United States Patent Application Publication US 2007/0067865 A1 - sequence listing, part 27

SEQ ID NO: 167992 - DNA, 379 bp, Arabidopsis thaliana nossen
atcaaagtctaatatcacaaagaaagagtttttttaactagcttagctcaaagtgtttgcttaagacaagaagaacatggcgtcttaccagaaccgtccaggaggtcaggccactgacgagtacggaaacccgatccagcagcagtatgacgagtacggaaatccgatgggaggaggaggatacggaactggtggtggtggaggagctacaggtggccaaggatacggaacaggtggccaagggtacggatcaggtggccaagggtacggaaccggtggccaaggatacggaaccgggaccgggactgaaggctttggaactggcggaggagctaggcaccacggccaagagcaactccacaaggaaagtggtggtggc

SEQ ID NO: 167993 - DNA, 362 bp, Arabidopsis thaliana nossen
cggacgcgtgggttggcctcacgctctgctgagtactacaagcaaggcgctcgttttgccaagtggaggacagtggtgagtgttccctgcggtccttcagcactggctgtgaaggaagctgcgtgggggctggctcgctatgcagccatctctcaggataatggtcttgtccccattgtggagccagagatccttctggacggggaccacccaatagagaggactctggaggtggcagagaaagtgtggtcagaggtgttcttctacttggcacagaacaacgtcatgtttgagggcattctgttgaagccgagcatggtcaccccaggcgctgagcacaagaacaaggcctctcccgagac

SEQ ID NO: 167994 - DNA, 369 bp, Arabidopsis thaliana nossen
caagctttggtagaagcaaaaacactcaaagttagaatctttacacaaccacagagctcaaaaatccccaaatcaagaagaagacaaaaatgagcagaattcaaatggaagatacagaaccaaaagagctctgaaggatttgttataccttatgatgaggcaagcaagtgatgtgatactcgtgcataacccaaggagttctaactccatgaggactcttaccttcatggtacacaagcgtcttcttaatccctatcacaacaccatttcctcttttatccctaattttccgatcaacaccagtaggtttccaaaacccagaacctgtcgtcctcttcattttcatctgattcgggttcgtgtactcaa

SEQ ID NO: 167995 - DNA, 405 bp, Arabidopsis thaliana nossen
ccgggtgcgtctccacgcgttcggaaagcaaaaatattatgacttgttttttatatccactctacgcggacccgggggttctattattaaagataatgcgaaaccacaaacccaacttggaagtctttcgttcatgacataaattgtggatcataatcgcgcatacgcatcatgaacgtaatgcgaatattctaatatacgcattagcgaggaacgtttccacataactcgttgcatatttcaatgcaacgccaagaaacatgttacttaagaatataacaagaggatgtatgagctatgtgagtaaaacttaacatttttgctatcttgggaaactttactaaccttatttaaatcaaaagagataaattatcgggttacatactaacatgagattgtatcatg

SEQ ID NO: 167996 - DNA, 373 bp, Arabidopsis thaliana nossen
ctcatcgtctcctttacttcattcgtcttcttcctctctttcccacaagctcccattgatatagagagagagatttaaggaaggaatcatggcagggggtggagctccagcacccaaagcagacgaaccacaaccacatcctcctaaagatcaacttcccaacatttcttattgcatcaccagtcctcctccttggcctgaagctattcttcttggattccaacattaccttgtgatgcttgggacaacggtgctcatacctactgctcttgttccccagatgggaggtggatatgaagagaaggcaaaggtgatccagactattctctttgttgctggcatcaacacattgctccaaacactgttcggtact

SEQ ID NO: 167997 - DNA, 371 bp, Arabidopsis thaliana nossen
gatagattttagtggattctaaagatattttaatgatttatatatggttttatttcataattcgactagttaatagagaaaataaaattacatgaatgatctttacatagagctgcagcgagatagtgatgcccgtgggatatgacaaacaagatacaatgttcccaacggcaccatttaacatgaccagttacattgatggatgtaagtcttatcatggtgtcactcctagaccacattggatcacaacttatttcggcattcaggtatatatgattaatcaaatatcgttcagaaacacttttaaattaaatcttcatagttccttgtatttactgtctctagttttaatcataactagattatatgac

SEQ ID NO: 167998 - DNA, 372 bp, Arabidopsis thaliana nossen
cacaaacacacacaaatctctgaagtaaaatgacgttcccttctctttctgtctcatttctcttctttgccttcatattcgttacgcatgcattcgacctcagcatcatccagatgcaacagggaacatgtccgtacacggtggttgtcatgacaagctgtctttctccggagtcgacaagagatcagatcagcattgtttttggcgatgccgacggtaacaaggtgtatgcaccgaaactagggggtttggtaagaggaccagggggtttggggaagtgttcaacgaacacattccaagtcagaggtcaatgtttgaatgaccctatctgctctctctatatcaaccggaatggacccgacggttgggtcc

SEQ ID NO: 167999 - DNA, 378 bp, Arabidopsis thaliana nossen
gtctgttattgttctagctggtgaaatgcttcacgttgcagaagcgtttcttgagaagaattaccatcccacagtcatatgccgagcttacatcaaggctctcgaagattctattgctgttcttgacaaaattgctatgtcaattgatatcaatgaccgttcacaagtgctagggttagtcaagagctgcatagggacaaagttcactagccaatttggagatcttattgcggatttggctattgatgccactactactgttggtgttgatcttggacaaggtttgagggaggtagacattaaaaagtacatcaaggttgagaaagttcctggtggtcagttcgaggactctgaggttcttaaaggagttatgtttaa

SEQ ID NO: 168000 - DNA, 339 bp, Arabidopsis thaliana nossen
ggacgatagcagacgagttgcagcggagttgtttccatcgcttagttcgcaacttaagaggaaaaaggatcatggtcgagctgaagcactgctcattgcggcgtatggtgaagcccttaaaacagagaaattgttgatccagccaaaggaattactctctcaagttaactacttagaaaaccagttagtggaggttaaatagtgttttagtttcttggctctcaactcattaatcaaacaattacaatttggagtctattcctaactctactaaatgtatttttgctaaaccagttggtaaatctttttttttaccagttagtaaatccttaatcaaaa

SEQ ID NO: 168001 - DNA, 377 bp, Arabidopsis thaliana nossen
aaacaacaagaaaaaatggcaataaccaacaaattaatcataacacttcttctgcttatctccatagctgtcgtccactgcttatccttccgtgtggagatcgacgagttcgagccaccacagcaaggagaacaagaaggtccccgtcgccgtcctggtggtggctctggcgagggatgggaggaagagtcgacgaatcatccataccacttcaggaagcggagtttcagtgattggttccagtcaaaggaaggttttgtgagagtgctgcctaagttcacaaaacatgcaccggctctcttccgaggaatcgagaactacagattctcgttggtggagatggagccaacaactttctttgtgcctcaccatttgga

SEQ ID NO: 168002 - DNA, 370 bp, Arabidopsis thaliana nossen
gaggagcaatggatcctgagccagggaggtgtaagagaactgacggcaagaaatggagatgttcaagggatgttgtagcgggccacaagtattgtgaccgccacattcaccgtggaagaaaccgttcaagaaagcctgtggaaaccgccacaaccaccatcacaacgacagccacaacaaccgcatcttcttttgtcttaggtgaggagcttggtcatggaccaaacaacaaccacttcttctcctctggttcatctcaacctctccaccttagtcatcaacaaagttgttcttcagagatgaaacaagaaagcaacaacaacaagaggccatatgaagctaacagtggattcagcaatggaagatcaga

SEQ ID NO: 168003 - DNA, 363 bp, Arabidopsis thaliana nossen
tataccccacaaactaaactttttaccattcacaaaaaaactagagggagggatctctgagagttgtggtgatgaaatgatcgcttcttctcctacaatctcagaaaccttcgatcacgggtttagatatctactacaacggatacaatggagagcacctattcttcctgtggtccaccaccgccacaacctaacctttctacaagcttccggtttaaccctacccaccaagagcttgtagttcactacctaaaacgcaaagcagcctctgctactttacctgtcaacataatctacgaattcgatctctataaatatgatccatgggaacttaccactaaagcatcgattggagaacaagaa

SEQ ID NO: 168004 - DNA, 374 bp, Arabidopsis thaliana nossen
gccaacaactttctttgtgcctcaccatttggatgccgatgctgtttttatagtcctacaaggtaaaggagtgatcgagtttgtgacggataaaacaaaagaatcgttccacataactaaaggtgatgtggtaagaatcccttctggtgtcaccaactttatcaccaacactaaccagacggttcctctccgcctcgcccagatcaccgtccctgtcaacaatcccggcaactacaaggattacttccctgctgcatcccaatttcagcaatcctacttcaatgggtttaccaaagaagtcctctctaccagtttcaacgtgccggaagaattgctagggagattggttacgagatcaaaagaaattggtcaag

SEQ ID NO: 168005 - DNA, 372 bp, Arabidopsis thaliana nossen
cacgaagagaaaagaagagaagaagaagaagaagaagcagcagaagaagagaagaagaatccaatcatggcggctgctgtatcatctgtttgggcaaagcctggtgcttgggctcttgaagccgaggaacacgaagctgagctcaaacaacaaccctctcccaccaaccagaaatcctctgccggagattcctccgatttcccatccttagccgctgcagcgaccaccaaaacgaagaagaagaagggccaaaccatctctcttgctgaattcgctacctacggtactgctaaggcaaagccggctccacagacggagcgtctcactcaggctgagctggtcgctcttccgaccggtccacgtgaacgctct

SEQ ID NO: 168006 - DNA, 373 bp, Arabidopsis thaliana nossen
gggattcagttcccggatgttgtccacgcgttgaaacctaacccgaaaacaaacatccaagagtactggaggattctggactacatgtcccacttgcctgagagtttgctcacatggtgctggatgtttgatgatgttggtattccacaagattacaggcacatggagggtttcggtgtccacacctacactcttattgccaaatctggaaaagttctctttgtgaagttccactggaaaccaacttgtgggatcaagaatctgactgatgaagaggccaaggttgttggaggagccaatcacagccacgccactaaggatctccacgatgccattgcatctggcaactaccccgagtggaaacttttcatcc

SEQ ID NO: 168007 - DNA, 320 bp, Arabidopsis thaliana nossen
  unsure (1)..(320): unsure at all n locations
cacacaaactatgtctcatcattattttttgaatgccgatgctaaaaatataggtctacaaagaaaatttgggatcgacaaanacacanataaaacaaaataatctttccacataactaaaggtgatttggtaagaatcccttctggtgtcaccaactttatcaccaacactaaccagacggttcctttccgcctcacccaaatcaccgttcctgtcaacaatcccggcaactacaaggattactttcctgcttcattccaatttcaacaatcctacttcaatgggtttaccaaaaaagtcctctataccattttcaaca

SEQ ID NO: 168008 - DNA, 373 bp, Arabidopsis thaliana nossen
ctactattaaaataaagacatgaatcatatatgagtatattttcttatcgcatttcagaaagtttttttgggtatgaacataaattttaagaaagattttcaaataaatttaaaattataaaaaaattctaattaaataaacgggatattaaatttttcatttcatactctcaaaaaccataaccgccaagagaaggcaaattgttggagggtgaaatttcagtttacctgaccagtaaatcaagtggtaaaacatgagtaagcaacattactttttgccctgatgcttaatttccaaaatccttggtaccttggtccatatagacctccctcatgcaatacttcttggagttctcgtcgatagctcaatata

SEQ ID NO: 168009 - DNA, 374 bp, Arabidopsis thaliana nossen
ctcgattgtgagatcaattattaatattcatctggagaattatcgtctcttttctccattgctatggctctctcaactactccttctcagatgtccgttgcacttccaactagaattgatgggtcgagccgatctatgattaaggttcaaagtataagcttcactgataagtcatggggtcctcctctgctgagactagattcgaaatctagaagcttaggtgtgaaaaaaaggtccacaatatgcatgtcacttcagcaagcaagcaaatccaaagtcttggttactcctctagaacttgaagatcccaaagagactcccttaaacttgtttaggcctaaggagccttatactgcaactattgtttcggttga

SEQ ID NO: 168010 - DNA, 154 bp, Arabidopsis thaliana nossen
gtggactgtatgttggtgtcgtaggcttatgaactggaggtggcttgataggtggactgtaagtgggtgtcggaggcttatgcactggaggttgcttgatacgtggactgtaagttggtgtccaagagctcatgcaatggtgaaggctcgatag

SEQ ID NO: 168011 - DNA, 379 bp, Arabidopsis thaliana nossen
ctcaatctttctctcctgcgttttaatttctctcggattgaaatcatccatggctgccaccgcaaccgagaagctccctcagctcaaatccgccgtcgatggacttactgagatgagcgagaatgagaagagtggattcatcaacctcgtttcacgttacctcagtggtgaagcccagcacattgaatggagcaagatccagacacctactgatgaaattgttgttccttatgataaaatggctaacgtctctgaagatgcttccgagaccaaatatctgttggacaagcttgttgtgctgaagcttaatggaggtttgggaaccacaatgggatgcactggtccaaaatcggttattgaagttcgtgatggtttgaca

SEQ ID NO: 168012 - DNA, 366 bp, Arabidopsis thaliana nossen
tatatcgttatgtttataatacccgcaaccccataaatatcatacccgcaaccctattttttatcatgcatagtttattaattttccgatcatctgagcatagatagtaatataaccctaaacaaaaagacttaaattacaattttatgagggattatttgatcaaggattaaaatcaatatctatgttttaagatttagaaactactttttttttctttctaaatttccatgtttaatttgtgtggatttcatatttttttactataattttttttgtttctttagtaatataatcaaatctgtttcaattcatttcattgtaaagaccaacattggattatgttcgaatttatattggcactaa

SEQ ID NO: 168013 - DNA, 367 bp, Arabidopsis thaliana nossen
ctcccggagatctctctttctcttcttctccatccttcttctctcggcgcgcgcttcatccccaccaccttcgaattcgtgccctttgagggaagctgctaggatgggtgtgaagcaggctctaaggagcattgatgcgtttccaagagcagaggatcatttgcttcagaagacacaatctggcgctgttgtatctattgttggacttcttataatggctactttgttcttacacgagctgagttattatcttaacacacttacagtgcaccagatgtcagtggacttaaagcgtggagaaactcttccaattcatgtaaatatgacgtttccatctttaccttgtgatgtactgagcgtagatgct

SEQ ID NO: 168014 - DNA, 383 bp, Arabidopsis thaliana nossen
attcgatcccccgattggatcgggggcaaacgcctacgaaaagatcgcttggatttagtaaaaagtcggttagatttattcataatttttatttttattccttatctctaaaatcctattttgatcggatcaaaataaaaacgatttctatttctatataggatagaatttctatatagaattaagaatatcggattagatttctttctattgatttatttgtttatatttatatatatgtaataatatattgatactagcattattcctgttcttaaaataaaagttgacatacaagcactcaatttgatctatttcttgatttccccgtgaattgtatgtttataacaatagggacagaattttctcaattccaatcgact

SEQ ID NO: 168015 - DNA, 378 bp, Arabidopsis thaliana nossen
cattaacatataagaaaaaataaaagaggggagaactcttggatactgatgcgggtaatactaaacaatcatattctacacacaagcaaaatccatcaacttgtaacatgaaatagtaataataaggaacctgtatctctgaaagtatgcaaccatgtatcgccatgacggtgaaagcacaatgccttactgcaccactaagtttgacatagtttttccagggatggttaaacgttctgtaaggtccatgtggaggctcccatatggcaaaatcgagctgcgaaaaaagaggaatttcttaaatctcaatgctattaacatgcaaattctttagttgtctcaacttcaaacatatgtaccagagattcttcctgattt

SEQ ID NO: 168016 - DNA, 381 bp, Arabidopsis thaliana nossen
catctaacgaagattacttccgaagatcagaaacaaacacaaactgtggatcgttgtttgttaattctgtttaaaatcgccagaagaaagagatctccgttttctacagaagaaaagcaagagagtaagaatgggatcggaacaaaacgatagcacaagcttcacgcaatcgcaagcttcagagccaaagctatgtgttaaaggatgtggtttctttggatcaccatcaaacatggatctctgttctaaatgttacagaggcatttgtgctgaggaagctcaaacagcagttgctaaagctgctgttgaaaaatctttcaagccttctcctcctcgtagtctcttcatagcagaacctcctgctgttgttgtggaacccaa

SEQ ID NO: 168017 - DNA, 377 bp, Arabidopsis thaliana nossen
attattttcactgagcgcataacatttttgagacaagagactctctctgtctctcttctctctttctctccccctctctccggcgatggttgttgctatggaccaacgcaccaatgtgaacggagatcccggcgccggagaccggaagaaagaagaaaggtttgatccgagtgcacaaccaccgttcaagatcggagatataagggcggcgattcctaagcactgttgggttaagagtcctttgagatcaatgagttacgtcgtcagagacattatcgccgtcgcggctttggccatcgctgccgtgtatgttgatagctggttcctttggcctctttattgggccgcccaaggaacacttttctgggccatctttg

SEQ ID NO: 168018 - DNA, 385 bp, Arabidopsis thaliana nossen
cggacgcgtgggcggacgcgtgggtttaaatgatatcataaatattcttataacatcataacttaaggtgaacgagccaataaaatgaaaacaaaaccaaacatcgcactccaaataacaaaataaacatacataattatttctcgtcatggctaacctcagcctcaccagagagttcttcaagggacttgcctttgggctctgggacaaggaaggtgaagagcataccgataaagttaagaacaccaagcatgatcaatgagttcttaactccgatgcctggtgggtatcctgcgtctaccttggccttgtcttgtgattgagccgcatataggaacccaaaggctccaacaatggctccagccttaccagccgcggctgatat

SEQ ID NO: 168019 - DNA, 387 bp, Arabidopsis thaliana nossen
gtaaaaccctaaaatctcaacgaaagggacgaccaattgttcgacgattggtcatggggaaaaccgggatccaattgttcgacgattcgaggaatgggtttttctccgtttccgatttaggattcgattcgagcctaaacagctctaattaccacccaattggtgggttattcgccagcgttaatcagactaatccattcgcatccctctcgtcctcggatctttccaacagaggcaacaacagcttctctacccagctcaatgatctctacaccaagtatatgccgggaaaagaggaggaggaagaagtagttaatggcgagaagaggaagaggaagaagaaaggtgggctcacactgaagattaagatcgctaatccttcgttgc

SEQ ID NO: 168020 - DNA, 380 bp, Arabidopsis thaliana nossen
aagcttcttcttcctttagtaaattcaagtgtgaggtgtgtttattgataaagtgctcattttctcggatctcagatcttagatccaaaccctcattatttcattgatccgagatctaatagcttgagcttgctgggattttagttatggcgagacggcaagtaggttcaacaagacgtgttggcgatggtggaagcttcccttttgcaggagctttacactcaaagtctcgatcttctccactactatctatttgccttgttcttgtgggggcttgtcttctcattggttatgcttacagtggtccaggtatatttaaaagtatcaaagaagttagcaaagttacaggtgactattcttgcacagcagaagtccaaaga

SEQ ID NO: 168021 - DNA, 354 bp, Arabidopsis thaliana nossen
attccattacaaataaacaattttcatatatatctataacaaaaaaaaacaatggctacctcaagcatgaagagcattccaatggcgatcccaagtttctccatgtgtcacaagctcgagctccttaaagaaggcaaaactcgcgacgtcccgaaagccgaagaagatgaagggctaagctgcgagttccaagagatgttggattctcttcctaaggagagaggatggagaactcgttacctttacctattccaagggttttggtgccaagccaaagagattcaagccatcatgtctttccaaaaacatttccaatccctcgaaaacgacgtcgttctcgccaccatacctaaa

SEQ ID NO: 168022 - DNA, 382 bp, Arabidopsis thaliana nossen
ctagattcagtttttttcatcaaagaagagcgtcttcataaacgccctgcgtcttcttccctggaaatctagtttctttcttccacgaaaatgagagagtgcatttcgatccacattggtcaggctggtatccaggtcggaaatgcttgctgggagctgtactgtcttgaacatggcattcagcctgatggccagatgccgagtgacaagactgttggtggaggtgacgatgctttcaacaccttcttcagtgaaaccggtgcaggtaagcacgtcccacgtgctgtctttgttgatcttgagccaactgtgatcgacgaggtcaggactggtacttaccgtcagcttttccaccctgaacaactcatcagcggtaaagaag

SEQ ID NO: 168023 - DNA, 383 bp, Arabidopsis thaliana nossen
ctctctttggttttctcggaaaaatgtctgcgatactccaaggagctggagctgcaacggctctctcgccgtttaattctatcgattccaacaaactcgttgctccttctcgctcttctctttcagtgaggagcaagagatacattgttgccggatctgatagtaaaagctttggttctagcctcgtagctcgtcgctctgagccgttgataccaaatgctgttacgacgaaggcggacactgctgcgagctctacttcatcaaagcctggacatgagctattacttttcgaggctcttcaagaaggtctagaagaagagatggacagagatccacatgtatgtgtcatgggtgaagatgtaagccattacggaggctcatac

SEQ ID NO: 168024 - DNA, 382 bp, Arabidopsis thaliana nossen
ggcttcgcacctgagatcttggctcaagccttcaagatcaatgtcgagacggctcagcagctccagaaccagcaagataaccgtggcaacatcgtcaaggtcaacggacctttcggcgtcattaggccacccttgagacgcggcgaaggcggccaacaaccacatgaaatagctaatggtttagaggagactttgtgcaccatgcgatgcactgaaaacctcgatgacccgtcggatgctgacgtgtacaagccatcactcggatacattagcacacttaacagctacaatcttcctatcctcagacttctccgccttagcgctcttcgtggctccatccgtaaaaacgccttggtgctaccgcaatggaacgtaaacgcaa

SEQ ID NO: 168025 - DNA, 379 bp, Arabidopsis thaliana nossen
aagaaagaagaagagacgagtttgatatctaaaggaatcatttttgacgggtttaggatctaagtaaaccctagattgaccgaatatgagtactcaagcgacgggtccttcttcaacatcagggaggagaagcaattctactgtacgccgaggaccaccaccttctaagaaaccagtacaatcagagaatggaagtgttaatgggaacacctcaaaacccaattcacctcctcctcaacctcaatctcaagctccttctaatggagagagaacagtgaagaagcttaagttatcgaaagctcttactattcctgaaggaactactgttttcgatgcttgtcgaagaatggctgctaggcgtgttgatgcttgtttgttg

SEQ ID NO: 168026 - DNA, 369 bp, Arabidopsis thaliana nossen
ttgggattagggttcttcgagtggcagattatcttatggttatcgattgggttggcgatttcgcaacaagcgctgggattgagacctattagggagaaacctcgatcatggagtgacgagtggctctttggtaggaaacaagaagctgaagttggacccttttctgcttggaatataacaggaacttatagaggaacttggaagtttctgaattccttaaatagctcttcgaagtttcaagactttcaaaaagaaaatggtaattctgtggttgagttagtagcagttccaacgaagataactggtgtgcattatgttcagggtgtagttgttttccatgacgtatttgacaatgaacaaaatgtgggt

SEQ ID NO: 168027 - DNA, 388 bp, Arabidopsis thaliana nossen
gaagcttgtccttcatagaaaggggttttgagtacctttctgttttcttctcgtctgggaaaaggtacattgcgacattcaatagagttgggcttctgccagacacatcatttagaatgtggcatgtaggaagcagttcgaccttgagtaacgcaggcattgcctttgaacgtctgagggccttcctcctgatattggatgccggtttagaccaaaactcgcagtcaaactcaggcggcgaggcagaatccataatgcgtccgctggttcagtagttaaaaggaaaatttcatcatataacttgtgaaggtcaaaagatcaaaggaatcaaaaaaggagaaaagtgcaatattggcatcagtgaatcttattatggtcatgctctcga

SEQ ID NO: 168028 - DNA, 380 bp, Arabidopsis thaliana nossen
gttttacgataaaacatggacttccaataattgagtaatcaaattcataaaacaaaatatagaacaattgttcatttaaaaacatttagagtaaattttcttaagatacctatttgaagtgtaagagtttttttatataagaattgaagattgtcatccaaactcatggatcatatgtcattgacgattttagtttttgcatctacggatttttttttcaactttattgttgataaaaccttatattttttggagtatctgacaaaaaaaaatattgagtgatttggatatcttatccatcaaaagaaaataagttagaaacgttggttttgaaaactaaaattttgtgaaaaaaacaaaaatttgttttaagactattt

SEQ ID NO: 168029 - DNA, 219 bp, Arabidopsis thaliana nossen
aaaaaagcgcgttggtgacaaaaaaaaacgtagttatacactcgaatcagcaagggaaacaaacatgtatggatcgcatggaaacttgtgggtccctctttcttttaaaaaatctcgtattaattaaataaatggaaaaaaaaacatgatgggagtttgtttaggcaggggagattcttcttcattctcatcattatttctctattaatttcaccccaa

SEQ ID NO: 168030 - DNA, 375 bp, Arabidopsis thaliana nossen
gtcttgtctagctacttttgctctcgcagtgttagtaacacaaggaagcatttttagtttgtgtttggcctcctctgcttctacaaactctgttcctaattggtttcatcattggccgccgtttaaatggggaccaaaatttccatattctccacctaaaccgccgccaatcgagaaatatcctccaccggtgcagtatccaccaccgatcaagaagtatccaccgccaccatacgagcatccaccggtgaagtatccaccaccgatcaagacttaccctcatccgccggtgaagtatcctccaccagaacagtatccaccgccgattaagaagtatcctccaccagaacagtatccaccgccgattaagaagta

SEQ ID NO: 168031 - DNA, 379 bp, Arabidopsis thaliana nossen
tccaccaacggcagaaatcgatttggcttaaatctccccctcctttcgatctctctgatcgccgccgggaacattcaatttcccgggagttcaacaaaaaaaaaactctccgtttttatttttccccctttttcaccggtggaagtttccggagatggtgtcacccgaaaacgctaattggatttgtgacttgatcgatgctgattacggaagtttcacaatccaaggtcctggtttctcttggcctgttcagcaacctattggtgtttcttctaactccagtgctggagttgatggctcggctggaaactcggaagctagcaaagaacctggatccaaaaagagggggagatgtgaatcatcctctgccactagctcg

SEQ ID NO: 168032 - DNA, 353 bp, Arabidopsis thaliana nossen
gactttggttggggtcgtcctatctttatgggacctggtggaattccatacgagggtttgtcttttgtgctaccaagtcctactaatgatggcagcttatccgttgccattgccctccaatctgaacacatgaaactgtttgagaagtttttgtttgagatatgagagcgttaagccctcgtttttccctcagtaaatttgggcaaatttgcttcttgtcatcatcctgtgttttagagggtacaacaaatcataaggtgtgcttatggtctgtaactttggactatgtcgtataggaacttttgctttatgttaatacagatgataagtgttgttctataacacatgccgtg

SEQ ID NO: 168033 - DNA, 380 bp, Arabidopsis thaliana nossen
ctactctcaagtgatcaaattaactccgtcgcaggtgatgaggagatacagtccgccttattacagtcctccgaggagaggatacggtggtcgaggtagaagtcctcctcctcctcctcctcgacgtggatatggtggtggtggtggtggacgtagaggatctagccatggaagtctcttggttcgtaacattcctcttgattgcagaccagaagagcttcgtgagccctttgagaggtttggacctgtgagagatgtctatatccccagagactattactcagggcaaccgcaggggtttgcgttcgtggagtttgttgatgcatatgatgctggggaggctcacagaagcatgaacaggagaagctttgctggaagag

SEQ ID NO: 168034 - DNA, 372 bp, Arabidopsis thaliana nossen
aatcactcaaccattaaaccccattttgatctctagttttttaaaagcaggagattttccttttcccagaaaagaaatttcccaaatcaaagtttcgagctttcacttctcgacttgcaaattctcgtcctttttactgaattcgatctgggtttctgtttttgattagtaaaataacaaaaaaaaaaaaaaaaggatttatcagaaatggctgcgagcgatgaagttaatcttattgagagcagaacagtggttcctctcaatacatgggttttaatatccaacttcaaagtagcctacaatatccttcgtcgccctgatggaacctttaaccgacacttagctgagtatctagaccgtaaagtcactgca

SEQ ID NO: 168035 - DNA, 378 bp, Arabidopsis thaliana nossen
gcattttcttatctaatatatctccattaattataattacttaaaaaatgagaaattttaggacattattaatatatacttgattaaaaaataaaatattgtagttaattaaacatttaaaatatttaacagaataaacgtttagaatatttataatatgtaaaatctataaaatttatataattgtttgaaaaaaacttttaaattcatttgaattatattttttttaataaaagtattatttaaacaaaaaacaaaaaaatagtttttaatttcaccgaacgggattagatggtaggacgggtttataatatttataatatatgaacttttatacaatttaataaccatttgaactaaaaacaattaaattgattt

SEQ ID NO: 168036 - DNA, 298 bp, Arabidopsis thaliana nossen
  unsure (1)..(298): unsure at all n locations
gtccaatgggagcaagaatttttaggagcatttggaacatttcgaatgtgagcggtagagccgttttgaagtaatgtacgatcaataatgtattaatcaatattcgattgattgatctgaggttattgataaaaaagatttgtctaagacacttcgtttctttttgcctaagatactatataatctttttgaccaagctactacatttattggccaagtaacttctctatttgactaactcacttactttattctatgtgagtntcgagaatatccctattcataggtctgagatcca

SEQ ID NO: 168037 - DNA, 387 bp, Arabidopsis thaliana nossen
attcatcacctctctctctctatgtctctatatttggattctttataacatgtgagatcgatctatttttgagcagagacagagagaagactagaagaagcaaagaatatttcaagaatgatgaagatgaatacaggaacatcgccgtcggtcatcggcggcgggactagtggtaatgagtgggagtctcgacctggaggaatggttgttcaacgtcggacagatcagaactccgatgtgccacgtgtcattcgtgttcgggttaaatacgggtcggtttatcacgagatcaacatcaattcccaatcttccttcggagagttgaagaagatgttgtctgatcaagtgggacttcaccatgaagacatgaaggttttgtacaaagac

SEQ ID NO: 168038 - DNA, 380 bp, Arabidopsis thaliana nossen
tcctccatttctctatctttctctctcgctgcttctcgaatcttctgtagcatcttcttcttcttcaagtgaaaaatggccgatggtgaggatattcagccacttgtctgtgacaatggaactggaatggtgaaggctggttttgctggtgatgatgccccgagagcagtgttcccaagtattgttggtcgtcctaggcacactggtgtcatggttggtatgggtcagaaagatgcttacgttggtgatgaagctcagtccaagagaggtatcctcactctgaagtatccaatcgaacatggtattgtaagtaactgggatgacatggaaaagatctggcatcacactttctacaatgagcttcgtgttgcccctgagga

SEQ ID NO: 168039 - DNA, 381 bp, Arabidopsis thaliana nossen
atgagagcttcaataacattacaccttgggacagtcctcttctccaggttgtgtccaagtaccgtaggatttgaaaccacatccttcagtggccaattcatcttcttcaccacaaactcaatcttcttcttcaccgtctctgcagataaaataagacactgaggaaagcgcttaaccattgttatgaactcatctctgctgaagcctaggcctagaaatatttcaatggagttcaatatcttctgctctgaagtaccaatgcactgcggatactttttcaacactgagatgacctcgtcttcgagtagtccacacttcttcagggtttcaattgtctgacctatcttcttctccgaactattcaaaaagtaaggacacttt

SEQ ID NO: 168040 - DNA, 387 bp, Arabidopsis thaliana nossen
ccgaaccctctgattctcgtatagacacacacatacctatacatacacgctttaacacttatatctgtagagtatagccatgggagaaggagaagcaaaagcagagcacgcagccaaagcagatcacaagaacgctccctccgcttcttcaacgccagaatcttactctaaagaaggcggaggaggcggtggagatgctcgccgcgcaatctgcggcgcgatcttcaccatccttgtcatactaggtatcatagccttaatcctttggctcgtctaccgtccacataaaccacgtctcaccgtcgtcggagccgccatctacgacctgaatttcacagcgccgccgttaatctcaacctccgttcagttcagcgttttagcaagaaa

SEQ ID NO: 168041 - DNA, 376 bp, Arabidopsis thaliana nossen
gtttcattgaaaatttcaagatccctagttaataacgataatgggttcgggagttttggctttcttctgtgttttcttaatcttcacggtcatcacattgcctcccacgatccaagcttgcactccttgtactcgtcctcatcctccggttccgaaacctccacaacacggcggtggtggaggtggtggtagcaagccgcctccacatcacggtggaaaaggtggtggtaaacccccaccccacggtggaaaaggtggaggaccgccgcatcatggtggaggaggaggaggaggagggaaatcaccgccggttgttagacctcctcccgtagtggtgaggccaccgccaatcataagacctcctccggtcgtctat

SEQ ID NO: 168042 - DNA, 376 bp, Arabidopsis thaliana nossen
gtttgaattcatttcaacatatctttgttttttcgttaaagctagctcagactgcggtgaaagacaaagaagatcataaggataaagtggttgcgacgaaatgaaagaaggatgtgataacatggcaagcctttagcttaggcagtcccatgtcaaagaaggtagatgagaaacataccttgggttcctcttcttttccttattgacatgagattgccaagctataaggcttgtgttaatactttttcatattctcttgtgcaatctgaaagttttatcttcatccatatcatcatctttgtctttcaccaccacagggcaggctgagtttgtgataaccaagacaaagttccaaaagagtgactgagagcttaca

SEQ ID NO: 168043 - DNA, 141 bp, Arabidopsis thaliana nossen
ctcaaaggcaaatgcaatcaaatcacctgcaatcaaatctcacagatcaaaaatcgaaattttcccaaaaaagaaacattaccatttctagtgaatctatacattaagcgaattttgcttttttgtcggcgaaaattcaag

SEQ ID NO: 168044 - DNA, 383 bp, Arabidopsis thaliana nossen
aaaaaatagtgaagacgacgaacctttgaggacactcttcggtttctccaatcgttcatatgatgtcggacggaggagcaccgtcgagatacgtgaagttgacgaaggaacaagctccggtcgatgagattcatcccggtgaactcaatcagcccattgaagtttctcatctagctgttcacaaatgcaatgagtgtggccaacctttgcctgagaattttgaagctcctgctgatgagccctggactaccggaatattcggctgcactgaggacatgaatagtttttggctgggacttttctgcccaagtgttctatttggacgtgtctatgaaactctgagtgatgaggaaacctcgtggaagaaagcatgtatttgccat

SEQ ID NO: 168045 - DNA, 386 bp, Arabidopsis thaliana nossen
  unsure (1)..(386): unsure at all n locations
gtcactcaggatcagatcttagctaaattgagacaagctcaaaatgagtaagcttcanagtgaggccgttcgtgaagccatcactactatcacagggaaatccgaggcaaagaaacgtaactttgtcgagactattgagctccagatcggtctgaagaactatgaccctcaaaaggacaagcgtttcagtggatctgtcaagttaccacatatcccccgtcctaaaatgaagatctgcatgctcggagatgcccagcatgttgaagaggctgagaagatggggttggaaaacatggatgttgagtctctaaaaaagcttaacaagaacaagaaactcgtcaagaagcttgcaaagaaataccatgctttcttggcctctgagtctg

SEQ ID NO: 168046 - DNA, 380 bp, Arabidopsis thaliana nossen
cggacgcgtgggtggaatcggaggagaaagacaaatacttcgcaactccttatgcccgagtcatggcgagaagatgcttctttttcgagaaaacgttgcgcaacggttcaaacctactactacttggaccccgtcgagaacaattcaactggaaacatcagtttctccgttggtcagaacaagaagacgaggagagaccagtttcttcggtttgattatcctcagcttgtcttttacatcagcaaggaagcgtgatcatctcaggtcaaaggtgagctactttataacggaagaagaatcgtcattaacctggagatattccgaaaatggacttagcgtctaagaagaacacagctaatgtcggctccaaggagatagac

SEQ ID NO: 168047 - DNA, 381 bp, Arabidopsis thaliana nossen
ggggttgttggtgcattgtgtttggttgggcttggtgtgtgtctttatgcgaagaaaaggaagcgacctgctagagttcaaagtccaagcagcaacatggttattcatccgcatcattcgggtgacaacgatgacattaaactcactgttgcagcttctagtcttaacagtggtggaggaagtgatagctacagtcacagcggaagtgcagcgagtgatattcacgttgttgaagctgggaacttggttatatcgatacaggtcttgaggaatgtgacgaataacttcagcgaagagaatattctcgggagaggtggtttcgggacagtttacaaaggcgaactccacgatggaacaaaaatagctgtgaagagaatggag

SEQ ID NO: 168048 - DNA, 381 bp, Arabidopsis thaliana nossen
cccaaatatgcataagcttttgttttctcttctctccgtcgtctgactgtcatttctccgttgggcgcgtggcgccgaggcacgccagcgagaggcgccgtttccaaacgcctgccatttcagccaaatcaacagcctcgcgcccgctcaggcgacgaagttcgaagccggtcagatggaagtatgggaccacatgagccctgagctccgatgcgccggtgtaacggtggctcgcatcacccttcagcccaattccattttcttgcccgctttctttagcccacctgcccttgcttacgttgtccaaggagaaggagttatggggacgattgcttctggttgtcctgagacttttgcagaagttgaaggatcatcaggaag

SEQ ID NO: 168049 - DNA, 377 bp, Arabidopsis thaliana nossen
gttgatcgtttttgtgtgttgtaaatcaaaatggcgtcgagcgatgagcgtccaggagcgtattcggcacgtgacggatcagagaacttacctccgggagatccaaagacgatgaagacggtggtgatggataaaggagcggcgatgatgcaatcgttgaaaccgatcaaacagatgagtctccatttgtgttctttcgcttgttatggtcacgatcctagccgtcagattgaagtcaacttctatgttcatcgactcaaccaagactttcttcaatgtgctgtttacgattgcgactcctctaaaccccatctcatcgggatcgagtatattgtgtcggagaggttatttgagagtcttgatccggaggagcaaaa

SEQ ID NO: 168050 - DNA, 378 bp, Arabidopsis thaliana nossen
cgtctttccgtcgtccactgtctctctctctctctcgcgacgcagatggggattcgtcgaatattttagctaatcctctctcttaatctctttgaacatttttccccaaattcgccgcagtgaatactttctcttcccgtaaatctccaaaaatcgagttttttttattacttctcaattgaatttgcttcttccgattgatctcttaattgattcgcttgtgggttggatttgaatcctctcttactttccaaaggtcataccttttcacagatctatctttgaaattgtgaagaagaagaagaagaagacgatgattcgactaagaacatacgcaggccttagttttatggcaactttggctgtaatttatcatgc

SEQ ID NO: 168051 - DNA, 381 bp, Arabidopsis thaliana nossen
cggacgcgtgggtgccattccttgcaagaagtggatctctctgattgtgaatgattgtctaacagtgtttgcaaaatatttagtgatgatggtggatgcccaatgctgaagtcattgattcttgacaactgtgagagtttaacagcagtgcggttctgcaattcatcgctagcaagtctttcccttgttggctgtcgtgctgttacttctcttgagttgaagtgccctcgcatagagcagatctgtttggatggatgtgatcatcttgaaactgcattcttccaacctgtcgctctgcggtctctaaatttaggaatatgcccaaaattgagtgtgctcaatatcgaagcaccttatatggtgtcccttgaattgaaaggt

SEQ ID NO: 168052 - DNA, 365 bp, Arabidopsis thaliana nossen
cagcagtatcatgtcaagtcttattccactggttgttgttatggatatgttttgtgcaaccaatttgtcttgcactttaccttggaaacgctcttatacggattggaccaaaactactatacatcaactacgaagaaattaatttttgaaatctctgaattaggtactttcaatgagaatattatcttaccaacatattactgccacataatgtgcacacatataaagatgttattcatagatatgttcttacttcttacacacaataaggaacaaaaacgagggggcttttgcgaaaatggacatattttggcccataaactaggaaaaagacatttttgagttaagcttatgaaaataagcac

SEQ ID NO: 168053 - DNA, 381 bp, Arabidopsis thaliana nossen
gtctgaagagagagtaagaaatctgatggggaagagaaaagagcgtcggtacgccgccatgaatagcaccggccgtcgtgtcaagcttgatctctttgcggaaccctctggagatttgggtggctcagatgtgcgtgatggagttgagcgggaacaaacagagcttaatgagctacccaattcaccttcttcttcaggtcagaaaacagaaaatcctttgcttttacttgggcagtatagtgatgatgaggtggaagaagattcggataagaaggcagatgatacctctgcagatagttccttagccaataaaaatgagcaggttaatggattaattcaaggaggacacaaagatacgaatatcaaatcaggtgcagtcac

SEQ ID NO: 168054 - DNA, 382 bp, Arabidopsis thaliana nossen
cggacgcgtgggcttttcatttcatttggatagtcaccgaatataaaagaagtgttggatcaagactgtcagttttctcaaaggaagaatcagaacaagttaaaggctcatctgatttcataggaatcattcactatcttgcagcttcggtcacaagcatcaagatcaaaccttctatttcaggaaacccggatttttattcagacatgggtgtatctatgacattccttgggaatttttcagctttcgagtatgctgttgctccatgggctatggaaagtgtccttgagtatataaagcaaagctatggcaatcctcctatctacattcttgaaaatggtacaccgatgaagcaagatttgcagctgcaacaaaaggacac

SEQ ID NO: 168055 - DNA, 382 bp, Arabidopsis thaliana nossen
ctcgccaaaaaccttgaaacctttaaaaaatcgaaactatggctaagctcattctcgttttcgcagctcttgccctcttcatcctcctagccaacgcatccatctaccgcacagtggtggagttcgaggaagatgatgacgtgagcaacccacaacaaggtaagtgccagagggagtttatgaagcatcagcaactaagaggttgcaagcaatggatccgcaagagagctcaacaaggaagaatcggatacgaagctgatgactttgagctcactcttgatgtcgatcttgaggacgatgagaacccaatggggcctcaacaacagtcatctcttaaaatgtgttgtaatgaattaaggcaagtggacaagatgtgtgtgtg

SEQ ID NO: 168056 - DNA, 344 bp, Arabidopsis thaliana nossen
catttcccatatggcttctccacagtcactaggttacccaactatctcccctttcaacacgaggtacatgtcaccgtatagacctagcccgagcaatgcatcacctgcaatggctggatcatcgaattatccgttgaatccactgcgttacagtgaatcagctggaactttctttccatacgcctttgcaaactcgcttccagactgttagaaagtctacagaaccaaccactcttggttcaggtcatataagataatttcttttgcatttgagttttactacaaaacgtacttctggcgtttgtgtgtggtgtgtgtgtgtgtaacgatgcttttatagtctt

SEQ ID NO: 168057 - DNA, 379 bp, Arabidopsis thaliana nossen
gcttgaacttggaggatcaatggccgacgttcgcacacactcgcaccagcttcaagtgcaccctcaacgccagcatgaaggaggcatcaaagtcctttatcctcagagtggcccttcttccactcaggtgctagccgtgtttgtcggtgtaccgataggaggaacgctgctgactatagccggtttgacattagccggttcggttataggactaatgctagcattcccgttgtttctcatctttagtccggttattgtaccagcagcctttgtcatcggtctagctatgactggattcctggcttcaggggccataggtctcaccggactatcatccatgtcgtgggtactcaactacatccgccgggccgggcagcat

SEQ ID NO: 168058 - DNA, 407 bp, Arabidopsis thaliana nossen
  unsure (1)..(407): unsure at all n locations
gaatnccgggggggggcgaaacctacggtcacaccaccactcaaggttttgtttttcacgttgacacacactcccggcaggttaaagcgcactgcttggggccagcatgaagcaggcatcaaattccttcatcctcagagtggcccttcttccactcaagtgctagccgtgtttgtcggtgtaccgattacgctcgacactgctgactataaccggtttgacataatcgcagaccctgatatgactaatgctagcattcaccgcgtttataatctttagtccggttattggaccaacatcctatgtcatcggtctagctataactggattcctggcttcaagggccataagtcttaccagactatcatccatgtcgtgggtactcaactacatccgccgggccgggc

SEQ ID NO: 168059 - DNA, 379 bp, Arabidopsis thaliana nossen
attattttcactgagcgcataacatttttgagacaagagactctgtctgtctctcttctctctttctctccccctctctccggcgatggttgttgctatggaccaacgcaccaatgtgaacggagatcccggcgccggagaccggaagaaagaagaaaggtttgatccgagtgcacaaccaccgttcaagatcggagatataagggcggcgattcctaagcactgttgggttaagagtcctttgagatcaatgagttacgtcgtcagagacattatcgccgtcgcggctttggccatcgctgccgtgtatgttgatagctggttcctttggcctctttattgggccgcccaaggaacacttttctgggccatctttgtt

SEQ ID NO: 168060 - DNA, 376 bp, Arabidopsis thaliana nossen
  unsure (1)..(376): unsure at all n locations
ggtctatccaacgtataaaccaaatataaacacacaaatttattgggagtgtcatagtttaatgtaagagtgcgaagagatgcanattgagatggaagagaagtttgaagattggagaggcaaagaggcaatttctggcaaacatggtgggattaaagctgctttcattgcttgtgttgtagagacgatggagaatatggtgttcttagcatgttcaaccaacttcatgatgtactttacgaaatcaatgaattactcaacacccaaagcagcaaccatggtgactaatttcgtagggacatcgtttttgctcactattttcggtggttttgtcgcggactcttttctcactcgcttcgctgctttcgtcctcttt

SEQ ID NO: 168061 - DNA, 379 bp, Arabidopsis thaliana nossen
cttgatctatccacttactttacaaagaagaaaactctatgggaacaggtgttgaatactaaaactcggagtgtgaagaagtgtgactgtgatcaagtgaaggagctgcttgaagatgctgaaacaagtagagtcattcagtttttgatgggtttaaatgatgactttaatactatcaggagtcagattcttaacatgaagcctagacctggactgaatgaaatttacaacatgcttgatcaagatgagagtcagcgattggttggacatgcttcgaaacctactccctctccggctgcttttcagactcaaggtttgcttactgaacagaatccaatattgatggctcagggaaacttcaagaaacccaaatgtactc

SEQ ID NO: 168062 - DNA, 382 bp, Arabidopsis thaliana nossen
ctcttcttctctgctcttctctctctgtagacactagaagaagaacaaaaatgctcaaacagtttcttgttctgcaatccttctccttcttcctcttcaatgtagttatcgtcggaggaagaacattcggcggcggtttctcagcggaggagaatccatttactccaaaagcatctctagttcgttactggaacaaagagattcgtggccaatctcccagatcggagtttttaatctcaaaagcttcaccactcaacgccgtagactcagcaactttctcaaaactcgccgccgcgaactcgctgccgactcgttttcccgatttctgctccgccgcgaatctcttctgttttcctgatttaggagcgagtctcgagaaaca

SEQ ID NO: 168063 - DNA, 379 bp, Arabidopsis thaliana nossen
caacttctggtctctactatgattgttctgcacacatggtctggtgcggagagcgtaccagacaattggatggcgctcatgtcgagtttctcagggggattgctaatcctctgggcattaaggtgagcaacaaaatggatcccaatgagctggttaagctagtagaaatcctgaatcctaataacaagcctggaagaatcactgtaattgtgagaatgggtgctgagaacatgagagttaagcttccccacctgatcagagcagtccgcagatcaggccagattgtgacatgggtctgcgatccaatgcatggaaacaccatcaaagcaccttgcggtcttaaaacacgtgcctttgactcaatactggctgaagtccg

SEQ ID NO: 168064 - DNA, 382 bp, Arabidopsis thaliana nossen
ggaaccttatcctccttaaaagtcatttcatcctccagaactcgcttcaagcgagaagcacgtggacgcatgcctggtgtttctggaccaggaacatcgccatctactcctatatcttctactgatctaagttcagctctcccactgaaactaaaagcatggtttctttcttgagttttaccattattggaacgaaattgaggaataacatcattagccttcatacatagagatgaatcattcagcggaacaacatcttctcggctcctgaaaatttgtaaacaacgatccaatgcagtaatcagaatctctccaacgaatacaacaaattacacgaatcttcttcttccagctaaagataacaaaattaagagaatcgaag

SEQ ID NO: 168065 - DNA, 382 bp, Arabidopsis thaliana nossen
cggctctgtgatcggaaccgccgtatacatcaattcaactacgtatgtgccttcgtcccttagcttagccagattcatcactggggatttcatcagcagccgtacaattatgccctctggttgcagtatcagagctctctggatcatcaacaatcaagacactgttgttttctccaggaggtttccggtcgtcgagaagcaatggtgctccgcttacaagacggagaacgaaaacactggattagatcttcctagacttcccactgatcaacaaatctccgattcttttactcgaagaaagagacgggaaggctctactcgtggatatggtatacgtgttgctcaatccaccaaaggatcggattcttgggttgatgatccc

SEQ ID NO: 168066 - DNA, 383 bp, Arabidopsis thaliana nossen
cccacgcgtccggtttccagttattactcaactctctgttgagaagtgggtggagttaacacccagtgaaggtagtcaaacagatacgaaacccataagcctgcgagtcgctgtctcgtttactccaccagtacgcagtccatcagtcttacacatggttcaatcaagaccatcgtgcaaaggctcttgcttctttccaatcattggaaagtcccgtcttgctaaaagttcaacacacattgttgatgaaacccaaacagaggtgatcacacttcaaattaggaactccgctgatggaggaacacttaaagatgatcagagacaagttatgggtgtgacagactctggtgaaactcgcgtgcttgcggtttatactggtagtt

SEQ ID NO: 168067 - DNA, 378 bp, Arabidopsis thaliana nossen
gctagttgaaaatgttaatgtggatgaatgtttctctgctgcctctgtgtctggtgctgtcgctgtagatcaacctgtcccatccaacgagtttgactctggccagcaatctgagccattaaacatcaaccaatctgatattccttcggggagtggtgaccctgagaaatcctctttgaggtctcctcaagaatcacaaagtagacagatacgtagctgcacaaaggtgcacatgcaaggcagtgcagtaggcagagctattgatttgacaaggtcagagtgttatgaagatctgttcaagaagctggaagagatgtttgatatcaagggtgaactcttagaatctaccaaaaaatggcaagtcgtttacaccgatga

SEQ ID NO: 168068 - DNA, 368 bp, Arabidopsis thaliana nossen
gttcaattccacatctaaatcttcctctctgttttcttcttgtgaacgagtttttaatcggtaattttgattgggatcattggaatttatagagcagaacaatagaagaatagttcttgcgttgcagagtggtttgaagagtgaggtgacatgggcattgaacacacttacgttgctttccttcaaggaaaaagaagatattcgaagagatgtcatgcctcttgctaagatagctggcttgcttgatgcccttctcttaattgtgagtttatttaattgtttaggtgttgggattgtgttttcctctctgttctttgaaccaacatgatgctaaaactttggcagatagatgattggcgtgacatagc

SEQ ID NO: 168069 - DNA, 378 bp, Arabidopsis thaliana nossen
aattagtaaagagataagagtgttttgaatcttgaatatcaaattattattaacaagaaactgacaaaaagatgagacagtgttcattgagaagatctctgttgttttatctttttttttacatttcttggaaattggcaaaaccagtgtgatgaaactgtgaaatcttatctcgaacccaatcattgttctatgtttttctttaatctctaaaagtgaaaaagtgaatgcatgaaacgttcagatacattcattatattatacatttatacatatggacatggtgtacgtatgtacacgggtgcttgtttgatcacgggctcactgactataaaaatcatgttttttgggacatatagattcgcttacatcaactgt

SEQ ID NO: 168070 - DNA, 378 bp, Arabidopsis thaliana nossen
gttttggattcaggagtgctcctccattgtcttcatcaattaaacccgtgagaggtaataacaatggtggttcaagttcagacatggacattgcttctgattcagatgaagagatattcgagaggcaacactctcctcaagattatagaattcatcttggtttgcctcacgtcgcagctcaaaatggacttggacgtaatggtgctaaggtctttggtgctgctgatgatttatctgactcagctactagcactgaagtttcatatgaagcagaagcttgtggtgtgcggaacaatatatcttcacataatgaatttgaaagacgaaatgttgaggctggaacttcaggaaggactctgaacgggacaagcacttcaa

SEQ ID NO: 168071 - DNA, 383 bp, Arabidopsis thaliana nossen
ctctctctcgtccactcacctattgtgtatctcatcatcaccatggacaagacatttttctctagcaacgaagggaaaccaattacatgcaaagcagcaatatgtagaaaagcaggagaagcattggtgattgaagacatccacgtggatccaccccaagcttatgaagttaggattaagattttatgtacttctctatgtcacactgatcttactttctggaaactaagctttggaccaatttcaaggtttcctaggattcttggacacgaagcagtcggtgtggtcgagagcattggtgaaaacgtggacggatttaaacaaggtgacgtcgttttgccagtttttcatccttattgtgaagaatgcaaagactgcaaatc

SEQ ID NO: 168072 - DNA, 382 bp, Arabidopsis thaliana nossen
aggaaagaaaaacaaatatcgtatgttattatagtttatatataatcaacttgcaataaaggaaaaatttgaaaagcgtgactagatatgcacttggagactgacttacatagtagatacgataatcgaatatctagatatctggatggtactcatattatttgtttattacgtatgatcaaagatttattaatatgtatcatcttctacttggcttaattattaactagtttagtattcgtctctaatcttcaaaacaatcaacataaatatctaaactatattggtcatataaaatctaatactttactatccacttgtaatgtttgttttgttcagagttggagacccacataaattgatttccctatccgtattgtaa

SEQ ID NO: 168073 - DNA, 383 bp, Arabidopsis thaliana nossen
gactctcctcacagaacgatttagatttaatcgggaaaaagttcagtcagtgacactaatgttcgaatcgaacatggttctccaaacactatcttcttcttctcctccaattcaccgtctctatcttcaccattctcagattctcccttcttctgggtcacccagcaagatttctcttcagatacatggaaggactttggccattcgatcttttcatgaaatttctgctagaggtttaccggctttgaacaaagcttccttgaagaagctaccaatcaaaggatctacctttctgctggggcagagcttgttgatggtttctgctcacccacagttggcagcagcagcagaaatcataaagcctgaaccgatttacgaagttg

SEQ ID NO: 168074 - DNA, 379 bp, Arabidopsis thaliana nossen
ctcaaaacaagacccatcgataacagcgatcatggtggctaaagccttagcacagctgataacatgcatcatcttattctgccacgttgtagcttccgtagaagacctcaccatacgccaagtcacggccgacaatcggcgaattcgcccgaatcttctcgggactcacacagagagtaaattccggcttttcatgtccgattacggcaagaactactccacgagggaggagtacatccaccgcctcggaatatttgccaaaaacgtccttaaggccgcagagcaccagatgatggacccctccgccgtccacggagtcacacagttctctgacctcacggaagaggagttcaagcggatgtacactggagtagccgat

SEQ ID NO: 168075 - DNA, 379 bp, Arabidopsis thaliana nossen
attttccgtagaaatagtatttttgctttttttgatgatcctaggtaccgaagaaagagttccggaattcttaaatatgggactctaaaggcggattcaatcatccaaaaagaggatatgattgagtatcgaggagtccaaaaaattaagacaaaatacgaaatgaaagtagatcgcttttttttcattcctgaggaagtgcatattttacccgaatcctctgccataatggtacagaactatagtatcattggagtggatacacgactcactttaaatataagaagccaagtcggcgggttgatccgagtagagaaaaaaaaaaaaaggattgaactcaaaatattttcaggggatatccattttccggacaagacag

SEQ ID NO: 168076 - DNA, 378 bp, Arabidopsis thaliana nossen
caagctatggcggagaaggtagtgatgatgaaattgaaagtggatctagactgttccaaatgctacaaaaaggtcaagaaagctctccgcaaattccctcaaataacagacgaattgtttgatgagaagtccaacacgatcatcatcaaagtagtttgttacgatcctgagaggctaatgaacaaactttgctacaaaggagacggttctatcaagtccatcgtgatccttgagccacccaaaccgcctcaaccccagcctcaaccacctcagaagcctactgccccagccccagccccagcccaagcccaagccccagctcttgttcggccggctccggttcctgttcttgtttcgtcttccgctcctcaaccgatg

SEQ ID NO: 168077 - DNA, 378 bp, Arabidopsis thaliana nossen
tctccctcgacagagcctgcggctctggttttcaaaccaagaaagagtatttgttcgggaaaatcgacgtgcagctcaaactcgtccctggaaactccgccggaaccgtcactgcctactacttgaagtcaaaaggtgatacgtgggacgaaatcgatttcgagtttcttggtaatctaactggtgatccgtataccatgcatacgaatgtgtatactcaaggcaaaggtgatagagaacaacaatttcatctctggttcgatccaaccgctgacttccacacttactctgttttatggaaccctcatcacatcgttttcatggttgatgatattccggtaagagaattcaagaatctacaacatatgggtatccagt

SEQ ID NO: 168078 - DNA, 381 bp, Arabidopsis thaliana nossen
ctttaagattgacattgcctacttaagctctaaaaccgacatcgagtttgggtcaatgaaatgggtacaatatgggtttacaaagtcgtgtggacatttcaggatacgaaactctgacatagttgaccatgttaacatcttttcgcatcttttgaaaggcaagaagacagggagaggtggttgtgttcgaatcttccccacagctggggagatttgggctgtctacaagaactggtcactgaactgggacggatcaacaccggacgaagtgaggcaccaatatgaaatggtcgagattcttgatgagtatactgaacagtatggtgtgtgcgttacccctcttgttaaattagagggctacaaaaccgtgtatcacaggag

SEQ ID NO: 168079 - DNA, 384 bp, Arabidopsis thaliana nossen
atttaaattactacggtttgaagctcaaaggagtggctgatgcagcaaaaaatgaccatgttgtccttgaagaaaatcgaagactgtacaatgaagtgcaagaattgaaaggaaatatcagagtctattgccggattagaccatttcttccagggcaaaacagtagacaaacaactatagaatacattggtgagactggtgaattggtggttgcgaatccctttaagcaagggaaagatacgcatcggttatttaagttcaacaaagttttcgatcaagcagcaacacaagaggaggttttcttagatactcggccattaattcgatccattcttgatggctataatgtttgtatatttgcctatggtcagactggttctggaa

SEQ ID NO: 168080 - DNA, 383 bp, Arabidopsis thaliana nossen
gtccatctctgatcttccacgtcagaatcttcacattcttcggatgaatcagtggttacaactgattcacagctttcatcactagacttaaacttagtgggagtgttggactccaattgcttcgcggaaactatatcacctttaatgatgagtttcagctgagaaacagctctttcaaccttaaattgaaaagaagaaaaaggagcatgaagcacattagaattagtaagtgcagaatgagacgcaacaaaatgaaattaatctcatgtatatcttacatcttccggttttgccataaagtgatgacagaagaaacaggccctctgcaagaaattgaaaagaagattgaagagcaaaggatggtaaataggaaagacaagctc

SEQ ID NO: 168081 - DNA, 333 bp, Arabidopsis thaliana nossen
caccaatctctttttgacgcatattttttccacaatgcttcacacaaggggggggttgtagctgttttgtagggcataaaacaacactctacccaaattccctcaaataacagacgaattgtttgatgagaagtccaacacgatcatcatcaaagtagtttgttacgatcctgagaggctaatgaacaaactttgctacaaaagaaacggttctatcaagtccatcgtgatccttgagccacccaaaccgtctcaaccccagacttaaccaccttaaaagacctactgccccagcctcagccccagcccaagcccaagccccagctttttgtt

SEQ ID NO: 168082 - DNA, 380 bp, Arabidopsis thaliana nossen
cttaattctgcttttattaccagagaaagcaagaatatataagaatcagaaattgggtgaagaagaatggtcttgattactaagatgtctctctctttctacatcattcatcttctcattttctccttgatttccacttgtgttgtctccaaccgtacgtattggctatctatctctttcttagtgtatttacattatgtatttgtacaactcgttcttgaataaatatttacatatgtaatacgtgttttgagattacaagatggtttcaccggaaaaaaaggattacaagatgatcggtttgtaaatatatgtataataacatttattcaggtctttggtaattacttttaagctcataatattggaatttacaatgt

SEQ ID NO: 168083 - DNA, 380 bp, Arabidopsis thaliana nossen
tataaaagacacattttggccatcaacaactgtagtctttagtgcttctgcaagttctttgcttccagcaagcaagcggctgtatcaacaacatgtacaagtaagacaaaaagaaacagaacaaggattttttctctgttcataaagataaacacaaagggtaccttcctaaacaactgatcccaaatcgggtcggttcttcagatgtgaacaagattatctccagagacctcttcggtttaaaccccgaccttaagaaaacaaaagaaatatccaccaaaaaccatcaggaaacacaatcttagactttactttccattatccaaagatccttcataccttttcaaaacattgatagcttcaatcgcacctaaaacacc

SEQ ID NO: 168084 - DNA, 250 bp, Arabidopsis thaliana nossen
gaaactgctgcagctatggcttcagcgtctttggtgtttaaggatagtgatcctacatattcagcaacgctctttaaacatgcgcaaacacatgttttatttttcacatactctaagagggtcttacacagttaacacacccctgggtgacaaaatttacacatttcgcctggatatggagatgacctcctatggccagttagtgggttgtatcatccaccagaggaaaaacctcccctggattatgttt

SEQ ID NO: 168085 - DNA, 380 bp, Arabidopsis thaliana nossen
aattttctcaaactctaaaatcaatctctcaaatctctcaaccgtgatcaagatgcagatcttcgttaagactctcaccggaaagactatcaccctcgaggtggaaagctctgacaccatcgacaacgttaaggccaagatccaggataaggaaggtattcctccggatcagcagaggcttatcttcgccggaaagcagttggaggatggccgcacgttggcggattacaatatccagaaggaatccaccctccacttggttctcaggctccgtggtggtatgcagattttcgttaaaaccctaacgggaaagacgattactcttgaggtggagagctctgacaccattgacaacgtcaaggccaagatccaagataagg

SEQ ID NO: 168086 - DNA, 361 bp, Arabidopsis thaliana nossen
  unsure (1)..(361): unsure at all n locations
attattttcactgagctcatattttttttgagacaacaaacncgggctagttctcttaaaagtttttggcccccncactccnncgatcgatttttctatggaccaacacaccaatgttaactgatatcccggcgccgaataccgtaagaaagaagaaaggtttgatccgagttcacaaccaccattcaagatcgaacatataatggccgcgattcctaaacactcgttgattaagagtcctttgagatcaatgagatacttctccagagacattatcgcctataccacctaataccatccctgccaaataaaaataacatctagttcctataacctctttataggaccacccaaagaacac

SEQ ID NO: 168087 - DNA, 349 bp, Arabidopsis thaliana nossen
  unsure (1)..(349): unsure at all n locations
tccggaagtccagcgacgcttacgcctgcctatctctatattctttttcttttccactctctccaacnatgggtgntggtatggtccaacggaccaatgccaacggaaaccccggcgccggagaccggaagaaagaagaaaggtttgatccgagtgcacaaccaccgttcaagatcggagatataagggcggcgattcctaagcactgatgggttaagagtcctttgagatcaatgagttacgtcgtcagagacattatcgccgtcgcggctttggccatcactgccatgtatgttgatagctggttcctttggcctttatattgggccgcccaaggaacacttatctg

SEQ ID NO: 168088 - DNA, 399 bp, Arabidopsis thaliana nossen
cataaagcaaagttatttttcaagaaaatgcttacggtgaaataaatggcggagaaacaagcaatagtccaatatcttccccagtaagcatcagctattaaagctccaataagaggagtgatgtaacatgttccttgccatgtcatgacgtgtctagcagcagaaacattagtctcatgcaattcatttgtgaagtacgtgatgagattcttggcaattccataataagccaaccgttcgcagcattcgtttgcttcaccaaccaaagcatagatatcagtttttggagattaaagacagaacatgagagaatacaacaagtacattacaagtgaaataaaacaaagtgtttaccaaaaatgaatggacaagctttccagtttcctgttgtctgcttca

SEQ ID NO: 168089 - DNA, 353 bp, Arabidopsis thaliana nossen
ttttcgtaattaatgagctatatttaattatgtttgcaccgttttttttcttgggttgtgatgttactttgcatcgatgtgagaattcaatgaggttcgttaaaccgaaaaaagaattcaatgagtccgtatatttcggcttagagaatacgaaaggacaaaccaatgaatatgttctttagagaagaaagaatattagtcggttatagatatcgatggctttagatagttgtgacgtgcagcgagatacttgccctgattaattatcttcatattttttgagtttgtagtagaacagaattataattttccatgagagtataattgaacattatatttgagcttttagtaat

SEQ ID NO: 168090 - DNA, 385 bp, Arabidopsis thaliana nossen
acttggttctcgacaccggaggcgacgtaaatgggatccagtgtgaaccttgcgccgactgttaccaacagtccgacccggtttttaacccgacttcgtcttccacatacaaatctctcacttgctctgctccacagtgctctcttctcgaaacctccgcttgtcggtcaaacaaatgtctctaccaagttagttacggagacggatctttcaccgtcggtgaactcgctaccgatacggtgacgttttggtaactctggtaaaataaaacaacgtcgctttgggttgtggtcacgacaacgaaggtctctttaccggagcagccggtttactcggtttaagcgggtgtgttttatcgataaccaatcaaatgaaagcgacgtcg

SEQ ID NO: 168091 - DNA, 289 bp, Arabidopsis thaliana nossen
ctattttcacattctcttctctctcgatatcatctaaatctctctcgatctcaatttcgcaaaatggctgacaagaagatcagaatcggaatcaacggtttcggaagaatcggtcgtttggttgctagagttgttcttcagagggatgatgttgagctcgtcgctgttaacgatcctttcatcaccaccgagtacatgacatacatgtttaagtatgacagtgttcacggtcagtggaagcaccatgagcttaaagtgaaggatgacaaaactcttcttttcggtgaga

SEQ ID NO: 168092 - DNA, 380 bp, Arabidopsis thaliana nossen
cacaaatttctaactaaagcattcatagtctctcgaaagcctcttttcagaaccgaagctctttactttcgtccaccgggaaatatgccagtcgacgtagcctcaccggccggaaaaaccgtctgcgtcaccggagctggtggatacatcgcttcttggattgttaagatacttctcgagagaggttacacagtcaaaggaaccgtacggaatccagatgatccgaagaacacacatttgagagaactagaaggaggaaaggagagactgattctgtgcaaagcagatcttcaggactacgaagctcttaaggcggcgattgatggttgcgacggcgtctttcacacggcttctcctgtcaccgacgatccggaacaaat

SEQ ID NO: 168093 - DNA, 381 bp, Arabidopsis thaliana nossen
gaacattctcttcagttttttctgtcctctctaaaaaacctaatctctagactcgtcattgatgagctctgaccccaatctcaccactttcccctcactttctcggcaaaagttcagtgatttgctctgtttcctgggaggttttctctgttttttaaccaagatttcaagattcggttttgacggagcataaatggagagaacaagatcgaaaccggttcggaatctacccgagacaatccattcttttgctcggtttgaaatctcatatgaattctgattgggttaaatctgtatgcaacatcgccaagaatacttcttcaacgtcaaagaaagaagaagacgactctgtttctgtcgatttacagagcattagagatc

SEQ ID NO: 168094 - DNA, 382 bp, Arabidopsis thaliana nossen
gatacggaaccagtcccaatcagtacttaccgagacaatgaacctgtcccgctttcaacttaccgagaaaatgattcagatcatctcgacgccactcagcaagagaacgatgacttttgggaaaacggtttcagtagggaagaggccattgaagatccagagccttctcaggcaaaggaaaatggaaagagaagtgtagacaacagcgctttcactcatggggaaactgatctcaatcaacttcctgcgattcctccggtttcaactggtcaaggtttgccgtatgcccctgttgattggccaagccctggtgatgtatggacttggagagttgggaggagagtgactgctatggggtatcatcaggataggtttcttattc

SEQ ID NO: 168095 - DNA, 378 bp, Arabidopsis thaliana nossen
tttcgtcaccctagccgctttactctcttgcgatatctctgagatttgtttgacagtctctaaccatgggtaaagagaagtttcacatcaacattgtggtcattggccacgtcgattctggaaagtcgaccaccactggacacttgatctacaagttgggtggtattgacaagcgtgtcattgagaggttcgagaaggaggctgctgagatgaacaagaggtccttcaagtacgcatgggttttggacaaacttaaggctgagcgtgagcgtggtatcaccattgacattgctctctggaagttcgagaccaccaagtactactgcactgtcattgatgctcctggccatcgtgatttcatcaagaacatgatcactg

SEQ ID NO: 168096 - DNA, 358 bp, Arabidopsis thaliana nossen
gaaacaaatagatttatcttcgtgattaacgagagagaataatcgcatccatcaatcgtattttacgactttcgattgtgatagtttaatttatttcaatgtatgcagaaacatatcaactactgaattatatatattaattaaccattttgtagtcagaattaaccgggattaaatcacccaatcctaaatttgattttgacctaactaatgaaaatttagtagtaaaaaactattattttgattttacattttaactttgatagttttttctaattttttttaactagaaacctaattttttttcgtcaactagaaaactattctatctggatattagtttataatttcacagaca

SEQ ID NO: 168097 - DNA, 305 bp, Arabidopsis thaliana nossen
ctacatactctgttcctacttggtttcatcacgatgacttttgggaaaacggtttcagtagggaagaggccattgaagatccagagccttctcaggcaaaggaaaatggaaagagaagtgtagacaacagcgctttcactcatggggaaactgatctcaatcaacttcctgcgattcctccggtttcaactggtcaaggtttgccgtatgcccctgttgattggccaagccctggtgatgtatggacttggagagttgggaggagagtgactgctatggggtatcatcaggataggtttcttatt

SEQ ID NO: 168098 - DNA, 314 bp, Arabidopsis thaliana nossen
gagtggaggaagaattgtaatggatgagataagaagctttgagaaggcacacttgttcgatcttggtcatcctcttcttaaccgtatcgcagattccttcgttaaagccgccggagtgggagctttacaagccgtgtcaagggaagcttactttaccgtggttgacggggcaggttttgactcgaacaacgtgggtccaccgtcggagattacagggaacaagaaacataggttccctaatctcagaggggaaagcagcaaatctcttgatgcattggtgaagaacacaggaaaagaatctcttcaatgggggc

SEQ ID NO: 168099 - DNA, 338 bp, Arabidopsis thaliana nossen
catcggacggtggcaaatcctccgatccaaactcttcacactagggtcatctctctcttccttgggcgaatcacctcactggtcacaaaatcctctcctccacactctcctcccttctctcctctcaaatctccaacgcctctcttcactctccgaccaatgctcctccgcttcattctccggtggtaaacttctcatgcaaagcgacctcgacatagcttcctcttccctctctactcacataagtgaccttgacctcctcctcagatccggtgtgctccaccaacaaaacaccatctttttatcactcccaccacccacatcagataaaaatgaca

SEQ ID NO: 168100 - DNA, 392 bp, Arabidopsis thaliana nossen
  unsure (1)..(392): unsure at all n locations
ggcaaccatgtgatttctcctgttcttattccgcaattgttactanaatagagttgtctaatttggtgagctgaaccatttatgcagaaggctcttgtttgcttgttatatacatacatgataatgtgtagatgaacaaatgtagtttctaaaacaaatcctattatagaagagaggacacaacttcttttgaattggaacgtgtcattgttttatacttcaatgctgggtttctccatattgatacacttgttaagccatccatctcgcagcttcataaaaaagaatctctggtcgaaccttcttttctccacagaacctgaccacactcttccagttaccaatatcctatggcatcacaacacatagatcaacaatgtcaggcctatcta

SEQ ID NO: 168101 - DNA, 382 bp, Arabidopsis thaliana nossen
gtggtgaagcccagcacattgaatggagcaagatccagacacctactgatgaaattgttgttccttatgataaaatggctaacgtctctgaagatgcttccgagaccaaatatctgttggacaagcttgttgtgctgaagcttaatggaggtttgggaaccacaatgggatgcactggtccaaaatcggttattgaagttcgtgatggtttgacatttcttgacctgattgttatccagattggagaatctcaacaacaagtataactgcaagggtccttttggttcttatgaactcattcaatacacatgatgacacacaaaagattgtggaaaaatacaccaagtcaaatgttgatattcacacttttaatcagagcaag

SEQ ID NO: 168102 - DNA, 382 bp, Arabidopsis thaliana nossen
gcattttattatataatatattttcattaattataattactcaaaaaatgggaaattttaggttctttatgaatatatacttaattaaaaaataaaatattgtagttaattaaacatttaaaatatttaacagaataaacgtttagaatatttataatatgtaaaatctataaaatttatataattgtttgaaaaaaacttttaaattcatttgaattatattttttttaataaaagtattatttaaacaaaaaacaaaaaaataatttttaatttgaccgaacgggataagatcgtatgacgggttcataatatctataatatatgaacttttatacaattcaataaccatttgaactaaaaacaattaaattgatttaaa

SEQ ID NO: 168103 - DNA, 209 bp, Arabidopsis thaliana nossen
agtggttaaacccatcacattctttttaccaacatccacacacccacgggtgcaatttccggttcttttgaaaccacatcctacagcttccaatatatcttctacaccacaaacttaatcttcaatctcaccgtccttgaacttaatataagactctgaaccaagcgcttaaccattgttatgaactcatctctgcagaatcctaatcc

SEQ ID NO: 168104 - DNA, 383 bp, Arabidopsis thaliana nossen
atgcttttgctcagaagcttctagcttcatcgccaaacgtgcgggctttgtccctcgacaatggttcttccaattcaatctggttagagaactggtcagcatcttgcttctggaaaccagttcctcagccaaagaaagcatcactcagaaaatctcagaagaagtttgccagtaatcctcagatagtcgaggctgagtttgcgagaccaaagaagagtgttcgcaaagtcccttcttcaaatctcgacaattcctcggtggcacagacatcatctgagcttgagaaacccaaacgcagcttccgcaaggtttcaacaagccagtctgtagaaccactaccgtctatggacaatcctcaagttgatctagagaaagtgaaacgt

SEQ ID NO: 168105 - DNA, 350 bp, Arabidopsis thaliana nossen
caaaaagaaaatgattttataacagtcgaatcgtacggcagatatttggtggcccctcctcttatatgagatcatagtcaacaagagaacaaagccacagagagagagagacactaaaaccctaatctcttactcactgtctctcttcttcaatccatgtcttcaacacaagaagcgtctgttactgatttgcccgtgaagagacctagagaagcagaggaggacaataacggcggcgccatggaaacagagaacggtggaggagagataaaggagccttcttgtatgtcctctattattcctggatgggtctctgagattagtcctatgtggccaggagaagcacattc

SEQ ID NO: 168106 - DNA, 346 bp, Arabidopsis thaliana nossen
gtttattttcatgactttatatttcagcccttaccttaaacccagcggagtctgcggtttttggcagcgaccacgataatgacaaattcaataccacaaaatgaaagaaggacatgataacatctcaagcctttaccttaggctgtcccatgccaaacaacgtatatgagaaacataccttgtgttcctcttcttctccttatcgacatgagactgccaagctataaagcttccgtcaatactttttcatatactataatgcaatccgaaaggcatatctacatccatatcacaatctcttgctttcaccaccacaggacacgctcactttgagataaccaacaca

SEQ ID NO: 168107 - DNA, 422 bp, Arabidopsis thaliana nossen
aattcccggggcgttctccacgcgtgcgtcaaaacaagactccatcgatatctgcgatcatggtggctaaagccttaggacagctgataacattcatgatcttattctgccacgttgtagcttccgtagaagacctcaccatacgccaagtcacggccgacaatcggcgaattcgcccgaatcttctcgggactcacacagagagtaaattccggcttttcatgtccgattacggcaagaactactccacgagggaggagtacatccaccgcctcggaatatttgccaaaaacgtccttaaggccgcagagcaccagatgatggacccctccgccgtccacggagtcacacagttctctgacctcacggaagaggagttcaagcggatgtacactggagtagccgatgttggcggcagccgt

SEQ ID NO: 168108 - DNA, 381 bp, Arabidopsis thaliana nossen
  unsure (1)..(381): unsure at all n locations
gtcactcaagatcaaatcttattttattttatacacgctcaatnacagggggctgtgtantgttgttcggttgtgaagccatcactactatcacagggaaatcctaggcaaagaaacgtaactttgtcgagactattgagctccatatcggtctcaaaaactatgaccctcaaaaggacaagcgtttcagtggatctgtcaagttaccacatatcccccgtcctaaaatgaatatctgcatgctctgagatgcccagcatattcaacaagctgagaaaatggggttggaaaacattaatgttgagtctctaaaaaagcttaacatgaacaagaaactcgtcaagaatctttcaaaaaaataccatgctttcttggcctatt

SEQ ID NO: 168109 - DNA, 250 bp, Arabidopsis thaliana nossen
ggcattaatatatagatatatgactcataagtattcagcttatcaacacataagatactaacttctacggcctcttaagatacaagacagcaagttcggttttttctttgagaatgattcataaagtgtaacttgggcacacatgatgagcggcgagaagctagctagccatgaaaatatgtctgtcagattcagcgtgttcttgtactaatatcaaccatgcatataataaattaagacgatgatgatt

SEQ ID NO: 168110 - DNA, 389 bp, Arabidopsis thaliana nossen
gatgagttctcgcgcatcactatccaatttgaagcaattacggaagctaaaatattccctatcaatgccccaatctgtgtcgaagtcatcttcatgatacgactcatcccagaaacgtaagtcccaatttacctggaagtatgcatcatcatacaacgcatcccagaaacgttcacatgtatattcaatgttttcagataatggtacacaagaaacgtgatcttccattgtcgctaccacagttgcatcactcaacgccttgatgacacctctacagtctgtaaagtcggcgaccattagatttgtcagtctgaaaatgtttggggagatgtttttcaacctctggcaacaatacatcattagttcagtgagcctcgtgaaattctcaa

SEQ ID NO: 168111 - DNA, 380 bp, Arabidopsis thaliana nossen
gccagttggttagaacctgtctttctggacatgtctatgactctggccgggtggattttacgagtgatttgaatgtgaaattcgcactacatcccaccatacgacgaatgtctggtccttctagactagtatcttgggtggctaaagggatttcttccgggcttgatggtttatatcttacaagatttgaatcccaacgtagtgagtactggcaggccctctactcatcggttgaaattggggctccatatctcattttgtgctccgagaatgatgaacttgctcctctacaagtaatttcaagctttacccatcaattgcaagaactgggaggagaagttaaggttgtcaagtggaaaaattctcctcatgcaagacac

SEQ ID NO: 168112 - DNA, 383 bp, Arabidopsis thaliana nossen
attggtttttaataatgttagtctccatggagaattagttaattggtatatgattatacttatatgggttatagcgtgaaaaaaagaaacatctactttaagcaacagcagaaagcattaaagaatagataaccccaatttccgagaggaacgttaggagaaagtttttgaaaatttacaaaactttctgttagtagatgcttaatttcatcagtgttttccaagcaattttgaattaaggattaataaaattgttatgtatattatgaaataatgaagatatttcgctatctctagagtctaaagagattagcagttggtgccttggtggttgacaaaagaaaagaagaagagattagcagttgcgtttaacattggtttta

SEQ ID NO: 168113 - DNA, 380 bp, Arabidopsis thaliana nossen
atcagatacgaagggatcctttacaatattaatacagatgaatccagtatcgggcttcaaaacgttcgagcatttggaactgaaggaaggaaaaaagatggtccacaagttcctccaagtgacaaagtttacgagtacatattgttccgtggaactgatatcaaggatttgcaagtcaaagcttctccaccagttcagcctcctgcatctactataaataatgaccctgctataattcagtctcactaccctagcccgatgccaacatctggtagcttgccttctactgcgagcgggtcactacctgacattagttctcataatggacaacctggacaacatggaatgggattccaaaacgcaatgcctttgtatcaacc

SEQ ID NO: 168114 - DNA, 367 bp, Arabidopsis thaliana nossen
gtcgttgcataattatgtccatgagtctatccatcaaaataccttcggaatcatctttttattttatatatatactgcgacaacaataattatatgttttgtactgtcttttctggtcaataaaaaaaactaaaaatttggtcgaatttaatggacttccatgaccaactcttcatttcccttaaggataaattgagaagaaaattatatactggaatttgaaaaagctttatataattgtaacgtatttttataattgcacgacaaatctcttttcttgattttttgtatgaaactacaaagaccaatttttctaacaactaagattcagttattatttttggtcacataaataaatgagacgatt

SEQ ID NO: 168115 - DNA, 373 bp, Arabidopsis thaliana nossen
  unsure (1)..(373): unsure at all n locations
gcttctttttatgagatcgcttctcgctctcgagatcttctatgcgaggatgtgcttcctccagttctgcttcaagggaagaaaccaatgacacagcattcacttgctgatcaatacgcttcatgttgctatatatttggtgtacttcctccattgtatccaagcagacaggatcccattttgtcgccccctccattgctgagtggggaaatggcattgaaggttcgagctgacaagaaagcaatagaagacttgaggtcaagaaaccataaaaaattgattacaaaacatangatcaacaacaagaaagaccttcaaggactaggacaagaatatctcagtcaagagttatattgagaattacagctttgat

SEQ ID NO: 168116 - DNA, 383 bp, Arabidopsis thaliana nossen
catttcccggttggatcgaagggttaagaaccatagacagtgtgattgttgcatatggcaaatgttggcttaaatgttttcttgcagatccaaactcagtccttgatcttatacctgtggacatggtcgcaaacgcaatggtcacggctgcggcaatacacacagggaagctaggttcccagaccgtgtaccatgtcggatcatcttgtaaaaacccgatcacattcgaacagattcatgatctcgcggctcgctacttcaccaaaaaccctcttgttggacgtgatggttcacctatactagtctccaaaagaactatcttgtccacaatggctcagttcagtttctacatgaccattcgttacaagctacctttgcagatg

SEQ ID NO: 168117 - DNA, 415 bp, Arabidopsis thaliana nossen
  unsure (1)..(415): unsure at all n locations
nngtccgccaggacttgattcatataatcatttcccaagtgccatttggattggtgaccgtggagcgcaaattcatttgcgtgaaatgtaccccannatgaattgccattctagatatctnnacgactgagcgactagtgctataccataattcccagtctnctggcttcaaggtggcatttacctctaggagctgtggtttgtccacttgctgagactcctgaaggggaggaggtaccacttattgattttggctcaactggcatcatccgctgcagaagatgccgtacctatgtgaatccttttgtgacttttacagattctggaagaaagtggcggtgtaatatatgttcgatgcttaatgaatgtgcctggtgaatacttctcacatttggatgctactggccgaagaatg

SEQ ID NO: 168118 - DNA, 387 bp, Arabidopsis thaliana nossen
acgttaaggagtgaacttacacataggagagagaatggatgagattctgcaagtcatcgggggagaaaccaatctcatcaagtaatacatggtaatgagccggtcttgaagttccctgagagatcatagagggaaacattatatagcgttgattttaataaaggtgcgaggagtgaagctaaacttttgtctacacttactatttttcctgcatgagcacacatgtaaaaatcgtagtttgtcgggtgtacgatcttggtgtccacgacagttcctgacaaacgacattgttttttttatgatgaaatagttacggaaagaaatggaatcctagtgacgggtgaagaataaaaagtattttttacctgcaggaacattttcaggacc

SEQ ID NO: 168119 - DNA, 244 bp, Arabidopsis thaliana nossen
gatcatcaacaatcaagacactgctaaaaactccaggaagtctccactcgtcgaaaagcaatgacgctccacttacaagacgaataaccaaaacactcaattacatcttcctagacttcccactgatcaacaaatctccgattcttttactccaaaaaaaagactgtaaggctctactcttacatatgaaatacgtattgctcaatccaccaaatgatcaaattcttgggttgatgatcccatc

SEQ ID NO: 168120 - DNA, 365 bp, Arabidopsis thaliana nossen
attcaattccacatctttttttttctctctgttttcttctccggagcgagtttttaatcgttggtttggagttgccatcattctaatttataaaccataacaatagaacaataattcttcctttacagagtagtttgaacagttagtttacataatcatccaacacacttaccttactttccttcaacgaaaaataatatattccaatatataccattcctctttctaatatatctcgcttgctccattcccttctcttaatcatgactctattaaaatatttatgtgttttcattacattttcctttctgatcttttaaccaacttttttcctaaaactttttccaaaattatttattatcttt

SEQ ID NO: 168121 - DNA, 382 bp, Arabidopsis thaliana nossen
catggacggaccttgacctctctgcttcccttcgtgcattttctctctcgcactatcctctctctttctagtgtttgtttgatcctctgcgtactctgttcttcttctctcttcagataaaacaagtcctgcaaaattaagacctgatgtcttatcgattgctaagtgtggataaggaggaactggttacatcaccttgtttgaaagaacgtaactacttgggtctctctgattgttcctctgttgatagctcaactattcccaatgttgttgggaagagcaatctcaatttcaaagctactgaactgaggctaggtcttcctgagtctcaatctcctgagagagagactgatttcggtttgctgagtccgagaacacccga

SEQ ID NO: 168122 - DNA, 378 bp, Arabidopsis thaliana nossen
ggcgaagaggtcctcttggtcctaaggtaattagtctccgaatgttcaactaataaatcatggttaaagattaattatgctgcttaataattattattaatttttaaattggtaaatgtgtttcagagtttatgcaatgcttgtgggatcaagttcaggaaggaggaagagaggaaagccaaaagaaatgtagtgattgtattagatgactaatataaagaaaataagagaagttgatcgttagttattaggcattgtatattatcaatgtccctggttaagcgttatgagagaagagctaaagttttgagagttatcacttaagcaattgtaatgttaaggtcgctcatttgcaagtcttataaaattcatgaattt

SEQ ID NO: 168123 - DNA, 283 bp, Arabidopsis thaliana nossen
  unsure (1)..(283): unsure at all n locations
tggatcatcgcctggatcaccttctacagacaacaaggccaaaaatgaggaattcagttctcgctgtaggctcantanaatcagaaaaaaactaaagtttccggtgggaaaaaatccatccattgctcaacatgcctttgttcctaatcctaatccaattccttttcctcttaccttaatcaaaacctgttgtttggaaaaaaaaataaaaaccaatcccgggtcgattggaaaattcttgcctgccattccttaaaaagttaaggctattaaaaagattcct

SEQ ID NO: 168124 - DNA, 382 bp, Arabidopsis thaliana nossen
agattctgtgcttcttctgcgatcagctaagatccgatccgcgaccgttgcagacttcgatcagatccggttaagagaagcaaatcgggtcgaatatgactcgtcgatgttctcactgcaatcacaatggccacaactctcggacttgtcccaatcgcggcgtgaagctctttggtgttcggctcaccgaaggttcgatccggaaaagtgcaagtatgggtaatcttagccattacacgggttctggatcgggtgggcatggaaccgggtccaatactccgggttctccgggtgatgtccctgaccatgtcgctggtgatggttacgcttctgaggatttcgttgctggctcttcctctagccgcgagagaaagaaaggaac

SEQ ID NO: 168125 - DNA, 390 bp, Arabidopsis thaliana nossen
cgcaatcttcgctcttctctttgctctttctctctcaacgcggttcacatccgggtttgtgagattctttctgcctgaaaaaagccctctactctcgcttaccaactttgctccagcatggcatgatctgcaccagaaggcacacagtttgatgcacgtcagtttgaccagaaactcaatgaagtacttgagggacaagatgagttcttcacatcctatgatgatgttcatgagagctctgatgccatgggtcttcaagagaaccttctcaggggtatttatgcttatggttttgagaagccttctgctattcaacaaaaaaggaatcgtccccttctgtaagggtcttgatgtgattcaacaggctcagtctggtactgggaaaacagc

SEQ ID NO: 168126 - DNA, 347 bp, Arabidopsis thaliana nossen
  unsure (1)..(347): unsure at all n locations
ccagaattcaagaaggtgttgggtgatgccaaacaaaccgaagctgtcggtccaggtcctactaagaaagctcgacagcctgctaagcccaaggaggagcccaagaaggcagcccctgtagcagaggcaccaaagcctgctgaggaggaggaagcaccaaagcctaaagccaagaatcctcttgacttgctaccaccaagcccaatggttctcgatgattggaagaggctttactcgaacaccaaatccaacttccgtgaggttgctatcaaaggattctgggacatgtatgacccanaggggtactcactatggttctgtgactacaagtacaacgacgagaacat

SEQ ID NO: 168127 - DNA, 131 bp, Arabidopsis thaliana nossen
ccagtttgagaaaatcaagtcgatagatccatctttgattttcaagtctggagatgttacatcagcacacataaacttgatgttcttgtaatgcccattaacactttcattctgcaaagaaaaaatcatca

SEQ ID NO: 168128 - DNA, 362 bp, Arabidopsis thaliana nossen
gccgcatcctctctctctggtcggagaaatctccagatttggtcatttctccaatcttctcgggaccctaatttaaccaaacctctcctccttcagattcatcttcctcctaatctccctaaaagctcaaacctttctctcaatcaattctaaacaatggcaacagaagcaacaaccaaattcccagaatccgatctccgtccaatcccacaaccaccggattttcatccagcaatcatcgttccagctcaaaacacaactcttaaattctggcaactaatggtcgccggttcaatcgctggctcagtcgaacacatggctatgtttccagtagatacagtcaaaacccatatgcaagctct

SEQ ID NO: 168129 - DNA, 386 bp, Arabidopsis thaliana nossen; identical to SEQ ID NO: 131982

SEQ ID NO: 168130 - DNA, 386 bp, Arabidopsis thaliana nossen
cttcttcttccctgtcgccgcatcaaagagaactgaagctataggcttttgaagctctctgcataaacatgactttcaagcgcaggaatggtggcaggaacaagcataaccgtggtcatgtgaaaccaatcaggtgttccaactgtggaaagtgttgccccaaggacaaggcgattaagagatttatcgtaaggaacattgttgagcaggctgctattagagatgttcaagaagctagcgtctacgaaggttacactctcccaaagctttacgctaagacgcagtactgtgtctcgtgtgctatccattctcacgttgtgagagtccgatcccgcaccaaccgtagagttcgtaccccaccacctcgttttgccagacgcaaggag

SEQ ID NO: 168131 - DNA, 325 bp, Arabidopsis thaliana nossen
cttcactctccagcgatcgtttattgcttgaagacggcttcttcttctcacaagcctcatctctgctaatcaaaatgtctctggttgcaaatgaggagtttcaacacattcttcgtgtgttgaatactaatgttgatggtaagcagaagattatgtttgcccttacctctatcaaaggtattggtaggcgattggctaacattgtctgcaagaaggctgatgtcgacatgaacaaaagggctggtgagttatctgctgctgagattgataacctcatgacaatcgttgcaaacccacgtcagttcaagatcccagactggttctt

SEQ ID NO: 168132 - DNA, 404 bp, Arabidopsis thaliana nossen
caaaaccccaagagcttgaagagtcttcttctcattcctcacacccgaatacatacagcacaagctcacctggagttcaaatggtggagcttctcctaactgagagatcttaaccagaagctgctcagcttcctcgataagcccaagattagccatccaatcaacaagaacggtgtaagtgatcacaccaatttcaatcccatctttctccagctgcaacaaaagtctcagtgccttatctaatgagttctctcccttataagctcggaccaaatttgcaatgcacttgtcatcgggtttgtggccaagctttctcatttcatcaaaattacttttcgctttatccacctgacctgctttcccatatgcttccacaaataaactatatgcttcaaagctcagtg

SEQ ID NO: 168133 - DNA, 376 bp, Arabidopsis thaliana nossen
caaagaaagagtttttttaactagcttatctcaaagtgtttgcttaagacaagaagaacatggcgtcttaccagaaccgtccaggaggtcaggccactgacgagtacggaaacccgatccagcagcagtatgacgagtacggaaatccgatgggaggaggaggatacggaactggtggtggtggaggagctacaggtggccaaggatacggaacaggtggccaagggtacggatcaggtggccaagggtacggaaccggtggccaaggatacggaaccgggaccgggactgaaggctttggaactggcggaggagctaggcaccacggccaagagcaactccacaaggaaagtggtggtggcttgggaggaatgct

SEQ ID NO: 168134 - DNA, 376 bp, Arabidopsis thaliana nossen
ctcaaacacgcttttactaccttagaattctagaatatataataatcagaaattgggtgaagaacaatggtctcgactactaatatgtctctctctttctacatcattcatcctctcattttctccttgatttccacttgtgtcgccttcaaccgaacattttgtctatcaatctctttcactagtgtatctacattatgtattagcacaacctcgttcttgaataaatatccacatatctaatacatttttggagattacaagatgggtttccctaatatatactgattacaatgcttatcaccctcgtacaatataattaataaccacatttttttctaacctccggtaattactcataagctcataatattcc

SEQ ID NO: 168135 - DNA, 383 bp, Arabidopsis thaliana nossen
aagtggggcctattaaagtagtgccactgtattctactcttccacctgcgatgcagcagaagatatttgatcctgctccagagcctgtaacagaaggtggtcctcctgggagaaagattgttgtctccactaacattgctgagacttctctcaccatagatgggattgtctacgtcattgaccctggttttgctaagcaaaaagtctataaccctcgaatccgtgttgagtctttgttggtgtccccaatttcaaaggcaagtgctcaccagagatctggtcgtgccggtagaacacggcctggaaaatgcttcatgctttacacagagaagagttttaataatgacttgcaaccgcagacgtatcctgaaatattgagatca

SEQ ID NO: 168136 - DNA, 387 bp, Arabidopsis thaliana nossen
cggacgcgtgggcaagtgctctgcagagctgactatgaagacggatccacaaaattctgattacattggcgaatctggggcatctcgaaattacgaaccctggcgtgcagaagatgaggaggttgataaggataaacagaaaagagatgctgaggagatgggggacgcgatgaagtccttggagaacagaactttggattctaaaagagaaatggacattatagctgcacttgatgaaatgaaatcaatgaagtctagacatgctactgtgagtgtagatgcaatgttggaggccttgcaaagaaccggcgctgagaaggtaaaacgaatagaagaagaagatgaagcagttataaagtcgatatttggtaaagaagttattaggag

SEQ ID NO: 168137 - DNA, 379 bp, Arabidopsis thaliana nossen
taaagctttagattgccatttgtatgttccgagaatgtccttttttgaggccataagccgaatgactggttctctctttgtatttatatatatgtataaactattaagcctaacattaatcttttttaagtttctttgatttgatgagtctactataaaaaagaagggttaagttgcatactagtcactttttaaaacttaattggaaaagtagtcactttactattcataatttgtaaaatagtcatttttcactgtttgattcgtacacttagtttgtacactatttttagtgtacagatgtatataaaaaatacacagcgtacactttacatttgcacactaaaagtgatgtacaatccaagtgtacgaatcaaac

SEQ ID NO: 168138 - DNA, 379 bp, Arabidopsis thaliana nossen
ctctatcctaccgccgacgtccgtgatcgccgaaatgactgaagcagagtccaagactgttgttcctgagtcagtgttgaagaagagaaagagggaggaagaatgggcacttgccaagaaacaggagcttgaggctgccaaaaagcagaatgctgagaagaggaaactcatatttaaccgggctaaacagtactccaaggagtaccaggagaaagaaagggaattaatccagctgaagcgtgaggcaaaattgaaaggaggcttttatgttgacccagaagctaaactgcttttcattatccgtatccgtggtatcaatgccattgacccaaagacaaagaagattttgcaacttttgcgtttaagacagattttcaat

SEQ ID NO: 168139 - DNA, 373 bp, Arabidopsis thaliana nossen
acccgggttgcgaaccggcatatcctacaccgaaatgttcgaggaaatgcgttagcgacaacaaactatggagcgagtcgaagcattacagtgttagtacatacactgttaaatctaatccacaagatatcatggcagaggtttataagaatggacctgttgaagtctcttttaccgtttatgaggattttgctcattacaaatctggagtctataagcacataacaggttctaacattggtggtcatgctgttaaacttattggttggggaactagcagtgaaagagaagattattggttgatggcaaatcaatggaacaaaagctggggtgatgatggttatttcatgataaggagaggaactaatgaatg

SEQ ID NO: 168140 - DNA, 373 bp, Arabidopsis thaliana nossen
aattgatacaactgccgttctctttgatcgtccttcaggacaaatcttatcaacgctgactggtcactcaaagaaagttacaagcattaagttcgttggtgacactgatcttgtgttaactgcttcatccgacaagacagtccgcatctggggatgttccgaggatgggaactatacctctagacatacactgaaagatcattctgccgaggtgcgagctgtaactgtccacgcaacgaataaatactttgtgtcagcatcacttgacagtacatggtgcttctatgatctgtcctccggtttatgccttgctcaggtgacagatgcttccgaaaacgacgtgaattacacggctgctgcttttcatcctgat

SEQ ID NO: 168141 - DNA, 374 bp, Arabidopsis thaliana nossen
atccatctggtgggttctttctgttctttgccaatgctctcatctgtgcaaaacaaccattttttggttgatcagaaattgaatacacttgagcttagttacattatgtcccaattggtttgagaagtgtttatttaccttagtgccagaaatgaacaagaagtcctgagcccttgagggatcaaagaaagccatctttccttgtgtcttatcgtacgcagcaacctacaccaattgaaaccagaaatcagaactcaaaaagcctaaatctttgaaggaagataccaagtttgagtattatgcggtttctatgaatataccctgaaaggaagaatgttgagtcgttcgagtccaggagccatgcttagaacttt

SEQ ID NO: 168142 - DNA, 377 bp, Arabidopsis thaliana nossen
caccagtctctcgcaatcttcgctcttctctttgctctctctctctcaacgcgggtcagatccgagtttgggagattcaagctccctgaaaaaagccctttactctcgcttaccaactttgctccagcatggcaggatctgcaccagaaggcacacagtttgatgcacgtcagtttgaccagaaactcaatgaagtacttgagggacaagatgagttcttcacatcctatgatgatgttcatgagagctttgatgccatgggtcttcaagagaaccttctcaggggtatttatgcttatggttttgagaagccttctgctattcagcaaagaggaatcgtccccttctgtaagggtcttgatgtgattcaacaggct

SEQ ID NO: 168143 - DNA, 376 bp, Arabidopsis thaliana nossen
atctcattgcttcatcattaccaaatcatcaacttaatcgtttctctcaaatttagggttttctcttttctcgaaagtcttgcggttttctgaatcatctctatctggtttgagggtttcgtttgatatctggagaaaggggtttctggaaacaaggagttcataattcgcgatcttgatctatcgatcttcatttatatataaaagcgtgaatgagattatgatggagtcgaaaggtggtaaaaagaagtccagcagtagtagttccttattttacgaagctcccctcggttacagcattgaagacgttcgtccaaacggtggaatcaagaaattcaaatcttctgtctactcaaactgctccaagaggccatcc

SEQ ID NO: 168144 - DNA, 376 bp, Arabidopsis thaliana nossen
agattcgcaatgtcaggttcatcgaccaatctctcttctccaatcttctcgtctatctcagcttttgcctttttcaacacttcaggtttttttaataaatttgccatcgcccattccaatgttacggccgcagtatccgttccagctagcatcatactctatatacattaaattcacacacaagttgttagttcatctacacatgtacacatataatatctttataatataaatgtaaaaacataaaccatctttcttctttcagttttatgtttgcatttagtgagtccaaggaaaaaaaattatatttaaggtttatatgtatgagaatacttacgagcatgagccctttgatgatgacgtcactgtaatactt

SEQ ID NO: 168145 - DNA, 227 bp, Arabidopsis thaliana nossen
catcatactctataaacattaacctcacacaccattactccaatcatctacacatgaacccatataatatcatcataatatacatgtcacaacataaaccatcttccttcattcaaacccataatcacaactactcaccccatccaaaaacaattaaatcaaacctttatacccatcacaatacaaactaaccacatcccttctataataaacatcactaaatactt

SEQ ID NO: 168146 - DNA, 379 bp, Arabidopsis thaliana nossen
gaagaaactaattctggtcttctgtcatctcccgttgctacttctcagttaccggaagtatctaatggggtttcttcttattctgtcaaggaagagttacctctttcgaaacatgaagctaccagtgctacttcttcgcctaaagcttctaatacagttgtgcctagtacgtttaagaaacctattggtgctaaaaggacaggaaaaactggtggtcttggtgcaaggaagcttactactaagccaaaagacaatctctatgagcagaaaccggaagaagttgcaccggttattcccgctgtatcatcaacaaataacggggaaagcaaatcatcagctggttcatcatttgcctctcggtttgagtacaatgacgacc

SEQ ID NO: 168147 - DNA, 363 bp, Arabidopsis thaliana nossen
  unsure (1)..(363): unsure at all n locations
aaatggctcactcttgtctcttcaatgcctctgtatcgaccacaagccctaaacaagattttttggggcgccaccnnacaacctatctcctccgccaccgccccgtcgtcatctcctgtaccgccgatggcaacaacatcaaagccccgatcgagacagcggtcaagcctcctcaccgtaccgaggataacattcgagatgaggctcgtcgtaatcattccaacgccgtgaatccattttcagctaaatacgttccccttaatgcagctcctggatccacagagtcttactctctcgacgagatcgtgtaccgtaaccgctccggtggtttgctcgatgtcgaacacgatatggaggctttga

SEQ ID NO: 168148 - DNA, 369 bp, Arabidopsis thaliana nossen
aaaaatggctcgagtctcttctcttctttctttctccttaacactggtggtccttttccatgtgtgcgcggctcaacagggtcagcagggtcagcagtttccgaacgagtgccagctcgaccagctcaatgcgctcgagccttcacacgtactgaagagcgaggctggtcgcatcgaggtgtgggaccaccacgctcctcagctccgttgctcaagtgtctactttgcacgttacatcatctagtctaagggtctctacttgccctctttctttaacaccgcgaagctctccttcgtggctaaaggacgaggtcttatgggaaaagtgatccctggatgcgcccaaacattccaagactcatcagagtt

SEQ ID NO: 168149 - DNA, 368 bp, Arabidopsis thaliana nossen
aatgtatggaacaggggacattttgaggtcagtttcgattccttgtgagactgataagcctatagtcgtggagctagcggttgcagctatggaggaactcgtgagaatggctcaaactggagatcctttatggctttcaaccgataattcagtcgagattctcaacgaagaagagtatttcagaacgtttccgagaggaattggaccaaagccattaggattaagatcagaggcgtcaagacaatctgcagttgttataatgaatcacatcaatctcgttgagattctcatggatgtgaatcaatggtcttgtgttttctctgggattgtgtcaagagccttgacacttgaagttctttcaactggag

SEQ ID NO: 168150 - DNA, 381 bp, Arabidopsis thaliana nossen
cccacgcgtccgggtcagtcagccatcttccctctatgaatctaattaccgatacaaaagagtatatgaaatattgtttttgactttaaatcatctctgcagattcacaagagggcaggactcaagggatgctatgcaggtttgggtccaaccattgtgagagcattccctgctaatgcagcagcaattgttgcttgggagttctcaatgaaaatgttgggaatcaaacgtgactaggattagtcttccaatctaatttatttggttcgatttacagatctttaaaccacaaggagcttgcatttgcttcagattttgatgagctttcatgtaacagaactacatatagcacgaatcaaaagtgtctcccagattattatt

SEQ ID NO: 168151 - DNA, 375 bp, Arabidopsis thaliana nossen
ggaaaatttgccgcctcatctcggtgcttctatgtatgcaatagcttctgttctctcatatgatagcctcgcacaatcttcagttcaaactgtagctgtgcaacctattacttcagtggtagatgcaacgagtcccagagatgacataccttccactaaccccaatgagcttcgggagcatgacccgaacactactccaatggggtcaaagctcgaattagccaacaagttgggtttgggtaatatggaagagagcttgccttcaaatttcgctgatgggaatgagcaacctgacccaaacacttctccagtggaagatgtttcggcggctacaaaacaaaagaagatgcagtcagagtccaaaaggtgcaagtc

SEQ ID NO: 168152 - DNA, 376 bp, Arabidopsis thaliana nossen
ggcttctctcactctccttcgccgcggaatcgtctctcggagccgcgaaaggactcttagggttaaagattcttcccaaaatctccttctctcttcctcagctgatttcgactccgatcaattttctaggtgtttgaaggcatttgaaaggatgggagacaatggcaaagatgaaattatggtcgaggcatctcaatgcgctggtgctatggttgagataaagataaagacgttggattctcaaacgtacaccttacgtgtagataaatgtgtccctgttcccgcattgaaggagcaagttgcttccgttactggtgtcgttacggaacaacaacgcttgatatgtcgtggaaaagttatgaaggatgatcaactc

SEQ ID NO: 168153 - DNA, 401 bp, Arabidopsis thaliana nossen
  unsure (1)..(401): unsure at all n locations
aaanncccggggcgactccacacatccgggcttctctcactctccatcgtttcttaatcgtctctccaagccccnatgtgactctaaaagttttttattcttcccaaaaacacctactctcttcctcagctgatttcgactccgatcaattttctaggtgtttgaaggcatttgaaaggatgagagacaatggcaaacattaaattatggacgaggcatctcaatgcgctggtgctatggttgagataaacataaagacgttggattctcaaacgtacaccttacgtgtaaataaatgtgcccctgttcccgcattgaatgaccaagttgcttccgttactggtgtcgttacagaacaacaacacttgatatgtcttcgaaaagatatcaaagatgatcaa

SEQ ID NO: 168154 - DNA, 339 bp, Arabidopsis thaliana nossen
cgttgatagcgtggtctttggctgattgcttgggcttcttctccaattcttttccttggtttcagagtataataatccccagcttctttgatcctctctctctctctcttcctctgttacatgatggctacgacggcgagtagtgccgctaattctgcatctcgcttctccattgattcctctatctcgcgatcacgtcacggcgattcctctccctggttgttaccttctgattcccatgatcatccgactcttttcctctcccaggacgatcccttctcagcgccttccgtcttcccgcccaccggaaataactcttccgactacgacaatgctgat

SEQ ID NO: 168155 - DNA, 378 bp, Arabidopsis thaliana nossen
atcgatctaatcttttcagctctctccatcgtcgtcgtatctgtgactctcgtgatcatcgcctgaaaaaaatttgagataatggccagaaagttcttcgtcggaggcaactggaaatgtaacggaactgctgaggaggtgaagaagattgtgaacactcttaatgaagctcaggttccttcacaggatgttgtagaggttgtggttagccctccatatgtttttcttcccctggttaagagcacattgaggtctgacttttttgttgcggcacaaaactgttgggttaagaaaggaggtgctttcactggtgaagtgagtgcggagatgcttgtgaacttggatattccatgggttatccttggtcactctgaaagg

SEQ ID NO: 168156 - DNA, 379 bp, Arabidopsis thaliana nossen
aatcataacacttcttctccttatctccatagctgtcgtccactgcttatccttccgtgtggagatcgacgagttcgagccaccacagcaaggagaacaagaaggtccccgtcgccgtcctggtggtggctctggcgagggatgggaggaagagtcgacgaatcatccataccacttcaggaagcggagtttcagtgattggttccagtcaaaggaaggttttgtgagagtgctgcctaagttcacaaaacatgcaccggctctcttccgaggaatcgagaactacagattctcgttggtggagatggagccaacaactttctttgtgcctcaccatttggatgccgatgctgtttttatagtcctacaaggtaaagga

SEQ ID NO: 168157 - DNA, 383 bp, Arabidopsis thaliana nossen
gtgataattcaattgtgggcttaatatataaatcattttttaatgggcctcaagatagaaacaataaacaatcatccatcaaattaaatagcccaatactacacaaactctccaaatcatcatgaatcaaacagtagcagcaagaacatgtaccaattcatatgatttgggaactctaagcacaacatcaaaccattcagtcttaccgcaaatctcgtatatgtcgtgcctttcaatcgtaatctccgcacaccaaatcatcttgttcttagagctagaaggcacaaaagtatcccataaaaccgccatcttctcaccgtaagccgccaagttaacacggctatagcatagaaacttgattagccgttccaaccccatcaact

SEQ ID NO: 168158 - DNA, 372 bp, Arabidopsis thaliana nossen
aatgaagtcttgtctagctacttttgctctcgcagtgttagtaacacaaggaagcatttttagttggtgtttggcctcctctgcttctacaaactctgttcctaattggtttcatcattggccgccgtttaaatggggaccaaaatttccatattctccacctaaaccgccgccaatcgagaaatatcctccaccggtgcagtatccaccaccgatcaagaagtatccaccgccaccatacgagcatccaccggtgaagtatccaccaccgatcaagacttaccctcatccgccggtgaagtatcctccaccagaacagtatccaccgccgattaagaagtatcctccaccagaacagtatccaccgccgat

SEQ ID NO: 168159 - DNA, 367 bp, Arabidopsis thaliana nossen
atcacattttcgtagccttatttctgctttcagattcttacttgcagatgtgggtaaagagagggggggcattaacattgtggtcattgcacatgttgattctggaaaatcgaccacaactggtcacttgatctataagcttggtggtattgacaagcgtgtcatccagaggttcgagaaggaggctgctgagatgaacaagaggtccttcaagtacgcatgggtgttggacaaacttaacgccgagcgtgagcgtggtattaccatcgatattgctctatggaagttcgagaccaccaagttctactgcacagtcattgatgccccacgacatcgtgatttcatcaagaacatgattactggtacc

SEQ ID NO: 168160 - DNA, 331 bp, Arabidopsis thaliana nossen
gggacttggcccttttaaaacacctaatttcatgccttttcccgctgaacttgccactttctcctaaccaactcatttcttcatataaaaccaacaacatcacacaaaaagagccctcatttattcacctttcttttcccttaaatataatctttataaaaaaaattaaaaattaaaaattaaaaaaaggaagtaaattgaaaaaacaaaattggtcccctgtcttcttttgttcactggacccttttcttggcttcgctaaatcatactatctctatcttctcaccgacactttcttcttctttgatcatatcatatttatcttcactac

SEQ ID NO: 168161 - DNA, 378 bp, Arabidopsis thaliana nossen
ctccttctcctcttcttcttcttccttattctactccattacgcttcttggtcgagacacgcactagataatgaccgaatctttcaccttcccggtgaaccaaacgatgtctccttctctcacttctctggttacattaccgtcaacgagtcagcaggaagagcactattctactggctcactgagtcaccaccgagtgaaaaccctgagtctaagcctcttgtcctctggctcaacggtggacctggttgttcctccgtagcttacggtgccgctgaagaaatcggaccttttagaatcaatcctgatggcaaaactctttaccacaatccttactcttggaacaaattggcgaatttgctcttccttgaatcttct

SEQ ID NO: 168162 - DNA, 379 bp, Arabidopsis thaliana nossen
ccgaatttgcagtaaggagacgaaaatatggtgcacgtttgctactaccgcaactatggaaagaccttcaagggaccacgtcgtccttacgagaaggagcgtcttgattctgaattgaagctggttggtgagtatggtctgcgtaacaagcgtgagctctggagagtgcagtactctcttagccgtatccgtaatgctgctagagatcttttgactcttgatgagaagagtccaagaaggatctttgaaggtgaggctttgctccgtaggatgaaccgttacgggcttcttgatgagagccagaacaagctcgattacgtcttggctttgactgttgagaactttcttgagcgtcgtcttcagactattgtgttcaagt

SEQ ID NO: 168163 - DNA, 375 bp, Arabidopsis thaliana nossen
atgaagtcttgtctagctacttttgctctcgcagtgttagtaacacaaggaagcatttttagtttgtgtggtggcgctcctctgcttctacaaactctgttcctaattggtttcatcattggccgccgtttaaatggggaccaaaatttccatattctccacctaaaccgccgccaatcgagaaatatcctccaccggtgcagtatccaccaccgatcaagaagtatccaccgccaccatacgagcatccaccggtgaagtatccaccaccgatcaagacttaccctcatccgccgttgaagtatcctccaccagaacagtatccaccgccgattaagaagtattctccaccagaacagtatccaccgcctatta

SEQ ID NO: 168164 - DNA, 372 bp, Arabidopsis thaliana nossen
gtgaaaagagtatgaacgttttgatttgtgttttaggtggatagtgcgaataaacatgggatacttctggaggttgttcaagttttgactgagcttaatctgactattaagaaagcttatatctcctctgatggtggctggtttatggatgttttcaatgttactgatcaagatgggaacaaagttaccgatgaaattgttcttgaatatatccgtaaagtaagtgaagtgatatgattgtctcttgttttctgtttgattttggttacttgactctttctgtggtgtgtgattgcagtctcttggtcctgatgagtcttcttgcttcagtccatcaatgagatcaaccattggggttaaacaatctgtcga

SEQ ID NO: 168165 - DNA, 376 bp, Arabidopsis thaliana nossen
cgcttcactgtgaattaatcgagagatcaaaatatccgccatggacagagcacaattgatcttgttaggtctacctatattcttattttgttcggatctcttcaacctcttcactcctccgcctcctaaacctcagcctcaccgtcctcatcagccaccgcatattcctcaccagcatcgtcctaatgcgatcatccccgaaaccctagactttccttcacagaagacaagtggcttaggaggagcaattggatatggaaatacagtagagatcaacttctgcgtctcctgttcttacaagggaactgcagtcaccatgaagaagatgttagagacggcttttccgggtttagatgtgattctcgcaaattaccca

SEQ ID NO: 168166 - DNA, 377 bp, Arabidopsis thaliana nossen
gcctcactaatcatatcatcagcctcattgaggccatgcaacattgagtgattttattgatgattcctcaatataacattgaaacaatgagtatcaacaacgcacttagtgttaggatacttagttgaaagattccttggaatatacatgcaaatgtcttcataatctattaataatgtggaaatttgcttatatattgttcgtatattcaattattttcagtaccaattactccgtgaagaaattgagaagttgaaggcagaggtaaaacacaattcatacttaaacttttttttgctttctctaaatgtaattacatatatatagagtcatcctgtatctcgttattaatacttcatataactgttccttgtcaa

SEQ ID NO: 168167 - DNA, 374 bp, Arabidopsis thaliana nossen
gcctcactaatcatatcattattctcattgaggccatgcaacacggggtgattttattgatttttggtgaatataacattgaaacaatgagtatcaacaacgcacttagtgttaggatacttagttgaaagattccttggaatatacatgcaaatgtcttcataatctattaataatgtggaaatttgcttatatattgttcgtatattcaattattttcagtaccaattactccgtgaagaaattgagaagttgaaggcagaggtaaaacacaattcatacttaaacttttttttgctttctctaaatgtaattacatatatatagagtcatcctgtatcttgttattaatacttcatataactgttccttgt

SEQ ID NO: 168168 - DNA, 374 bp, Arabidopsis thaliana nossen
ctcgctcaccgctctcatttcctcaattctccgtccgtcgaagaagcgaatcgctcgaaattagggtttctactgagagaagatgcgagaaatcataagcattcacatcggacaagctgggatccaggttggaaattcgtgttgggagctttactgtctcgaacatggaatccagccggacggaatgatgccgagtgatactacagttggtgttgcacacgatgcgttcaatactttctttagcgagactggtgctgggaagcatgtccctagggctgtcttcgttgatctcgagcctaccgttatcgacgaagttcgtactggtacttaccgtcaacttttccatccagagcagctcatttctgggaaagaag

SEQ ID NO: 168169 - DNA, 376 bp, Arabidopsis thaliana nossen
ttctcttcttcttcttcaagccgcggctaaagatccctacttctctcgacactgatagagtttcagtcatggccgcctccgcagaaatcgacgctgagattcaacagcagcttaccaatgaggttaagctcttcaaccgttggagctttgatgacgtttcggttacggatattagtcttgtggactacattggtgttcagccatcgaagcacgcaacttttgttccccatactgctggacgatactctgtgaagaggttcagaaaggcgcactgcccaattgttgagaggctcactaactctctcatgatgcacggaagaaacaatggtaagaagttgatggctgtcaggatcgtcaagcatgccatggagattat

SEQ ID NO: 168170 - DNA, 369 bp, Arabidopsis thaliana nossen
caagactataggattacattacctgtgtgcttaacataacttttagataggctagagaattgatctattacaagataatcaataatttacagaagaaaacattcttttttttgttctatttccttcatgtaggtatgtagctgtatattatactatcttgtattttcgatatcgtgctggaactgtcacagatgcaatgctctcggtgccaaaatctccatttttaattgttggcatcttagaggctctagctgcagctgctggcatggcagccgcaggtaacgttcatctttatgcaaatgtcttatattgtctagcaaaaatgccttcatctcttacgaatcagtcttattgtgttttcattttctt

SEQ ID NO: 168171 - DNA, 370 bp, Arabidopsis thaliana nossen
aaaaccctaaacgccgttgtctgatattgagagagagagagagagattaaaaacttcttctggttccttgtatcaacattttttctctctcttaaaacttcgaagcgatttttgatttacagactatggaaatggaatcattcatggacgaccttttgaacttctctgtaccggaagaggaagaagacgacgacgaacatacgcaaccaccgaggaatattactcgccggaaaactggattacggccaacagactccttcggtctctttaataccgacgaccttggagtggttgaagaagaggatttggaatggatttcaaacaaaaatgcttttccggtgattgaaacattcgtcggtgtattaccgtc

SEQ ID NO: 168172 - DNA, 381 bp, Arabidopsis thaliana nossen
ctcagagccacaccaacaacaatggcgtctctattcgcacacggtatctccaggttctctccacagccgggtggcgattcctcaaaatcaccaaatgggtttcacccaaaacccgcctccttaaaattcccatctaccaaatccctaaatccaaccagaccgatcttcaaagccagagccgatgtctgaatcgattctcgtcccatcggagcttctgaatcatcatcatcaggtacatcaaccgttagctcaactgataaacttcaacagtatttccaaaatctcgattacgataagaagtactgattcgatgaagatatcgattccttcacaatccctaaaggtttatctgaagagacgattcgcttgatttcgaaattg

SEQ ID NO: 168173 - DNA, 343 bp, Arabidopsis thaliana nossen
tttgcactcagtctagagacaaagagagagagagatggggtcaaagacggagatgatggagagagacgcaatggctacggtggctccctatgcgccggtcacttaccatcgccgtgctcgtgttgacttggatgatagacttcctaaaccttatatgccaagagcattgcaagcaccagacagagaacacccgtacggaacttcaggccataagaattaccggcttagtgttcttcaacagcatgtcttcttcttcgatatcgatgataatggcatcatttacccttgggagacctactctggactgcgaatgcttggtttcaatatcattgggtcgcttata

SEQ ID NO: 168174 - DNA, 374 bp, Arabidopsis thaliana nossen
gaactcgtcttctgctgaaaaccctagatctacagatctcccgaatctcgcagggagataatttgaagatggtgtctgacgctagcaagaagaaggcagctcagaagaaagctgctgccgccgctaaaagaggtggtaaagctgctgctccatccaaatccgccgctacttcttccaacggtgttgatagcttgtcaagcggtgtcgatgctcttcaaatttctgatcggacttgtaccggagttctctgttctcatcctcaatctagagatatccgaatagaatctctgtctgtgacgtttcatggttatgaccttattgttgattcaatgttggagcttaactatggaaggcgttatggtctccttgggttg

SEQ ID NO: 168175 - DNA, 374 bp, Arabidopsis thaliana nossen
atgagtcttttgacatgttgtcttcagtttactctctgatgctgtcttcacaaactaagtagggtttaagtgaatagttcttaaaagtttcttttatcatttgcagtttgttgttggattttgcatttcaatttcagcaccgaacaaggaaatattagctttatttgttagacattcgcttgtgcaagctcagcaggttctcctcttgtttgttgcaacttgtcgtctcacactgcccacgtactttcaaaggtccatcgagaacaatcaaattttataaagtctcctcatttagtaaatactaggattcaacctgcggttcaccgcggacatcagttttatgcgggtttctgttaagtatttaataatgtttt

SEQ ID NO: 168176 - DNA, 376 bp, Arabidopsis thaliana nossen
tcctccatttctctatctttctctctcgctgcttctcgaatcttctgtatcagggtcttcttcttcaagggagaaatggccgatggtgaggatattcagccacttgtctgtgacaatggaactggaatggtgaaggctggttttgctggtgatgatgccccgagagcagtgttcccaagtattgttggtcgtcctaggcacactggtgtcatggttggtatgggtcagaaagatgcttacgttggtgatgaagctcagtccaagagaggtatcctcactctgaagtatccaatcgaacatggtattgtaagtaactgggatgacatggaaaagatctggcatcacactttctacaatgagcttcgtgttgcccctg

SEQ ID NO: 168177 - DNA, 373 bp, Arabidopsis thaliana nossen
ggagctcttccacaaccacaacaaccttctcctatgatgcagcagcagatgcatccaagaggtcgaatgtgtcggtatcctcagcgagatgtaaacacaatgcctggtcctactcaaaacatgctttctgttccatatgacgtctcaagtggtggtggtgtgcatcatcgtgactcgcctacttctcaacctgttcctattgtagctttggctacacggcttgcgaatgcagctccagagcaacagagaacgatgcttggtgagaatctatacccgcttgtggagcagctggagccagaatccgcagctaaagtcacgggaatgcttcttgaaatggaccaaaccgaagtacttcacttgctggaatcaccag

SEQ ID NO: 168178 - DNA, 374 bp, Arabidopsis thaliana nossen
ctaaaaaaaaatctttctggtgagtaacgaaaaaaatgtgtccggtggagaacaaatggttaaaggtgggtcaaaaaggagctggtcctggggctagaagctcacatgccatgaccgtcgttgggaacaaagtttactgttttggtggtgagcttaagccaacgatccatattgataacgatctttacgttttcgatcttgagactcaagaatggtcgatagctcctgcgaccggagaggctcctttcccctgttttggtgtctcgatggtaacgatcggttcaacgatctatgtctacggtggccgtgacgataaacggagatacaacggtcttcattcgtatgatactgagaccaatgagtggaaattgttg

SEQ ID NO: 168179 - DNA, 375 bp, Arabidopsis thaliana nossen
gtgtggacaagcaggggctgatcaatttgttatgaaaaacccgaataacaggggtggtttgataattggtcagggaggtgaaacaatcaaatatatgcaagctaagactggagctagaattcacgttattcctttacatttgccccctggagacccaacgccagaacggactttgcagatggatgggataacctaacagattgaacatgctaaacaattagttaatgaaatcatcagtggcgaggtatgttcgattgctgtgtctgtttatagattatgacaggcttctgctgtgtctatttttatacatgaatttgatattgtgacgtgattacattataaagttgtcattagctatacgtctatctagtctac

SEQ ID NO: 168180 - DNA, 375 bp, Arabidopsis thaliana nossen
acaatctaatcccaaaaatcaaaagatgaatgccacaaagtttgttgtgcttctcgtgattggcgttttgtgtgccattgtcaccgcaaggcaggtcaaagatttgtccacggagaccaaattaggggcctctcttccaaaaactactaccaaaggcattggagctcagctttctgcaactggcacaacttacagcaccagcagtgtcgttagctatgctaatggttttaacaatcccaaaggtccaggggccaatgcattcgaaagtgccaacacatttaccagcggacaagtcactgccaagggtcgcaaggcaagagtttcttctacaagtgcttctgccgctgaaggcgatgctgcagctgcagtgactcg

SEQ ID NO: 168181 - DNA, 372 bp, Arabidopsis thaliana nossen
ctttctttctctctgatgaaaagctaacggaaaatggggaaatacatgggaaagagcaaaatttttggagctggagctggagctggtggtggaggtggaggtggaggtggaggtgaatcctctattgctctaatggatgttgattaaccttcttgctcttcttcactaggtgttttaactcgagctaaatatatagctcttcaacaacaacaacaacgctgtctttttaaaaaaccctcttgtccttcttcgttaccaccgacttgtgcttatactaatacaccgtcaaagcagaatatgaagaataagcagcagcagatgaacgattgtggttcgtatcttcagctacggagtcttcggcttcagaagaaa

SEQ ID NO: 168182 - DNA, 378 bp, Arabidopsis thaliana nossen
tgaacaacggtttaaaaaagagaagatggtacgcttccaaccatattctggccgacggtaaacaaatcgtcatgggaggtcaaggacaattcaactacgagttctttcccaaaacgacaaaccctaacgtagtcgcgttaccgtttttggccgagactcatgatcaaggacaagagaataatctttatccttttgtgtttatgaataccgatgggaatctatttatgttcgctaataacagagcgatattactcgactatgttaagaacacggtggtgaaaacttttccggcgattcccggtggtgatccgagaaactatccgagcactggctcagccgtgttattaccgttaaagaatcttgaagcggataatgtcg

SEQ ID NO: 168183 - DNA, 378 bp, Arabidopsis thaliana nossen
  unsure (1)..(378): unsure at all n locations
acatttttgagacaagagactctctctctctgtcttctccanancacggtgtggttctcgtgattggcgttttgtgtgccattgtcaccgcaaggcaggtcaaagatttgtccacggagaccaaattaggggcctctcttccaaaaactactaccaaaggcattggagctcagctttctgcaactggcacaacttacannnncngnagngtngnnagctttgctaatggttttaacaatcccaaaagttcaggggccaatgcattcgaaagtgccaacacatttaccagcggacaagtcactgccaagggtcgcaaggcaagagtttcttctacaagtgcttctgccgctgaaggcgatgctgcagctgcagtgactc

SEQ ID NO: 168184 - DNA, 358 bp, Arabidopsis thaliana nossen
aaattggtgaaaattattacttgtgtccaaagttactgcatttttagggtgtggttatatcatattcattgtaagagagttgctgaatcaccccaaaaggagttggattaaacaaatagtatatcaaggtccaatatttatttttctaaacatattatcacaagtgatttagacaagagagttaacgaccctaaagaatatattatgagatcacaagttccttgcaagagaagattacatgacagatcctaagtgtccagagatctgatccaccaagaatctaattgagtgtgcaatgaaacacactgctaagcatctgctcgttgctgattcagtcatcactagtaaaatcatgagg

SEQ ID NO: 168185 - DNA, 320 bp, Arabidopsis thaliana nossen
acttaccatccatggatgccttggatataaacgagaaaaatactatccaggcggtacctacgtattttggaggtgaggaggatgatgatattccagacatggaggagtttgatgaggctgacaatgtggtagaaaatgatccggcaactcttcagtcaacatatcttgtggctcatgaacctgatgacgataacattctccgaactcggacatatgatctcagcataacgtatgataagtattaccaaactcctcgtgtttggctgaccggttatgatgagtcaaagatgctgctgcaacctgaacttgtaatggaggat

SEQ ID NO: 168186 - DNA, 289 bp, Arabidopsis thaliana nossen
tcgcccagcgtcactatttcgcgataaacatgttatggcgagagttttacacatttgtcaagggaatcttaacttcatgcattcttttgtccaggatattaatcttgagtttcgaatacgctatgtagtaaactatggatcttaattagcatagcgacaatgcattagatgtttttttttattacattgttataaatcaagttggtaaactgaatgtttgaaacatgctgcgagaagcaaaagtacgggctcagacttaaaactgaaagctttggcaaaatatagcaat

SEQ ID NO: 168187 - DNA, 373 bp, Arabidopsis thaliana nossen
cggacgcgtgggtttaacttttgtacttgatcaattattttggaatattgttgatgttaatcatgattcatgattaatatgtgggctggataatcatgggtctctctatttttctagtctgtaaagtttgatcgaaactgagagcatattaaaatatttaaatcgagatatagaaataacttgtctcatatactactaatatcaaatgcctttgttcttattctacacacatctcaatcacttatgtggtgtatatgttgagcattgctaaatcttaaactattgttttccaaattaagcaataatgacaacaatcttaacataatttcacaagtacatgtaaattttcaactaaacaaacactaaaagtaaa

SEQ ID NO: 168188 - DNA, 377 bp, Arabidopsis thaliana nossen
ctggttttatacaaaccagtgacaacattgtttttggaggcaccattactcccatctcagcattcggaggcaaccaatttgagatcactgtatccatatggaaggttagtttgtttattatcaaaagaattttctatttatgtaacaaaatttacactttcaaataaatagttacatatcatttttaataaacaaattatgtaggatcaaaagcacagaaactggtggttgagtgtgggatccaacaattcattggttggatactggccagccgagattttcacaaatttagcttatggagacgaggcgcaatggggtggtgagatcgtgaactcacatagttgcggccgacatacgacaacccagatgggctccgg

SEQ ID NO: 168189 - DNA, 364 bp, Arabidopsis thaliana nossen
gtgagataccactctggttgagcaacatctgagaattgaaaacgcgcgggtcaaagatttgtggggccgagtctgagccttaaccggtaagtttcttggccggtctaatggttcacatcatataccggactcagcacttgttctcggcgttggtgttggttctggtggatgtaatgttggtggtggtttcactctctcttctccgctgttgcctcaagcttctcctagatttgagatttctaatggaaccggttctggtttggtggctacggttaaccgtcaacaaccggttagtgttagtgattttgatcagagatcgaggtatttggatttagctcttgcggctatggatgagcttgtgaag

SEQ ID NO: 168190 - DNA, 374 bp, Arabidopsis thaliana nossen
gtcaacacagatcagaatctgaggctttggccgagacgagagaagcagaagaagaaaatggcggagactgtacattctccgatcgttacttacgcatcgatgttatcgcttctcgccttctgtccacctttcgtcattctcctatggtacacaatggttcatcaggatggttctgttactcagacctttggcttcttttgggagaatggagttcaaggacttatcaacatatggccaagacccactttgattgcttggaaaattatattttgctatggagcatttgaagctattcttcagctgcttctgcctggtaaaagagttgagggtccaatatctccagccggaaaccgaccagtttacaaggccaatgg

SEQ ID NO: 168191 - DNA, 376 bp, Arabidopsis thaliana nossen
gaacgattcgataatgaggctcaatcattatcctccatgccaaacaccagatctcacgttaggtacaggacctcattgtgatccaagttctttgaccatccttcatcaagaccatgtcaatggccttcaagtctttgtcgacaatcaatggcaatccattcgtcccaatcccaaggctttcgttgtcaatattggtgacactttcatggctctatcgaacgggatattcaagagctgtttgcatagagcggttgtgaatagagagagcgcgagaaaatcgatggcgtttttcttgtgtccgaagaaagacaaagtggtgaaaccaccaagtgatattttggagaagatgaaaacaagaaaataccctgacttcact

SEQ ID NO: 168192 - DNA, 377 bp, Arabidopsis thaliana nossen
gtaaaacagtactaattatggaattgatcaacaacattgctaaagctcatgggggtgtatccgtatttggtggagtaggcgaacggactcgtgaaggaaatgatctttacatggaaatgaaagaatctggagtcattaatgaacaaaatcttgcggaatccaaagtggccctagtttatggtcagatgaatgaaccgccaggagctcgtatgagagttggtctgactgccttaactatggcagaatatttccgagatgttaatgagcaagacgtacttctatttatcgacaatatcttccgtttcgtacaagcaggatccgaggtatccgccttattgggtagaatgccttctgctgtgggttatcaacccaccctt

SEQ ID NO: 168193 - DNA, 120 bp, Arabidopsis thaliana nossen
accatatataccttttgagatttcttgaacggtagcgggaacaaccaaggcggaataagaatcttcggcaacatagaaagggttggaggaaaactcttgatgcttgcctagccactgcac

SEQ ID NO: 168194 - DNA, 372 bp, Arabidopsis thaliana nossen
atttgcactcagtctagagacaaagagagagagagatggggtcaaaggcggagatgatggagagaggcgcaatggctacggtggctccctatgcgccggtcacttaccatcgccgtgctcgtgttgacttggatgatagacttcctaaaccttatatgccaagagcattgcaagcaccagacagagaacacccgtacggaactccaggccataagaattacggacttagtgttcttcaacagcatgtctccttcttcgatatcgatgataatggcatcatttacccttgggagacctactctggactgcgaatgcttggtttcaatatcattgggtcgcttataatagccgctgttatcaacctgaccctta

SEQ ID NO: 168195 - DNA, 374 bp, Arabidopsis thaliana nossen
gaagaatagtttgatcatcttgtgagaaaaataatggctgcttcagtggtgctatcttcggtgacattgaaaccagctggtttcacggtggagaagacggcggctagaggattaccgtcgctcacaagagctcgtccctccttcaaaattgtcgccagtggcgtcaagaagatcaagaccgacaagcccttcggaattaacggcagcatggacttgagggacggcgtcgacgcttccggcagaaagggcaagggatacggtgtttacaagtacgtcgacaagtatggagctaacgtcgatggatacagtcctatttacaacgagaacgagtggtcagcgagtggtgacgtgtacaagggaggagtcaccggatt

SEQ ID NO: 168196 - DNA, 374 bp, Arabidopsis thaliana nossen
cttctacttatttcatcgtttcatttcttaggtttctgatttcatcacagcctgtggatttgatttttgattcggaggtatataaaaaaatgtttagtggggtttgcgattcgatgaactagggtttgtaatttcactatcttcttcttctcttcgatcgtttactcatcgggtgagaaggaagcgtctttcatgtgttcttccgtgtaatcgactgttttattgggcttagtagctctagtttggtcaaagaattcgtaacaagtgaatcttagattgggaagatgctagaaggagcaaagttcaacgtgcttgctgttgggaatcatcacaacaacgacaacaattactatgcttttacgcaagagttttat

SEQ ID NO: 168197 - DNA, 374 bp, Arabidopsis thaliana nossen
agaacaatggcttcctctatgctctcttccgctactatggttgcctctgcggctcaggccactatgggcgctcctttcaacggacttaagtcctccgctgccttcccagccacccgcaaggctaacaacgacattacttccatcacaagcaacggcggaagagttaactgcatgcaggtgtggcctccgattggaaagaagaagtttgagactctctcttaccttcctgaccttaccgattccgaattggctaaggaagttgactaccttatccgcaacaagtggattccttgtgttgaattcgagttggagcacggatttgtgtaccgtgagcacggtaactcacccggatactatgatggacggtactggac

SEQ ID NO: 168198 - DNA, 381 bp, Arabidopsis thaliana nossen
gaaagaccctgaaatcttgcccagccttattctgaagatctgtcgactgtgaagaatccaaggtcttgagtaagaattcaaggagcacagatgaaatttctgcggagaaagaagggtataactcaacaaggctgcttacaatcttccttatccttttattagaacctgaaaatcacaaaaataaccttatatgaccatacgaattaacagatatgcgaagttaaacacgaaaatgcaacccaaaattatttccatctctaaagctggaaaaataatctagtgcagccaaaaccaatgtatcatgtcattataaacttcatcgaggtaaacaagcaagacaccgatgggatcattcccatttttttgcttggtgatactact

SEQ ID NO: 168199 - DNA, 380 bp, Arabidopsis thaliana nossen
gtctgtatgacgaagctctctatgaggctgcaaaaataatctatgcgttgatatcaaactggggcttgttagccgtcacacttgtgaagttgcaacagttccaaggtgctgttgatgctgcaaggaaagcaaacagtgcaaagacatggaaggaagtctgctttgcttgcgttgatgctgaggaattccggttggctcaaatatgtggtcttaacattatcattcaggtggatgacctggaagaagtcagcgagtactaccagaacagagggtgcttcaatgaattaatctcacttatggagagtggacttgggcttgaacgtgctcacatgggtatcttcaccgagttgggtgtactctatgctagatatcgttatgag

SEQ ID NO: 168200 - DNA, 186 bp, Arabidopsis thaliana nossen
gacgagcagaacaatgtgtatagccgaccggagttgacgatgtttgtgtgaaagaaagattctggattcgatgtgattctattactctctagtcacctgtagttgttggtattttggctttattgcaaaggtttgctttgtataaaacacagaaacgtttcttttctttttctgataactagaaaa

SEQ ID NO: 168201 - DNA, 374 bp, Arabidopsis thaliana nossen
gatttcttggtcctccgcaggtacttgtggattccggggtacaagaagaggaacaccctttgctgcccaaaccgcagcaggaaatgctattcgagcagtagtggatcaaggtatgcaacgagctgaagtaaggataaaaggccctggactcggaagagatgcggcattacgagctattcgtagaagcggtatacttttaagtttcgtacgagatgtaacccctatgccacataatggttgtagaccccctaaaaaaagacgtgtatagaactaaaaaaaggctaaaagggtttcaagagaaataaacgattcaacgatctgatcaaataaaattactatggttcgagagaaagtcaaagtatctactcggacac

SEQ ID NO: 168202 - DNA, 314 bp, Arabidopsis thaliana nossen
gtcgttgataataatagaacactttctttctctctctaaaaagcaaaagtagggtagtcactgatttcttctaatcctccggtggagtgagagatgatatctccgacgttgtttcctctcctctgcgctttatttctatgtcttccagtggctgttatcttcacagtccagcgagaactcacctgcgttatctcgccggagtttggtttccgctctctttccgtcttctctctttactctcgaaatgtccccgactcttcttcttcttcttcggcggttcggattcgacagccgattcccaaagaagacgaccc

SEQ ID NO: 168203 - DNA, 378 bp, Arabidopsis thaliana nossen
ccaaaatatcattattttgatcaaactcaaggggactcaaatttcaaggccaaaggagctcatctactcaatctctcaaggaaaacatgttaaaatttatgcttcaacaagtgctagaaggataaaccaagagcaatttggacattaacaaagtgtatgaagtttaaaacgattatgtgaaatcaattgaataacaagtgtctcaagccgcatcaacatctaagagttcaatggttataccagataaacatgtcttagtctaatggatcattgcaatgaaatcttttgtggcaatgggaaagatcaagatttaagagttctgagaagttggaggaagtcgcttgtgaaaaagaagaagaatcatataggataaaccac

SEQ ID NO: 168204 - DNA, 375 bp, Arabidopsis thaliana nossen
gtgatgggttcgatgcttattgggattttttctctaaatgacatgaatttaacttcatgtggatctcatctctgaaaaatataagacattcgaacttgaatttccagatattcaaaaaaaaaaagaaagaagcaaagtcgacgacaaatagtgatgtcgtgattttggtcttgtttgtttgcctgtcgctagcgactgaaatcagtgacaataacaaaaagttgttcatttatttgttgctagattcaagtgtatgtggtcacttatctgcaaatcaaggttaagcttttatgactaaatcacaccttcaagtgatgaaaatgcgaaggtatcgacttataccaaagaccatataagtttacatattaacccaac

SEQ ID NO: 168205 - DNA, 376 bp, Arabidopsis thaliana nossen
gttcgattttgtttagatactaaagattttttttcgttcatgcttctgaaaggattcgacatatttttgtataggtatacctataggataaaaaggtaaaattttgagtaagttcttaagtataagttaataaggggacagccattttctagactccataataagtattcaaatgagtaagtgttttttcaatttcaaccattcctttcacgaagatacaattcaagattcaaaaatatcaagaaacctttttttcgtccaccaataaatatattcacagaattaaggaataacaactatgaaaataagggcttccgttcgtaaaatttgtgaaaagtgtcgactaatccgcaggaggggacgaattatagtaatt

SEQ ID NO: 168206 - DNA, 374 bp, Arabidopsis thaliana nossen
ttcagttctttcacttgtcttctgtcaaatagtcaacaaattttgaattataggatatattatttgtatttgatttgagcaacagttttagatcgccctgtttcaattttttttatagagtttttatcataattttgcatataatagaagtagtaattataaaaatattatatattaattatcaattgggtttttgctaaacggagcctggatacttcattttattagtccgatcacgtaaaccataaaaaaattttgataatctaatatcaatctaaatactccctgcatttaattccactttattttttgcgcttcgcgttacaaatttttgataattcaatcaatctttttgagcgaaacagaggatatct

SEQ ID NO: 168207 - DNA, 377 bp, Arabidopsis thaliana nossen
  unsure (1)..(377): unsure at all n locations
taaagatcaaagcttaagtgagtagcagaaaaaaatggcgaaatctcagatctggtttggttttgcgttactcgcgttgctactggnttcagccgtagctgacgatgtggttgttttgactgacgatagcttcgaaaaggaagttggtaaagataaaggagctctcgtcgagttttacgctccctggtgtggtcactgcaagaaacttgctccagagtatgaaaagctaggggcaagcttcaagaaggctaagtctgtgttgattgcaaaggttgattgtgatgagcaaaagagtgtctgtactaaatatggtgttagtggatacccaaccattcagtggtttcctaaaggatctcttgaacctcaaaagtatgagg

SEQ ID NO: 168208 - DNA, 374 bp, Arabidopsis thaliana nossen
cttgaatatcattcaaaaaagtttcgcattgtctagtattccaccaattagtaatccaagttttcaaacttttattacagcagagagagatcaaccagggcaaaaagactatagatagaaaataaaaaaaaggaatgaatgctttcttttttgccattttgaatctgtgagttgttaatgaacctacctcatttgttgattctattagatctaatatttctatcgagcatgtgtttctattctaattcgaatagaatatagtgagcctatgaatccattttatcttttgctgttgattcaatactgagtctttgctttgaatctagaaagaatacagaaacagactcagaatacacttccaacttgaatcaaga

SEQ ID NO: 168209 - DNA, 374 bp, Arabidopsis thaliana nossen
gcgggcgtttactctctctctctctcacattttctcattctctcctacaacgagtttccgccgctaagccactcactacgcagccatggcaaatcctgaccatgtttcagatgtgctacataatttgtcgattgatccaacaaccaaggctttagctcctgattctgaaacaaagggggcttatggcggaaacggtaatgacttcttgctcaatgatgagttagtggaggctaccaaaattggtaaacctagtcttttgtctaaagatggaggtgtgaccaaagacaagggatccaaccttaagaaactcgggtaccaaagtgcatcttataacgcaaagggttcatatgggaagggtgcctatgcttatgggt

SEQ ID NO: 168210 - DNA, 373 bp, Arabidopsis thaliana nossen
cttcagaaccaacaagacagcataggaaacatcgttcgtgttaagggacgtttccaggtcgtgaggccacctctaagacagccctacgagagcgaggagtggagacacccacgtagcccacagggcaacggccttgaggagactatctgcagcatgaggtcccacgagaacattgacgaccctgctcgtgctgacgtgtacaagcccagcctaggtcgcgtgaccagcgtcaacagctataccttgcccatcttggagtatgtcaggctcagtgccactcgtggcgttctccagggtaatgcgatggtgcttcctaaatacaacatgaacgctaacgagatcttgtactgcactggaggacaaggaaggatcc

SEQ ID NO: 168211 - DNA, 374 bp, Arabidopsis thaliana nossen
atttataacttccagaaatgtattttcagattcattgtgagttacagattgtaatgaattgggttccagattaatcaaattcatgcctttcatagatttacacatatattcaaaaaaggaaacagaacagaacaaaattatcatcgtttatccttatgtctacatttcctcaaacttaagactacaattcatctttggcagacccatcctttggtttcaactcttcgttgataaaaacagccatgtccttcgcgctcaatttcgttgatagctttaactgcaaatgaaaaatgggtaagatacacactacggacaaagcttataagcaaaaacagaagtaatgatgtctaaaagggcttgagctagtgagctct

SEQ ID NO: 168212 - DNA, 391 bp, Arabidopsis thaliana nossen
ctttatccattaaggtttgatcctctcacttaaattaggattatatatggctacatctgctagaagagcatatggattcgggagagctgacgaggcgactcacccggactccattagagccactttggctgagtttctttccacgttcgtcttcgtctttgctggagaaggctcaatcctcgctctagacaagttgtattgggacacggcggctcacacggggacaaacacgcctggagggttagttctggtggcgttagctcatgcattggccttgttcgcggctgtttctgcagccatcaatgtctctggtggccacgtcaaccccgctgtcacttttgctgctctaatcggaggcaggatctcggtcattcgagctatctactattgg

SEQ ID NO: 168213 - DNA, 383 bp, Arabidopsis thaliana nossen
aaaagcataagaataaagttaacatactctgtaacgccgaatatttccttgacgattaaggagttgtcttttgagcagaagtcaggaagctgttgaagagagaatggagttagaaaatctatcacacatcgaaaacattgtatgcatatttgacttcaggattagatcaacgaaaatgttgaaagagtaagcagattctctcaagtacaagtaatgtttccacattgattacctcagaaagatagtaaatctttccaaaaagcgcttgcacggcgagttttctcttgaatcctttttcggtaaagccttgcattttcatcactaccggacctgccaaaatcaaatatgtcaagagcaataaagaagagactgccacaatagag

SEQ ID NO: 168214 - DNA, 353 bp, Arabidopsis thaliana nossen
caatgataatagtggacgacgagtcggtgtcttagggtttactgtttgtaaagaaaattttcttgttgaattattggctttttgtgaattcgattttctcttatttttataaaacattattgaatttcaacgctattttgaaaattttatttttaatattcatgttgtattagaatctggaatgtcagaagaacgtgtgcaggaacaagaacttggggttggtgtaatagtttaaataaattcttacaaagaataagaaaaaaaatcaggttctctgcaccaaattttttaaatcattatttaacatattttgctaaattctctaaaaacaaatttgataatgatgaaaattc

SEQ ID NO: 168215 - DNA, 385 bp, Arabidopsis thaliana nossen
cacccgcgacaaagcaaaccctatataatacatcggcgagtgagacggcaactcctcatcagtaaagcctgccaccggcggcgagcactcagcctaaaatctctgaatcccactcatctctgaaacattctggtggtaattctggcctggcggagcatttggcttcaatctttggtgctgagaaagacagagagaatagccctttctacttcaagattggcgcttgccggcatggtgaccggagctcgcgtcttcacaaccgtcctaccatctccccaacactccttcttttaaacatgtaccaaaggcctgacatgattacccctggggtggacgctcaagggcaaccactcgacccgcgtaagattcaggagcactttgagga

SEQ ID NO: 168216 - DNA, 365 bp, Arabidopsis thaliana nossen
caattcatgaccagaactttacgggaaaggtagtggaagtggtgagtggggaggggctaatagttgcggatggtgctgttccatttgggagtccagcagcagagagacgggtctgtctttcgagtatcagatctccaaaaatgggcaacccacgtagagaagagaaaccagctccttatgctcgggaagcaagagaatttctgtgatcccgacttattggcaaacaggttattgttcaaatggaatattcaaggaaagtcacccaaggagatggtcctaccacatctggagctgctgataggttcatggattttggctcagtgttccttccatctgctgccaaagccgattctgatgaagtgact

SEQ ID NO: 168217 - DNA, 386 bp, Arabidopsis thaliana nossen
gtttttcacgtctgtctctacttgatttctgtttgtggtattagtattaccaaaagcttgaagagaaacaccaagcacttgaagctgaaaggatcgagctcgaacaaaggcaaaaggcaagaatctttttagtaactaaatcaataaaatgtattctgaaaatctaatataggaactcaattttgcaggaagaacaagaagcagctattaaacagcttcggaaaaaccttaagtttaaggctaatcctgttcctgacttctattaccaacgacctcccgtgaaaccagagctaaagaaggtattaaattgttttcaagaaaatttctcatatttgtaaggaattaagattatgtaacatatttcttgtgtgacaagcaaacttacg

SEQ ID NO: 168218 - DNA, 382 bp, Arabidopsis thaliana nossen
attattttcactgagcgcataacatttttgagacaagagactctctctgtctctcttctctctttctctccccctctctccggcgatggttgttgctatggaccaacgcaccaatgtgaacggagatcccggcgccggagaccggaagaaagaagaaaggtttgatccgagtgcacaaccaccgttcaagatcggagatataagggcggcgattcctaagcactgttgggttaagagtcctttgagatcaatgagttacgtcgtcagagacattatcgccgtcgcggctttggccatcgctgccgtgtatgttgatagctggttcctttggcctctttattgggccgcccaaggaacacttttctgggccatctttgttctc

SEQ ID NO: 168219 - DNA, 375 bp, Arabidopsis thaliana nossen
cgatggtgaagctctggagaaatttgtcaaagaatccagcattgcacttatcaccgtctttgacgaaagatccaaacaaccacccatatgttatcaagttctttgaaagcactaataccaaagcgatgttgttcattaacttcactggagaaggagctgagtctcttaaatcaaacctccgagaagatgctacatccaacatgggtcagggtcttagcttccttctaggtgatgctgagaacacccaatgttcattacagtactttcgactcgaagagagccaattttttctaattatcacccagactgctgacgacaagccatagctgtaaacaaatagggacgctgaccagactgaatcatgggtcaaggact

SEQ ID NO: 168220 - DNA, 156 bp, Arabidopsis thaliana nossen
cgaggcttaaatcaaaacgtttttctttttcttaataaagtatggtcaggttggaatcacgtccctttgccttgaacgtacgtgtaaaatatgtgtctgcggcacctcacttgtaataacactttcttctcataaataaaagggaagtttcgagtt

SEQ ID NO: 168221 - DNA, 384 bp, Arabidopsis thaliana nossen
aaaaccttgaaacctttaaaaaatcgaaactatggctaagctcattctcgttttcgcaactcttgccctcttcatcctcctagccaacgcatccatctaccgcacagtggtggagttcgaggaagatgatgacgtgagcaacccacaacaaggtaagtgccagagggagtttatgaagcatcagcaactaagaggttgcaagcaatggatccgcaagagagctcaacaaggaagaatcggatacgaagctgatgactttgagctcactcttgatgtcgatcttgaggacgatgagaacccaatggggcctcaacaacagtcatctcttaaaatgtgttgtaatgaattaaggcaagtggacaagatgtgtgtgtgtcctacact

SEQ ID NO: 168222 - DNA, 384 bp, Arabidopsis thaliana nossen
ctgaaaatggtcgcggacaagagcaagaagtcgaaaattgaagagaaaggcgaagaagaaaacttggagcaaatcgacgcagagcttgttctctcaattgagaagcttcaggagattcaagacgacctcgagaagattaacgaaaaggccagtgacgaggtcttggaagtagagcagaaatataacgtgatacggaaacctgtctatgacaagcgcaatgaagttatccaatcgattcctggcttttggatgactgcttttttgagtcatcctgccttaggcgacctcttgactgaagaagaccaaaagatttttaagtacttgaactctctggaagtggaggatgccaaagatgtgaaatctggatactctataacttttcac

SEQ ID NO: 168223 - DNA, 389 bp, Arabidopsis thaliana nossen
actaaacctgagagaaaaagccagaagaaccaaactcagaccgagagatagagattgagggagagctctagctctgtagaaaagaaggattcattcatcatatccagaaatggctctaaagtttaaccctttggtggcatctcagccttacaaattcccttcctcgactcgtccgccaacttcttctttcagatctcccaagttcctctgcctcgcttcttcttctccggctctcagctccggccccaaggaggttgagagtttgaagaaaccatttacgccacccagggaagtgcatgttcaagtcttgcactccatgccacctcaaaagatcgagatcttcaaatctatggaaaactgggccgaggagaaccttctgattcacctca

SEQ ID NO: 168224 - DNA, 388 bp, Arabidopsis thaliana nossen
tgcaaaggttggagttcaaacatcccagatggaaatgttgcctacagacacaaagaatttccagtgggagagttatttggaagatctttcttctctagatgacagctccacattcaccactcacggactcttggagcagataaatgtcacgcgtgacacaagcgattatctttggtacatgacgagtgttgatatcggtgacagtgaatcattcttgcatggaggagagctaccaactctcattattcaatctacaggccatgccgtgcatatatttgtcaatggacagctttcaagttctgcctttggaacaaggcaaaacaggagatttacttatcagggaaagatcaatctgcattctggaactaacagaattgcgttgctgagt

SEQ ID NO: 168225 - DNA, 287 bp, Arabidopsis thaliana nossen; identical to SEQ ID NO: 132008

SEQ ID NO: 168226 - DNA, 287 bp, Arabidopsis thaliana nossen
attaggtacaacttcatctttcgaggttgattagggtttttattcgaatctgttgtatagttctttaaattggtaatttatcttttattgtctccactttatggttatcttgacacattctcccatttacttgtcctaattttctttcatcgagcgtagggctttaatttgtccaagttgttattgaatttttaataagcaaagctcacatgtacgaaacactcaacgtgttacttcatgcacgttgccaaacagtacgatagaaaattgaaattcaccatccaaaa

SEQ ID NO: 168227 - DNA, 389 bp, Arabidopsis thaliana nossen
atttgcaagaacataatgttattcacactgtggcagtcttcagacaattgcaacaatgtattcgataccactagcaatcgcggctgcagcaaggttagagctttagtcacactatgcagtacataaatactgaagcatattttctgctcatgacaaggaatcatatggtttcatattcataagcggatgtttatttcttgtgcagcacaagaatctcaaatgaattaggtgctggaaactctcgagcagcacatatcgtggtctatgcggcaatgtctcttgcagttattgatgcattgatagttagtatgtctctactaatcggcaggaatcttttcgggcacattttcagcagtgacaaggaaactatcgactatgttgcaaagatg

SEQ ID NO: 168228 - DNA, 349 bp, Arabidopsis thaliana nossen
ctcgtttttttttgggcagtacattcgagtaaatacgattgaagaaatgatgcatttttaggtgatcgaatacattgtatacgatgcttccatacaaattttggtttgtttgttaggtgacaaatttcaagtgtggagggttcgtgcttggactaggcatgaaccacaatatgttcgatggtatggcacccatggagttcctcaactcttgggccgagacggctcgtggacttcctctctccgttccacctttgttggaccggacacttctccgaccacgaaccccaccaaagatcgaattcccacacaacgagttcgaggacctcgaagacatctccggcaccggaaa

SEQ ID NO: 168229 - DNA, 380 bp, Arabidopsis thaliana nossen
ctcgttttgaagggcaccatgcgtgcacacactgacatggtgacggcagtcgccaccccaatcgattacgcagacatcatcgtctcagcttcccgcgacaaatccatcattttgtggaaactcaccaaggacgacaaagcctacggtgtagctcagaggcgtctcactggtcactctcacttcgttgaggatgttgttctctcctccgatggacaattcgcgctttccggcagctgggacggcgagctccgtctttgggatcttgctgctggtgtctccactcgtagattcggtggacacaccaaggacgtgctctccgtcgacttctcactcgacaaccgtcagatcgtctctgcatctcgtgaccgtacgatcaagct

SEQ ID NO: 168230 - DNA, 261 bp, Arabidopsis thaliana nossen
gttcagatcttttgcttcaatgccatataccacaaggatattcttgctggcgatgtggccattcacgtgctgtgttatgttgggcatgtgggcttggtcaaagacttttcttttcagcttctataccctctggaacaatctttgtgagactcggggcgctgctagattcggatgccaatactcattaccggttgctacagacagaattaatgatcagattgaggctgcgattcttagagctgataagattggtgataaagt

SEQ ID NO: 168231 - DNA, 386 bp, Arabidopsis thaliana nossen
gttcagatcttttgcttcaatgccatataccacaaggatattcttgctaccgatgtggccattcacggtctgtgttatgttgggcatgtgggcttggtcaaagacttttcttttcagcttctataccctcaggaacaatctttgtcagacttggggcgttcctagattcggattccaatacttcttaccgtttgctacaaaaggaattaatgatcaaattgaggctgcgattcttagagctgataagattggtgttaaagttataagcttggctgctctcaacaagaacgaagctctaaatggtggtggaacactgtttgtcaacaagcatcctgaccttagagttcgtgtggttcatgggaacactttaactgcagcagtgattc

SEQ ID NO: 168232 - DNA, 265 bp, Arabidopsis thaliana nossen
atctttatctccagagtattgtttattgttggggtttttaatagggcgggcattgagtcgtggtcttactctcgactgctaaaattactatcaaacttttacaaataattttgaagattatcccaatattataccttaaaaaatctctagaaaaactccacctaaaaagtcggcgtatttactattaacataccacgtaaaccataagaaatctcccttacatatactctaaaccattgcaaatcaacttatcctctgtttcgaa

SEQ ID NO: 168233 - DNA, 386 bp, Arabidopsis thaliana nossen
caaatttcgaccgagttttgttgaattccgattagatctttcttgcacgaaacccccccaagtacccattccatcttctccggtgagtctcccatgttggcattacgctagggttcttcttctctgtggtttcgcataacccaataatccaattttctacttgggcatcaatgggtcgctctcgagggaacttccaaaatttcgaagaccctactcagagaacgaggaaaaagaaaaatgcggctaatgtggagaactttgagtctacttctttggtaccaggtgctgagggaggagggaagtataactgcgattattgccagaaagacattactggaaaaattaggataaagtgtgctgtctgtccagattttgatctctgtata

SEQ ID NO: 168234 - DNA, 354 bp, Arabidopsis thaliana nossen
gtctctcgaaagcctcttttcagaaccgaagctctttactttcgtccaccggggaatatgccagtcgacgtagcctcaccggccggaaaaaccgtctgcgtcaccggagctggtggatacatcgcttcttggattgttaagatacttctcgagagaggttacacagtcaaaggaaccgtacggaatccagatgatccgaagaacacacatttgagagaactagaaggaggaaaggagagactgattctgtgcaaagcagatcttcaagactacgaggctcttaaggcggcgattgatggttgcgacggcgtctttcacacggcttctcctgtcaccgacgatccggaacaaatg

SEQ ID NO: 168235 - DNA, 379 bp, Arabidopsis thaliana nossen
tttctctctctctcatccaaagacttcacgagtccccaaagaaaaaaaagaacctattcccaaagatgaagaacaataacaacaaatcttcttcttcttctagctatgattcttctttgtctccttcttcttcatcctcctcccaccagaactggctctctttctctctctccaacaacaacaacaacttcaattcttcctcaaaccctaatctcacttcctccacatcagatcatcatcatcctcacccttctcacctctctctctttcaagctttctccacttctccagtcgaacggcaagatgggtcaccgggagtttcacccagcgatgccacggcggttctttccgtttaccccggcgggcctaaacttgagaa

SEQ ID NO: 168236 - DNA, 346 bp, Arabidopsis thaliana nossen
atttccgtcttttccgctaggtttccgtctctgttttttcttgcattttgcccggaattccttcacattctcgccttttcctctttttaattcctcaccacctcaaattctccataaacaaatccacttctgcatggttgggagaatctgttagagaatttttgttgttgttgggttcagatttggaaaatttccttttttttcgagtttcttctgaattattcatcgtggagattctcggatcgggaagggctgcgagaggtggttttcacggcggggatagattcatcttctgtcttctcctgagggggtagccgaggctccggccttcccggtttttaaaccc

SEQ ID NO: 168237 - DNA, 391 bp, Arabidopsis thaliana nossen
cgaaaacgctagaacaataactttgatcgttcttcttcttctcttgaatcggaaacaatggcggatgaacataagcatgaagaatcttcacctaatttggatccagcagtggaggttgtagagagggaatcgttgatggagaagttatcggagaagatccatcacaaaggtgattcgtcgtcttcatcatcatcagatgacgaaaacgagaagaagtcttcgtcatcgtctccaaagtctttgaaatcgaaggtttatcgtttgttcggaagagagagacctgttcataaggttctcggcggcggaaaaccggcagatatatttatgtggaaggacaagaaaatgtcaggaggtgtatttggcggtgctacagtggcatgggtgctatttg

SEQ ID NO: 168238 - DNA, 388 bp, Arabidopsis thaliana nossen
gaaaagatgatttttcttctcatgtaatatacaaatacagtctactcactaattcttggtcttctggtatgaagatgaactctccgaggtgtttgtttggatccgcgagccttggagagattgctatattcgctggtggatgtgattcccagggaaagattcttgattttgcggaaatgtataattctgagcttcaaacttggataactcttccaaggatgaacaaaccgaggaagatgtgttcgggagtttttatggacgggaagttctatgtaattggaggaatcggtggtgctgattctaaaggcttgacctgcggtgaagaatatgatttggagaccaagaaatggactcaaatccctgacttgtcgcctccaagaagccgtgc

SEQ ID NO: 168239 - DNA, 303 bp, Arabidopsis thaliana nossen
gaattctaaaatcgtaaagttctaaagcgggttttcatcaattttcaagcaatcgagaaaaaagcaatggcgtcagacaaacaaaaggcggagagagccgaggttgcggcgaggctagcggctgaggacttgcatgacattaacaaatccggtggtgctgatgtcacaatgtataaggtgacggagagaacaactgaacatccaccggagcaagataggcccggtgtgataggatcagtgttcaaggctgtccaaggaacgtatgagcatgcgagagacgctgtagttggaaaaacccacgaa

SEQ ID NO: 168240 - DNA, 359 bp, Arabidopsis thaliana nossen
tcctcattctgtattttgacaaaaaaaaacaccctttgttttttctctgctttgcatgttgtgattgtgtttgcttcacaacatgggagttttagtaatctcgcttctcgtggttcatctcctagctttttccgtctgcgttcagggcggctaccgtcgtggcggacaccatcccggcggtcacatgggaccttggatcaacgctcatgccactttttacggcggcggtgatgcttccggcactatgggtggagcatgcgggtaccgcaatctgtatagccaaggttatggactggagacggcagcgctgagcacatcgttattcgaccaatgacttatttgtggcgcatgttttgagc

SEQ ID NO: 168241 - DNA, 376 bp, Arabidopsis thaliana nossen
atctttatctccagagaattgaatattgttggggtttttaatattttcgtcattgtgtcgtgttattactctcgtttgttaaaattactatcaaacttttacaagtaattttgaaggttattccaatattttaccttttaaaatctcttgtaaaatcctatttaaaatgtctgtttaaatccttttaaaataccttgtaaatctttcgttatgccacttacatatactttaaacgattgtaaatcaagttaaacacttttacaagcttttaacttgaatcttttaaaatgtcttgtaagtcgtttactaaaattactatcaaactttacaagtaattttaatagtaattccaataatttacctttttaaatatttt

SEQ ID NO: 168242 - DNA, 364 bp, Arabidopsis thaliana nossen
cgaaaaccctagtttcagaggcatctccagacaccgaaaatggcggaaggactcgttttgaagggcaccatgcgtgcacacactgacatggtgacggcaatcgccaccccaatcgataacgcagacatcatcgtctcagcttcccgcgacaaatccatcattttgtggaaactcaccaaggacgacaaagcctacggtgtagctcagaggcgtctcactggtcactctcacttcgttgaggatgttgttctctcctccgatggacaattcgcgctttccggcagctgggacggcgagctccgtctttgggatcttgctgctggtgtctccactcgtagattcgttggacacaccaaggacgtgc

SEQ ID NO: 168243 - DNA, 389 bp, Arabidopsis thaliana nossen
caaaaaccaaataattatccgttcatgattttacaaaaagtagattttgtaaaaaataggaaaaccagattttaggagtttttacttatttcttcatagaatctaaaaaccaagttttatgggtttttaaaacaatttacatgacattttttttaatttactattattgtttaattatgctatttttaccatttacaaattcatccaaagataaaatatacaatttaaaaacgtttaaaaattaagattacgtagaaaaactaaaaattaaacaaatttccattcatgattttgctaaaactaaaatctacaacaaaaataaaaaactacaaaaatcaaaaaccaaaaactaaaaaccaattaaaaactacaaaacattcaggacaaaa

SEQ ID NO: 168244 - DNA, 389 bp, Arabidopsis thaliana nossen
actcaaaagagcaaaaaaaagagaagaagaatcaaaatcccacacaatggcaacacactcttccttcaccgcaacaacacctctctttctcatcgttcttctatccctatcctccgtctcagttctcggcgcatctcaccaccacgcaacggcgccggctccgtctgtagactgttcgactctcatactcaacatggctgactgtttatccttcgtttcgagcggaggcacggtggcgaaaccggaaggtacatgttgctctggtcttaagacggagcttaaagctgactctcagtgtctatgtgaagcgtttaagagcagagcttctcttggagttactttgaatatcactaaggcttctactcttcccgccgcatgcaagcttcacg

SEQ ID NO: 168245 - DNA, 390 bp, Arabidopsis thaliana nossen
caactcgcgaacaaagcaaaccctagatcatccatcggcgagtgagacggcaggtcctcgtcggtaattccttccaccggcggcgaccactcaccctcagatctctcaatcccactcatctctgtaacattctggtggaaattctgccatggcggagcatttggcttcaatctttggtactgagaaagacagagtgaattgccctttctacttcaagattggcgcttgccgtcatggtgaccggtgctcgcgtcttcacaaccgtcctaccatctccccaacactccttctttcaaacatgtaccaaaggcctgacatgattacccctggtgttgacgctcatggccaaccactcgacccgcgtaagattcaggagcactttgaggattt

SEQ ID NO: 168246 - DNA, 378 bp, Arabidopsis thaliana nossen
ccaatatctatctcataaagattctgagttagatattggcccagtatttgcaagtgattttagtgtcaaagagatcccaaagatattaaaatgggaagactatatcgttcccacctccaaccaatggaaatggcaggtagcagtgtctgcattgtttgaagagcgacctgtgtggacaagagattccatagtccaacgactactcgataaaggtcttacatgcacacatcatatgttaaacaggtttcttcttagggctgcatattatttctcgggtggtccatttcttatgttctggattaaaagaggctatgatccacggaaagatcctgaatctcgtgtattccagagaatggaattcaaggttccacctgaatt

SEQ ID NO: 168247 - DNA, 374 bp, Arabidopsis thaliana nossen
tatttccatacgtttacatatttgcttacttttgtttttgttgattcatatttgcttacttgatgatcaagataaatatactttcacttcatatctatcaccaataaataaatgcattcaaaaaaaaagagggtgcttatagtcatgactcctctaaaactctttgttgtaagagttgatcatatttgtaatatatcactaatatttgataaattaaggaatggcaactattgctgtaaagataaaacgaatgaaaactatcaaacaaaaatatattttttttcaatcaattataactactaaataaaccatttaaatacctttgatcttttgaattaataagctaaaaattctagaaactagcacatcttaaa

SEQ ID NO: 168248 - DNA, 385 bp, Arabidopsis thaliana nossen
gttatggggacgattgcttctggttgtcctgagacttttgcagaagttgaaggatcatcaggaagaggaggaggaggagacccgggtcgacgttttgaggacatgcaccagaagttggagaatttccggcgaggggatgtgtttgcttcgcttgccggagtttcacagtggtggtacaaccgcggtgattccgatgccgtcattgtcattgttcttgatgtcaccaacagagaaaaccagcttgaccaagtccctaggatgttccaactagccgggagcagaacgcaagatgaagaacaaccattaacgtggccatcatgcaacaacgctttcagcggtttcgacccaaacataatcgcggaagcattcaaaatcaacatcgaga

SEQ ID NO: 168249 - DNA, 305 bp, Arabidopsis thaliana nossen
cattaatcatcatcttttcttcacagagaggaaaaaaaaaaaatggcgacagagtctcaaccaaaccaaaagctaacgcttccgttaaaaacaagaatcgctctcaccgttatctccaccatgaccgataacgctcaacgtcctgacggaactatcaaccgccggttcctgcgactcttctatttccgggctcctcccaatcctaaacccggcaacatcgtctccacctccgatttcgtcgaggatcaatcccgtgatctctggttccgattgtacactccacatgtctccggcgataaaatccc

SEQ ID NO: 168250 - DNA, 390 bp, Arabidopsis thaliana nossen
cttaaatctccggatttcgattcccgaggctcgaaaaaaccctaaatcgcttctccgttcactcatccaaccgaagatgcgtgagattcttcacatccagggtggtcaatgcggtaaccagatcggcgccaagttctgggaagtggtttgcgccgagcacggcatcgatccaaccggaaggtacaccggagactcagatctgcaacttgagcgcatcaacgtttactacaatgaagcgagttgcggtagattcgttcctcgtgcagtgctcatggatttggagcctgggactatggatagtctcagatctggaccgtacggtcagacctttcgacctgataacttcgtctttggtcaatccggtgctggtaacaactgggccaagggaca

SEQ ID NO: 168251 - DNA, 390 bp, Arabidopsis thaliana nossen
attttgttagaaattttggttctttagcaaataagtcaaatgatgcagataagaaaactccagcttgtaaagaagacaatttcaaggtaggagtgggcttcctcttactgggagactccatgaggcttcccaacgttctccatcggatagagaacagagatctcatgcataatttatcaatctttgttctgctatccgatggatgaagaaggcacagttgatgaggcccatcactaataataaagcatgtttcagatacaaaattttccgttaacttcctggtaaaatgcaggtttcatgacctacaatatacaaaaccatcgtggtttatactaatttcagaacggtgctcgaaattttttatcagcttggtcattgcaaagaagcgat

SEQ ID NO: 168252 - DNA, 390 bp, Arabidopsis thaliana nossen
taagcttcctcatgaactaaatgtctatcaggatatcttcaaagagttgtatttaagcaagtacagtggtaggaggttaatgtggcaaaattcattaggccactgtgttttaaaggcagatttctccaaaggtaaaaaggagctggctgtttccctgtttcaggctgttgtgttaatgttatttaacgatgcaatgaaacttagctttgaagacattaaagattccaccagcatagaggacaaggagctgaggaggactttgcagtcgcttgcttgtgggaaagtccgtgtcctgcagaagaatcctaagggaagagatgtagaagacggtgatgaatttgaatttaatgatgagtttgcagctccgctgtatcgcattaaggtaaatgc

SEQ ID NO: 168253 - DNA, 390 bp, Arabidopsis thaliana nossen
gaagaagaagatgattccgacgacgatcttactctcagctctcattttgtctcgatcaccgatctgtgaagctgtgtggcttactgtacctcacaccggatcaaagtgcgtctccgaagaaatccaaagcaacgtcatcgttttagctgattaccttgttatctccgaggaacattctatcttccctactgtctccgttaaggttacagcaccttatggcaccgtgttacaccacagggaaaatacaacaaacggtcagtttgcattcacaacccaagaatcaggaacttacttggcgtgttttgaggccgatgctaaaagtcatggtaacaaagattttagcatcaacatcgactggaaaactggaatcgcagctaaagattgggactc

SEQ ID NO: 168254 - DNA, 371 bp, Arabidopsis thaliana nossen
ccttgggttcaccttggagcctagtcccagcaaagttcccctacctttgtgttctgaagatcctgctgtgccaaccgaccctacaagtttgtctgaacggtctgcggcgtctcctatgctagattctggaattccacatgcagatgacgtgattgattcaagaaatattgtggacagtaacctcgaattagttccatatcagggtgacatatctgttgatgaaccttcatcagattcaaaagagcttgtcccacttccagagttggaagtcaaggcgcttgccatagttccgttgaaccagaaacctaagcgtactgagctagcccagaggagaactaagagacccttctctgtgacagaggtagaagctc

SEQ ID NO: 168255 - DNA, 388 bp, Arabidopsis thaliana nossen
agaaaatggttaagctcagcaatctcctcgttgcaaccttcggggttcggctcgtccttaacggctggcttgcgaggcagtcacttggggttcctcctcagctacagaacgagtgtaacctcgacaacctagatgttctccaagccaccgaaactatcaagagtgaagccggtcagatcgagtactgggaccacaaccaccctcagctccgatgtgttggtgtttccgttgctcgttatgtaattgaacaaggcggtctttacttgcccaccttcttcacttccccaaaaatttcctacgtcgttcaaggaacgggtatcagcggaagagtggtccctggatgtgccgagaccttcatggactcgcagccgatgcaaggacaacaaca

SEQ ID NO: 168256 - DNA, 392 bp, Arabidopsis thaliana nossen
cttccattgtttatagcaatatcacttaacctttcatctttctctggtgtaaaaaattgatcacctccagctacatcatcaaagaaagaccctaattcagggtcaccaagaaggtttctggcacgttttaacgcctcagctgacactgacaatgattttccaccagcagtctgaaactttgttggaggcacctttaaagatggatttaagacttcagatctcttcccagatacataatcctcatattgtcctggagttcctgaatgatgcttaactactgtagcatcaaactcctcatgagtttttaatccggaccacccatgttgctgggaggaagaagacgactggttcacatggttaaatccattcaaatcatcttcttctagtcctaa

SEQ ID NO: 168257 - DNA, 388 bp, Arabidopsis thaliana nossen
tcattattgattgctctaatcaggttccgacgagactaataatcctttgtcagggcgataacaatgtctcactgtgctggttctcaggctggtgctgtctcagtttcaattggaaacgaacgttctcttagaagatccgtcttcaagcagaacaatagcataagcttcaacaacaagtcatggtcatcttccttagcattgaaccagaaaacagcaagcataagagatgggaaacggtacacgaacacgacaatttgtatgtcggttcaacaaacaagtagttccaagggtactgtctctcctatagaggtggaagaccctaaagatcctcctttgaacttgtacaaacccaaggagtcgtacaccgctaagattgtctctgtggagc

SEQ ID NO: 168258 - DNA, 394 bp, Arabidopsis thaliana nossen
cgtccacataaaccacgtctcaccgtcgtcggagccgccatctacgacctgaatttcacagcgccgccgttaatctcaacctccgttcagttcagcgttttagcaagaaaccctaaccggagagtctccattcactacgacaagctctctatgtacgtaacgtacaaagatcagatcataacaccgccgcttccactaccaccgcttcgtttaggacataaatctacggttgtgatagctccggtgatgggaggcaacggtataccagtctcgccggaagtagctaatggtttaaaaaatgatgaagcttacggcgtcgttttgatgagagtggtgatttttgggaggctacgttggaaagctggtgcgattaagactggacggtatggatttt

SEQ ID NO: 168259 - DNA, 384 bp, Arabidopsis thaliana nossen
gagagagatggggtcaaagacggagatgatggagagagacgcaatggctacggtggctccctatgcgccggtcacttaccatcgccgtgctcgtgttgacttggatgatagacttcctaaaccttatatgccaagagcattgcaagcaccagacagagaacacccgtacggaactccaggccataagaattacggacttagtgttcttcaacagcatgtctccttcttcgatatcgatgataatggcatcatttacccttgggagacctactctggactgcgaatgcttggtttcaatatcattgggtcgcttataatagccgctgttatcaacctgacccttagctatgccactcttccggggtggttaccttcacctttctt

SEQ ID NO: 168260 - DNA, 384 bp, Arabidopsis thaliana nossen
ctcctctacgcgaaattcgtattctctcatttcttctacggagatttgcgatcgaagaaactgactcgcttgtggaatcaacaacaagacgatgtggcgctgcgtctctcgtggctttcgagctcctgcttcaaagacctcttcactctttgatggcgtctctggatctcgcttttccagattcttctccactggttctaccgatacgagatcctcttatacgatagtggatcacacttatgatgcggttgtggtgggagctggtggtgctggtcttagggcggcgattgggttatcggagcatggctttaacaccgcttgcattactaagcttttccccacaaggtcacatactgttgctgctcaaggtggtattaatgctgc

SEQ ID NO: 168261 - DNA, 388 bp, Arabidopsis thaliana nossen
aattcgttgaccatatttgatagaatcaagcgatgatgaatcttaaggttttggtcctcgctctccttctccttgcatctcctctgcttcaagttgctagatgtcaatcggatgccgaggatcattcaagtcttgttgacgatgttgtgggagaaaacactgatgatgcggttgaggaagatgaccatgatttggatatgaacttgtcctcatttccaggagttgagactgtttgtgttttccccaaaaacagtgccaaattggttccagctggagaagagactgagctccttgttggtcttaaaaatgaagggaaaactagagtaggtgtgatgggaattagggccagcgttcatcttccttatgatcataagttgttggttcagaa

SEQ ID NO: 168262 - DNA, 393 bp, Arabidopsis thaliana nossen
cggacgcgtgggaacagtattactatggaaaaaactttacctcgtgatctccttctccgcctttaaacggtggttgttaggaaaaacgcattgaagaagtgccgtgccatggatgttatagaggaactggaggtgggattaaggtaagtggaagaaacaataacaatagatcactgtcttgttcttctctcaagttctcaaccaagtgcgtcccaaccagtcttccaaaaaaatggaaggacttagagttggagtactccacattcttttatcaccacttcgtaacggttgacttcgaactcgaggaaaaactcgttggttttcacatccgcttcaagttcaaaggttagcaaatgctccgccaaaattggaggcacaacaaagccgtgtgca

SEQ ID NO: 168263 - DNA, 391 bp, Arabidopsis thaliana nossen
cacaaacacaatctaatccaaaaaatcaaaagatgaatgccacaaagtttgttgtgcttctcgtgattggcgttttgtgtgccattgtcaccgcaaggcaggtcaaagatttgtccacggagaccaaattaggggcctctcttccaaaaactactaccaaaggcattggagctcagctttctgcaactggcacaacttacagcaccagcagtgtcgttagctatgctaatggttttaacaatcccaaaggtccaggggccaattcattcgaaagtgccaacacatttaccagcggacaagtcactgccaagggtcgcaaggcaagagtttcttctgcaagtgcttctgccgctgaaggcgatgctgcagctgcagtgactcgcaaagctgg

SEQ ID NO: 168264 - DNA, 382 bp, Arabidopsis thaliana nossen
aaaacgctatggtgctaccgcaatggaacgtaaacgcaaacgcggcactctacgtgacaaacggaaaggctcatatacaaatggtgaacgacaacggagaaagagtgttcgaccaagagatctccagcggacagttactagtcgtgccacaaggcttttcggtcatgaaacatgccataggcgaacagttcgagtggatcgaattcaagacaaacgaaaacgcacaggtcaacacactcgcgggccgtacctcagtcatgagaggtttgccgcttgaggttataaccaatgggtaccagatctctcccgaagaagctaaacgagtaaagtttagcacgattgagaccacactgacccatagcagtccaatgagctacggaag

SEQ ID NO: 168265 - DNA, 337 bp, Arabidopsis thaliana nossen
atcgtattcggaggtgttgatccaaagcattttagaggagaacatacatttgttcctgtgacacaaaggggttactggcagttcgacatgggtgaggttctcattgccggtgaatctactggatattgtggaagtggttgttctgcgatagcagattctggaacatcgttacttgcgggtccaacagctgtggttgccatgataaataaagctattggagcatctggagttgctagccagcaatgcaagactgttgttgaccagtatggacaaaccattttggatttacttttggctgagactcaaccaaagaagatttgctcacaaattggtcttt

SEQ ID NO: 168266 - DNA, 386 bp, Arabidopsis thaliana nossen
ctggggtaacaaaatttcttcattggtttctggaaatctcggggaacgatttgttgggttttcttctttgtactctctcctcacattagcttttgttggtgggattgtttgaggatggtgattgctgcagctgtcatcgtgcctttgggccttctcttcttcatatctggtctcgctgtcaatctctttcaggcagtttgctatgtactcattcgaccactgtctaagaacacatacagaaaaattaaccgggtggttgcagaaaccttgtggttggagcttgtatggatagttgactggtgggctggagttaagatccaagtgtttgctgataatgagaccttcaatcgaatgggcaaagaacatgctcttgtcgtttgtaatca

SEQ ID NO: 168267 - DNA, 375 bp, Arabidopsis thaliana nossen
  unsure (1)..(375): unsure at all n locations
gaagaagaagatgattccgacgacgatcttactctcagctctcattttgtctctatcaccgatctgtgaagctgtgtggcttactgtacctcacaccggatcaaagtgcgtgtccgaagaaatccaaagcaacgtcatcgttttagctgattaccttgttatctccgaggaacattctatcttccctactgtctccgttaaggttacagcaccttatggcaccgtgttacaccacagggaaaatacaacaaacggtcagtttgcattcacaacccaagaatcaggaacttacttggcgtgttttgagggcgatgctaaaagtcatggtaccanagattttagcatcaacatcgactgggaaactgtattcgcagc

SEQ ID NO: 168268 - DNA, 396 bp, Arabidopsis thaliana nossen
tttacaatcgaaataatcaaataaatgattgtctttatttaggactacgatcaagaaccgaatgggcttttccaaaccaaaccgagatttgaattttatggtgcggattcggttaactggagaatagctatcaacaacaatttaaaatagatttagctagatcggtttggttcggttcgttttgtattctctgtcactcctcacaatcgcttatattttatattggatgtttaaaagtcaacattgaaatattgtacgttagtatgtcacttatcataatgtttattcgtaaacacaatttgaaaaggtcaaagaaagaggaaagatagttaatcaaacccttgttgtcaaaaataattattttatttactgtcatcgtaatgtttatcaatgcag

SEQ ID NO: 168269 - DNA, 349 bp, Arabidopsis thaliana nossen
gcagacatacgggtttatgccgtgtactaagaccgctcttggaaacgtgtttctgattttggtttatgggtttctcatgttcacggctgcgacgtatctctctgctggaagtgagctacttcttgagatccttggacctggaattgtcggtggtttgtttcttccgatgcttggtgctcttcctgacgctatgcttatcatggtgtctggactatctggagatgcagcaactgctcaaagccaagtctctgtgggaatgggtttgcttgctggttccactgttatgcttctcactgttatctggggaacttgtactgtggttggcaagtgtgatcttcgtgattcaatt

SEQ ID NO: 168270 - DNA, 389 bp, Arabidopsis thaliana nossen
aaatttgaaacgccgattcgtttttgctctttaagctttcttcttgatttcgacggtgtctctcaatctccgtcaagcttgacgaatttcaagagctatatataccatggcgctcttgtctcaagcaggaggatcatacactgttgttccttctggagtttgttcaaagactggaactaaagctgttgtttcgggtggcgtgaggaatttggatgttttgaggatgaaagaagcttttggtagctcctactctaggagtctatctaccaaatcaatgcttctccattctgttaagaggagtaagagagggcatcaattgattgttgcggcaagtcctccaacggaagaggctgtagttgcaactgagccgttgacgagagaggatctca

SEQ ID NO: 168271 - DNA, 380 bp, Arabidopsis thaliana nossen
gtttttgtctgctcaccaaatcaaaccaatttctcctgatagccaaagtttttgtccccaacaagaaactcatgcaacattcttcacccactagctaactaacgacttccattcttattaatctctctcaattcttcatttctgagattcatcgctctctcttctctttgtcacaatgaatttcaattcttcttacaatctcactttcaatgacgttttcttctcttcttcttcctccggtgaccctatggtttcacggaggctgtttctcttgagagatgttcagattcttgagctccttattgccattttcgtctttgtcgcaatacatgccttgcgtcagaagaaataccaaggtcttcccgtgtggccgtttcttg

SEQ ID NO: 168272 - DNA, 380 bp, Arabidopsis thaliana nossen
cacttttctgcgatatctctgagatttgttgacagtctctaaccatgggtaaagagaagtttcacatcaacattgtggtcattggccacgtcgattctggaaagtcgaccaccactgggcacttgatctacaagttgggtggtattgacaagcgtgtcattgagaggttcgagaaggaggctgctgagatgaacaagaggtccttcaagtacgcatgggttttggacaaacttaaagctgagcgtgagcgtggtatcaccattgacattgctctctggaagttcgagaccaccaagtactactgcactgtcattgatgctcctggtcatcgtgatttcatcaagaacatgatcactggtacctcccatgctgattgtgct

SEQ ID NO: 168273 - DNA, 348 bp, Arabidopsis thaliana nossen
ccaggacgctattgatgcagccatggttggaatgcttgctgatcctaaagaggcccgagctggaatcagagagggtcacttccttccattcaaccctgtggataagagaactgctttgacttacatcgactctgatggtaactggcacagagtcagcaaaggtgctcccgagcagatccttgaccttgccaatgccaggcctgaccttaggaagaaggtactctcttgtattgacaagtacgctgagcgcggtcttaggtcgttggcagtagctcgtcaggtggtacccgagaaaacaaaagaaagcccaagtggaccatgggaatttggtggcttgttgcctctttt

SEQ ID NO: 168274 - DNA, 374 bp, Arabidopsis thaliana nossen
cttgttcaccaaagagaagaagactaactgtgtttttttttttttctttcctcgatgcctagatcaagcagatgggtcaatcagcgagctacctctaagattaaaaaatttatactctttttgggtgtagcctttgtcttctacctctacagatacccttcttcgccatcgacggtggaacaatcatccacttccatctacaacatttccgttaaggatattgaagggaaagatgtgagtttgagcaagtttaccgggaaagtgcttcttatagtcaatgtagcctctaagtgtggtctaacacatggaaactacaaagaaatgaacattctgtatgccaagtacaaaactcaggggtttgagatcttagcatt

SEQ ID NO: 168275 - DNA, 386 bp, Arabidopsis thaliana nossen
gtctagtcactgatttcttctaatcctccggtggagtgagagatgatatctccgacgttgtttcctctgctctgcgctttatttctatgtcttccagtggctgttatcttcacagtccagcgagaactcacctgcgttatctcgccggagtttggtttccgctctctttccgtcttctctctttactctcgaaatgtccccgactcttcttcttcttctccggcggttcggattcgacagccgattcccaaagaagacgaccctcttcttcgactatcttctcgggttaacccgaatctacctcccggttcgacccggaaaatagcttttatgtacttaacgacgtcgcctcttccgttcgcgcctctttgggagatgttcttcga

SEQ ID NO: 168276 - DNA, 333 bp, Arabidopsis thaliana nossen
  unsure (1)..(333): unsure at all n locations
cgttcttaaatttctctccctaaatattccgagttcttgatttttgataacttcaggtcaaaatgggaggatactctagagcggttgcgttttccgtctttgtgtcgattctgctgtttttcactgcttattctaagagaaatgatggaacattcagagttggcctaaaaaaactgaagttggatcctaacaaccgactcgcaacacgctttggttccaagcaagaagaggccttgagatcttctttgcgttcgtacaacaacaatctttgggggtgattctggagatgctgatattgtnccgctcaagaattacttggatgctcagtactat

SEQ ID NO: 168277 - DNA, 394 bp, Arabidopsis thaliana nossen; identical to SEQ ID NO: 132010

SEQ ID NO: 168278 - DNA, 398 bp, Arabidopsis thaliana nossen
cagagagatagattttttttctgggggagaatctagcagaagaagcctactagggtttggtttcttgagtcacatagatcttcttctctatctgtctctcttggattcttcaatgttcactttcagtcattggaaaaaaagggactatgtaatctaactctttttgtacttgagagaagaagctgaagtacatttgttcatcatttggttttatagtattaataactgccaaactccagagctttaagatgtatgactctcaagttttgaaatctaaatacaacccatttctcagacgttcgcattctggaaagaaatttcagggcacagttaccatgtcagagggcagagaaacttgcgaagaatctacgagtggtgaatcttttccatatagattt

SEQ ID NO: 168279 - DNA, 344 bp, Arabidopsis thaliana nossen
gcgctcgcggatcttaaagtctacggtgtaccgtacattatctttgtgatgtggtcggatgctggcacgtatttgcatcatcatggtcacgatgagaagttgccttggtatataggcaacgaatggagttatctacgcggaggattaacaacaattgatagagattaccgaatctttaacaacattcatcacgacattggaactcacgtgatccatcatctcttgccacaaatgcctcactatcacttggtcgacgccacgaaagcagctaaacatgtgttggggagatactacagagaaccaaagacgtcaggagcaataccgatccacttggggggagtttg

SEQ ID NO: 168280 - DNA, 251 bp, Arabidopsis thaliana nossen
acttcatgttaattccagaacgatctgaaaaatattccataaatcaatggtatttaacaaatgcaaaggcattagtacgtaaaattaacctataaaaaaccagaggttatttattgtcttgatttttgatctgcgataacatctgctgagttttgagttatacaaaccactcaagtctcaacattgagattttttcaggtccatttggataaaacaataagttgaacccataaagatagtgcgcgtcaaaa

SEQ ID NO: 168281 - DNA, 394 bp, Arabidopsis thaliana nossen
tttcatcctctaaaaaaaaatctttctggtgagtaacgaaaaaaatgtgtccggtggagaacaaatggttaaaggtgggtcaaaaaggagctggtcctggggctagaagctcacatgccatgaccgtcgttgggaacaaagtttactgttttggtggtgagcttaagccaacgatccatattgataacgatctttacgttttcgatcttgagactcaagaatggtcgatagctcctgcgaccggagaggctcctttcccctgttttggtgtctcgatggtaacgatcggttcaacgatctatgtctacggtggccgtgacgataaacggagatacaacggtcttcattcgtatgatactgagaccaatgagtggaaattgttggctcctgttga

SEQ ID NO: 168282 - DNA, 390 bp, Arabidopsis thaliana nossen; identical to SEQ ID NO: 132011

SEQ ID NO: 168283 - DNA, 379 bp, Arabidopsis thaliana nossen
gatcttgcaaagaagatctgggcttttggacctgaaaccacagggcctaacatggttgtcgatatgtgtaagggagttcagtaccttaacgaaatcaaggattcagttgttgctggtttccagtgggcgtccaaggaaggtcctcttgctgaagagaacatgagaggtatctgttttgaggtctgtgatgtggtgcttcactctgatgccatccacagaggaggtggtcaggttatccccacagccagaagggtcatatatgcttcccagatcacggctaagcccagacttttggagccggtttacatggttgagatccaggcaccagagggagctcttggaggaatctacagtgtgctgaatcagaagcgtggacacg

SEQ ID NO: 168284 - DNA, 388 bp, Arabidopsis thaliana nossen
gtgagactcaaccatggcgtctttggctcagcaattctcgggattgaggtgttccccactctcttctggttctaggttatcgaggagagcttcgaagaactttccccagaacaaatctgcctctgtttctccgactattgtcgccgcggttgcaatgtctagcggtcaaacaaaggagcgtcttgagctgaagaagatgttcgaagatgcttatgaacgatgtagaacttctcctatggaaggtgttgctttcaccgtcgacgatttcgctgctgctattgaacaatacgacttcaattccgaaatcggcactagggtaaaaggaacagtgttcaagactgatgcaaatggtgcattagttgacatttctgcgaaggcatcggcttac

SEQ ID NO: 168285 - DNA, 368 bp, Arabidopsis thaliana nossen
  unsure (1)..(368): unsure at all n locations
caaagaagtcctctctaccagtttcaacgtgccggaagaattgctagggggattggttacgagatcaaaagaaattggtcaagggattatccgaagaatttctccagaccaaatcaaggaacttgctgagcacgctacatctccttcaaacaaacacaaagccaaaaaagaaaaggaggaagacaaagacctaagaacgttgtggnntntnnttnttgtntgggggggagtttccatcttttattntttaatttanaggtcatgccgtgcatatatgttgtaatggacagcttttaggttctgcctttggaacaaggcaaaacaggagatttacttatcagggaaagatcaatctgcattctggaact

SEQ ID NO: 168286 - DNA, 325 bp, Arabidopsis thaliana nossen
gtccaattttaaacgtgaacgacatgatggtaacgttagttacattggagtctcagttaaattcaaaacatttgattatttataacccacacacgcataatatccattttaaacgtgatttatacatgatgatgacattagttacatagtagtgttcgttaattacaaaaaaaaaaaaaattggacgtttttcttgtttagaactcacaagcgtatattgtccagtctaaatttataaaatagtggtgacattagttacataatagtctttcgtcaaaaacaattttttgaccacttttatcattcataattcacacactcatat

SEQ ID NO: 168287 - DNA, 398 bp, Arabidopsis thaliana nossen
gcttcatcggcgtcggcggcgacgacgtctccggcaacgttgaccaagcccgttggagttaatgtgggtaaaggaaaatgggcaccagagagttggaggacgaagaaagctttacagcaaccggactatccagatttagctgcgcttgaagctgtgctagagacgatcgaagcttttcctccgatcgtgttcgccggagaagctagattgcttgaggaacgattaggacaagcagcgatgggtgaagcgtttctgttacaaggaggagattgtgcagagagtttcaaagagtttaatgcgaataacattcgtgatactttcaggattcttcttcacatgggtgctgtgttgatgttcggaggtcaagtccctgttgttaatgttgggagaatggcggg

SEQ ID NO: 168288 - DNA, 330 bp, Arabidopsis thaliana nossen
ctctaacacaccagttgaaaaaaaaaacacagaccttcaaaagggaaaggaaaggtgtgttatgggttggaacatgaaaactgaatcatcagatttaccaaactcacctaagctttcttcaaagcttcacgtaactattccatcaccggtcaaaatcagacctgaaacatgtccgatctcatagccagcacctgctctttgctttgcttaccagctttacctacatctccctgagctaagaaagctctggtcatctcgtgattttcctcaatggacatcaaagccgattctcaaaccagctcttcaagctttggaaatcaggctcagatt

SEQ ID NO: 168289 - DNA, 374 bp, Arabidopsis thaliana nossen
caaaatcttaaaaactttctctcaattctctctaccgtgatgagagatggagatctttgttgagactctcaccggaaagacaatcaccctcgaggtggaaagctccgacaccatcgacaacgttaaggccaagatccaggataaggagggcattcctccggatcagcagaggcttattttcgccggcaagcagctagaggatggccgtacgttggctgattacaatatccagaaggaatccaccctccacttggtcctcaggctccgtggtggtatgcagattttcgttaaaaccctaacgggaaagacgattactcttgaggtggagagttctgacaccatcgacaacgtcaaggccaagatccaagacaaag

SEQ ID NO: 168290 - DNA, 382 bp, Arabidopsis thaliana nossen
cccacgcgtccgggaaaccaaaaacaaaaacaagagaatagggtgattggttagccgccagcttgacctctttatcatatatatcgtctctctactcaaatacagtgcaattagggaaaattgtttggcttctttttgttatatgattcttactattatgtttttaatcaagatgcagattatatatatagacaagtattccataccttttaatgaattcttccttatgcaaattcaagtgaaaaattatacttgatcttcaattccaaacacaagaacatgagagagtattgaaaggaaacaaaaatagaaggctggcaacaattgcagttgcatgcaagacttatcacttgttaggtcaaattaaagcattgaccagtga

SEQ ID NO: 168291 - DNA, 285 bp, Arabidopsis thaliana nossen
gggtcccccatgcagtcaagttcgtcaaagcatatcagcatgccgccaggacagcaatcttcgtctcagcaacaagatcacttactatcccagcaatcacaacagaacaaccgcaaaagaaaagggccttcctcttctggtcctgctaacagcacagggacaggaaacactgttggcccatccaactcacagccatcgactccgtcaacgcatacccctgttgatggagttgctatagctggtaacatgcaccatgtgaatagcatgccaaaagggccaatgatg

SEQ ID NO: 168292 - DNA, 283 bp, Arabidopsis thaliana nossen
  unsure (1)..(283): unsure at all n locations
aacttatcgaaatttttttaaaaagtatctaaccaaatgcaatagaaaacaaaatatgtgacgacaaatataaaaagtgtttttattaaagataacattaaagaaaacaaaaaggtatttaaagctaactaaaacacgtcattaaaaggcatgtaaatattgggaaattggatggccgtgacataaaattcctnaccaaaggaaaaaccggacaccgaatcttgttctcccaccgatcaccaccggagatatggaatcgccgattactcaaccccaaatggtt

SEQ ID NO: 168293 - DNA, 393 bp, Arabidopsis thaliana nossen
aacgaaacaatggatgcgttctcttccttcttcgattctcaacctggtggcagaagctggagctatggttctcttaaaaatttccgtcagatttctccagccgttcagaatcatcttaaacgggtttatttgaccttatgttgtgctcttgtggcgtctgcgtttggagcttacctccatgtgctctggaatatcggcggtattcttacaacgattggatgtattggaagtatgatttggctcctttcatgtcctccttatgaacaccaaaagagactttctctcttgtttgcgtctgctgttcttgaaggggcttctgttggccccttgatcaaagtggcaattgatgttgacccaagcatccttatcactgcatttgttggaactgcgata

SEQ ID NO: 168294 - DNA, 395 bp, Arabidopsis thaliana nossen
gtggtattagccagattgaaaattttgattgttctgaatttcctacgcgaattgcgggagagatcaaaagcttctcgactgaaggatgggttgctccaaaactttctaaaaggatggacaaattcatgctctatcttctcacagctggtaagaaagctttggctgatggtggggttactgatgaagtaatggcagagtttgacaaaaccaaatgtggagttttgattggctcggcaatgggaggaatgaaggtgttttacgatgctattgaagctctgagaatctcttacaagaagatgaatcctttttgggtaccttttgcgacaacaaacatggggtctgctatgcttgccatggatctgggatggatggggccaaactattctatttcaact

SEQ ID NO: 168295 - DNA, 368 bp, Arabidopsis thaliana nossen
caaagaaagagtttttttaactagcttagctcaaagtgtttgcttaagagaagaagaacatggcgtcttaccagaaccgtccaggaggtcaggccactgacgagtacggaaacccgatccagcagcagtatgacgagtacggaaatccgatgggaggaggaggatacggaactggtggtggtggaggagctacaggtggccaaggatacggaacaggtggccaagggtacggatcaggtggccaagggtacggaaccggtggccaaggatacggaaccgggaccgggactgaaggctttggaactggcggaggagctaggcaccacggccaagagcaactccacaaggaaagtggtggtggcttggga

SEQ ID NO: 168296 - DNA, 356 bp, Arabidopsis thaliana nossen
  unsure (1)..(356): unsure at all n locations
ccgnnccggaannccgggggcggccggcgcgtccgccaaaacgctagaacaataactttgatttttcttattcttctcttaaagcgnaagcgatgtcgtttgggcataggcatcaacaatcttcacctaatttgcatccagcagtggaggttgtagagagggaatcgttgatggacaagttatctgagaagatccatcacaaaggtgattcgtcgtcttcatcatcatcagatgacgaaaaccagaacaagtcttcgtcatcttcttcaaagtctttgaaatcgaaggtttatcgtttgttcggaagagagagacctgttcatatgttcttttcggcggaaaaccggcagatatat

SEQ ID NO: 168297 - DNA, 397 bp, Arabidopsis thaliana nossen
gctcaagggctttataacaatatggttttcagttagaataataatcgggggctgggtacaacgacattggttcattctagctaaagcacacatccttacgttgtcctgtaaaaatgcttcaaaccagaacattccaacaaaaatagagtctcgtctcttcttacggttagtacacagtaattgtttctattaattcaatggagttatgttcaacatatccactataccacatttggattcaaacccttatagtagaatatgttttttttttttttccaagtgcattcaacttgtccaaataataataatgtaaaaaaacaatttttaaattttttaaaatatatggatagtaaaaaaagagatctgagaatttacctttttttatggtagctgaaaa

SEQ ID NO: 168298 - DNA, 355 bp, Arabidopsis thaliana nossen
caaaggggacgtggagggtcccgaaacccaccccgttttgcaaaatgggggggtacgtaaaccgatcatcggaactattaacggttttgccatcaccgccgggtttgaactcgccttggcctgtgatattttggtcgcttctagaggagctaagttcatggatactcacgccaggtttgggatatttccttcatggggtttgtctcagaagctgtcgaggatcatcggagcaaacaaagctcgagaagttctttaacatcgatgccactcacagcagacgtggctgggaagttagggtttgtaaaccatgtggttgaagaaggagaagcgttaaagaaagctagagaaatcgcag

SEQ ID NO: 168299 - DNA, 388 bp, Arabidopsis thaliana nossen
ctcttttgattctttcttactctttagctagagaagatttagactgggttttgagtatttctcggaaaatttcgttttttttttttctgggagagtttccgagatctcggtggagtactttttttgacgacgaaccagtatggtttggtactcaagctgtagaatttcgtttctgggtctgcttattttgctagcttcgagctgggttttggatagatgcgaaggatttggtgaatttgggtttgaatttcatcatcgtttctccgatcaggttgttggggttttgcctggagatggtttacctaatcgagattcttctaagtattatagagtgatggctcatcgtgatcggttaattagaggtcgtcgacttgcaaatgaagatcaa

SEQ ID NO: 168300 - DNA, 362 bp, Arabidopsis thaliana nossen
ctaaaaccaaactattatactttcatgcttgacaaaaatagggtgtggaaaaagtatgggggccagattttagtagtttttacttattgctgaatagaatctaaaaaccaagttttactgtttttaaaacaaccacattacattggttctaattcactataattgcgtaattatgctagcttaaccatctacaaattcactcaatgatggaatatacaaaataaaaacgtgtaaaaatttagatttcttataataacttttacttacacagatttccatgttatgatcttgctaaaactaacctctacaacaaaaatttaaaactactaaaatcaaaaaccataactaaaaaccaattaaaa

SEQ ID NO: 168301 - DNA, 367 bp, Arabidopsis thaliana nossen
gttaatggtgaaagggacaccttacgataatgtagatgacttaggtgatagggaggatgatgctggaccgttgatctctgagaatgtgattggagtcgttcatgatcatttcataacgtttcatctagacatggatattgatggaccgatgaataattctttggttaaggttcatctagagaagcagagagttccaacaggaaaatcgccaaggaagagttacttgaaggtcaagaagtatatagccaagactgagaaagatgctcagatcaagttgagcctatatgacccatatgaattccacattgtgaacccgaaccggaaatctcgggtaggaaacccggctggttacaggatcataccgggt

SEQ ID NO: 168302 - DNA, 398 bp, Arabidopsis thaliana nossen
gagagatggggtcaaagacggagatgatggagagagacgcaatggctacggtgggtccctatgcgccggtcacttaccattgccgtgctcgtgttgacttggatgatagacttcctaaaccttatatgccaagagcattgcaagcaccagacagagaacacccgtacggaactccaggccataagaattacggacttagtgttcttcaacagcatgtctccttcttcgatatcgatgataatggcatcatttacccttgggagacctactctggactgcgaatgcttggtttcaatatcattgggtcgcttataatagccgctgttatcaacctgacccttagctatgccactcttccggggtgggtaccttcacctttcttccctatatacatacac

SEQ ID NO: 168303 - DNA, 384 bp, Arabidopsis thaliana nossen
attataagttatataatcatataatattttgtgttcgattagtgtaacaaaaatggggttagagaggaaagtgtacggtttggttatggtatctttggtacttatggctattgcaacgatgtgttgtgtccaagctacgatcgacgaagaagcggctaaggatgaatcatggactgattgggcaaaggagaagatcggtctcaagcacgaagacaacatccaacccactcacaccaccacgaccgttcaagacgacgcttggagagcgagtcaaaaagccgaggacgcaaaggaggcggctaaacgcaaagcagaggaagcggttggagccgcgaaggagaaagcgggttcggcatacgagacagctaaatcgaaagttgggga

SEQ ID NO: 168304 - DNA, 375 bp, Arabidopsis thaliana nossen
gaaaagtaaagtgaaagacgataaattctccatccttgagctatttcaaggttcaactagacaactatgatcttggttatataataaggaaccatgaagattaaaaattgagaatcggattagtacgatatctttggtgataagagtttatgtcctatattttaggagtttgtgtttatatcttgttgagttcattgtgaataaatactcattgtttgagaattaatgaaagcaagtcagttcaatatctaattctacagtataacattttacagcttgagaaagcggtgtgttcttgcggtttgaaatcgcttttctgtgagttatatcaatgttttgattagaatcttccgaggagatagtttaatctttcta

SEQ ID NO: 168305 - DNA, 397 bp, Arabidopsis thaliana nossen
ggaacaaacatctgtttcgtaagtttcagcaatgtacagtggaactgtgaagagggtatcaccactgcaagatattaaactgcgtgtgcagattacagtttctttggaaatggaggataatgatccgaataaagaatatttgtatgctaaaggcttaagtgattttgttacttggctaaatgctgataagaaaccgcttcacgatgtgctgggatttagaaaagagataaatggtaccaccataaacatcgcgcttcaatggtgcgtagatggatattcaaacaaaattctgggatacgccaatggcatccgcaccatggatggtggaacatacatagatggtgtgaaagcgtcaataacaagaaccctgaacagccttgtggagaagtcgaagctt

SEQ ID NO: 168306 - DNA, 397 bp, Arabidopsis thaliana nossen
  unsure (1)..(397): unsure at all n locations
tgtggatacagagccaattgatgcagaacatgactcaagagaggatagggaactacattaatgagatatgcgagcgcatgcctagtccaaatggagagtctgctgttgactgctcacaactttctaaaatgcctactgtttcattcaccattggaggcaaagtctttgatcttgctcccgaagagtacgtactgaagattggggaaggaccagtggcacaatgtattagcggctttaccgcacttgatatccctccacctcgtggacctctctggatacttggagatnngtttatgggaaaataccacactgtctttgacttcggaaacgagcaggttggcttcgcagaagccgtgtgaaaaatgtaacatcgatcttttgttgatatgtttttggg

SEQ ID NO: 168307 - DNA, 348 bp, Arabidopsis thaliana nossen
  unsure (1)..(348): unsure at all n locations
ggggcggcgcgacgcgtccgcattaatcatcatctcttctttacagagttgaaaaaaaaaaaancncgggagattgtcaacctttttagtttctagcnctnccannaaaaacaagaatcgctctcaccgttatctccaccatgaccgataacgctcaacgtcctgactgaactatcaaccgccgattccaccaactcttcgatttccgtgctcctcccaatcctaaacccgacaacatcgtctccacctccgatttcgtcgtggatcaataccacgatctctggttccgattgtacactccacatgttttctacgataaaaaccccgtcgttgttttcttccacggcg

SEQ ID NO: 168308 - DNA, 389 bp, Arabidopsis thaliana nossen
aatgtaactgacaatcgtggtgaagtggtcgaccgtggtagtgaacaaggagatcagttaacattgtcttttcagggccaagtctacgtttttgacagtgtcttgcctgagaaggttcaagctgtgcttctattattgggtggtcgtgaattacctcaggcagcccctcctggcctaggatcacctcatcagaacaacagagtatcgagtttacctggtactcctcaaaggtttagtattccgcagcgattagcttctttggtcagatttcgagagaaacggaaaggaaggaattttgataagaagattcggtatacagtccgcaaggaggtagctttgaggatgcaacgcaataaaggtcaattcacatctggcaagtcaaacaatga

SEQ ID NO: 168309 - DNA, 373 bp, Arabidopsis thaliana nossen
agcttcatcattaccaaatcatcaactcaatcggttctctcaaaaacagggtattctttttgctcgaaagtattgcggacatctgaatcatctctatctggtttgagggttacatttgatatctggagaaaggggtctctggaaacaaagagttcataattatcgatctcgatctatccatcttaatttatatataaaaacgctaatgagattatgatacattcaaaagcgtggaaaaaaaaaaacagcactagtaattcacttattttacgaagctaccctcggttacagcattgaagacgttcgtccaaactgcggaatcaacaaactcaaatcttctgtgtactaaaactgctccaagaggccattctta

SEQ ID NO: 168310 - DNA, 390 bp, Arabidopsis thaliana nossen
tctttataaagaaggcttgttactcaagttagggtttcaagatgacatgtttaagaagtttcctctccctaaggtcgtagttgataccctccaagaatctactaaaggactcctcaaatacgacactcccaaaatattatcgaaggataaaaacgcatggttaagagatgacgaattcgcacgtcaagccatagctggaatcaatccagtgaacattgagagagtcaagacttttccaccggtcagcaatcttgaccccaagatctacggtccacaacactccgctcttactgacgaccatatcattggtcacctcgacggattctccgtacaacaagcgttggaagagaatagattgtatatgttggattaccatgacatattcttacc

SEQ ID NO: 168311 - DNA, 395 bp, Arabidopsis thaliana nossen
gaaaaaaaaaagagtcgcccattttcttctcattttttttttgctcttggcgaagaaaccaaaaaaaaaaaaaaatgagagagatccttcatatccaaggcggtcaatgtggaaaccagatcggagcaaagttctgggaagtgatctgcgacgaacacggcattgatcacaccggtcaatacgtcggcgattctccgttacagcttgaacgtatcgatgtctatttcaacgaagctagcggtggaaagtacgttcctcgcgctgttcttatggatctggagcctggtaccatggattctctcagatctggtccgttcggtcagattttccgtcctgataacttcgtctttggtcaatctggtgccggaaataactgggcgaaaggtcattacacc

SEQ ID NO: 168312 - DNA, 398 bp, Arabidopsis thaliana nossen
aattgtgcttttttcgcctataatctctcggcccccaaatatctcactggccgtcgcaggcttttccgccggcaatttcttaccctatttcatcttccctctcctctgatatacccataaaaacacaaaaaaaacgaaaagataaaaactttggctttagttttgttgattttgtcattcgattcgatttctttttcttctttcaaattctagggttttcgatttggtttcagtctaataacgagaggggagggaagagtaactaaaaccccaaaaaaagtcaaaaaagtttcgaaaatccaaaaaaagataatggcgcaggttcaacttcagggtcagactccgaatggttcgaccgcggcggtcacttctgctccggcgacgtcaggtggagcaac

SEQ ID NO: 168313 - DNA, 393 bp, Arabidopsis thaliana nossen
ttacttcttcttcttcttcttcctcctcctctgttcgtcaatcgccggtctcggtgcttcattttccgtgagatcgattggtacaagtgttcatccaatggttggaggaggagttatccggcagcttcttagaaggaaacttcattcccaatcagtcgcaactccggtattgtcatggttgtcttcgaagaaagctaatgaagatgctgggtctgctggtttaagagcatttgctctcatgggtgctggtattaccggattattgagtttttctactgttgcatctgctgatgaggctgaacatggtctggagtgtcctaactacccttggccacatgagggcattctcagctcatatgaccatgcttcgatccgtcgtggtcaccaagttta

SEQ ID NO: 168314 - DNA, 398 bp, Arabidopsis thaliana nossen
atcggagaagatgaatggaaggtttgctgtggaagctccgaattcgcgaagcagatgtctacgtctggaccgttaacttctcaagaagcaatatatactgcaagagacatctggttcaaccaagttaatgtgacagattggcttgaagctttctctgctcatcctcagattgggaatactccttcaccttctatcaactccgattttgctcgtcggagcgtatcagaacagtcaaccgcctttgccacaacttctgcttctgctttacaggagcttgccgaatggaatgtactttacaaaaagaagtttggctttatcttcattatttgcgcttctggcaggactcacgctgagatgctccatgcgttaaaggaaaggtatgaaaataggccaatagt

SEQ ID NO: 168315 - DNA, 363 bp, Arabidopsis thaliana nossen
aaaacacacccaaatatgcattagcttttgttttctcttctgtgcgtcgtctcactctcatttctcctcttcttccatggcgccgaggcacgccagcgagaggcgccgtttccaaacgcctgccatttcagccaaatcaacagcctcgcgcccgctcaggcgacgaagttcgaagccggtcagatggaagtatgggaccacatgagccctgagctccgatgcgccggtgtaacggtggctcgcatcacccttcagcccaattccattttcttgcccgctttctttagcccacctgcccttgcttacgttgtccaaggagaaggagttatggggacgattgcttctggttgtcctgagactttt

SEQ ID NO: 168316 - DNA, 397 bp, Arabidopsis thaliana nossen
gtttgtatacctttcgacacatcaatgtcgggactcagattggaaggcgaggatcgtgattataacaggcggagccagcgggattggagccgacgccgctaggctgttcacggaccacggagctaaggtggttatagttgacgtacaagaagaactaggccaaaacgtcgcagttttgatcgggaaagacaaagctagtttttaccgttgcgatgtgacaaatgagacggaagtcgaggacgcagttaagttcaccgtcgaaaaacacggaaagctagacgttctgtttagcaacgccggagtcttggaaccactggaaagcttcctcgactttgacctcgaacggtttgaccgcataatggctgttaacgttcgcggtgcagctgcgtttatcaaa

SEQ ID NO: 168317 - DNA, 399 bp, Arabidopsis thaliana nossen
aaaaaaaattccaatggcttttgctactctaaccttccccaccactatggtttgctaggtattttcctttactttgaaaggccttgatataaaaaaatagaataactacaaaacgtagtaaatagaattggataaatagtgggttccatcgtttctatggttacttctaaaacggtgaggtcctctctatacaccggagctccttcttttaattaatcaatactattggtaacttgtacaattcacattctttggctctaccccatgaatattccagtaataggtctttcacaatgagatcccctttatacagtaacggtatttcattttgaaaattgattaggtcatttaccctgttagtccgttcttttctttcaagagtggaatcttttttctaaa

SEQ ID NO: 168318 - DNA, 386 bp, Arabidopsis thaliana nossen
aatttctcaaactctgaaatcgttctctcaaatctctcaatcgggatcaagatgcagatctttggtaagactctcaccggaaagactatcaccctcgaggtggaaagctctgacaccatcgacaacgttaaggccaagatccaggataaggaaggcattcctccggatcagcagaggcttattttcgccggaaaacagctagaggatggccgtacgttggctgattacaatatccagaaggaatccaccctccacttggttctcaggctccgtggtggtatgcagattttcgtcaagaccttaacgggaaagacgattactcttgaggtggagagttctgacaccatcgacaacgtcaaggccaagatccaagacaaggagggtat

SEQ ID NO: 168319 - DNA, 378 bp, Arabidopsis thaliana nossen
caaaatagtatttaatcaagttgttgagattatgataaataccagcactaagaagtacaagatcttgatctgaaagccctttttctctaaattttgatttcaaagtatttatggaatcttgaacatctggcaagttcttagcatgatcaacatttgcaatcagaccgtctctccgaccggttggaacttcataaaatggtccttttgcctaataagttaatatttaatatcaaaggatcttatttaacccaacacatatacatcgtacgtgtattaaaaaaaaagttctataaagaagtattaaagtgttacctcagcaatagcgtctctagcagcaagagcaacgatgtcagcgcaagacacaacgcccggacaaaa

SEQ ID NO: 168320 - DNA, 376 bp, Arabidopsis thaliana nossen
gggcaagttagccgtcacacttgtgaagttgcaacagttccaaggtgctgttgatgctgcaaggaaaggaaacagtgcaaagacatggaaggaagtctgctttgcttgcgttgatgctgaggaattccggttggctcaaatatgtggtcttaacattatcattcaggtggatgacctggaagaagtcagcgagtactaccagaacagagggtgcttcaatgaattaatctcacttatggagagtggacttgggcttgaacgtgctcacatgggtatcttcaccgagttgggtgtactctatgctagatatcgttatgagaaacttatggaacacatcaagttattttcaactcggctcaatattcccaagcttata

SEQ ID NO: 168321 - DNA, 345 bp, Arabidopsis thaliana nossen
atttcaagaaccctagttaataacgataatgggttcgagagttttggctgccttctttgttttcttaatcttcacggtcatcacattgcctcccacgatccaagcttgcactccttgtactcgtcctcatcctccggttccgaaacctccacaacacggcggtggtggaggtggtggtagcaagccgcctccacatcacggtggaaaaggtggtggtaaacccccaccccacggtggaaaaggtggaggaccgccgcatcatggtggaggaggaggaggaggagggaaatcaccgccggttgttagacctcctcccgtagtggtgaggccaccgccaatcataag

SEQ ID NO: 168322 - DNA, 398 bp, Arabidopsis thaliana nossen
aaaagaatcgttccacataactaaaggtgatgtggtaagaatcccttctggtgtcgccaactttatcaccaacactaaccagacggttcctctccgcctcgcccagatcaccgtccctgtcaacaatcccggcaactacaaggattacttccctgctgcatcccaatttcagcaatcctacttcaatgggtttaccaaagaagtcctctctaccagtttcaacgtgccggaagaattgctagggagattggttacgagatcaaaagaaattggtcaagggattatccgaagaatttctccagaccaaatcaaggaacttgctgagcacgctacatctccttcaaacaaacacaaagccaaaaaagaaaaggaggaagacaaagacctaagaacgttgt

SEQ ID NO: 168323 - DNA, 396 bp, Arabidopsis thaliana nossen
gtgacttatctgtcaacttttccactatcacccccaaaaaaccaaactgtgctttgcgtaaagttgccagagtacgattaacctcgggatttgaaatcactgcttatatacctggtattggccataatttacaagaacattctgtagtcttagtaagagggggaagggttaaggatttacccggtgtgagatatcacattgttcgaggaaccctagatgctgtcggagtaaaggatcgtcaacaagggcgttctagtgcgttgtagattcttatccaagacttgtatcatttgatgatgccatgtgaatcgctagaaacatgtgaagtgtatggctaacccaataacgaaagtttcgtaaggggactggagcaggctaccacgagacaaaagatct

SEQ ID NO: 168324 - DNA, 393 bp, Arabidopsis thaliana nossen
ggataaagttggatccctccatgaaaatcccatcgccaccaacagctacggcggttcttgctatgcatggtattaattcgcgaaggccaccactagcaacacccccaccatctaactatataaacaaggtatgtttgagtttagaccaattctgatttagctttaaaacaccaagcattttcttaaattactcagagcatcgttctaatgaccataccttcttgcctgcaggttgttgtaatgaatgagttatatcagcaacctgaagccaataactaaattatattatacgagtgtcaaaacatcaaagtataaagccaaagccaagatataaactcccacaacaagaaaagaacaagaagcaatattaactcacaacgggacaatcagctt

SEQ ID NO: 168325 - DNA, 93 bp, Arabidopsis thaliana nossen
gtgggaaaagggtattatacggactatacacctgaccagatcgttgaaagatatatggacttgctcaacaattcataaatttcaacgtaaaaa

SEQ ID NO: 168326 - DNA, 336 bp, Arabidopsis thaliana nossen
  unsure (1)..(336): unsure at all n locations
ctgatctattggcttttattatcaaactaagtatattaccaccacatttgaactagaagattgttatggaggaatntcttatgaagctgtcaaaaatgggagcttcaaataaactcactattcactacgctcggcaacttcactttgatcttgagtcatcctataactcgttcatggctgctttgtctaatgctggtaattaaccgatgtgccactagagactgatgagtgggccgttaatttagattagcttggctttatctatttatacagatggctttaagaacaaagatttttagttcatgacaatttgctacatatattttggggatgaat

SEQ ID NO: 168327 - DNA, 384 bp, Arabidopsis thaliana nossen
gcaatctccaaaagctgagatacacaacagaggaagtccacacctcttctttttcttttttcttttttagtctctatttagatttcttttgtcttgagcttgtttgtaattcttctagctgttagtcactctttgctctgtttcagtagctctctttgctccttgcatgaaacaaaacacgtttcatctatcagtcacaattttgagcaaacataacacaacaaggtcgaaacataagaacaaagacagaaaccatttaaacagacctttctctcctcattgctgctttcttgagcaaacacacaaaacccaacatttacaatgaacaagaatccaataaagagaccagctctggaccttcccttcacaattcccatattcttt

SEQ ID NO: 168328 - DNA, 324 bp, Arabidopsis thaliana nossen
  unsure (1)..(324): unsure at all n locations
acaacagaggaannccacggcacgagtttnacttttttggcttttggacncaactaaaataaccttatcacctcccaccaaaaacagcaatcctcctaactactaagacaccacatttcgctctaattacaactaactccccaccgcaccttacatgaaacaaaacacctttcatctatcacacacaaaattgagcaaacataacacaacaaggtccaaacataacaacaaacacataaaccctacaaacacacactactcttcccattgcttctttactaagcaaacacacaaaacccaacatttacaatgaacaaaaatcca

SEQ ID NO: 168329 - DNA, 269 bp, Arabidopsis thaliana nossen
  unsure (1)..(269): unsure at all n locations
aaatccaaacgncaccaaaaaggcaagtcaaacattcgttcaagaagaccaaattagacgcctgtcttccaaaaactactaccaaatgcattggagctcacttttttgaaactagcacaacttacagcacaaccagtgtacttagctatcctaatggttataacaattacaaaggttcaaggaccaattcattccaaagtgccaacacatttaccagaggacaagtcacttccaacgttccaaaagcaagagtatcttaatcaagagct

SEQ ID NO: 168330 - DNA, 298 bp, Arabidopsis thaliana nossen
gaaacccaaaccctcattccataaaatgttgtctcactctcaaaacccgtcctttgtcgccctcctagggcttgggtgtcaaagccacctcctatgcttgcgactgtacccctcctaaaccatcaccatcacctcacaaaccaccaaaacattcagacaaaccgactaaaccttcttccggcaaaccaccttaaccacccgcagtaaaaccacctactccaaaaccttccaccgtgaaaccccattctaaaccaccaaccgttaaaacccatgctaaaccaccaaccgtcaaacccca

SEQ ID NO: 168331 - DNA, 270 bp, Arabidopsis thaliana nossen
  unsure (1)..(270): unsure at all n locations
ctctggaaacaaaatttcttttttggtttcttgaaatcgcannnaacgggtcgtggggcattcttttgtgtacggtctccacacatcaacttttgttgatacgattgcttgaggattataatagctgcaactgtcatcaagcactttttgccttctcttcttcatatccggtctccatgtcaatctctctcaaccagtttgctatgtacttatttaaccactgtttaagaacacatacctaaaaattaaccgggtggttgcacaaacctt

SEQ ID NO: 168332 - DNA, 390 bp, Arabidopsis thaliana nossen
gtagacagtgttgtgcccaattacgtaaatgttgaagttacaaaaatagatgattttgaagatatttttacacaaaacccttagaaatatacattatactttcttttctctaaacagacacctataagatatgaaataccatttatttgtgtttagtcttcttatgtatatggtaagctatatctttcatatagtctaatcagtgcatgtccatcaataataccatgcatgagccttcctccaactattcacaacaggagctgaatattaaactggcaaattgatgttctaccatatatacctattatatcacaaccagcatagtctatagtggttttactatagctaatgtaattagtactaattaaagctagttgttagaaaaacatg

SEQ ID NO: 168333 - DNA, 383 bp, Arabidopsis thaliana nossen
gaccctctttgtccctcagtatcttgactcaagccttctcatggttattcgtcaaggtgaaggaacccttggagtgatatgcaaagacgaattcggagagaggaaactgaaagcaggagacatctactggattccggctggttctgtcttttatttacataacacaggcctaggtcaacgccttcatgtcatttgcagcattgatccaacgcagagtctcggcttcgaaaccttccaacctttctatataggtggagggccttcgtctgttctagctggatttgatcctcacactttaacttcagcattcaacgtttccctacctgagctgcaacaaatgatgatgagtcaattccgtggcccgattgtacacgtcaccgaag

SEQ ID NO: 168334 - DNA, 343 bp, Arabidopsis thaliana nossen
cactttcattctcacttgtgttcgtacgtaatgttcttgatgcgcaaaagaagaaattgagtttaaaggagaagtgtgagaaggaagtttcaggaagatgggtgaagaaaagaggagaatttcaggaagatcagtttcacttccatcgatagacatattactagacgagaaaccaggttggccatttcttaaaagagcaagtttaaggacaccacaacaagttcacaaatggcacacacgaaaagtctcagtggtcaattgggtcatgagcttacctgaacggtttccaaatcatcaacagactctaaactatgagacaagcttgattaagaaacaaatccag

SEQ ID NO: 168335 - DNA, 398 bp, Arabidopsis thaliana nossen
tctttattcgtcaaggtgaagcaacccttggagtgatatgcaaagacgaattcggagagaggaaactgaaagcaggagacatctactggattccggctggttctgtcttttatttacataacacaggcctaggtcaacgccttcatgtcatttgcagcattgatccaacgcagagtctcggcttcgaaaccttccaacctttctatataggtggagggccttcgtctgttctagctggatttgatcctcacactttaacttcagcattcaacgtttccctacctgagctgcaacaaatgatgatgagtcaattccgtggcccgattgtacacgtcaccgaagggccacaaccacaaccacaatcgacggtatggacccaatttttggggttgagaggg

SEQ ID NO: 168336 - DNA, 383 bp, Arabidopsis thaliana nossen
ctgatctctcggcttctcttaacaaactaagtatattgccaccagatttcgaggggaagattaagatgaaggaatggcttttgaggctgtcaaagatgggagcttcagatgaactcactgagcagcaggctcggcaacttcactttgatcttgagtcatcctataactcgttcatggctgctttgcctaatgctggtaattaaccgatgtgccactagagactgatgtgtgttcggtttattttgtttagtttggctttatgtagttataatgatggctttaggaacaaagatttttgtttcatgacaatttgctacatatattttggggatgaatggtcgtagacaaaacaagcttttccttttggtgtgtaaaagatgatg

SEQ ID NO: 168337 - DNA, 315 bp, Arabidopsis thaliana nossen
cagctctacagaaatctctcgcttttctttacaaactaagcatatagccaccagatttggcgtgtaatagggagaggaaggaatggctgcttctgctctcaaaactcggaccttcagatgaactcactgagcaccaggctcggcgacttcacttggatcttgcctcatcctataactcgaacatggttgctctgcctaatgctggtaattaacccatgtgccactagacactgatgtgcgttcggttgattatgtttaatctggctttatgtagttatcacgatgggtttaggaacaaacatttctgttttatga

SEQ ID NO: 168338 - DNA, 328 bp, Arabidopsis thaliana nossen
atcagatttgtaaaacattgttgctatgttattatatgagttgataaagaaaattactttagttcgacttcttgatgtttgttgcttcttctgctcactcattgaggttggagtgatgggttcttgacacttggcagctccacaagtatccatcggttgcttgtcttgagggattggagcaagagaattgcttgtgagatcaaatccaaacaacctatagctacaattcgttggaggaggaggagtctcgggtttgaagctgttgtttgaggagtatccacctgaaattctctcaagtgatggatcttgaaacagtttaagggatgca

SEQ ID NO: 168339 - DNA, 388 bp, Arabidopsis thaliana nossen
agaatctcttcttcaacttctcaccgataacgaaaaatccgcaagaatcatagctaaagaaggtaacgttggttacttagtaactcttcttgatctccatcaccatcctctaatccgtgagcacgcactcgccgccgtctcgctgttaacttcatcgagcgccgactcgagaaagacggtgttcgaacaaggcggattaggtccattactacgattgctagaaaccggatctccaccgttgaaaacaagagcagcaatagcgattgaagctataaccgccgatccagcaaccgcttgggctatctcagcttacggaggcgtaaccgtattaatcgaagcttgtagatcaggatctaaacaagtacaagaacacatcgctggtgctata

SEQ ID NO: 168340 - DNA, 392 bp, Arabidopsis thaliana nossen
agaatctcatttccaactgcttaccgttagcgaacaatacgcaagaatggtatgtaaagaaggtatcgggggtgggacattaacactgattgacctccatcaccataactataatacgtgagcacgcactcaccgccgtctcgctggtaactttatagagcgccaactacagaaagacaagtgtttcaacaacgcggattatgtccattactacgatagctagaaaccggatctccaccgctcaaaacaagagcagtcctagcgattgaagctataaccgccgatccaccaaccacttgtgctatctaagattacatgaggcgtaaccgtattaatcgaagcttgtagattaggatctaaacaagtgcaagaacacatctcctggtgctata

SEQ ID NO: 168341 - DNA, 375 bp, Arabidopsis thaliana nossen
ctctcaaagaaatttcttttttgttttttactttcttggtttgtcaaatatggtcagccatccaatggagaaagctgcaaatggtgcgtctgcgttggaaacgcagacgggtgagttagatcagccggaacggcttcgtaagatcatatcggtgtcgtccattgccgccggtgtacagttcggttgggctttacagttatctctgttgactccttacgtgcagctactcggaatcccacataaatgggcttctctgatttggctctgtggcccaatctccggtatgcttgttcagcctatcgtcggttaccacagtgaccgttgcacctcaagattcggccgtcgtcgtcccttcatcgtcgctggagctggttt

SEQ ID NO: 168342 - DNA, 385 bp, Arabidopsis thaliana nossen
atctccgtccttttttgttgatcgacggtggtgaatcttaaacatggcggctgcgaagctcgtctctttgttacttcttgccttgcttttcaccaccagcgtcttcgccgatgctgatgagccggaggtttctgaggctgccggatccgacggctcttccaagatccacctggatcagcttaatgccaagatccgtgccctagaatctcaaatcgatgagaaaacccgggaagttcaaggcaaagacgaggtagtagcagagaaagagaaactactcaaagaaagggaagacaagattgcttccttgcagactgaagtctcatcactacagaaaaagggatcatcagattctgcaaaacagttgggaaaggctcaagcacgagct

SEQ ID NO: 168343 - DNA, 374 bp, Arabidopsis thaliana nossen
caccacattattttcactgagcgcataacatttttgagacaagagactctctctctctctcttgtctctttctctccccctctctccggcgatggttgttgctatggaccaacgcaccaatgtgaacggagatcccggcgccggagaccggaagaaagaagaaaggtttgatccgagtgcacaaccaccgttcaagatcggagatataagggcggcgattcctaagcactgttgggttaagagtcctttgagatcaatgagttacgtcgtcagagacattatcgccgtcgcggctttggccatcgctgccgtgtatgttgatagctggttcctttggcctctttattgcgccgaccaaggaacacttttctggg

SEQ ID NO: 168344 - DNA, 253 bp, Arabidopsis thaliana nossen
acgggtctattctgtcatctgtatatataataaatatttatggacaaacactatttaaaacaagatccagtgtttggtgtcctaaaaagaacaacatccttttcaattagttcatttttgacttgttggagattctagaaccaagagacagttgagataatcgtgtaaaggtcaaatttagctctttacatatagatagtattattattattttttgctaaaaaaaacatatagtaatatattttaaataaaa

SEQ ID NO: 168345 - DNA, 384 bp, Arabidopsis thaliana nossen
cggacgcgtgggcatttgcctcgtcctatcaaaatgcggaagaaacaagatgtgaagagccgttcagtgaggaaataaatgtggccagaactcaaaacattacaacaataagcaaagacagacctaaagcaaatcaacaacaaaccaagactacagacatctacctagcagcaaagactaaccacaagtagcagaaaagactcagaaattgaatatcctaagaaagttgaaacctttcctcttaagaaaacacaatcgcacaaagaaactctaacaaaacgttgttttttctcttccagagagctaatagcgttttcagatgacgatgagactcaaaaaggagaagactttcgtcggaaattagaagaacttactaagtacaga

SEQ ID NO: 168346 - DNA, 379 bp, Arabidopsis thaliana nossen
ctcaaattacccaacttcttaaacacattcccatcacctcacaaaccattaaccgagagccaactagcgagtagaatcaactatcaagcaatggcatcgatgaccatgaccgctaccttcttcccggccgtcgccaaggttccctcagccaccggcggacgaaggctctccgtagtcagagcctccacgagcgacaacacacccagcttagaagtcaaggaacagagcagcaccacaatgaggagggacctcatgttcacggctgcagctgcagcggtttgttctttggctaaggtagccatggctgaagaagaagagcccaagcgagggacagaggcggccaagaagaaatacgcacaagtttgtgtcacaatgccta

SEQ ID NO: 168347 - DNA, 378 bp, Arabidopsis thaliana nossen
acggttttcggatatgaaactccaaacctgaggaaacttgctgacaaggttgcagaagctggattctacgcggtggttcctgatttcttccatggagatccttataatcccgagaaccaggatcgtccgtttcctatttggatgaaagatcatgaactagagaaagggtttgaggagtcaaagccaatagtggaggccttgaagaacaaaggcataactagtataggagcagcagggttctgttggggtgcaaaagttgcggtggaactagctaaggaaaagcttgttgacgctactgttttgttacatcctgctcgcgttacggtggatgatatcaaggaggtcaacattccaattgctgtattaggagctgaaatc

SEQ ID NO: 168348 - DNA, 312 bp, Arabidopsis thaliana nossen
acgcgtctattctgccatcagtatatataataaatatctgggctcaaacacggtcctatcgtcattctcaggatggacggtgaagatctctcggagtttgtccaccgccctggatatgaaatcgagagcatttctgttttctcagagctcttcagtagcaaggacgcatcgctccgtgattgtatcgtcaaagctctccaggctctttctgttgatcatggaatggctcctttcaacgacccatgggtgatgagcaacatcttataaccaaatgttgactcttgtcttgatgaacaaaataaaagagagaaa

SEQ ID NO: 168349 - DNA, 379 bp, Arabidopsis thaliana nossen
aacaaatacttttacgaaaaaagcttttaaaacttatctagtggggtttgatacacatttgaagaaagaaatggcatccaaccaacagagctacaaagctggtgagaccagaggcaaggcccaggagaagactggacaagctatgggaacgatgagggacaaggctgaggagggccgggacaagacttctcaaacggcccaaacagcccaacagaaggcccatgagacagcccagtcagctaaagataagacatctcaaactgcccaagcggctcagcagaaggcccatgaaacggcccagtcagcaaaagagaagacatctaaaactgcccaaacggcacagcaaaaggcccatgagacgacgcaagcagcaaaagaa

SEQ ID NO: 168350 - DNA, 376 bp, Arabidopsis thaliana nossen
aaaatcaagttcaaggcttttgatttgggtggtcatcagattgctcgtagggtttggaaagattactatgccaaggttgatgctgttgtctaccttgtggatgcttatgacaaagaaagatttgcagagtcaaaaagagagcttgatgctcttctctcggatgaagcccttgcaactgtcccgtttctgattcttgggaacaagattgatatcccttatgcagcttctgaagacgaactgaggtatcacttgggtctcactaacttcaccaccggtaagggcaaagtgacgctcggagactctggtgttcgcccacttgaggtcttcatgtgcagcattgtccgtaaaatgggttatggcgagggattcaaatggc

SEQ ID NO: 168351 - DNA, 348 bp, Arabidopsis thaliana nossen
gggtcggttcctcagtctgcaactacactgtcatcttatctgccggatgggtttccaatgcaagggcggtaattattgcctgaatcgatctcaataattataacattcttggcttcctgtcttaagacatcatcctactctttaaccattctctcatgcatatgaatagcaatccaattgtgtggcatcacttactcgtatacgaaggcaatctatacttactctatcaacttgacctaagcaactacacttttataggtcctttaacctatgtcatcctagcaccacattctctaatgacacactctcattgttacaatgactgagatagctcgtaggctataaatc

SEQ ID NO: 168352 - DNA, 375 bp, Arabidopsis thaliana nossen
tgatacttcatcagatgattgtacaaggaaagtaaactactagggtttagaaaggaaagccgggaaaaagaatcataaagaacttttttttttattggatcgggaatctcattatgtattcggtgtggataaaagatcttcctatgttatactattaaattcttgacgatgaatcgattttatagctccgatattgttattcatgatatttctttcattcgatatcatcgcaatctaattcatctgagtaagtttacaagcgaaagatttctcatctctatgggattaaatcccgagatattccaaagaaaaaaaaaataataataataaacgattaaattatggaagtaaatattcttgcatttattgctactg

SEQ ID NO: 168353 - DNA, 375 bp, Arabidopsis thaliana nossen
atctggtacttcgatccattgaatcgacgaagcatctttcgcgtttttagtcagagtcccgaatcttgatttctgcttctcgccgtaaaccaccggagaaccacctcttatcatctccggcaatcggaataccacttgttggtctggaatcactacgaaattctcagtgatcgcgaaatcgtggatcatcgttggttgatcaagcggaatctcgacgtctggtgatttctcaccgtcggatgtgaatctgaagtattttaagtaaggctttgaaacgacgtcgtagcttaaagcgaagagttctcgggtttcgggatcgattttcgggtgggctatcattgttgattttaactgaccgtcgaaatcgtaccgacc

SEQ ID NO: 168354 - DNA, 386 bp, Arabidopsis thaliana nossen
catcaacaaaacaataagaaaaaatggcaataaccaacaaattaatcatagcactgcttctccttatctggcgatagctgtcgtccactgcttatccttccgtgtggagatcgacgagttcgagccaccacagcaaggagaacaagaaggtccccgtcgccgtcctggtggtggctctggcgagggatgggaggaagagtcgacgaatcatccataccacttcaggaagcggagtttcagtgattggttccagtcaaaggaaggttttgtgagagtgctgcctaagttcacaaaacatgcaccggctctcttccgaggaatcgagaactacagattctcgttggtggagatggagccaacaactttctttgtgcctcaccatttgg

SEQ ID NO: 168355 - DNA, 379 bp, Arabidopsis thaliana nossen
acaaaacaaatgaaatttttgtggttgaaaacaatcgtcttccttttttgtggtgctttttattggtcatgaacatttgtttttaccccttgatcaatcaatgatgatcgaccttttataatttgtaccagaaaaggttttaaaatgagagacataatgataaatcactatgattacaaaaggtcgacagtaattactttttaaaaattataaaattgacagaaacgtgagatgtcaaatctgtgagattcatttactgaagagagtaaggttaagtttggattgcaatgagatttatacacaaataataatgcttacaagcaaatcatctttaagttttgtcctcttctcatgatgatgatactgttgcctccgacaa

SEQ ID NO: 168356 - DNA, 379 bp, Arabidopsis thaliana nossen
caggtaactagccatgagtcgagccctgtggctagatgtcgaagagtatgtgctcatgctcatgattatgatattaattcaatctcaaataacagcgacggcgaaacatttatttctgctgatgatttgcgaattaatctttggaatctggaaattagcaatcaaagtttcaatattgttgatgtcaagcctgcgaaaatggaagatctatctgaggttatcacatcagcagaatttcatcctacccattgcaatatgttagcctatagcagttcgaaaggttcaattcgcctgattgatctgcgccagtcagctttatgtgattcacattcaaaattgtttgaggaaccagagcaagcaggtcctaaatcgttcttta

SEQ ID NO: 168357 - DNA, 363 bp, Arabidopsis thaliana nossen
atcacttacaagatgagagtcccactaatagatttcttgagagtgcttaggactcattctttgtgttaggggtgcttcagttgctgcagatgcaacggggaaacaaaactttaataagtatgagactgatagtggtcacgcacattcgccaccaatttatggtgccccacccagctacacaacaccaccaccaccaatttacagtcctcccatatatgcaccaccaatacaaaaacctgcgacttatagtcctcccatatatccaccaccagtacaagtaccttcaacaccaacttatagcccttccataaaaccaccaccgggaccaggggcttccacaacaacttactcattaacttccca

SEQ ID NO: 168358 - DNA, 377 bp, Arabidopsis thaliana nossen
tcgtggtataccgcagttttcaagaaccattcccctgaagagatgaccggatagtcaaggctcgggaagagatcagtccatgtattgtcgagtttatctagatgaagctggactgcagctgatgagacaccatttgagtcttcaaagatatccgcttgaacaagaaaaggcgaccaaatgttggataccgtaaagttatacgaaggaaaatgccaacgcttcgatctatagttctcatcgtgatacacttctaccggtttttcaacctgaaacatcgaaaaaacaacatttgtcaatcacaaactcttattcttctcaagctgcaaatagctagcaagcaatagctaaaaaccttactgtagatagcatacaaagca

SEQ ID NO: 168359 - DNA, 374 bp, Arabidopsis thaliana nossen
ggttcgtccttcaagcgctcatgattcccctttcttcactacaaactcgggtgctcctgtctggaacaacaactcttctttgactgtcggaactcgaggtccaatccttctggaggactatcatctgcttgagaaactcgctaactttgacagggagcggattcctgagagggttgttcatgccaggggagccagtgctaagggtttctttgaagtcactcatgacattacccaacttacttctgctgattttcttcgaggacctggtgttcagactcctgttatcgttcgtttctcaactgtcatccatgagcgtggcagtcccgagactctcagagatccccgtggttttgctgttaagttttacaccagag

SEQ ID NO: 168360 - DNA, 376 bp, Arabidopsis thaliana nossen
ggaagaataaaacatttggggagtttcttcgctaatccttcaaggtgtgacctgagaatcacaacacaaaacaatctcactcgaaattcctttgactcatcatcatcaccatgtggagaagaatcgtctcctctcagctcaaaaccctagccgccgatgtcgtcgctgcttctcctcgtcgatcgatagccgccaccaccagacctgtcggtttctatctcgccgccaatcgatcagccatttccgcatcttctttcgttatccctcgtcgtttcagctccgattcagtagagactcctgcgacgaagaaggtggaggatgtaatgcccattgcgactggacacgagaaggaagagcttgaagctgaacttgaggg

SEQ ID NO: 168361 - DNA, 377 bp, Arabidopsis thaliana nossen
caacttttgactaaaaaaagcagctcatagcagcggttatgcctgtttgcgccgcgagttcgagctccgtaagctcaatcgctgaagaaccgccgccaaagaaacagcatgatccatcgccgtcctgttcatcgtatctgttactacttccagacgaaatcattctgaattgcttagcacgcttgccgaaatgttactacccggtgatttcactcgtctccaagacctttaggcgtctcatagcttcaccggagatctacgttgaaaggtcattacttcgccgcaccgagcgtgtcctttatgttgtgcttagatctcacgctacagaaactccccgatggtacactctcaatttcaaaccctttggaaatgattca

SEQ ID NO: 168362 - DNA, 405 bp, Arabidopsis thaliana nossen
cgaatcccgggggcggccgacccgtccggacaagtaaaatctagtctgattttttcactttctcttctttaccatggggtaggttattcttcatttgtaaaatcttctcacgagttgtattatacgctcccttcgatttatctttaaggctacccaattgcttctgtatctgatctccgtacttctcccacaactttggaaccgtcaagcccatcaccaaacctgtattagaaaatcaagaaacatgaatcacatctacttgaaaccatcttaaaaacacatagtcttatgtatttttaatgtagttctttcttcatgttaaaatatattgtacagtatagactatgatcttctgatgaaaatatgaatttatagcattaaaagcattctgactttattgcaatt

SEQ ID NO: 168363 - DNA, 411 bp, Arabidopsis thaliana nossen
ccggaacgcccggggccgcccaaccgtcccgtcaaaaagactctttttacgatcattttacctactcatccatgacgagggtcggttattcacactacagctgctttacatctatttcgtaagtgggtctttcaaagtcatctcctttgatctactttcattcaagggtcgctgatttggtgataagtcagtataaatggataaggactaaatctccagcaccttcttgtggagggcttccttctccatctccatcatgccgatgctatgcattctcagaaacttgtcccattggtcatggttcacatgctaatctaatgagtcatgatattagccgtatgcttgattacccacctaagaagattggacatcggcgagctcattctgaaatacttactctccctgacgatt

SEQ ID NO: 168364 - DNA, 377 bp, Arabidopsis thaliana nossen
ttcactagtgctgtccctaaaatgaaacctggttttgatcccactaaaggtggaagacctgattttatgttcgaagatggacagtatcctgaacaagttgattggattggacagaagaatcaaattgatgcagccaaggttgctggtgttaagcatattgtcgtggtcgggtcaatgggtggtaccaatccggatcatcctttgaacaaactgggaaatgggaatatactggtttggaagagaaaggctgaacagtaccttgctgattctggaactccttacacaattatcagagctggaggacttctagataaggaaggcggtgtacgagagctgctagttggtaaagacgatgagctacttcagacagacacgaa

SEQ ID NO: 168365 - DNA, 375 bp, Arabidopsis thaliana nossen
acaaaatatagatcgttcatatactctattgtgtctgaaacttgggggggacattggtgcagaggcaagcaactccattttttagaaaacccccaatgataacaaatgagtatccattaagcgggggaaattccattttttagaaaaaagattccactcttgaaagaaaagaacggactaacagggtaaatgacctaatcaattttcaaaatgaaataccgttactgtataaaggggatctcattgtgaaagacctattactggaatattcatggggtagagccaaagaatgtgaattgtacaagttaccaatagtattgattaattaaaagaaggagctccggtgtatagagaggacctcaccgttttagaagt

SEQ ID NO: 168366 - DNA, 371 bp, Arabidopsis thaliana nossen
  unsure (1)..(371): unsure at all n locations
tcaagatgtgaggaaacaacttctcagcattatggacaagtatagactgggcntcataactgctgtaaagaatttcacgaagataacgaaagcaatcacggcaggattcttcttccatggagcaagaaaagatccacaggaaggttacaggacgctggtggagaatcaaccggtgtatatacacccgagcagcgcgctgttccagagacaaccagactgggttatatatcatgatcttgtgatgactacgaaagagtacatgagggaagtgactgtgattgacccaaagtggcttgttgagttagctccaaggttcttcaaagtgtctgacccaacaaaaatgagcaagcgtaagcgccaagaacggattg

SEQ ID NO: 168367 - DNA, 375 bp, Arabidopsis thaliana nossen
aaagactctctttgctattactattcttagacaagatttctctgggggggttatctctttggttgtgactcttttgttgatcaagggtttgcattggatggctcaaaagagagtggagtatattgagactactccttctgtgactttgctctctcatgtccgtatagtttcttttatggttttcctccttatcttagattgtctccttacgtatagttctatacggcaattgattcagtcacgtaaagcttcaatgtcagtcttcttcacgtttgagtatatgattctggcaacaacaactgtttctattattgtgaagtatgccttctatgtcactgatatgctcaaggaaggtcaatgggaaggaaaaccagt

SEQ ID NO: 168368 - DNA, 376 bp, Arabidopsis thaliana nossen
gattcaaagcaaagactcagtattgaatcaacagcaaaagataaaatggggtcataggctcactatattctattcgaattagaatagaaacacatgctcgatagaaatattagatctaatagaatcaacaaatgaggtaggttcattaacaactcacagattcaaaatggcaaaaaagaaagcattcattccttttttttattttctatctatagtctttttgccctggttgatctctctctgctgtaataaaagtttgaaaacttggattactaattggtggaatactagacaatgcgaaacttttttgaatgatattcaagaaaaaagttttctagaaaaattcatacaattagaggaactattccagctcgat

SEQ ID NO: 168369 - DNA, 378 bp, Arabidopsis thaliana nossen
cagcctccaatgcttgatttagtctatcctggctaatcttggtggtctgttgaagttttttctctgtctcaccgattttcatttccagtgaactcaccatactctgtaagaagagcaattcagacaaaaaagatcaatcgtttttcagtaaagtttgtcatctgaagagatctgtgtagttagtattctcaaatcttaagtatttttgctcttctcctctaagtaagctacaagttcagaaattttcacaaaccttcagcttttcattttcattcgtgatcttatccattaattcctgatcaaccacaggaatctccttaataatcggggcaatctcagcaaccttcttggcagcttcacgttctttaataagcaatg

SEQ ID NO: 168370 - DNA, 382 bp, Arabidopsis thaliana nossen
acaccacatacttaaacagtttttatggcccgaccacgagaaaccttctgcggatgttcaacctttccgagtcccactcatagacctagccggtttcctctccggcgactcgtgcttggcatcggaggctactagactcgtctcaaaggctgcaaccgaaacatggcttcttcctaatcactaaccatggtgtcgatgagagcctcttgtctcgtgcctatctgcatatggactctttctttaaggccccggcttgtgagaagcagaaggctcagaggaagtggggtgagagctccggttacgctagtagtttcgtcgggagattctcctcaaagctcccgtggaaggagactctgtcgtttaagttctctcccgaggagaa

SEQ ID NO: 168371 - DNA, 379 bp, Arabidopsis thaliana nossen
agagaagcttgggaagcttagtgacattcagtgcacaccagaatctcaggtcagggttatcgcagaggctggggtccagatcattgaatgcagacgggtactgaaatggacatatgcatatggatactatctacaagatcatgctaagaaaccattttttgagtatttgcaaggggaggctgagtcaggtttggagaggctccacaaatgcgtagagaaggatatagaggtgtttgaacttgctgagggcccttcagaggaattcaatcatttccggacaaaattaactggtttaaccagcataacaaaaaccttctttgaaaatctggtgaaagctctggagaatggtcttgctgatgtggattcacaagctgctagc

SEQ ID NO: 168372 - DNA, 381 bp, Arabidopsis thaliana nossen
atcaaagtgaaatagagaacttcattctctttttttttcatttcatgccgattggcgttccaaaagtaccttttcgaagtcctggagaaggagatacatcttgggttgacatatacaaccgactttatcgagaaagattattttttttaggccaagaggttgataccgaaatctcgaatcaacttattagtcttatgatatatctcagtatagaaaaggataccaaagatctttatttgtttataaactctcctggtggatgggtaatatctggaatggctatttatgatactatgcaatttgtgcgacccgatgtacagacaatatgcatgggattggccgcttcaatagcatcctttatcctagtcggaggagcaatta

SEQ ID NO: 168373 - DNA, 378 bp, Arabidopsis thaliana nossen
gttgtcggacattttgttgggtatggctgctggtctgaaacgtgatccgatcggcgatcctcaggatgggcggggaggatctctcggagtttgtccacggccctggatatgaaatcgagagcatttctgttttctcagagctctccagtagcaaggacgcatcgctccgtgattgtatcgtcaaagctctccagtctctttctgttgatcatggaatgcctccttccaacgacccatgggtgatgagcaacatcgtagaaccaattgttgactcttgtcttgatgaagaagataaaagagagaaaagcgcgtctcatgagagattcttggaagcattcaagagagtcgtgaagagtgtggctcatcgtctcaatgaac

SEQ ID NO: 168374 - DNA, 406 bp, Arabidopsis thaliana nossen
  unsure (1)..(406): unsure at all n locations
tcgctcgaatcagcacaaagtaaggaagtagttgggctcctcgttagagttcttgatgtggttcacgtgttattacgtgtaggtcantccaatattctacagaggatgaacactaatccgtgaatatgaatccataataagaaaataccctattaaagccgatcacaagcaatacccagctacagtacgctattcacccaaagaggaatccttccagtagtatcagccatttatcccgcttccctccacatttaatcgagtggtcatgctagaaacataaacagtcagagataattattatatataatccatccgaatgggataataaaattactactctttattttttattttattattctacgctcttttcttaattgaagaaataattcgaaaataaaacagc

SEQ ID NO: 168375 - DNA, 380 bp, Arabidopsis thaliana nossen
acaaaacacacccaaatatgcataagcttttggtttctcttctctgcgtcgtctcacttttattgtgtcctcttcttccatggcgccgaggcacgccagcgagaggcgccgtttccaaacgcctgccatttcagccaaatcaacagcctcgcgcccgctcaggcgacgaagttcgaagccggtcagatggaagtatgggaccacatgagccctgagctccgatgcgccggtgtaacggtggctcgcatcacccttcagcccaattccattttcttgcccgctttctttagcccacctgcccttgcttacgttgtccaaggagaaggagttatggggacgattgcttctggttgtcctgagacttttgcagaagttgaagg

SEQ ID NO: 168376 - DNA, 380 bp, Arabidopsis thaliana nossen
atcgcaccttctgttgtatggcttaccatcaatgacctaaacccaacacgaagggtaattcgttttagttttgaaaacagagagaacaaaaaaagggttttagttttacctcaggagccatgtatccaagagtaccggtttctcctgtcatgtcttttggattaagagcttccactcgtgctactccaaaatccgctattttcaaattcttctgagcatccaaaagcatgttctctgttttcacatcgcggtggacaatcttctctgagtgcaaatagcttagcctgcagtaagaacaacaataagatgtttgtttgcacaaatctgaaaaagattagcagtgtcaaaagactaattaattaccctctggcgagatcaag

SEQ ID NO: 168377 - DNA, 378 bp, Arabidopsis thaliana nossen
  unsure (1)..(378): unsure at all n locations
caacccacgacttgtcacgtgctgactcatgtgcgtacnagcgtgaatggacaaaaattctttggggtgtgacatagggttaaccttacaagcgcgctagaatctgcccatgacgaacattcaagtctttcatgagtctatttcccgttcacgctcccgctccagatcaagatcatcagcatcttcttcttattcttatccaatttgattaattagagattgtatttgataatttggttatcttatacgaagtggactcattacaataacacatttaaattgtcaaatcaatgctcgaatgttgttacatcgcttaaatccaatatcagagatgttccttatttccatatgtacaagcgatattggtgaaatcattca

SEQ ID NO: 168378 - DNA, 369 bp, Arabidopsis thaliana nossen
gaatcttttagtatcctgagctttaggggaagtgagaagagtgcgatgggtggatatattttgcgtaagatggtaaatttagggtggagacccatctccactcaaacctcttcagttattgctgaagctggaaatgaagtccaagaagtagctcagtgtagcaaatcaagtgatgtttctaaggaagttattgaaggagagacagcttcagttgtttcagctggaaagcattcagtttctcttgaggttggggcttctttgattaagttcattagagggaaagaaggaacgacgcagatgaaacttgaagaggaaatgggagtgaagatcattcttccatcatcaaggaacaaagatcatatcagcatt

SEQ ID NO: 168379 - DNA, 370 bp, Arabidopsis thaliana nossen
ccagtctctcgcaatcttcgctcttctctttgctctctctctctgaacgcggtacatatccttgtttgggagattcaagctccctgaaaaaagccctttactctcgcttaccaactttgctccagcatggcaggatctgcaccagaaggcacacagtttgatgcacgtcagtttgaccagaaactcaatgaagtacttgagggacaagatgagttcttcacatcctatgatgatgttcatgagagctttgatgccatgggtcttcaagagaaccttctcaggggtatttatgcttatggttttgagaagccttctgctattcagcaaagaagaatcgcccccttctgtaacggtcttgatgtgattcaac

SEQ ID NO: 168380 - DNA, 373 bp, Arabidopsis thaliana nossen
acacattggttggtcacgacagctataacagcgcaatgggccatgggggaggtgatcaagaatgttttagggcaacaaaaagtgcaagaagagttcgacagagtgggttggacttgaccggatcttaaccgaggcagatttctcccgcttaccttacttgcaatgcgtggtgaaagagtcattcaggctgcatcctccaacgcctctaatgctaccttaccgaagcaacgcatatgtcaagatcggaggctatgatattcccaaaggatcaaacgttcatgtgaatgtgtgggctgcggctagagacccggctgtatggaaaaatccatttgagtttagaccagagagattcttggaagaagatgttgacatg

SEQ ID NO: 168381 - DNA, 382 bp, Arabidopsis thaliana nossen
  unsure (1)..(382): unsure at all n locations
gatttctcacattttcgcagccgtaagactcctttcagatncncacacgcgtcggtggataatgataagtttcacatnaacattgtggtcattggtcatgttgattctggaaaatcgaccacaactggtcacttgatctataagcttggtggtattgacaagcgtgtcatcgagaggttcgagaaggaggctgctgagatgaacaagaggtccttcaagtacgcatgggtgttggacaaacttaaggccgagcgtgagcgtggtattaccatcgatattgctctatggaagttcgagaccaccaagtactactgcacagtcattgatgccccaggacatcgtgatttcatcaagaacatgattactggtacctcccaggctg

SEQ ID NO: 168382 - DNA, 383 bp, Arabidopsis thaliana nossen
cgataagaagaagactggaatttttttgaggaggactctgctccatcgccgcccgccctgtatcctagcggactcagtaaactagtctgtaacacaatatcttctatttcagataagatttagcttggagaagagcaagttccgaaaatggaggggcgtcgtgtatagatccaccacccacagccctgatggaagcagacaacggaggccccaattctagtcatgcatccaaacaacgtctgcgttggacgcatgagctacatgaacgcttcgttgatgccgttgctcaacttggtggccctgatagagctacacccaaaggcgttcttagagtgatgggtgtacaaggcttaactatatatcatgtcaagagtcacttacag

SEQ ID NO: 168383 - DNA, 381 bp, Arabidopsis thaliana nossen
cgtcgggttgcgttaaaaatgttggtacctcgccgagtcactcatgggcgagcgccaaaatgttattgacccgtgaatctcaaccgttggccccagcgttagaaaacgaagatcctgttgacgactttgagtttctactcgaagatcccgtcacaatgctatccgccgacgagcttttctccgacggaaagcttgtcccgcttaagttttctggcgtaacttatccggaagagaagcctataacgtcggtggttcatacggcggtgaaaccatgccgaagattggaaatggagatctccggcgtcgtcgatccttatctcttctctccgagagctcctcgttgcaccgtgagatggcgtgagcttttaggtcttaagagac

SEQ ID NO: 168384 - DNA, 375 bp, Arabidopsis thaliana nossen
  unsure (1)..(375): unsure at all n locations
caactggtgtcgtggaaatacagttcaggtaccaactactttttggtggaccctttttcctgtttgattgttagnctttcatagatgagtaattgtctgataagctctaagtgttagtctggttcactaggcaatatgattagctaggcggtttgtagtagctgtgttaacagctcagcaacaatcttgttaatgtagtctctctgtgatgtgtaagttatttggtgaaatgaataaaagtgttcacggattcgattcctatgattgccactaagatgtactaatagaacatatgaattccataccaatatcaaacttgttgttgtggtgaatctacttgtaatgatccgttaccaaagatgaattcacaaatgg

SEQ ID NO: 168385 - DNA, 376 bp, Arabidopsis thaliana nossen
cagatctctccctccctctttctccgatctcagatccattcaacaggctgcaaagaagatggttccaggctcttcatggggtaacacctctctcgtctccgtagatccagagatccacgacttaatcgagaaggagaaacgtcggcaatgtcgaggaatcgaacttatcgcttccgagaatttcacttccttcgccgtcatcgaagctctcggaagtgccttaaccaacaaatactccgaaggtattcctggtaatcgttattacggaggtaacgaattcatcgatgagatcgagaatctttgccgttcaagagctctcgaagctttccattgtgatccagcagcgtggggcgttaatgttcagccgtattctgga

SEQ ID NO: 168386 - DNA, 375 bp, Arabidopsis thaliana nossen
acattttcgtagccgcaagacttctttcagattcttacttgcaggtatgggtaaagagaagttttacattaacattggggtcattggtcatgttgattctggaaaatcgaccacaactggtcacttgatctataagctcggtggtattgacaagcgtgtcatcgagaggttcgagaaggaggctgctgagatgaacaagaggtccttcaagtacgcatgggtgttggacaaacttaaggccgagcgtgagcgtggtattaccatcgatattgctctatggaagttcgagaccaccaagtactactgcacagacattgatgccccaggacatcgtgatttcatcaagaacatgattactggtacctcccacgctga

SEQ ID NO: 168387 - DNA, 377 bp, Arabidopsis thaliana nossen
  unsure (1)..(377): unsure at all n locations
aaacaacaatcactatgataaaatcttatattactaacttactcttagggccgagaaaaacaaagtttcttagtcaaaaacaatgtacaaaactagttntaagaccgacttcacaactacttttaagttcgtatctactagaaatacaatttattaataatcgacagcaaataaatcaaatccatctctaggcataactacacaatatatggaaaatgctacagaagtaaatacataaataatccaatgacaggtgacaagcctctatctcagtttcgaaatcaagatatgtatagcagcaataatttgtgcactaactttatactcacattataaaataatttcctaatgccatcctatactgcaccaatctattc

SEQ ID NO: 168388 - DNA, 373 bp, Arabidopsis thaliana nossen
gcaataatgagggtttctcaatctctaatcccttttgccataagggctgtggtcctttcctttgtcaatgcttatgatccaagtccactccaagacttctgtgttgccattgatgacctaaaaggcgtttttgtgaatggtaggttttgtaaagacccggagcgagtcgatgcaaaagattttttcttctcaggtctcaatgtgcccgggaacaccaataatcaagttggctctaatgtgaccactgttaatgttgatcagatccccgggctaaacaccatgggaatatcattggtccgcatagactacgcaccgcatggccaaaatccacctcacacgcaccctcgtggctcagagatccttgtccttgtcg

SEQ ID NO: 168389 - DNA, 378 bp, Arabidopsis thaliana nossen
tagaaattgactttttttttttctttcttatagagaaaatcaagggaaggtaaaaatgatttttttatggatttatactcaatcaaatgaatcactctttatttgactcgttagtccatgtctcgcctcactctcttaatctctatttcctctcacatctctcaaaaagtgtacgttttgtgacaaaaactgttttttaaagttagctataagaacatgaggaagatcatacggtttagaatccgcagacgagtctcaagatggatctttcgcaaaacccggatccaacgttcaggatacaaccggatacactcgacccagcaagcttgcatgctgatgacaccattatccaaactcaaaagttggggccaacgtctc

SEQ ID NO: 168390 - DNA, 382 bp, Arabidopsis thaliana nossen
  unsure (1)..(382): unsure at all n locations
gacacatttcataagaaaacattcaatcgagaaatggcaatgtctgnaagataggtggcggatgttctgtttaagggatcggcggagaaacactacaagaagtggaggaacgaaaaccacgtcttccaggatgccgtcggccaccacatccaaggttgcactatgcatgacggtgactgggactcccacggctccatcagatcatggaatatcacatgcgatggaaagccggaagtcttcaaggagaagagagagatagacgacgaaaagatggcgttgacgttgaaagggctagagggtcaagcgatggagaagtacaagaagtatgaggttatctaccagttcattcccaagtcgaaggaaggctgcgtctgcaaaatca

SEQ ID NO: 168391 - DNA, 355 bp, Arabidopsis thaliana nossen
acaaatattaaaataaaaagtgtcggtgaattctcaatctttgtcttctgtcggcggctctttaaaactgtctgcggccctccttattatgtaaccgtctcgccgtcaaattttcaaaatctctccctccgttcataaacccagatcgaaatttatggttttgtaatttttttaccggcggttatcgacacgggagcggcggtgacagcgacagttacggcggcgaccatggggattgggacgaggaagagagatctgaaaccgtataaaggaatacgaatgaggaaatgggggaaatgggtggcggagatacgggaaccgaataagagatcaaggatctggttaggttcttatg

SEQ ID NO: 168392 - DNA, 382 bp, Arabidopsis thaliana nossen
ttaactaacaacaaatggcgaacaagctcttcctcgtctgcgcagctctggccgtgtgtttcatcctcaccaacgcttccgtctatcgcacggttgtcgagttcgacgaagatgacgccagtaaccccataggcccaatacagaaatgtcagaaggagtttcagcaagaacagcacctaagagcttgccagagatggatgcgcaagcaaatgtggcaaggacgtggtggtggtccttccctcgacgatgagttcgatatggaagacgacatcgagaacccgcagagacgacagctactccagaagtgctgcagcgagcttcgccaagaagagccagtttgcgtttgccccaccttgagacaagctgccaaggccgttagatt

SEQ ID NO: 168393 - DNA, 382 bp, Arabidopsis thaliana nossen
ctcttacactgtttaacagatatgtctgaaacaaaaacgaaagggtaaggggaagtgtcttttttctacctattgtaagtaggtgaaagctcagaagattctttgtggtggtcccattgtgctcttgaggtacaaacacctgacattttgccagttcttcttcaatagcgagacgaggaagttgacgctcatctgcacattctgaaagatctgcttctcttccattgaaaggttaccaactgcaactcccatgcacagaaccttcttcagctggaacttcactgttgcctttgtttcattcacctttgactccaaggattcctggtggctcacaagagttgggaattttcctgtgtaaagtaaagcaaaggaatgttactta

SEQ ID NO: 168394 - DNA, 376 bp, Arabidopsis thaliana nossen
cggacgcgtgggcggactcgtgggcttgaacttggaggatcaagggccggcgttcgcacacactgtcaccagcttcaagtgcaccctcaacgccagcatgaaggaggcatcaaagtcctttatcctcagagtggcccttcttccactcaggtgctagccgtgtttgtcggtgtaccgataggaggaacgctgctgactatagccggtttgacattagccggttcggttataggactaatgctagcattcccgttgtttctcatctttagtccggttattgtaccagcagcctttgtcatcggtctagctatgactggattcctggcttcaggggccataggtctcaccggactatcatccatgtcgtgggtactca

SEQ ID NO: 168395 - DNA, 378 bp, Arabidopsis thaliana nossen
  unsure (1)..(378): unsure at all n locations
gctgcagaagataaaagcagaggatgatgccagtttgagttacagaagaggatgtanagaaggtgttatgtggatcttgttcaatgaacattgacggtactaacactgtcgcatgtcttaaacccataaacccaaacacgtcgaagcccaccataattactccattgcctcacatgtacgtcatcaaagacctagtcgtcgacctcactaatttttaccaacaatacaagtaagtgaagctagctaccttctttaatcccatataaagtttctcacactttcaacattatggatgtcgaacaagtatatatgatggtttcatgcaaaattgaggaaaagaaacataaaacttgatttaagtgaatacttgcagcatag

SEQ ID NO: 168396 - DNA, 379 bp, Arabidopsis thaliana nossen
gcagattcgtccacagtgatggaggagctgatttggttggctcccaaagcaggggcgagcttcttatgtgtaagtcggtacccccaagacttgctcaccacttcatgactcgctcttctctcccttctttttcacctaaaggtgttaacttgcagcaaaacgatgttcaaagagctgctgctgctttgatgataggagatgaattgcagaagcttggaagatggagacctgaaaggattgatctttctgctatggcttgtccagcttcaagacagatctatctgacattccctggccgacagtaggttcagggaggaagatgtgtccaattacttcagtacttttggaccagttcaagatgtgaggataccatatcagc

SEQ ID NO: 168397 - DNA, 376 bp, Arabidopsis thaliana nossen
gagagatcgtgagagagcagagaggaaacgtttctcttgttcgggggaggctccgtccctttttgttgatcgacggtggtgaatcttagacatggcggctgcgaagctcgtcgctttgttacttcttgccttgcttttcaccaccagcgtcttcgccgatgctgatgagccggaggtttctgaggctgccggatccgacggctcttccaagatccacctggatcagcttaatgccaagatccgtgccctagaatctcaaatcgatgagaaaacccgggaagttcagggcaaagacgaggtagtagcagagaaggagaaactactcaaagaaagggaagacaagattgcttccttgcagactgaagtctcatcacta

SEQ ID NO: 168398 - DNA, 377 bp, Arabidopsis thaliana nossen
caaaagttaaaagttacaccttactaaacacaaacaacttcataatggctgtccagttcctgcgactttgcttcttctcagctcttcttgccgtggttctccaactccttcatggcgtctctggccaactaggtgtgggtgaggaacctatttctgctcctccgcctccgctggtcgacctaaacaccggggatggcattgggcccggccctgtttgtcttcggtgactctctaatagacaatgggaataacaataacattccttcctttgccaaagccaattattttccttatggcattgatttcaatggcggtgcgaccggtcgattctgcaatggcttaacgatggtcgatgggattgctcaactattggggct

SEQ ID NO: 168399 - DNA, 378 bp, Arabidopsis thaliana nossen
cctcctttaggtgcataatgaaaataatatatgtaaaaatgtgatgtcggtatgagctaagcggtgctaatgtgtttacaagaaatccctagccaaccttcttgcaaaagatcttttcttactaccaagtgggttcatgctagataaaaataaaaaaggaaactctaaaaatttctttgttctcaacgcccctaagtttccaggaattagtcacttcaacagtcttcaatggttatacgggtatccaaaatacgaacgagatggatgtttattgttccaaccattttaattagtcccaatcccaacgaagaagaagaaagaaagggaatcatttttaagaaagttttcgtgttgttgatttctcggcgtagtgcttct

SEQ ID NO: 168400 - DNA, 373 bp, Arabidopsis thaliana nossen
gtgatgaataattgaaatcacttttgtatgttcatccttggtcaatttgaagcggacttgtgcgttcggaacaaggtttctatgcaaaaggctcaaaatggagttcaatacttcaattagtctcctgatctggtttttacatcaatactcaactaattcgtcttgattttgtaggaggtaaaattagcaaacattacgtaaaggcaattgaaatcaaaatcacaaacattaaggaaagaacatgagatgagacgagttgatgaattcttcccttaaccttttaaatcaccccgtagtgtaacagtttctgtgtgatttaaggatctcaggatacaacctctataaactgattttgcatcactcgaaactcaac

SEQ ID NO: 168401 - DNA, 357 bp, Arabidopsis thaliana nossen
ggcttataattcacctgagaaaaacaatatcaatcggctcgttaactctggtcagggtttcttgaggggggctgggagatcgtataaaagattcaaaaccctaatctatcaattagatcctgtccattctctgttattgcttgagaattgtgcaatccgatggggacgatgcaccagggtggtgctcccacaaggacaaacgaaaatgcgaagcttatcataacgacaatcgtgggagtcgtgttaggatattatgttggtgtaacattaccattacgttcctttagaaagattagcttaccttcacggcttatgtcatctctcgatggagccatctcagatgggaaattggtttat

SEQ ID NO: 168402 - DNA, 371 bp, Arabidopsis thaliana nossen
ctttatttcaaatctttgctccttgtagaaatccatagcaatctgcaagggggaagctcaggttattgtattgacataagtctcgaattgccaggagctactaccagaatcttattttccttgtcttagtgcagtacctgaaacactgaactgttttgagatggaaacaatgaaagagccttcaaggaattactgttgcttttggtcactctctttccaccttcctgtaattaaaagaatatagagagatatgagaaaagggtctcaaagttgcacacaaatagaatgattgatttctatgtctgaggatagagaattttaccttgagatttacaaacacagcagtcccgtcatccattgctagatgctct

SEQ ID NO: 168403 - DNA, 348 bp, Arabidopsis thaliana nossen
ctcaaataatcctaattaaaattattgctgcgccgaacccaatgcatagggcactgaaaacaatggctgcagcaaagttggaacgactatgtgttctctcattctttcttttttgtgcaacagtttttggaacagaatcattggagtcattgcctgaggataaactgatactgagagggttgaaattttatggtttccatggagtgcttccagaagagagggaattgggtggtctgtttatcgttgacattaatttgtggttgagtctgaaaaaggccattgaatcagacaacttagcagatacagttagctttgctgatacttttaggctagtgaagaaaattgttg

SEQ ID NO: 168404 - DNA, 350 bp, Arabidopsis thaliana nossen
aacatttattaaatttttttatctaaatattacaagttcttcaggtttgatagcttaatgttaagatggaagtatactacacagcggttgcatttatgagatctattgagattaactgactgttattcactgcttattctaagaataatgatggaacatttacagttggtctgaaaaaactgaaattgaatactaacaacctactcgcatcacgcattggttacaagcaagaagatgccttgaaatcttctattgcggcgtacaacaacaatcatgatggtgatactagcgatgctgatatttgtccgatcaataattacttatatgctcaccactattgtgagattgct

SEQ ID NO: 168405 - DNA, 384 bp, Arabidopsis thaliana nossen
acgcgcacggacgggaatgcagctgtgcggtctaaatactgctgaaaccagacgatcatcttttacagaatcgattccctacgagaatatctggagttcagtatgtctggaagcacaggagaacgttcttttgctgatattattaccagtattcgatactgggtcattcatagcattactataccttccctattcattgcgggctggttattcgtcagcaccggtttagcttacgatgtgttcgggagccctcgtccaaacgagtattttacagagagccgacaaggcattccattaataacaggccgttttgattctttggaacaactcgatgaatttagtagatctttttaggaggacccaatgactatagataggacctat

SEQ ID NO: 168406 - DNA, 378 bp, Arabidopsis thaliana nossen
gttgggagaccagacgatggttggatcaccaggaagttgtgcgaaccaaatgctcagtaagaatcggtcggttggcttaaaccgagtaaacccgattgcaaaagtaccgttagcagaaacccatgcccggttcggttcactagcttttagctttgaacccaaaccgatgtgcggttcagtggccaagctaactaagaagaagcaaaagaatgagaagagaccaacagaaggaaaataaaaatgaaatgaagacatagtagaatcttgtaacaaaagagaatgaggctaaaaaatcggtataccatgtggtttagtaatctttatatatcactcacttatataatttgaacgcatttagagagatggttcggtgggaga

SEQ ID NO: 168407 - DNA, 395 bp, Arabidopsis thaliana nossen
tccacgcgtcgcgtcaccacatttattttcactggatcgcataacaatttttgagacaagagactggcgtctctctctcttctctgtttctctccccctctctccggcgatggttgttgctatggaccaacgcaccaatgtgaacggagatcccggcgccggagaccggaagaaagaagaaaggtttgatccgagtgcacaaccaccgttcaagatcggagatataagggcggcgattcctaagcactgttgggttaagagtcctttgagatcaatgagttacgtcgtcagagacattatcgccgtcgcggctttggccatcgctgccgtgtatgttgatagctggttcctttggcctctttattgggccgcccaaggaacacttttctgggcca

SEQ ID NO: 168408 - DNA, 428 bp, Arabidopsis thaliana nossen
  unsure (1)..(428): unsure at all n locations
gggccggaaatcccggggcgcgtccaacgcgtcgcgtgtcatatagtgggagtactatgtcattgtggaaacggtaaattggaaagtgatggtcataggacgaggagacacgattaaaactaaagcanaaatgctcaaaatgtacatanaacgaacaaaccaaantcgatcctcacctttatgcccactatagctaataatataagatcatcctctgggagtacccactttgagagctcttcgcctgttgggaccttttcagcctcataggttctaaaggcgagtgcaacacatcgtaaggttcttccagccatatcattaatgccattcttgaaaaacgatgcctggtaaaatcaaagaaaatcgagtgagctgagcatcatgacagcccaaaggctaatcacagattcgaacaaatacagctgagt

SEQ ID NO: 168409 - DNA, 382 bp, Arabidopsis thaliana nossen
cgcaaggatgggaatgcagctggtggtctaaatactgctgtaaccagacgatatcagattactttcaggtttatcagtttgagcaactcttttccaaaaggaacactcccattgctcatgctgttggtttctgggactaccagtctttcattactgctgctgccctctttgagcctcttggttttggtaccactggaggaaagctcatgggacagaaagaaatggctgcctttctcggtcatgtagccagcaaaacgtcctgtggctatggagttgcaacaggagggcctttagcttggggtctgtgctacaacagggaaatgagcccaatgcaatcctactgtgacgagtcctggaaattcaagtacccctgcagccctgg

SEQ ID NO: 168410 - DNA, 412 bp, Arabidopsis thaliana nossen
ggtacgggatcgccgggtcggcccacgcgtacgcgcaaggatgggaatgcagctggtggtctaaatactgctgtaaccagacgatatcagattactttcaggtttatcagtttgagcaactcttttccaaaaggaacactcccattgctcatgctgttggtttctgggactaccagtctttcattactgctgctgccctctttgagcctcttggttttggtaccactggaggaaagctcatgggacagaaagaaatggctgcctttctcggtcatgtagccagcaaaacgtcctgtggctatggagttgcaacaggagggcctttagcttggggtctgtgctacaacagggaaatgagcccaatgcaatcctactgtgacgagtcctggaaattcaagtacccctgcagccc

SEQ ID NO: 168411 - DNA, 375 bp, Arabidopsis thaliana nossen
gaaaatttcaagaaccctagttaataacgataatgggttcgagagtttgggcttccttctttgttttcgtaatcttcacggtcatcacattgcctcccacgatccaagcttgcactccttgtactcgtcctcatcctccggttccgaaacctccacaacacggcggtggtggaggtggtggtagcaagccgcctccacatcacggtggaaaaggtggtggtaaacccccaccccacggtggaaaaggtggaggaccgccgcatcatggtggaggaggaggaggaggagggaaatcaccgccggttgttagacctcctcccgtagtggtgaggccaccgccaatcataagacctcctccggtcgtctatccaccac

SEQ ID NO: 168412 - DNA, 375 bp, Arabidopsis thaliana nossen
agatagttgtggcttctgttgctactgcgtctgccaaagaatgggcgggggacatagaattgcgggtcggaaagaagatcgaaatgttatccaagataaaccacaagaattttgtcaaccttcttggttactgtgaagaagaagaacctttcactaggatcttggtctttgaatatgcatcaaacggaacagtctttgaacatttacactataaagaatcagaacacttggactgggtaatgcggctaagaatagccatgggcatagcttattgccttgaccatatgcacggactcaagccacctatagtccacagcaatcttctctcatcatcagttcaactcacagaggactatgcagtcaaaattgcggatt

SEQ ID NO: 168413 - DNA, 376 bp, Arabidopsis thaliana nossen
aaaaaaaaaaaaaaaaattgaaatggagaagaaactaccgagaagattggaaggcaaagtcgcgattgtgacggcttcgacgcaagggattggtttcggaatcattgagcgtttcggtctcgaaggcgcttccgtcgtcgtctcttcccgcaaacaggcaaatgttgatgaggcagtagccaaactcaaatccaaagggattgatgcatatggaatcgtctgtcatgtttccaatgctcaacatcgccgcaatcttgtcgaaaagacggttcagaaatatgggaagatagatatcgttgtctgtaacgctgctgccaatccatctacagacccaatcttgtctagcaaagaagctgttcttgacaagctttgggaa

SEQ ID NO: 168414 - DNA, 375 bp, Arabidopsis thaliana nossen
gacagacaaaaggctaattcggagctctcctccacatcttcttgcaaaacacaaacaaacccgcaaatttccagaaaaatcagatcattctttcatcaatctcgtcttctttaatcataggtgggaattcatcagctcaaaaacgctgtacccgatcgttttacgactcaaatcagagaagctgattcttttccaatcattccaatttccatttcttccttgggaggttttacaccaaattagccgtcgaaaggggtgcttctttgatctaatttcgatggcgggattagagaaaaacgctgatttctcagggaagacgacgaaatcggctacaacgacgtcgtttttcaacaggtcgcttacaattcacggaag

SEQ ID NO: 168415 - DNA, 373 bp, Arabidopsis thaliana nossen
cttggaattcatatattcctgttggagaaaacaaaaattttggggaacgggttaatgaggggggccggtttgtaaaaaaccaaattaaaaagtttatttcagcgcttgtggagaaacttgcggaaaatactaggatacaaaatcacatgaagctaaagaccatcatccacgacttatgggaaaccacaccggaaccggatgttagaaacagaatgacgtcattgaaggattttctagacaaaaccatcgatcatctacacggtgttttcttaccagatgtgtttgtagcaatctgcagaagaatctgggaccgaatgggacaggatgtgcttcgtcttttggaagacaagaaaaataatgtgacttggcataa

SEQ ID NO: 168416 - DNA, 376 bp, Arabidopsis thaliana nossen
  unsure (1)..(376): unsure at all n locations
ctttccctcaaacccaaaacacatttcgttttttgtttcccatctaaaatgcgtatgatttggaacggatgtagagttctacgaaaaggctgcacagaaaactgtagcataagaccttgtcttcaatggatcaaatccgctgaatctcaagccaacgccaccgtcttcctcgccaagttttatggccgtgcggggctcatgaacctcctcaacaccggtcctgaccacctgcnnnntgngatatttagatcattgctgtacgaagcatgcgggaggattgtgaatccgatatacggatccgtggggttattgcggtcaggaaactggcatctttgtcaagcggccgttgaggcagtaatgagaggctcacccgtga

SEQ ID NO: 168417 - DNA, 380 bp, Arabidopsis thaliana nossen
gagaagataagaaagcagcacgaacaccaactcttaaggaaaacatctaagttatggttaagtaattgcatgcaatttaaagctacgtgtccagcttaagacactcaagtctcacatctgtccctttttacttcgacttcgcttcttttggcttcttttaaactctctctatctctctctttcttcttcacactttgttgttaatttcaagtgtttgatcataatggcaacatcagctcgtagagcatacggtttcggtagagccgatgaggctacacaccctgactccattagagcaactttagctgagtttctctccacttttgtcttcgtctttgcagctgaaggctctatcctctctctcgataagttgtattggg

SEQ ID NO: 168418 - DNA, 385 bp, Arabidopsis thaliana nossen
  unsure (1)..(385): unsure at all n locations
cttgggtatgtcccaaaacttgtcgctgctgtggcatatgaggggaggcgggaaacaatgtcttctggcgaagtgaaggctgaagaaattggctctgatggagtgaatgagtctactgatccctcaagtctacctgggcaaacccctcaagaacgtgtgcgccttagttgtttacgtgtgcttcatcaacttgcagctagtaccacatgtgctgaagcaatggctgcaactagtgctggaaatgcacaggtggttccacttctcatgaaagcaataggatggcttggtggaagcattttagcactcgagacacttaagcgtgttgttgttgctggaaatcgggccagagatgcgcttgttgcgcanggtctaaaggttggtctca

SEQ ID NO: 168419 - DNA, 239 bp, Arabidopsis thaliana nossen
gaccattaataaatcctccaagttcgctcatctattacttgaagaagggaatccatttactgttatactagtggaatagaaactttttcgttctaacattcttttttgttgcagataacaaaccagtcgaagttctcccatccagcgagccaccaagtggtttactgtcactacttcaacgcgcacgatttttgtagacatttgacacaaaaaaccattccgaccttccaaccaatttt

SEQ ID NO: 168420 - DNA, 374 bp, Arabidopsis thaliana nossen
attaatttaatgactgttattttctctttcttttcggcagtatttaaccaaaaatggcatctacagtcaagcatgtggactaaacaatgagcatgatgtcatggggccatgacgactacatgtacatggaatttacactcaaggatgtggattaaacaatatagttaagcaaagttcattttgacttgatcttcatcacgtcaacatgaactttgattttactgtataacttgtatttactgtaataacaacaatatataacaattagaggttgtagatattatgatcaattacttaatcatgtcttgatcctaataactacggtctctgaattgctgtatattattattattacagcaagtacaagttatacc

SEQ ID NO: 168421 - DNA, 380 bp, Arabidopsis thaliana nossen
ggttaggtgggtgccgattaataattagagacaaccgtggcaagcgtaaaaggacagtgaaatgatgtatagtgaaatatcgagctgcgtcaagtaaacaaatatgaagaacgttgatgttgtatggttaaatttgcgtaagtttgagaatttaggggtcctagtggacccatttctttaaagcccataataaaaccaacctcatattcttgtaggcccaaaactggtcctagcttattgattgttttcatctaccaacatatatgtgaacaagtgaaaagagaacacatttcattctattacttttttcattaccaggaactaatcccaacttttatagccaagactaatccttcaagtgagtgtaacggtcgagtagc

SEQ ID NO: 168422 - DNA, 307 bp, Arabidopsis thaliana nossen
cggacgcgtgggcaaagaaagagatcaaacgatgaaagagaagaggaggacgacgaagatgcgggagggatcggcgagtgggagagagcttatgttgacgaccgatcctgggaggagttgcaagaggatgagtctggacttttacggccaattgataacagtgccatttaccatgctcagtatcgccgccgtcttcgtatgctctccgccgctgctgctggtactcgtatccaaaagggacttattcgatctctacatcgtcattgacttctctcgggcagctgcggaaatggatttcagaccaagc

SEQ ID NO: 168423 - DNA, 336 bp, Arabidopsis thaliana nossen
aaagtttgttgtgcttctcgtgattggcgttttgtgtgccattgtcaccgcaaggcaggtcaaagatttgtccacggagaccaaattaggggcctctcttccaaaaactactaccaaaggcattggagctcagctttctgcaactggcacaacttacagcaccagcagtgtcgttagctatgctaatggttttaacaatcccaaaggtccaggggccaattcattcgaaagtgccaacacatttaccagcggacaagtcactgccaagggtcgcaaggcaagagtttcttctgcaagtgcttctgccgctgaaagcgatgctgcagctgcagtgac

SEQ ID NO: 168424 - DNA, 384 bp, Arabidopsis thaliana nossen
gacgcatgtcaaatatcaaaaccattccattttgtagtccagcataaatatggtgagagcttttgagatcccacgagcaagaccaaggtgcagccggtagatcataagataagacagtgttgtggctctccaagcttataacagataatttttttcctagagacccaaatactgcaagcccattattgtgaggggaaaggtgaagatctttaattgctctagtggtacgaggcaacaaaatatcatcaatctcacaaggcgaatgtaggctcatctgcaatatattaaaaaaaaaggtcgtatagtgcatcattttactggtataagataaaaaagaaaaatgagaggcaaaacaaaaaagcttacttgcgtaagcacaaacgt

SEQ ID NO: 168425 - DNA, 378 bp, Arabidopsis thaliana nossen
aaacaaacagagagcgagtcacgcgccgagttttcctcacttggtctcaataaatctctctctctttcttctctatcgctttcatttttctcctccagatctcgattccaatctctctctccctctctacttccttcaacagaaatggaaacgttcctatttacctctgaatccgtcaatgaaggacacccagacaagctttgtgaccagatttctgatgcgatccttgatgcttgcttagagcaagatcctgaaagcaaagtggcgtgtgagacatgcaccaagaccaacatggtgatggtgtttggtgagatcactaccgctgcgaaagttgactatgagaagattgttagatccacttgcagggagattggtttt

SEQ ID NO: 168426 - DNA, 311 bp, Arabidopsis thaliana nossen
accttccagaacaataacacgtgttaaatatggcctgttgggaaaaaggaatgggcaggcttaacattcctggttccagaaaaaatggggatatacctttgataccaagaaactattccgaaacaaggttcaatacagagtagattggaacaaaatttccacacaggggtaaaacttattgaggatatgcccctcgggtgagtaaacttgtgaatttcaagagaagggggtaaatgaaataacatggggggcacggggatatttattgaaaaaaaaaggatgtatactttacttttttgaagacgtttctt

SEQ ID NO: 168427 - DNA, 388 bp, Arabidopsis thaliana nossen
gaagaaacagatctgaagatggagtgtgtatttggtctagttgggaatggattcgctatcgtggcggcggatacatcagcagttcacagtattcttcttcacaagaacaaagaggacaagatcatgactcttgactctcacaagctcgtcgccgctagtggtgagcctggtgaccgggttcagtttacggagtatgttcagaagaatgtgtcactgtatcagtttcgtaatgggattcctttgagtactgctgctgctgctaacttcactcgtggagaacttgccactgctttgagaaagaatccatattcggtgaacatcctgatggctggctatgacaaagaagccggcgcatctctatactacattgactacattgcaaccctcc

SEQ ID NO: 168428 - DNA, 381 bp, Arabidopsis thaliana nossen
tactcctaaggtaaaggttcacaacaaaatagtttatattataagagttactttgaaaacaaaaaaaaggaaagtcatattttctcaattccaaaaaattgtataactggatctaatatatatgagttggcgatcagaatctatatggatagaatttataacggggtctcgaaaaacaagtaatttctgctgggcctttatcctatttttaggttcattaggattcttattggttggaacttccagttatcttggtagaaatgttatatcgttatttccgtcccagcaaatcattttttttccacaagggattgtgatgtctttctatgggatcgcaggtctctttattagttgctatttgtggtgcactattttgtggaa

SEQ ID NO: 168429 - DNA, 378 bp, Arabidopsis thaliana nossen
gtgaacaaatagtacttaacttttaataccaaatactagtttcgtggtgttataaataaaacaaatgttgagggtcatcatgtatacaactattcctgctcaaattgacggcatggaaaaagaaattgagaaatagtaccatttatacaaaaatgcaaagtatacaaaatcgtggaaataaatgtggatgatttgtataagggcaagttggttttggttactttcctcgtaagtcggaaaatattcgtgtgtcggtagaaggtaatgagatgaagccatgtgtaagatcgtgtagcatatggaagaagtgttgatcgatctttgtcgtattaaggacccacaacgcaccgactgatcaatcttaaagctgttccattc

SEQ ID NO: 168430 - DNA, 315 bp, Arabidopsis thaliana nossen
acaaactctagatgtcactgcgaaatgtgatgacagcatctttgttagtggatgtgaaccattttttcaagacttacggatagagggataattaaagaaaatatcaccttttatggcgtaaaattatgatctcgtttgcaagatatattaaaagcttgtcctacttcaaaactccatgaatcttgtcttttggttcgttatctaaggatcagtggttcaaatttttccatgaacaagaacccacgattaatcaagaaaatagcttggtctgccgaatgatataacttaaaaaaaagcgcaaaaccaaaattaaat

SEQ ID NO: 168431 - DNA, 380 bp, Arabidopsis thaliana nossen
cggacgcgtgggcacattctcttctctctcgatatcatctaaggctctctcgatctcaattgcgcaaaatggctgacaagaagatcagaatcggaatcaacggtttcggaagaatcggtcgtttggttgctagagttgttcttcagagggatgatgttgagctcgtcgctgttaacgatcctttcatcaccaccgagtacatgacatacatgtttaagtatgacagtgttcacggtcagtggaagcaccatgagcttaaggtgaaggatgacaaaactcttctcttcggtgagaagccagtcactgttttcggcatcaggaaccctgaggacatcccatggggtgaggctggagctgactttgttgttgagtctactggt

SEQ ID NO: 168432 - DNA, 367 bp, Arabidopsis thaliana nossen
ggtgtagtgagagaagttagatagagaaaaaaaatgggaggcgggggtgtgataattgttttggtgctttgcctttgggcactctctgcaacatctgaagcagtaacagaggctgagccaggtttgatgatgaacttctacaaggacacgtgtcctcaggccgaagacatcgtccgtgaacaagtcaaactcctctacaaacgccacaagaacaccgctttttcttggctccataacatcttccatgactgcgccgttgagtcatgtgatgcgtcacttttgctggattcgacaagaagagagcttggagagaaagaacacgacaggagcttcggacttaaaaactttaagtacatcgaggagatca

SEQ ID NO: 168433 - DNA, 379 bp, Arabidopsis thaliana nossen
gaaagaagcagaagtgtgacaagacgattctggattctggatacagctggaagagaattaaaagaaaaagaaaaacacttccaacgaagaagatcgatttgctttgagtctctgaaagaagaagaaaaaataatgggacgtatggattatctagcgatgaagaccgacgacgtcgatacggtggcgttagtcaattccgatatggaagagctcaaggtcgctgcgaagaaactgtttagcgatgtttcgaagcttggtggattaggcttcggtgtttcttttctcaaattcctcgcttctttcgctgccatttacttgttaattttggatcgtaccaattggaaaaccaagatgcttacatcactcctaataccataca

SEQ ID NO: 168434 - DNA, 419 bp, Arabidopsis thaliana nossen
taccggaccgccggggccgtcccaacccacgcaaacgggctgatgttcacaaatgaaaggtttgtgtaaccggagccggcgggtttttgaattcttttttggtcgatctacttctctctaaggattacttcgtccatggcactgtcagagaccctgataatgaaaagtatgctcatttgaagaagctcgagaaagctggtgacaaactcaagctcttcaaggctgatttgttggactacggctctcttcaatctgctattgcaggttgcagcggagtcttccatgtcgcttgcccggttccaccagcttcagtccctaatcctgaggtagaattgatcgcacctgctgtggatggcacgctgaatgtgcttaaggcatgcattgaagcgaatgttaagcgtgttgggtatgtttcctct

SEQ ID NO: 168435 - DNA, 386 bp, Arabidopsis thaliana nossen
ggcggaaagaggaggagaaagcggcgcagagcgtggcggtgaccgtggtgacttcggacgtggattcggcggtggacgtggaggtggccgtggccgtgatcgtggtccaagaggccgtggaagacgtggaggccgtgcctcggaagaaacgaaatgggttccagtgaccaaactaggtcgtctagtggctgacaataaaataacgaagctagagcagatctatctccattctcttccagtaaaggagtaccaaatcatagatcatcttgttggtcctacgttgaaagacgaggttatgaagatcatgccagttcagaaacaaaccagagctggtcaaaggactagattcaaggcctttgttgttgttggtgatggtaatggtcatg

SEQ ID NO: 168436 - DNA, 385 bp, Arabidopsis thaliana nossen
aaaacatagaatgaaaaaaactgaaaacaacataattaaagaaaatacacgaatttctatttaccattaagtcaggataagaaaaaaatgagcaaatgtagtagagctgactaatacatagctggaagtttgtatattgtgacttataaatttaattttctatatatacagtttgtttccttttctttgaatttgcaattattcatatatatatatatatatatacatatatatataataataatagagaaaataagtgaaaagaacatcctcccataaattagaatatataatattgtattacttagcttattaatagttttttttttttacatatcagttaatatgtttttgtcatataaattgctatatgaaataacatgga

SEQ ID NO: 168437 - DNA, 383 bp, Arabidopsis thaliana nossen
ccatttgcaaaaaacttctctttgaatctcagtgagttctcataaaatgggagggatggtgttttttgccgttcggactctctttgctgctttactctcacagcagctctttgcttctgttgcttccgtaaggtttgaggatgccaaaacatactacttatctcctccctctggctcacatggaactcctccatcacacacgcctccttcttctaactgtggaagtccaccttacgacccttctccttcaactccttctcacccttcacctccatcacatactccaactccttccactccatcacacactccaactccacacactccatcacacacgccaactccacacacccctccttgtaactgtggaagtccaccttccc

SEQ ID NO: 168438 - DNA, 380 bp, Arabidopsis thaliana nossen
ggacaaagcaaaaaggatatcctgtcgtctcagccaaaataaaagatgggaaattggaactcgtgcagtctcgtttcttgtcaagtggttctcctggggaaggacaatggattgtaccagtgaccttgtgttgtggttcatatgaaaagcgcaaaaacttcttattagaatccaaatctggagcgtatgatttaaaggaattattgggctgctccattgccgatggtagcgacaaaattaatgggacatgttcttggataaaaatcaatgttgatcaggctggattctatagggtgaaatatgatgacagccttgcggctggactcagaaatgcaacagagagccaaagcttgacttctatcgatagatatggtattttg

SEQ ID NO: 168439 - DNA, 113 bp, Arabidopsis thaliana nossen
gaagttaaatagtacgaagtaataataataatgtacgaacatgtgacaagttttgttgaggtttacctgtaaaatgccactccttttctgaataaatcttttttcgatcaaaa

SEQ ID NO: 168440 - DNA, 422 bp, Arabidopsis thaliana nossen
cgcccgacggacccggaaggcccgggggggcccacccatccggacgaggatggtatatgatgagagagttgaggcaagtgatcaaatcagaaggtggagagatgagagttgtgttatcaccaacaggaaggatcattgagaagccaatgcacattgggttactaacaatggaacctacgaccctctttgtccctcagtatcttgactcaagccttctcatctttattcgtcaaggtgaagcaacccttggagtgatatgcaaagacgaattcggagagaggaaactgaaagcaggagacatctactggattccggctggttctgtcttttatttacataacacaggcctaggtcaacgccttcatgtcatttgcagcattgatccaacgcagagtctcagcttcgaaaccttacaacctttc

SEQ ID NO: 168441 - DNA, 381 bp, Arabidopsis thaliana nossen
caacttttgactaaaaaaagcagctcatagcagcggttatgcctttttccgccgcgagttcgagctccgtaagctcaatcgctgaagaaccgccgccaaagaaacagcatgatccatcgccgtcctgttcatcgtatctgttactacttccagacgaaatcattctgaattgcttagcacgcttgccgaaatgttactacccggtgatttcactcgtctccaagacctttaggcgtctcatagcttcaccggagatctacgttgaaaggtcattacttcgccgcaccgagcgtgtcctttatgttgtgcttagatctcacgctacagaaactccccgatggtacactctcaatttcaaaccctttggaaatgattcaaata

SEQ ID NO: 168442 - DNA, 380 bp, Arabidopsis thaliana nossen
caacttttgactaaaataagcttctcatagcagcggttatgccttgttgggccactagttctggctgggtaagctcaatcgctgaagaaccgccgccaaagaaacagcatgatccatcgccgtcctgttcatcgtatctgatactacttccagacgaaatcattctgaattgcttagcacgcttgccgaaatgttactacccggtgatttcactcgtctccaagacctttaggcgtctcatagcttcaccggagatctacgttgaaaggtcattacttcgccgcaccgagcgtgtcctttatgttgtgcttagatctcacgctacagaaactccccgatggtacactctcaatttcaaaccctgtggaaatgattcaaat

SEQ ID NO: 168443 - DNA, 349 bp, Arabidopsis thaliana nossen
atcacaaacacgtagttattctctctttactctctctatttcttttttgttcaaaccctacgaagatcttcttcttcttcttcaagaatcgatcatgaaaggagctaaatctaaggctgaaaccaggagcacaaagctctctgtgactaaaaagcctgttaagggagccaaaggtgctgctaaggatccaaataaacttaagaggccttccagtgccttcttcgttttcatgaaaaattcccgtgtgacgtccaggggggacccccttaaaaccaagtttgttgttgtggttgccaaacttggtggtgaaaagtggaaatccttgtctgactctgaaaaggctccttat

SEQ ID NO: 168444 - DNA, 382 bp, Arabidopsis thaliana nossen
aatttcaagtgtttgatcataatggcaacatcagctcgtagagcatacggtttgggtagagccgatgaggctacacaccctgactccattagagcaactttagctgagtttctctccacttttgtcttcgtctttgcagctgaaggctctatcctctctctcgataagttgtattgggaacatgcggctcatgcggggacaaacacaccaggagggctgattttagtagcgttggctcatgcgtttgctctgtttgctgctgtttcagcagccattaatgtctccggcggacacgttaacccggcagtcacttttggtgctcttgttggaggcagagttacagcgatccgcgccatctactactggatcgctcagcttcttg

SEQ ID NO: 168445 - DNA, 383 bp, Arabidopsis thaliana nossen
gcgattctcactaaaaccctcgaacacatcgcctttatctctttctctagatctactcgctatggctactatcaccgctgttaaggctagacagatcttcgacagtcgtggtaatcccaccgttgaggttgatatccacacgtcaaatggtattaaggttacagcagctgttccaagtggagcttccactggtatctatcaggctcttgagctgagggatggaggatctgactaccttggaaagggtgtatctaaggctgttggcaatgtgaacaacatgatcgggccagcacttattggaaaggacccaactcagcagactgctattgacaacttcatggtccatgaacttgacggaacccaaaacgagtgggggtggtgca

SEQ ID NO: 168446 - DNA, 386 bp, Arabidopsis thaliana nossen
cggacgcgtgggtctctctctgccaatctcatcttcaacctctctctaactctcgttttcgattctacaatggctgacaagaagattaggatcggaatcaacggattcggaagaattggtcgtttggttgctagagttgttctccagagggacgatgttgagctcgtcgctgtcaacgaccccttcatcactactgagtacatgacctacatgttcaagtacgacagtgttcacggtcaatggaaacacaatgaactcaagatcaaggatgagaagacccttctcttcggtgagaagccagtcactgttttcggcatcaggaaccctgaggatatcccatgggccgaggctggagctgactacgttgttgagtctactggtgtctt

SEQ ID NO: 168447 - DNA, 375 bp, Arabidopsis thaliana nossen
gactcattcatctttcaaaatcaactacaactagatgtatcataatccccttgttagatttattattctttttgtcttaatatcttataatagttaatagtcattaataaagaaaaatttttcttccattacaaatttctacaaaattgattagaatctgatctaacaacagggaattttcgggaaatgcaaaaagatggaagactctctatagatctgcatctatctatatttgaattatctatacatatgcaagcaagggaggaaaatgaacttttttttgtttgtctagtctaatttgaacttcccccccaaaaaaattcactttttagcttgttgatagacgtttactgagtagtaaacaagaatatcgat

SEQ ID NO: 168448 - DNA, 378 bp, Arabidopsis thaliana nossen
ccgatccaaattccgagaaagacaaccaaattttccttttcctctgcaaaaatgtttattgagagcttcaaagttgagagcccgaacgtgaagtacacagagaatgagattcactctgtgtacgattacgagacgacggaggttgttcatgagaagaccgtcaatggcacttaccaatggattgtgaagccaaagactgtcaaatacgatttcaaaaccgatattcgtgtccccaaattaggggttatgcttgtgggtttgggaggaaacaatggatcaactctcaccgctggcgtgattgcgaacaaagaaggaatctcgtgggcaacgaaggacaaagtgcaacaagcgaattacttcgggtcactaactcaagct

SEQ ID NO: 168449 - DNA, 380 bp, Arabidopsis thaliana nossen
caagtaccaaactttttccttcagggttttcctctcaaaatcccaacttggcctctgtttttgctttcttttatgttctcttcttctctaaaaaccatctcatacttccaagaatttctctcacaaagaccaagaactcaaaatgtatcaagattctggattaatgctccgttacatgcaaaactgtcccccagatattcaacaattcgaagacctcttcaaatcatacaaactctccgatgaaatgaacaacacttttgttgagtcatcaaacatatctgagtatgatattggagaagaaagtgatctttttagagctcctgatccaattcttgaagaaccaatcttaaccgttgatccactctctgctgctttgacta

SEQ ID NO: 168450 - DNA, 384 bp, Arabidopsis thaliana nossen
cacaacgagagtatctccgtcgttcttgaaaagttcaaatccatcggtatcgacactcccggcctcgtcgccctcctagggtcacacagcgtgggaagaactcactgtgtcaagctggtccatcgtttgtaccctgaggtggacccgtccttaaacccggaccacgtccctcacatgctacacaagtgtcctgactcgatccctgacccaaaggcggtccagtacgtgcgtaacgaccgtggcacccccatggtgctaggacaacaattactaccgtaacatcctagacaacaagggtttgctccttgtggaccatcagctcgcacacgacaaacgaaccagaccaatcgttaagaagatggctaaggaccaggcctacttctt

SEQ ID NO: 168451 - DNA, 382 bp, Arabidopsis thaliana nossen
actagatttgcggtattgccactctctgttctccttctcgttctcttgtgtcctctgcactgagtcgttggctaagtcggaggagtctgaagaatacgacgtcgctgtgccttcatgttgcgggttttcgtctcctcttctgattaagaaagatcaatggaaaccaatcttcgagacgaagtttggacagatttcaaccgttcaaatcggcaatggatgcggtggaatgggaccttacaagatacattccataacgttggagccaaacacaattttgctccctcttcttcttcattccgacatggtcttcttcgttgactctggaagtgggattctgaattgggttgacgaggaagcgaagagtactgagattagactaggg

SEQ ID NO: 168452 - DNA, 377 bp, Arabidopsis thaliana nossen
ctgtaaatggcgaaaaaagaaggttcaaagatgaacatcgccattatacatccagatcttggaataggcggagcagagagattgattgttgatgcggccgttgagcttgcctcgcacggtcataaagttcatatcttcacctctcaccacgacaaatccagatgcttcgaggaaactctttccggtatctttcaagttacggtgtatggatctttcctgccacggcatattttctaccgactacacgcagtgtgtgcatatttgcggtgcttgtttgttgctctctgtgttcttttgggttggtcttcattcgatgttgtactagcagaccaagtttcagtcgtagtcccattgctgaaactcaaaaggtcatctaa

SEQ ID NO: 168453 - DNA, 346 bp, Arabidopsis thaliana nossen
cggacactggggaaaaaagcatgctaacttatgatacaaagcttaaacgacccggaacaaagagtaggggtggtggaaaatcaaaaagagagatcggacgcaaaacttgcctatatgggtcattcatttgatgtaaacacctctgatgagcacgcaatcatatgcttcggatgaacatttgcgtttatcactgaagaaaaagaggctacatatttacgatcacgtattgtgatatatcttctaaccacttactgtgcatatggtgggtacaagaatggtgatgtctaaattattgccaatgaccaatgataccgtattacaccttcatgacgaaggtttactgact

SEQ ID NO: 168454 - DNA, 386 bp, Arabidopsis thaliana nossen
gcaaatgcgcgaaacgtttttggaccaattctaatttctaaagtaacgcgataaatctaatgcattcccacgatttgtgtttgtccctctgacgaaaaatcctcggatctgttgcattctctccaaagcttgaatcagaagaaagcttttgaagatcagcctaaaagtgatctctcataactgcttaaaagattgttgaaactcgaagatgtctttggccgagataaacaagaatgaagtcgacattgttattggggctcttaatgctgaccttacacagtttttgaccagctggaggcctttcttctccggattccatctgattgttgtcaaagatcctgagctcaaagaggaactcaacataccagaaggctttgacgtagatg

SEQ ID NO: 168455 - DNA, 389 bp, Arabidopsis thaliana nossen
ggctcatatacaaatggtgaacgacaacggagaaagagtgttcgaccaagagatctccagcggacagttactagtcgtgccacaaggcttttcggtcatgaaacatgccataggcgaacagttcgagtggatcgaattcaagacaaacgaaaacgcacaggtcaacacactcgcgggccgtacctcagtcatgagaggtttgccgcttgaggttataaccaatgggtaccagatctctcccgaagaagctaaacgagtaaagtttagcacgattgagaccacactgacccatagcagtccaatgagctacggaaggcctagggcttgaggcttgatgagcgcgtggtggaatagcgtttgaatctaaagttcggtttggtacgacttgt

SEQ ID NO: 168456 - DNA, 367 bp, Arabidopsis thaliana nossen
cacagacacggaagaagtagcttggttcttctctttgtgaaggtgaatgcgggagatggggactggagattctgcttccagactgattctctggttctgcttaagggttttgattctaagggttggatttgtgcaatgtggaggtacttattaccggaaagcacttcttatttattgacagagacgaaaacttttttttggctgcatacattaccccccaaacactcctgatattttggaagatttgattcataaagcgaaagatggaggcattgatgtgattgagacgtatgtgttctggaatcttcatgagccttcttctggaaaatacgattttgaaaggagaaatgatttggtgagattcgtg

SEQ ID NO: 168457 - DNA, 377 bp, Arabidopsis thaliana nossen
gaaagcagcacgaacaccaactcttaaggaaaacatctaagttatgggtgagtaattgcatgcagttgaaagctacgtgtccagcttaagacactcaagtctcacatctgtccctttttacttcgacttcgcttcttttggcttcttttaaactctctctatctctctctttcttcttcacactttgttgttaatttcaagtgtttgatcataatggcaacatcagctcgtagagcatacggtttcggtagagccgatgaggctacacaccctgactccattagagcaactttagctgagtttctctccacttttgtcttcgtctttgcagctgaaggctctatcctctctctcgataagttgtattgggaacatgc

SEQ ID NO: 168458 - DNA, 365 bp, Arabidopsis thaliana nossen
caatcattgagatctgaatatcttacgttaaggagagaaagatgtacggattcgaggcgcttaccttcaacatccatggcggatatttggaggcgatcgttagaggccaccgtgctgggcttctcaccaccgccgattacaataatctatgtcagtgtgagaacctagacgatatcaagatgcatctctctgccaccaaatacggctcttatctccaaaacgaaccgtcacctctgcataccaccaccattgtggagaagtgtactcttaagcttgttgatgactacaagcatatgctttgccaagctactgagccaatgtctacctttttagagtacatcagatatggccacatgattgacaat

SEQ ID NO: 168459 - DNA, 381 bp, Arabidopsis thaliana nossen
atcgccgtcgcggctttggccatcgctgccgtgtatgttgatagctggttcctttggcctctttattgggccgcccaaggaacacttttctgggccatctttgttctcggccacgactgtggacatgggagtttctcagacattcctctactgaatagtgtggttggtcacattcttcattctttcatcctcgttccttaccatggttggagaataagccaccggacacaccaccagaaccatggccatgttgaaaacgacgagtcatgggttccgttaccagaaagggtgtacaagaaattgccccacagtactcggatgctcagatacactgtccctctccccatgctcgcatatcctctctatttgtgctacagaagt

SEQ ID NO: 168460 - DNA, 383 bp, Arabidopsis thaliana nossen
caacaataagcaccaaaacctcttttcttctcttcatttgagtctcaaatcgaaaaatactaacaatggaggcaatgaagatgaagctttacgtggtggttttggtggcagtgatagcgttctctacagttcaccagacggttgcagcggttgacgctcccgcgcctagccctacctccgatgcttcctcatttatccctactttcttcgcctccgtagcggtgatggcctttggattcttcttttaagaagtttcttctttgctttttatgtttaaatgaatttaaagtaaaatcaactaattgatgatgtttaagtctggtcttgttttgagttctagttgatttcatgttggttatgtttgatgtcttttatctctctat

SEQ ID NO: 168461 - DNA, 382 bp, Arabidopsis thaliana nossen
gaaagacccagaggttcacgggcggtttacccttttgcagacatcccggggccgacaagggtatttgcgtgccacatacatgatgaaaccaaaaaattctgctaccaaactggtgtgaacgttgttgctgcttatggaggaacacccattcaccaccagatcacggaactcgagaggggatgtgatattcttgtggcaacttctggccggttaaatgattcgctcgaaagagctagagtctcaatgcagatgattacgtttttagctctatatgaggcagacaggatgctggacatgggttttgagccacagattagaaagattgctgagcagattgacatgcctccacgtggtgagagacaaacaatgctgttcaatgcta

SEQ ID NO: 168462 - DNA, 389 bp, Arabidopsis thaliana nossen
aaattaacaatcactatgataaaatttgatattactaacttactctttgtcccaaaaaaaacaaagtatcttactcaaaaactatgtacaaaactagttttaagaccgagtacaaaactacttttaagttgtatttactagaaatacaacttagtaataatcgacaggaaattaatcaaatccatcggtaggcgtgactgcacagaagaaggaaaatgctgcagaggtaaattcataaataatcaaatgacaggtgacaagtctttatctctgttttgaaatcaatatatgtatagctgccataatttgtggtctttgtttatactgccataatcaaaaagtttcctaatgccataatatctcgttccaatccatgctattatatttta

SEQ ID NO: 168463 - DNA, 352 bp, Arabidopsis thaliana nossen
aagaaaacttccttatggcgagtttggttctttttttggtccttcacggcctgttatttcctcaagggttatacaagaaagcaaatccttgcttgaaaacgagctacgtaaaatgtcgaattcgagccaaactaagaaaagaccagttccgacgaatggttcaggctctaagaatgtgtcacaagagaagcgacctaaagttgggaatgaggtgagaaggaaagttgagactcttaaggatacaagagactattcggttttgtttttcgatgacgcggagcttcctgttccgaagaaggaatctctttcacgaagtggctcttttcctaattctggttttttgctgatgttc

SEQ ID NO: 168464 - DNA, 380 bp, Arabidopsis thaliana nossen
ccttcaactccttctcacccttcacctccatcacatactccaactgctgccactccatcacacagtccaactccacacactccatcacacacgccaactccacacacccctccttgtaactgtggaagtccaccttcccacccttccacgccttcacacccttccactccttcgcacccaacgccatcacaccctccttctggtggatattactcatctcctccaccaagaactccggttgttgtgactccaccatcacccattgttgatccaggcacacccatcattggaggaagcccaccaactcctatcattgacccaggcactcctggaactcctttcattcctgctcctttcccaccaatcactggaacatgcga

SEQ ID NO: 168465 - DNA, 411 bp, Arabidopsis thaliana nossen
ccggagggcaagtcccggatcgcccgacgcgtcccacgtaattatgaatatgacacgctctatgtatgcttatatatagactttgctcattacgtatacttcaaagttgccattttatctttctgttaattgttttccaaaaatggccgataaaatgttcaaagcattgttgtgggcttttgccacggcggttgtgatggccgaggctgttcgtggacaactagtcccttgctatttcgttttcggagactctgtcttcgacaatggtaacaacaatgagttggataccctggccaaagtcaactattcaccttacggtattgattttgctagaggtcctaccgggagggtcagcaatggtcgtaatattcccgactgtatctgttagtcccagttttggtttatctcttt

SEQ ID NO: 168466 - DNA, 380 bp, Arabidopsis thaliana nossen
ggctaatctgagatgggattaaagctgcccaaaactatcaaaagagtttgcagatcgtcgaagacatgatttggaatttcaggttggtggtaaagtgtttattaaaattcaacatatcaaaggcaagttccgaattcgatagtcacgaaagttaaagtcgctcaagttgtgaactttgaacttctataaagtcaagaagacatgagttacaaaaaatagccaattcacatattagacactagagtgaaagagttcaggagcaaaacttttaggacttgaatataagaggtgcgtaacttaagtgcataagaagaaacatggtagttgaaatcctctagaatctctgaattataagtcttgaaatgtatcacatctgcttc

SEQ ID NO: 168467 - DNA, 382 bp, Arabidopsis thaliana nossen
  unsure (1)..(382): unsure at all n locations
cacgaaacaaaattcatattgaacaaaacaaaaaggtcaaaccggagcgggggcattttattacactcgtctctcacaagacctctccttcaatcatttcaccgaccaacaccaacctccacctccggaaccggctgctcctccttcgcaacagcaacaacatttccaagaagcaccgcctactaattggttaaacacaacgcttgttcgctcctcaaataacaacaataactttctcaacctgcacacaggcaccgctgacaccacaaccgcaagcagctccgattctccttcctccgccgacggcgtcggcggtgctaaccaggggctatctcgctcctactttttnctgcaacgaaacaacaacaacaacaacgctttc

SEQ ID NO: 168468 - DNA, 384 bp, Arabidopsis thaliana nossen
caaacgtggaggatttgaagaggcaatggttttataggtttctgcagaaaacagtgctatttcacattttaggattgggtttctttctcttctaccttggtggcatgtccttcgttacttggggaatgggggtaggagcagcattggaagtgcacgtgacttgcctcataaattcactctgccatatttggggcactcgaacttggaagaccaatgacacttctcgtaatgtttggtggttatcggtattttcatttggagagagttggcacaacaatcatcatgcgttcgagtcatcggctagacaaggacttgaatggtggcaaatagacatttcgtggtacattgttcggtttttcgaaattatcggtttagcgaccgatg

SEQ ID NO: 168469 - DNA, 381 bp, Arabidopsis thaliana nossen
ctgtctgactacaagaatgcattatccatcttagagagactggttgagcccgacagtcgacgcacagctgaattaaacttccgcatctgcatttgtcttgagactggatgtcagcctaaggaagcaataccatattgtcaaaaagctttgttaatatgcaaagctcggatggagaggctcagtaatgaaatcaaaggtgcatctggttcagcaacttcctcaaccgtctctgaaatagatgaaggcatccaacaatcatccaatgttccttacattgataaatctgcttcagacaaagaagttgagatcggagacttaacttgtctcgctgaagatctagaaaagaagcttgaggatttaaaacaacaagcagagaaccca

SEQ ID NO: 168470 - DNA, 381 bp, Arabidopsis thaliana nossen
ggaagagtgatcggagatgtgttggacatgttcatcccaaccgccaatatgtggggctactttggccccaaacacatcactaacggctgcgagatcaaaccctccaccgcagtcaatcctgcaaaagtcaacatctcgggccattccgatgagctttacactctcgtgatgactgacccggacgcacctagcccaagcgagccgaacatgagagaatgggtccactggattgtcgtggatattcccggaggcacaaattcctcaagaggaaaagagatacttccatacatggaaccaaggccaccagtggggattcaccgttacatattggtacttttccggcaaaactcaccggtgggtctgatggtgcagcaacctaca

SEQ ID NO: 168471 - DNA, 386 bp, Arabidopsis thaliana nossen
  unsure (1)..(386): unsure at all n locations
cttgcttcagataaattctttgaggatcgtatacctcatatatgcaacatatgaaaattcgctgttcttaaaaaagatcattcgttcatggcgattggtggttcctgggatcccacagatggcatggacccatcagttgatcagtcttccttaattcagacaatgctgagacactcaaaggataagcttcatcttgatctgagtaactgccgtcactggaatccattcctagagatacattatgacagagttggtacagatggagtgtttagctacaaagagatcacagtactttttgtncccgatttatcagaatgtcttccttcatttgatgtttggagaacccaatggttggcacacaggaagggctcttacttgaaagagat

SEQ ID NO: 168472 - DNA, 392 bp, Arabidopsis thaliana nossen
gtccagctgatgggaacgaaacagccggtgcatacaaaatcgctgtcacaaaacgtaagacaccttctgtcttagccttatctagacaaaagctgcctcaacttccaggaacatctattgagagcgtcgagaaaggtggatacaccatttctgacaactcaaccggtaacaaacccgatgtgatcttgatcggaactggatcagagctagagattgctgctcaagctgcagagaagttaagggaacaaggcaaaagtgtgagagttgtttcctttgtatgttgggagcttttcgacgagcaatcagatgcatacaaggaaagtgttttgccatctgatgtatcagctagagttagtatcgaagctggatcgacttttggatggggaaagatc

SEQ ID NO: 168473 - DNA, 377 bp, Arabidopsis thaliana nossen
ctttgtgaaggtgaatgcgggagatggggactggagattctgcttcgagactgattctctggttctgcttagggtttttgattctaggtgttggatttgtgcaatgtggagttacttatgaccggaaagcacttctcattaatggacagagacgaatcctcttctctggctccatacattaccctcgaagcactcctgatatgtgggaagatttgattcagaaggcgaaagatggaggcattgatgtgattgagacgtatgtgttctggaatcttcatgagccttctcctggaaaatacgattttgaagggagaaatgatttggtgagattcgtgaagacgattcacaaagctggtttatatgctcatcttcgaatt

SEQ ID NO: 168474 - DNA, 377 bp, Arabidopsis thaliana nossen
gagggattgttgagagtgttggagaaggagtgactgatcttcagccaggggatcatgtgttgccgatctttaccggagaatgtggggagtgtcgtcattgccactcggaggaatcaaacatgtgtgatcttctcaggatcaacaccgagcgaggagggatgattcacgacggtgaatcaagattctccattaatggcaaaccaatttaccatttccttgggacttccacgttcagtgagtacacagtggttcactctggtcaggttgctaagatcaatccggatgctcctcttgacaaggtctgtattgacagttgtggtttgtctactgggttaggagcaactttgaatgtggcttaacccaagaaaggtcaaagt

SEQ ID NO: 168475 - DNA, 385 bp, Arabidopsis thaliana nossen
atcgaaacgaagaagatcgagatcagtgaagaagaagaagacgaaatcacgaaaccatgttcttgttcgattggttctacggaatcttagcttcgttagggttatggcaaaaagaagcaaagatcttgtttctcggtctcgataatgctggcaaaactacattacttcacatgctcaaagacgagagattagttcagcatcagccgacgcaacatccaacgtctgaagaacttagcattggaaaaatcaagttcaaggcttttgatttgggtggtcatcagattgctcgtagggtttggaaagattactatgccaaggttgatgctgttgtctaccttgtggatgcttatgacaaagaaagatttgcagagtcaaaaagagagct

SEQ ID NO: 168476 - DNA, 383 bp, Arabidopsis thaliana nossen
ctaaccttaaatgattcaaacccatatatatcaaggatgcttatagatcgtcctgtacgtgatttaccgacttccaatgcaatgtttatttgctcaacaagccagtcaaaaaggtttgcataaataaattttgctattccatccctcatgtcagttgcctgtaagtgaaaacggttcagcaactcatacatcacctaatgatcgatgtatatgaaaacaagtagcaagaacgatgacactattaaacattacctgccgcaatgtcagttttttagcaatacaatccgtaccagcttgaagtttacgggtggacaaaaccaccataagctcttctgtgttgcagcccattaacatagcggcattggcgacagctgtaagaaata

SEQ ID NO: 168477 - DNA, 378 bp, Arabidopsis thaliana nossen
  unsure (1)..(378): unsure at all n locations
caccaaactgcgaataactcaataatccaaatccacttctgaaaaatggagaatgacgataaatgacttgggaataactctaccaaattttgttacctttgacaacgatttgataagccgaaactgtttcctcccaaaccctaacgattatggnccttctctttctctctctttttctccttttaaaacgaaaagtggctaactaaagccctaatttcgagtttccttcttttctaagcacactctagggtttacattaacctaactgattaaaccggacgatttaaaaataaaccctaaccgattttccggttcacgggcgttacaaatataatttgaagtgaacataaaattgaaaatttaaaatcacaattggaa

SEQ ID NO: 168478 - DNA, 371 bp, Arabidopsis thaliana nossen
aaacccggggcgtcccacgcgtccgcaccaaactaataataactctttaattcaaagccacttctgaaaaatggggaatgtccataattttttggttggtgacactaccaaattttgctaccatagacaacgattggataagccgaaactgtatgctccgaaaacctaaaaacaatctaccttatctctctctctgtcttacatcttacaaaacgataagaggctcactaaaaccctaattgcgaggtttcttcttttataggcacactctaaagtgtccattaacctaactgattaaacatgcccattttaaaataaatccttaacaaacttccacttcacacactgcacaaaactaattgacagcaaac

SEQ ID NO: 168479 - DNA, 361 bp, Arabidopsis thaliana nossen
aaaacaacaagaaaaaatggcaataaccaacaaattaatcataacacttcttctccttatctccatagctgtcgtccactgcttatccttccgtgtggagatcgacgagttcgagccaccacagcaaggagaacaagaaggtccccgtcgccgtcctggtggtggctctggcgagggatgggaggaagagtcgacgaatcatccataccacttcaggaagcggagtttcagtgattggttccagtcaaaggaaggttttgtgagagtgctgcctaagttcacaaaacatgcaccggctctcttccgaggaatcgagaactacagattctcgttggtggagatggagccaacaactttcttt

SEQ ID NO: 168480 - DNA, 385 bp, Arabidopsis thaliana nossen
acacaacacacccaaatgtgcataagcttttgttttctcttctctccggcggcggactctcatttctgctcttgttccatggcgccgaggcacgccagcgagaggcgccgtttccaaacgccttgcatttcagccaaatcaacagcctcgcgcccgctcaggcgacgaagttcgaagccggtcagatggaagtatgggaccacatgagccctgagctccgatgcgccggtgtaacggtggctcgcatcacccttcagcccaattccattttcttgcccgctttctttagcccacctgcccttgcttacgttgtccaaggagaaggagttatggggacgattgcttctggatgtcctgagacttttgcagaagttgaaggatcatc

SEQ ID NO: 168481 - DNA, 392 bp, Arabidopsis thaliana nossen
ccacgcgtccgcgcttcccatcaatggcttctcctatgttttatatcaccagacactctcaccgggtgtttttaactacatctttggcctctcaaacgcaaattaccattcgtaaaacccaaattacccctttaatcgaaccaattccggagatttccgcatgcgtctgcattctacatccagtaaaactggcactaaggaacttatacattcctgcaattcttcaattgattcaaagttgaacacttttgaagctggatctaaaaacctcgagaaattggttgcaacgatattgatatttgctcaagtatggtctccattgcccttgattggtctagactctgcttacatttcacctgcagaggcagttctttactctacggacactaaag

SEQ ID NO: 168482 - DNA, 322 bp, Arabidopsis thaliana nossen
aatttcaagtgtttgatcataatggcaacatcagctcgtagagcgtacggtttcggtagatccggtgaggctacacaccctgactccattagagcaactttagctgagtttctctgcacttttgtcttcgtctttgcagctgaaggctctatcctctctctcgataagttgtattgggaacatgcggctcatgcggggacaaacacaccaagagggctgattttagtaacgttggctcatgcgtttgctctgtttgctgctggttcaacagccattaatgtctccggcggacacgttaacccggcaggcacttttggtgctc

SEQ ID NO: 168483 - DNA, 378 bp, Arabidopsis thaliana nossen
aaaaaacttctctctgaatctcagtgagttctcataaaatgagagggatggtgagttttgccgtttgggctctctttgctgctttactctcacagcagctctttgcttctgttgcttccgtaaggtttgaggatgccaaaacatactacttatctcctccctctggctcacatggaactcctccatcacacacgcctccttcttctaactgtggaagtccaccttacgacccttctccttcaactccttctcacccttcacctccatcacatactccaactccttccactccatcacacactccaactccacacactccatcacacacgccaactccacacacccctccttgtaactgtggaagtccaccttcccacc

SEQ ID NO: 168484 - DNA, 350 bp, Arabidopsis thaliana nossen
gtaagattacgaatcgctgtcccgcattcaagaggattatgtttcgcctgttactcggagaaacgacgagcaaacaattcccaatcatggcccttgcggatcggatcatccatataatatacaaaaagaaacttcagatattagatatctgtgtcttgcaatgagatatcaattacagcgacggtttcattagatatcttacaacaaaaacccctgttttttacgatccagtttcttcaccaccgcgaactccagtttgattcaggcatgatacacttttgagttattgggagaacccaagtactctctttcggatcccggaaacagactttatagatcttttttccttt

SEQ ID NO: 168485 - DNA, 367 bp, Arabidopsis thaliana nossen
gcgaaacaacaagaaaaaatggcattaaccaacaaattaatcataacacttcgtctccttatctacataggtgttgttcactgcttatccttccgtgtggagatcgacgagttcgagccaccacaacaaggagaacaagaaggtccccttcaacatcctggtggtggctctggcgagggatgggtggaagagtcaacgtatcatccataccacttgacgaagcgtatattcaatgcatgcttccagtcacaggaatgctacgtgagagctcttcctaagttcacaatacatgcaccggatctctcgcgagtaatcaacgaactacacattctaatcgctggagatggacccaacaactttctttgtg

SEQ ID NO: 168486 - DNA, 380 bp, Arabidopsis thaliana nossen
cggacgcgtgggctcacattttctcattctctcctacaacaagtggccggcgctaagccactctgtacgcagccatggcaaatcctgaccatgtttcagatgtgctacataatttgtcgattgatccaacaaccaaggctttagctcctgattctgaaacaaagggggcttatggcggaaacggtaatgacttcttgctcaatgatgagttagtggaggctaccaaaattggtaaacctagtcttttgtctaaagatggaggtgtgaccaaagacaagggatccaaccttaagaaactcgggtaccaaagtgcatcttataacgcaaagggttcatatgggaagggtgcctatgcttatgggtactatcccccagcatat

SEQ ID NO: 168487 - DNA, 380 bp, Arabidopsis thaliana nossen
cagaaagaagggtttcaatctcattaaagagaaaagaaacgatcagagagggagaagagggtattgacgtgcttttctttgtttctgtggaggctcttcttcttcttcttctctgtctctgtctctgtctctctgtaatcttctgtgctctccacaaatttgtctctcctctctctcgccgactccacaaattttgagcttctttttttgaaattcttgagaacaagtgaaagagcctaatatccacaaaactcttgtttctttcttaaatggctaaaatttattggccttatttcgatcccgaatatgagaacctgagctccaaaatcaatcctccaaatgtttctataaataacactatctgcaaagaatgcactctt

SEQ ID NO: 168488 - DNA, 375 bp, Arabidopsis thaliana nossen
ttgactaaaacccaggtgggtttaatgcttagaggagattccggcaacgggagcacatatattgtgcgggcgtctggtgaaatatatgatgcgaatcgcactatggccccgctactagagatgttcccaaatttacaaactaaggagatgcttgcatcagaggaggaacttgctccatataagaatttctcttccagaatggctgcaatagattacacggtctgtctccacagtgaggtatttgtgaccacgcaaggtggaaactttcctcatttcctcatgggtcatcggagatatatgtttggaggacattccaagaccattagaccagacaagcgaaagttagcaatcctctttgacaatccaaacatcggg

SEQ ID NO: 168489 - DNA, 382 bp, Arabidopsis thaliana nossen
attaaatgtggattcatcattaaatgaaacaactcttcttctctgtacagttggtcttcacaccttcaccaaattctttgacttcaaaaatcttataaaatttatatatctccaaaaccataaaaccaaaacgagttttcacaaataaattacttagttgaaatttcaaatctcattcaattagggtacactctctcaacaatccacattaatgagggttgctgcttctgatggctagcagtaacagttttatcgcctccacttcttaatgccatctttttcctcttccctctccttctctatatatattttctgactctgcaaaaccttaattcatccatctctcaaacaccatttttggaaacaccatttcacattcctt

SEQ ID NO: 168490 - DNA, 381 bp, Arabidopsis thaliana nossen
  unsure (1)..(381): unsure at all n locations
tttttcgtcaccctagccactttactctcttgcgatatctctnaaaacggttggacagtcgccatccatgggggaanagaannnccacatcaacattgtngtcattgcccacctccatcctggaaagtcgaccaccactgaacactttatctacaacttgaacgaaatagacaaacggcgcaaacagagatgactgaatgctcaatgatgaattagcggaggctaccaaaattgcgaaacctagtctttcgtctaaagatggaggtgtgaccaaagacaagggatccaaccttaagaaactcgggtaccaaagtgcatcttataacgcaaagggttcatatgggaagggtgcctatgcttatgggtactatcccccagcat

SEQ ID NO: 168491 - DNA, 378 bp, Arabidopsis thaliana nossen
gaattttcaaatctttctcttctctcgctctctcgaattcttctctctgttcgtcgtagatcccctctgtgtgcgttttcgtcttttcgaattccgaagatctcaaatgggtgaggatgcaatctcaggtaatctcaagaatctaacgatcgacacaagagattcagaaactcttgtggtatgtttcggtgaaatgttgattgattttgttcctacggtgggaggtgtttcattggctgaagcaccagctttcaagaaagctcctggaggagctcctgctaatgtagctgttggtgtctctagacttggtggctcctctgctttcattggaaaggttggtgatgatgagtttggaagaatgttagctgatattctaag

SEQ ID NO: 168492 - DNA, 216 bp, Arabidopsis thaliana nossen
gggggagtcccacgcgtgcgaaaatatatatacaatgtgactttaaactttaaagtcttaaaaggcgtgtgaataaatacatgttattgagtaaagtgagttatacgtatcttttcaaatctcttatcaagcttttagataagcaaattttgtaaatactatgaaaaatgtttttgagtatcatagttcttgcaatatctcaaaatcaatttaaaa

SEQ ID NO: 168493 - DNA, 379 bp, Arabidopsis thaliana nossen
cggacgcgtgggctttgaacttgcgaaaaatgtttcattcttgctctgtgattcgagaagctttggctggggagacgaagaatattgctccttcattcgatcgtgccagtgagcttaaagcttttgatgagaccaaaacgggtgtgaaaggactcgtcgactccggaatctcacagattccacgcatctttcatcattcatctgtcaaacttgcaaaccctgaaccagtttcctcggacttgctacatctcaagacgatcccaacgatcgatcttggaggacgagttttcgaggacgagcttaagcacaagaacgcgattgaaaagattaaagaagcagcagagaagtggggtttcttccaggtgatcaaccatggagt

SEQ ID NO: 168494 - DNA, 381 bp, Arabidopsis thaliana nossen
  unsure (1)..(381): unsure at all n locations
caaccattaacttggccatcattcaacaacgctttcancgatttcgaccgaaacataatagggtggcagttcaaaatcaacatcnagacagctaagcaactacaaaaccagaaggacaacagaggaaacataatccgagcaaatggtcctctccatttcgtcatcccaccgcctcgtgaatggcagcaagatggcattgctaatggcatcgaagagacttattgcacggctaagattcatgagaatatcgatgatccaaaacggtctgaccattttagcacacgagccggaagaatcagcactcttaacagccttaatctccctgttctacgtctagtcagacttaacgcccttagaggttatctctacagcggaggaatg

SEQ ID NO: 168495 - DNA, 380 bp, Arabidopsis thaliana nossen
gcaggttcctctctgctctgacatgctcaacctgcaaaatgtacggtcagtttagtcatattatggtagaagaaacagacatgtaggtaaactcagagacaagcataaatataatcagttttagctgtggcacatcattccaattgtttacgaattttacctgtcctctcatgaccatttcagatttctttaacttcttcatggcataaatatttccagactttctctcccgacataagcgaacctgtaaataagattaagttatttctaagattaaaagtaccatactcattaagaaaggacccagaaaccaatctcggtaaagttgtaaatgctcgagctgcaagaataagtgagaataaaagggagaggtagtaatc

SEQ ID NO: 168496 - DNA, 385 bp, Arabidopsis thaliana nossen
aagaaagtcaaaatgaatgtttgtgaacaatgtggacattatttgaaaatgagtagttcagaaagaatcgtgctgtcgattgatccgggtacttggaatcctatggatgaagacatggtctctgcggatcccattaaatttcattcgaaggaggaaccttataaaaaccgtattgactctgcgcaaaaaactacaggattgactgacgctgttcaaacaggtacaggtcaactaaacggtattccggtagcccttggggttatggattttcggtttatggggggtagtgatggatccgtagtaggcgaaaaaataactcgtttgatcgagtatgctaccaatcaatgtttacctcttattttagtgtgttcttccggaggagcac

SEQ ID NO: 168497 - DNA, 370 bp, Arabidopsis thaliana nossen
tttctttgttcattgcctttgtagttgctagatctgttgcttgttgtaagttgtgttcgtgggatgatatcgggttccttgaatatagttttcgtaatatgtgataagatatcaaatccgactgatgaagtttaatcaacttgaagtctcaaaactagatatgagttttgttttgtccccaataaaaagtgttaatctaatcccatcagacttaatactatggcaatctctgaattggggtatctttggttaagaatgagatcaaaatccaatacttgactggtttgccctgtgtttgaattgactacttcacatgtgtagtttatgtgtgataactaataatggatcaccttgaggaatgaattgtttt

SEQ ID NO: 168498 - DNA, 375 bp, Arabidopsis thaliana nossen
  unsure (1)..(375): unsure at all n locations
ttcaataactataatggcttcatcataaccaatatcaaatcccagggttccaaacacacttttgtgggttctgatcataaactttttgtacctaattcaaactaattcagctgtcagtatcagttccaattccaactcccacttctcaagattctcgagacatcgaagctcaccatcatcaaaaaccaaacaagggtttcttgcaacggtccaagagagtatgaaccatgctctcttggctcgttctcttgctttcaacctcactctntctcatcgaaccgtacaaacccacacgttcgatcccatccacgactgcctcgagctgctcgacgacacacttgacatgttatctcgcatccatgcggataatgatga

SEQ ID NO: 168499 - DNA, 384 bp, Arabidopsis thaliana nossen
atcatcgtcacatagatcctcctttttcgttaattggggagagatatagggtcttttgaggatcttatggtgacagggtttagctcaaggagagggtgagaaaaagaagaagaaggtgagaaaagtgaaggcaaggctttgaggatgtcttttacaggaactcaacagaaatgcaaggcttgtgagaagactgtttatgctgttgagcttctctctgctgatggagttggatatcacaagtcttgcttcaaatgcactcactgcaaaagcaggcttcagctgagtagttactcatcaatggaaggtgttttgtactgtaagcctcattttgagcagctctttaaggagagtggtagtttcaacaagaactttcagtcacctgca

SEQ ID NO: 168500 - DNA, 373 bp, Arabidopsis thaliana nossen
gttttcgtagtatcaatctaccaatttgaagatgtcaattagctaagtgacatccatgtgacctaaatgctatctccattttgtacattcgaaattagtgattgaagtcgccaatttagggtttcaatttgcgtattctaggtttcaactttacttttgctttctttctcatcatacaaacgtatgacatttccatagattagatttggacaactgattttatataatcaaattagaagaaaattgtattagcaaactaaaaataagtcacaaatattatacgaataagagatctaaataatacgatcaaacaaaaaccttaggattttataagaaaaggtgtgaatgcgtcagtaatctgaatattgtccac

SEQ ID NO: 168501 - DNA, 378 bp, Arabidopsis thaliana nossen
cattattttcactgagcgcataacatttttgagacaagagactcgtctctctctctcttctgtcttgctgtccccctctctccggcgatggttgttgctatggaccaacgcaccaatgtgaacggagatcccggcgccggagaccggaagaaagaagaaaggtttgatccgagtgcacaaccaccgttcaagatcggagatataagggcggcgattcctaagcactgttgggttaagagtcctttgagatcaatgagttacgtcgtcagagacattatcgccgtcgcggctttggccatcgctgccgtgtatgttgatagctggttcctttggcctctttattgggccgcccaaggaacacttttctgggccatcttt

SEQ ID NO: 168502 - DNA, 378 bp, Arabidopsis thaliana nossen; identical to SEQ ID NO: 132024

SEQ ID NO: 168503 - DNA, 380 bp, Arabidopsis thaliana nossen
cgttacaaaggcaactcctgaagagagctacttccgatatctatcggcggcgtgcgatctctctgctccgtactgatttctctacttctccttcgattgctgatgctccaccgcacattccgccgttcgttcaccagccacggccgtataaaggtccttccgccgatgaggttttacagaaacggaagaagtttctcggaccttctcttttccactactaccagaagcctcttaacatcgttgaagggaagatgcagtacttgtatgatgagagtggtaggcgatatctggatgcctttgctggaatagtcactgtgtcgtgcggtcactgccatccggatattcttaatgcgattacggaacagagcaagctacttcag

SEQ ID NO: 168504 - DNA, 366 bp, Arabidopsis thaliana nossen
  unsure (1)..(366): unsure at all n locations
cacgcgtccgaaactctaaaattaataccttttttctcttaatccctatctnnccacaagtgtcttttcaaactttttggtgcacaacaacnnctctcctttatcattaaatttttaactctccatatcatccattataacattagacaccaaatatacttatttttttctctccaatactcaacgagagcttactttaaaccatcataagacagggtacttctaccctactactacccccataacgaatgtacattcaacctagtacaaaaggcaaccttgattctcacaattggtcatcgaactttgttgaaaatccattgactactaagctaccgtgcgctggattatgactgaacacctcta

SEQ ID NO: 168505 - DNA, 388 bp, Arabidopsis thaliana nossen
ctcatggagaatcaaggatctagctatagtaattgtcgaatgctggtataagggcggtaatcacaatacgttgggttgacccccgacatcccacacggtaaagctaatgttcttgtattccacagtctccacattgaaacctagcaagaacaggtattgtcaatacgacagatctaaaaaattcaagcactcattctatgaatcatacacaaaccatgaatcaaagatgaatgaatgcccttgagcaagtagaagtacaccgcatgcaaaccaaatgaaaaaacttgcaactatatattcaagttccaatctaatctatgaatccaaccatgatacgaaaaattcaacctaagcccttgagatgattgcataacaatgtgtcaatttc

SEQ ID NO: 168506 - DNA, 385 bp, Arabidopsis thaliana nossen
cttcttctctctcgctttgctctctcggaaatttttgcagaaacctctgtcatgtgaactcagagagtggtcgagttcgtatatctcctccgtttgagcaatggcttaggtcatccacacttacaagggaaacaaaggtgccaattaagcacttattgctgcagagtatgcggatgtgaatatcgaggagtccgcaaactttcagatgggcgtcactaacaagtcacctgagttccttaagatgaatcctattggaaaggctcccgcacttgagactactgggcgtcccatatttgagagccatgctatcgcccgcttccttagcccatagtatgttttctactctgtgaactgatcctaccttattgaatacgctcacattgag

SEQ ID NO: 168507 - DNA, 306 bp, Arabidopsis thaliana nossen
  unsure (1)..(306): unsure at all n locations
tatctcaccattccacattcagctatatgcaaattatatactttaatgtctttatgaaaatagagttaaaatattcctttaagattcagcactaagcatatcctaagcacaaatccgactttattacatcatcgtattcataaatacaacacaatatattacaaatacactgatacacaacccaatactgtaacgtaaaagcccatgagaaagagaaacagtttaactatcaactgttgaattatccaaaaagtttaaactacatagagaaatctacctanaattgtatatatactgattataaca

SEQ ID NO: 168508 - DNA, 350 bp, Arabidopsis thaliana nossen
ataaaatggaaaattaaacatgttgaaatttagacccgccgtacatcatgtcttaatgaaatgtttgtggtcgtatttatgattatacaaatgtagcctaaaatatcattatcgtaaaatataaatattttaaaaaacttacttcaagtgtttatatatgatacatagtcataaaattttgaaatttgtaatcgtcttcgatgtactgtggggtcaatcccaagttaattattattttgttttcaggatcatgttttgtatattttggtttgtccatttagtaatccatatataaatttttttaaaaattatcgtaatccataaataaataaaatttagaaattaaattt

SEQ ID NO: 168509 - DNA, 387 bp, Arabidopsis thaliana nossen
caaactctaaaatcaatctctgcaaatctctcaaccgtgatcaagatgcagaggttcgttaagactctcaggggaaagactatcaccctcgaggtggaaaggtctgacaccatcgacatcgttaaggccaagatccaggataaggaaggtattcctccggatcagcagaggcttatcttcgccggaaagcagttggaggatggccgcacgttggcggattacaatatccagaaggaatccaccctccacttggttctcaggctccgtggtggtatgcagattttcgttaaaaccctaacgggaaagacgattactcttgaggtggagagctctgacaccattgacaacgtcaaggccaagatccaagataaggagggtattcctccg

SEQ ID NO: 168510 - DNA, 383 bp, Arabidopsis thaliana nossen
ccactactcctacaaccacaagttgctgggagtggaagaatgtctcaaggagtggtagactctcggctatggtcttcactgatggtccattgcttgactctctagatctccgccaacccgtcaaaggaggtgaggtttgcttatattccccactatatgaaacgtctagcacacccaataagcccttaccttgtgataaggaaatatctgtctctccgccactttgtctgtcaccacttggtccgaagttttctgagagagtaaaagctgtaagaagttgccaaactgggaaaatactggaagatttaaggaatatcagtgaagaagcagaattaagagttgatcgtagattgtttgatgatgcatatgccattaggagagcg

SEQ ID NO: 168511 - DNA, 267 bp, Arabidopsis thaliana nossen
aaattaccttatataccggttggcttaaaacaaatcaccttatataggggaagtgaatcactagaatcggctccgataatcacaaactcgaaaagaacaaataagctttccattatagattaggacattgaattagaacactaaagtaaaaggttagctataaatgcatacaatctatttaataatacattttaccggcttataaatgatgaattcccacatttctttattcttcttcgtccttcaagatttaacaaaacacacaac

SEQ ID NO: 168512 - DNA, 380 bp, Arabidopsis thaliana nossen
caagcctggtatggttgttacttttgctcccacagggttgaccagtgaggttaaatctgttgatggtcgccaccagtctcttcttgaggcacttcccggtgacaatgttggattcaatgtcaagaatgttgctgtcaaggatcttaagagaggatacgttgcctctaactccaaggatgatccagctaagggtgccgccaacttcacctcccaggtcatcatcatgaaccaccctggtcagattggtaacggttacgccccagttctcgattgccacacctctcacattgcagtcaagttctctgagatcttgaccaagattgacaggcgttctggtaaggagattgagaaggagcccaagtttttgaaaaatggtgacg

SEQ ID NO: 168513 - DNA, 383 bp, Arabidopsis thaliana nossen
acacattttgttttttgtttcccatctaaaatgcgtatgagttgtaacggatgtcgagttctactttttggctgcagtgaaaactgtagcataagaccttgtcttcaatggatcaaatccgctgaatctcaagccaacgccaccgtcttcctcgccaagttttatggccgtgcggggctcatgaacctcctcaacaccggtcctgaccacctccgtcctgcgatatttagatcattgttgtacgaagcatgcgggaggattgtgaatccgatatacggatccgtggggttattgtggtcaggaaactggcatctttgtcaagcggccgttgaggcagtaatgagaggctcacccgtgactccgatcgcatgcgacgcagcggt

SEQ ID NO: 168514 - DNA, 418 bp, Arabidopsis thaliana nossen
  unsure (1)..(418): unsure at all n locations
cgtaccggaccggaaggcccggggcaccccaccccatcaatggccattagtcctacaaggaaaagaccaaaccttatttttnaccacttgtgctataacaagtgttttcggtatctaaaataatggctcaaaataacccaactggtcattccatatttgtgcattactcctgctgatcgaagtaaggatgcaagaaacaaactccttcaagggacaacggagtctgcatctcaattaaccgcgacgcctgcaccgatcaacataattaaccaaagtagttttttggatgaaaagaatattaggaactgagaaatgacttacggctcgagcaaaagcaaacatttcctcttcaccagaaagcattgatacgatcgaagaaagcgagccaactgcacttatgctaccttctgcaagcaca

SEQ ID NO: 168515 - DNA, 383 bp, Arabidopsis thaliana nossen
tgatcaacgcttttaagactatccgatcactgccctcgaataccaccggctcggtctgctcaacacgttgtcggttaggccggaaagtcactggagttagttttgccaccacttctgatcagcaaaagatggataaaaagcctgaaaatccaaacgagaaaaccggtgacgtgatgtcgcattcttatggagaagggtacgcaacaaggtctgacgaagaagggtttggaggaatctatggaggaaatcaaacacttcagaaggaaaacgagatccatgagaatcaccctgattacgacaaaacgcaaggtagcgaatcgaaggagaaggagaaagcaaggaaccagacacaatcccactgctaaagaaaaaatgatgattta

SEQ ID NO: 168516 - DNA, 385 bp, Arabidopsis thaliana nossen
  unsure (1)..(385): unsure at all n locations
cgagatagcggatcacacctcgcaccggttgatccctatctcgtcngtgcgagggttgcgtccttgatggtggacaagaaggctggtcctctccataaagcttctaagtatctagcagtccatctcaggtttgaaattgatatggtggctcattctctctgttacttcggaggaggcgatgcggaaaaggcagagcttgatgcttaccgagaaatgcatttcccaacgttggcaaatctaacaaagacgaaaaaaatgccatctccagacgatctgaggacagaaggactttgtcctttatcacctgaagaagccgtgcttatgcttgcgggtctgggttttagtcggaagacacgtgttttcgtcgctggtgcgaatatatatg

SEQ ID NO: 168517 - DNA, 413 bp, Arabidopsis thaliana nossen
  unsure (1)..(413): unsure at all n locations
ccgnnccggaggccgggggggtcccacgcgtccggtttttatagtcctacaaggtaaaggagtgatcgagtttgtgacggatagaacaaaagaatggtttccgtaactaaaggtgatgtggtaagaatcccttctggtgtcaccaactttatcaccaacactaaccagacggttcctctccgcctcgcccagatcaccgtccctgtcaacaatcccggcaactacaaggattacttccctgctgcatcccaatttcagcaatcctacttcaatgggtttaccaaagaagtcctctctaccagtttcaacgtgccggaagaattgctagggagattggttacgagatcaaaagaaattggtcaagggattatccgaagaatttctccagaccaaatcaaggaacttgctgagca

SEQ ID NO: 168518 - DNA, 380 bp, Arabidopsis thaliana nossen
cttagagtatcacgccctcgctgagtataaacctaaaggctcattgaaggctaacaagaacattttctgcacgttagccactaacggcgccggaaaattcgatctaacgacctctacctccggcgacgaagttattctccacaccggcgttgctccgtcgagactcgcggacactgtgctcgacgcgactccggttgtgatattcactgtggataatgtccttctccctgctgagctattcggaaaatctaaatctccatctccggcaccggcgcctgagccagttaccgcaccgacaccatctccagcggatgcaccttcacccaccgcagcttcaccaccggcacctccgacggacgagtcaccggaaagtgctcctt

SEQ ID NO: 168519 - DNA, 373 bp, Arabidopsis thaliana nossen
cgtcggcgaatgtggtggtcgcttcaccaacttctcaaactgggaaatgaaaaacgaaagatgtcttaaggaacaatataaatattattatgtaccaaataagaaagagggcaaaaggaaaaaatggcagcgtacccgagtgtgccacttctcgtgcatgcatgggatcttgaagacaaatggagggtcatgattaaagctgtttggtcggggtccgggtttttactccattttttgctttttcttgtcgagtcggtttttttataactctttaccctttttaccttcaggatattgtagagatgattaattctggaaatggtgtttgtgttatatttctggagagatgattatatagttcttttgttgttgt

SEQ ID NO: 168520 - DNA, 380 bp, Arabidopsis thaliana nossen
gggctgtcaagaacgtagaggaggtaggatggtcagttggtcagggctggtatggatctttcttggacggtagttggagtcggcggctctcctagggttccctcgtctgggattgatccctggggaagaggatcaagttggcccttgcgaacagcttgatgcactatctcccttcaaccctttgagcgaaatgcggcaaaaggaaggaaaatccatggaccgaccccatcgtctccaccccgtaggaactacgagatcaccccaaggacgccttcggtatccaggggtcgcggaccgaccatagaaccctgttcaataagtggaatgcattagctgtccgctcgcaggttgggcagtaagggtcggagaagggcaatcac

SEQ ID NO: 168521 - DNA, 380 bp, Arabidopsis thaliana nossen
attattttcactgagcgcataacatttttgagacaagagactctgtctctctctcttctctgtttgtgtgcccctctctccggcgatggttgttgctatggaccaacgcaccaatgtgaacggagatcccggcgccggagaccggaagaaagaagaaaggtttgatccgagtgcacaaccaccgttcaagatcggagatataagggcggcgattcctaagcactgttgggttaagagtcctttgagatcaatgagttacgtcgtcagagacattatcgccgtcgcggctttggccatcgctgccgtgtatgttgatagctggttcctttggcctctttattgggccgcccaaggaacacttttctgggccatctttgttc

SEQ ID NO: 168522 - DNA, 375 bp, Arabidopsis thaliana nossen
aaaaagcaaaaaatctcttaacaccttctccaccttctcccccccaccaccactggtcgtctgagaattttatgaacaaccaccatgaaatactgtgaaaaccactgccactctcgccagaaactaataaggcgaatattttaatcattaatcttcctcctcttcatcatattactaacaatcctccccatttgtgcaattatccaaccttcaaagccactcttcatccttcaagacgccaccatctactaattaaacatttacgtcaatacacacaacatcctcacctccaacttccaaatcactctctcttacctgaacccttacaacaaaatcggcttttactacgaccggcttaacatctactctacttac

SEQ ID NO: 168523 - DNA, 383 bp, Arabidopsis thaliana nossen
gttcttcttgaaaggggctaccggaaaaggacttgatgcctataacgcgacactggctaaaggcggaccaccggcggtaggggccaagaaagccaaccttgatcctataactaaccgaatcatcgaggagtttggttatcaagaaatcggtcatcttagggcgattacggatatgacgggaggaattccacgtccgctaataaatctgacgagagagaatttcgcagtgtttatggacagagcggttggacgcaaatctaatccgcggtttgatccttacgccaactcactcaactatctcttagcttcgtactatatcccttatgttggccttaccggttatgtcggaaccatcccttaccttgtctacttcaatatcaaaa

SEQ ID NO: 168524 - DNA, 384 bp, Arabidopsis thaliana nossen
  unsure (1)..(384): unsure at all n locations
ttcaaaacgattcgggtcaaggttattgactttctcattcancantgaagctgggatcatgggctggagggtggctaaagatgtgactgaattgattgggaacactccattggtgtatttgaacaatgttgctgaaggatgtgttggtcgtgttgctgctaagcttgagatgatggaaccgtgctctagcgtcaaagacaggattggttgtagcatgatttctgatgcacaaaagaagggtcttatcaaaccaagatagagtgtgctgattgagccaacaagtggaaacactggagttgggttagcattcacggcagctgccaaaggctacaagcttattattacaatgccagcttctatgagtactgagagaagaatcattct

SEQ ID NO: 168525 - DNA, 382 bp, Arabidopsis thaliana nossen
acaaaacaacaagaaaaaatggcaataaccaacaaattaatcataacacttcttctccttatctggatagctgtcgtccactgcttatccttccgtgtggagatcgacgagttcgagccaccacagcaaggagaacaagaaggtccccgtcgccgtcctggtggtggctctggcgagggatgggaggaagagtcgacgaatcatccataccacttcaggaagcggagtttcagtgattggttccagtcaaaggaaggttttgtgagagtgctgcctaagttcacaaaacatgcaccggctctcttccgaggaatcgagaactacagattctcgttggtggagatggagccaacaactttctttgtgcctcaccatttggatg

SEQ ID NO: 168526 - DNA, 379 bp, Arabidopsis thaliana nossen
gctgaggccaggtttgcgtgagcttcagccattgtaggccggaagtttggagcatgcatgtaatcctgaattgcttcagttaccctcccgatctctttgtaagtattccctctattaaccagagcgtcagctgccaatgggtcaatacgaagaacctcattatagcaggatatagcatccgagtaatttccctgtagtaaaggagaagaaaacaagctaaatttgtcaaacatgagcaagactacaaaaatgattaaaaattgataatggagcacgtagctacctgttgcttgtaaattatagcaaggttattgaacggagcagatagccctgtagttacagccagagtagccttgaataatgaggaagcaggacccat

SEQ ID NO: 168527 - DNA, 381 bp, Arabidopsis thaliana nossen
gcgccgtcttagccttacgtgcgccaacggcgcactctcctatcctacggtcatctatcggcactcccacagcgagagctgtctcggaagtttccggttgtactacgatcgatccagattttctcgtagagatctctgattctaaccagacgcgggcgatgtcgaaagctcgtgtgtacaccgaagtcaatgtgattcgacccaaggattattgggattacgagtcactcattgttcaatggggggagcaagatgattatgaggtagtaaggaaggtagggcgtggaaaatatagtgaagttttcgagggtataaatgtgaacagcaaggagaagtgcattatcaaaatcctcaaacctgttaagaaaaagaagataagaa

SEQ ID NO: 168528 - DNA, 379 bp, Arabidopsis thaliana nossen
cggacgcgtgggttaaaacttaaaagtctactttacaaaagtaagtgatgaacaatatatgagatatttaaaggattaatttgagtttgcttgagaaaaatatagtttaatacgcaaatttttaaaaaatattcatttaatacataaattttgaatataatcatttaatatatagaaaaaaagttattttacactaatttaatgttatctaatttttttacggcggtataaattttggctgataaacaattaagtttgtgtaaaatgaccggtcaataatttttacatatattaaatgtttatatataaaatttacgtattaaataacaattttttgataattcatgtagtaaacgacatatttccgactctatatttc

SEQ ID NO: 168529 - DNA, 349 bp, Arabidopsis thaliana nossen
  unsure (1)..(349): unsure at all n locations
attccggggcgtcgacgcgtgcgtcctcctccaacgttttgaagtttgctagcatgaaatcccattnanggcggaagtcatcatctttgttggaatccctaacaatatctggagttgcatcctcaaacacagtccggctgcgataaataacaggacctgtcagataaaccatacaacctatcaggctacaaacacaatttgatcaaatgtttctatcatccagtatttaagaattccccatttcattatagcaagaacacagtttcaagtaaaatgtcacaaaaatgccacacaaaggggtaaatgcaacaacgcatcacatcgtgcccaaaaagaaccaaagctaaaa

SEQ ID NO: 168530 - DNA, 381 bp, Arabidopsis thaliana nossen
  unsure (1)..(381): unsure at all n locations
atacatcatgggcctctgttttttttgggtcaaaatatcattgggcctcatgggttaaaaatgcgtatgaaaacttcaactgaaacccaaatcaactcaaattattgaatgtcgtgatctcattgttatcttgagattgaagcangggcggagggagtgaangggggaaggggtccattgaccccataacttttatgatttttaaggtaagtctcataatatttgatctcacatagctttactgagaacctccaaaaaaattgcacttattacttataatctgcaaggcattgtatagtttaggaattgaaatcttatgcatgacgtgaaacgatgaaagtataaacatcaattttcactattaacatcaatttttgtaga

SEQ ID NO: 168531 - DNA, 381 bp, Arabidopsis thaliana nossen
cggacgcgtgggctggcttggtcacttaagagcatcttaaattaggctgaaatgtgtcccccaaagggcggcaaacttctccttggcacacgcgtgaagtcatcttctattactactttctttaccatatttatcaccaagatcctctttgtctccaccaaccaacattaataactggtcttataaataaataattatttaaacaaatcaaaagttggttcgatatatcatagagaaagcttcgtaaagattttaactttatgagctttgcggtgtaatacgtatatgatactccgcaaaagcttttgactcgcatataaaatgcttcatggacctctttcgctatattgggtcaccggtctgcgtcattttagctggaaa

SEQ ID NO: 168532 - DNA, 383 bp, Arabidopsis thaliana nossen
aaaaaagagagagagaacctaaaaagaagagaagagaaagagagatccgaaatggcggtgacatcaacggtggaggagaaccaccagaaaaatccatcaacgccggcggcggtggaggagaagaagaagaggagatgggtgttttgggatagaaggtggaggagattagattatgtgaaattctcagcttctttcactgttcattctcttgctctcttggctccgttttatttcacttggtcggctctttgggttacgtttttgttttacaccatcggtggtcttggtatcaccgtctcttatcatcgcaacttggctcaccggagtttcaaagtccctaaatggcttgagtatctcttagcctattgtgcccttctcgctat

SEQ ID NO: 168533 - DNA, 384 bp, Arabidopsis thaliana nossen
ctggctttcgacgatctgctgacgaataccatggcgccgattttcagagccaggtcccttatcggtttttctgggttcttcttcttctttgcttccactcttccgatctcatctgggtctgaggatagttacacgatcacgggtagagtgagggttccagcaagcaccgtgattggtcatgcagctaaattctcaaatatcaaagttatactcaacggtggacagcatgttactttcctcaggccggatggatactttaccttccacaaagtgccagcggggactcatctgattgaagtttatgcactgggctacttcttctccccagtgcgagttgatgttagtgctcggcatcgtggcaaggttcaagcaacacttacagaa

SEQ ID NO: 168534 - DNA, 378 bp, Arabidopsis thaliana nossen
ctcaaaagagcaaaaaaaagagaagaagaatcaaaatcccacacagtgggggcacactcttgcttgaccgcaacaacacctctctttctcatcgttcttctatccctatcctccgtctcagttctcggcgcatctcaccaccacgcaacggcgccggctccgtctgtagactgttcgactctcatactcaacatggctgactgtttatccttcgtttcgagcggaggcacggtggcgaaaccggaaggtacatgttgctctggtcttaagacggtgcttaaagctgactctcagtgtctatgtgaagcgtttaagagcagtgcttctcttggagttactttgaatatcactaaggcttctactcttcccgccgcatgc

SEQ ID NO: 168535 - DNA, 380 bp, Arabidopsis thaliana nossen
agaagatctcactctcaccgccttcatttcctcgatctccgtcttcctcgttctccgtctggcggagagcatcgctcgaattagggtttctgctgagagaagatgagggaaatcattagcattcatatcggacaagccgggatccaagtcggaaattcctgctgggagctttactgtctcgaacatggaatccagcccgacggaatgatgccgagtgatactacagttggtgttgcacacgatgcgttcaatactttctttagcgagactggtgcagggaagcatgttcctagggctgtcttcgttgatcttgagcctactgttatcgacgaagttcgtactggtacttaccgccaacttttccatccagagcagcttat

SEQ ID NO: 168536 - DNA, 378 bp, Arabidopsis thaliana nossen
gtttctttatgaggggagtccatgaaacgtcattattgatgtttacgatgttagctctgatttttttagggttcttgatattgatatagattggcatgaactgtttagtcacaatagcgtgtctttgaagggaaatacttacttttttggtcgaaagggaccacgtttgcctatgctgtttaaacctccatctcgtcgttttgaatatttgactctatcttgtgttagaaatgagaaactcgctgtgttatacagccacctcaacagatttggcacaatagagatttgtatttcgactaagattgatcccagtgcagtatcatggaccacttttttgagaattgatatgacactaatcaatggtttaccggataactt

SEQ ID NO: 168537 - DNA, 336 bp, Arabidopsis thaliana nossen
  unsure (1)..(336): unsure at all n locations
ccaaacccaaaacacattttgttttttgtttcccatctaaaatgcgtatgagttgtaacggatgtcgaggtctacgaaaaggctgcagtgaaaactgtagcataagaccttgtcttcaatggatcaaatccgctgaatctcaagccaacgccaccgtcttcctcgccaagttttatggccgtgcggggctcatgaaccttctcaacaccggtcctgaccacctncgtcctgcgatatttagatcattgttgtacgaagcatgcgggaagattgtgaatccgatatacggatccgtggggttattgtggtcaagaaactggcatctttgtcaagcgg

SEQ ID NO: 168538 - DNA, 383 bp, Arabidopsis thaliana nossen
ggaagaaaatcgcatcgcaaaagattgatctcgatgtcatcagagacatggatctctacagaatagaacgcatgggatctacaaggttacttaccgaacaccgtgagatattttactttggttaaggttttattgattatcaccttaaattttaaatgttacagaacaatgtcgaatcggttatgaggaacaaaatgaatggtatttttttagtcacaaggacaagaaatatccaacggggacaagaactaatagagcgaccatggctggattttggaaagccacgggaagagacaaagctgtttacgacaaaacaaaactaattggtatgaggaaaacacttgtgttctacaaaggacgtgcacctaatggcaagaaatccg

SEQ ID NO: 168539 - DNA, 375 bp, Arabidopsis thaliana nossen
aaatttgttgacaccgaatgcatatgttcagaacccttaacaccgcataatcatgtaaactcaaaaattgggcgtggaaacccaaaaggttgattcatcagcacacaaaactcaatgctgttaatttaaaagtaacgaaataaacgaattgcaaaattataggggtcatgcacaactccacctatatcatgactgatgaagcccacctaaattacatgaatcttgctggtggagagatcaaaactctacttgttcgaggccttgttagacagcttcttcaccggtttcatgcttcttcttgtcagaatctgcctcgagtttgcgacaggggaagtagaataactgaatgagaataagaaaatctataacagaaca

SEQ ID NO: 168540 - DNA, 379 bp, Arabidopsis thaliana nossen
ctgatgaaaagctaacggaaaatggggaaatacataagaaagagcaaaatcgacggagctggagctggagctggtggtggaggtggaggtggaggtggaggtgaatcctctattgctttaatggatgttgtttcaccttcttcctcttcttcacttggtgttttaactcgagctaaatctctagctcttcaacaacaacaacaacgctgtcttcttcaaaaaccctcttctccttcttcgttaccaccgacttctgcttctcctaatccaccgtcaaagcagaagatgaagaagaagcagcagcagatgaacgattgtggttcgtatcttcagctacggagtcgtcggcttcagaagaaaccaccaattgttgtgattc

SEQ ID NO: 168541 - DNA, 379 bp, Arabidopsis thaliana nossen
ggaaatggttgccctgatctgaagcatgtctctctgaacaaatgcttgcttgtttctggtaaaggacttgtcgctttggccaaatctgcattgtcacttgaaagtttgaaacttgaagaatgccacaggatcaaccagtttggtcttatgggttttctcatgaactgtggctcaaagttgaaagctttctctttggcaaactgtctgggcatcagtgacttcaactcagaatcctctctgccatcacccagttgcagctctttacgttctctgtcaatccgatgctgccctgggtttggggatgcaagtctcgctttcttgggaaagttctgtcatcagcttcaggatgttgaactctgtggactaaacggagtgacag

SEQ ID NO: 168542 - DNA, 376 bp, Arabidopsis thaliana nossen
ctggacacctcagtcactttatcaaaggtccttcctctcgcattatcatggcattgtcttttttggaccacgattatcttgattttcatactcacgtattgcttcattcatgctaaattatcttctctattactatctcctcgcttttccaggcttggttttagctaaatctcaatttactcgtgctttgtttgtccatgtaaatctgcgtctcaattctttaccatttatttgttcatgttttgtttttctttgtcctagttcattgagatgcttgaagatcacccgaagcttctattgtcaaaagcaagtgttaaacagggggaaaacactctctacatgcaaggcacctcggttctagaagagtttcacagac

SEQ ID NO: 168543 - DNA, 381 bp, Arabidopsis thaliana nossen
ttcaagaaacacaaaaattcaaacttattcaaagaaaaaaaatatagcagggactagaatgaatattacggtggaggatccaagcaagatcatgagaaggtcaattcacactttcctccaaaactaccaccgtgtcaccaccgcagccgccgtggccctccctttctccgccggtctcctcctctctcaacctttcttctcttcttcctcttccacccttcacatgaggctgaacatgctctttcgcggagcgggtttctcttcttctcatgatttcttcaacatcttaagccttaaactttcacaaaccctatcttcctctttattcactcttcctttctccctcacattcctccttttatccaaagcttacgtcatcaa

SEQ ID NO: 168544 - DNA, 375 bp, Arabidopsis thaliana nossen
ctgaaaacgaaaacgaaaataaaaagcggagagagagatggctagatacgatcgagcaattactgtcttgtcccccgacggtcacctctttcaagtcgaatacgcccttgaagccgtccgcaagggtaacgccgccgtcggtgtccgcggtaccgacaccgttgtcctcgccgtcgagaagaagtccacccccaagcttcaggattctagatcagccagaaaaattgtgagccttgacaatcacattgccttggcatgcgcggggctcaaggctgatgcccgagtcttgattaacaaagcaaggatcgagtgtcaaagccacaggcttacacttgaggaccctgtcactgttgagtacatcactcgctacattgc

SEQ ID NO: 168545 - DNA, 378 bp, Arabidopsis thaliana nossen
aaaaaaaagaaaaagggaagtaagaagccagctagggtttgactgcgagggatttctgatctgcgtgggggtctcaaagagaggaatcgatcatcgattccgtggatttcgtttccctccctttttatttttatttttcgagaagccatctcaaaggatctgagtttataccgttgcatcccccgcgactttcgttttccgatttcccccaaattcgatgcaaatctaagaagagagagaaatagaaaggtgtgtgcgcttcaaccgactcagtgtctctctctctctctctctgttgctatttgaggttttttcctttgcctcgggggctctcgctgtccgaattcttttggagggatttattggtgactgtcagat

SEQ ID NO: 168546 - DNA, 384 bp, Arabidopsis thaliana nossen
ctaaagtttattttcttaaacttattacaaaaaacatgatcttcaaaagttgatttaatctctttttatccatcttcttcttcatttctcaatatcaaacttttttttttttgtaagcttaacataaaccctaatattttcttgatttttttcaagaaaataaaaacataaagatgcttgaagttagatcaatggatatgactccaaaatcaccagaacccgaatccgaaactccgacccggatccaaccagctaaaccaatctctttcagtaacggaatcatcaaacgccaccaccaccaccaccacaacaacaacaaagtaacttacaaagaatgtctcaagaaccacgcggcggcgattggtggtcacgcgcttgacggtt

SEQ ID NO: 168547 - DNA, 383 bp, Arabidopsis thaliana nossen
tcgccacaaagcaagagtttgtgctactagcttagctaaaagtgtttgcttaagacaagaagaacatggcgtcttaccagaaccgtccaggaggtcaggccactgacgagtacggaaacccgatccagcagcagtatgacgagtacggaaatccgatgggaggaggaggatacggaactggtggtggtggaggagctacaggtggccaaggatacggaacaggtggccaagggtacggatcaggtggccaagggtacggaaccggtggccaaggatacggaaccgggaccgggactgaaggctttggaactggcggaggagctaggcaccacggccaagagcaactccacaaggaaagtggtggtggcttgggaggaatgctt

SEQ ID NO: 168548 - DNA, 379 bp, Arabidopsis thaliana nossen
tgctactgcgaagaacaacaaattccttgtttatcatggcgaattccggcgaagagaagttgaagctctactcttactggagaagctcgtgtgctcatcgtgtccgtatcgccctcgctttgaaagggcttgattatgagtatataccagtgaatttgctcaagggtgatcaattcgattcagtttatcgttttgatcttcaagatttcaagaagatcaatccaatgggaactgtaccagctctggtggatggagatgttgtgattaatgattcttttgcgataataatgtatctggatgagaagtaccctgagccacctttattacctcgtgacctccataaacgggctgtgaattaccagggaatgagtattgtctt

SEQ ID NO: 168549 - DNA, 379 bp, Arabidopsis thaliana nossen
ctcctctctcgcttactggaatttggggattagcttgggaaacttcgccggagattcatacgtcgtcgtcgtctttagtatctgtatcgtcaatggcgttgctgaagtctttcatcgatgttggctcagactcgcacttccctatccagaatctcccttatggtgtcttcaaaccggaatcgaactcaactcctcgtcctgccgtcgctatcggcgatttggttctggacctctccgctatctctgaagctgggcttttcgatggtctgatccttaaggacgcagattgctttcttcagcctaatttgaataagttcttggccatgggacggcctgcgtggaaggaagcgcgttctacgctgcaaagaatcttgtcatt

SEQ ID NO: 168550 - DNA, 377 bp, Arabidopsis thaliana nossen
cattcatcttctcattttctccttgatttccacttgtgttgtctggaaccaggccgaggttgttggtgttcaaggcctaaacagctaccgaactgctcaaagagttcctccatttgccaagaatgagaaggctgattgtgtggctgatgagatcgccgacaagctcgaagatcagccatgcacaaaccacaccacatcgagcacagttacttctggctcggtacctccacagctgacgaactaccaggacattctctctgaatgcaaaatcgacccaaacactacccgtgacggattgatcttacctgtctgtatccctaaccagatcccgactttggctttaactaattacacccaaactggttatgctcggtatc

SEQ ID NO: 168551 - DNA, 396 bp, Arabidopsis thaliana nossen
  unsure (1)..(396): unsure at all n locations
gtaggagggaacccaatccacagaaccttacttggctggacatctccttgaaagtcttcatatgagtgaggatactgtaagaatataacaaaacgtcaaaaccagtaacctatacatatcactagtaacaagagacatactttcaacattcaagactaacctgcggtttatgattcatattgccatttctgttatcgtaagagccagcccattgttcctgaagataacacaaaggtaacttgatttcagacttaagaagttgagcctactctacaatgaaatagagacgagtaaatactgctcctaggggcacaagacagagctcagccctatcagtttgacgcanattatgaaactaaacaaaatgtttactggagcgttttcaaaagtaaaaat

SEQ ID NO: 168552 - DNA, 394 bp, Arabidopsis thaliana nossen
ccatgatcatgagggggattcacaagtagagtctagagaaaagagagaatgggtgagaacaataccaaattccttatgcaatttgcaacttttgcaatggttttaacctttgcgatgatggtcaaagaagctacaagcatgtccatttgtgacatggacataaatgatatgcagaaatgtcgcccagccatcactggaaacaatcccccacctcccgtcaatgattgctgcgtagtggttcggaaagctaatttcgaatgcttatgcagatttaagttttatctcccaattttacgaattgatccatctaaagtcgtggctcttgtagctaaatgtggtgttacaacagtccctcgttcttgccaagtttgaagaactaagctgaggacaaatc

SEQ ID NO: 168553 - DNA, 394 bp, Arabidopsis thaliana nossen
agttgatgatggtgatgatatctcttcacttctctactccgccgctagcttttctcaaatctgattccaattccagatttctcaagaaccctaatcctaattttatccaattcaccccaaaatcccaacttcttttcccccaacgtctcaatttcaacaccggaacaaatttaaaccggcgaactctgagttgctatgggattaaggattcaagtgagacaacgaagtctgcgccgtcattagactccggcgacggtggcggcggaggaggtgacggtggagatggtggtgatgatgataaaggtgaagtggaggaaaaaaataaactttttccggaatggttggattttacctcggatgatgcacagactgtgtttgtggctatagctgtatc

SEQ ID NO: 168554 - DNA, 387 bp, Arabidopsis thaliana nossen
acccattttaaatgcctatagtccatcacaaacacccacgatgatgtaatgaatgcggttgaagtatccaattggtaagcatacatgggatcttctgaccagagaatcaaagtatcgaggaaaaaattcaatgaggacttgtgacaagctactttcccgtactagatctaaggtcacatataacttgttctttgaagttgaacaaaattctccttaatatgtccaaaataaacttatgtttcaacagatggcatcatcgtaatatgaaaagaatcaatactaattatacaaaatattcaaagtgaactccaagagaagtgatataatattcttttcaatctcttacagatcaatgttacatggaagggtttggacattatttacaac

SEQ ID NO: 168555 - DNA, 343 bp, Arabidopsis thaliana nossen
cccacgcgtccgatttctcacattttcgtaggcgcaagactcctttcagattcttacttgcagctatgggtaaagagaagtttcacattaacattgtggtcattggtcatgttgattctggaaaatcgaccacaactggtcacttgatctataagcttggtggtattgacaagcgtgtcatcgagaggttcgagaaggaggctgctgagatgaacaagaggtccttcaagtacgcatgggtgttggacaaacttaaggccgagcgtgagcgtggtattaccatcgatattgctctatggaagttcgagaccaccaagtactactgcacagtcattgatgcccc

SEQ ID NO: 168556 - DNA, 397 bp, Arabidopsis thaliana nossen
tttctccttaatttgcttcgaaaaagaaaacaaaaaaaaaataacaaatggaagaaagcacatcgaagtttagtcttcgtgctacgctcgtttgtcgtcagtcgtctgatccatctcagccgatacacttcctatctagacaatatggtgaaaaattgtctaaatgcttaaactgcagatacacgaaacaacgtactgcgtatcatctctattgtgaaacctgtgattacggtattcacaggcattgttattacttaccaagatgtcgtttatcggatataacaaggcctcacaccctccaagagagttatcagtatttctctagttgcttcgcatgtggagacgagggcatcggacatgatctgaactattaatgtgctacttgtggtttgttttc

SEQ ID NO: 168557 - DNA, 395 bp, Arabidopsis thaliana nossen
attcaatctgaaagttgtgtgtgtttttagatacaattgaaaaaaacatgaatctggacttatgtgatactaaaaaacttcctcatcattttgttctgcaaccatttttacaagttggagcttataactgaaaacttgattcaaagaatcaaactaagtgagttgaatattttctaaacatgttaaatatattggtacaagtttgtccaatcattttgctagtttcctattttaatgttttctccactttaggagatgaactttcaagtgcaaggaaaggatttaagaccaagaaactttaactcattaaatatgtgcagctgaagcatacaaaatttaagcttgtgcaatttaaagcttctggagagatgcttacgttaattcgagaagattag

SEQ ID NO: 168558 - DNA, 392 bp, Arabidopsis thaliana nossen
gcgatattactcgactatgttaagaacacggtggtgaaaacttgtccggcgattcctttttgtgatccgagaaactatccgagcactggctcagccgtgttattaccgttaaagaatcttgaagcggataatgtcgagacggaggttctagtgtgtggaggtgcaccaaaaggatcatacaacctcgctagaaagaaaactttcgtgaaagcgcttgacacgtgtgcaaggatcaagattaacgatgccaaacctgaatgggcggttgagaagatgccacatgctagagttatgggagatatgattcctttgccaaacggagatgttttgctaatcaacggtggatcttttggtactgctgcatgggagcttggtcgtacaccggttttagc

SEQ ID NO: 168559 - DNA, 393 bp, Arabidopsis thaliana nossen
tggtcatcagacacaaaagactctcaaaccctaactagtctcgcttttgcgctctctcgaaccttcttggatctctgtcctttctcgatcacttgctaaaatcaaaattttaggcgggaattcgatatccaagcccaagacccaaacacttcccccctcacgtttcgctgctttcgttagctagctttctcaaacgagatctgggcttgtcgaaagaaacgtgatatatatgcagtgagccagtgatcatgcaaaagaaattcagagtgcgatagagaagatggagcctgaacgtttaaaatttggaggtccaagagagttgtgtggtgctgcggatcttatatctcaattcaaactagtgcaacaccatgaattcttttgcaagaaatctct

SEQ ID NO: 168560 - DNA, 101 bp, Arabidopsis thaliana nossen
caaataaagaataaactgttctgttttgaatttgttaaataggagagtgcgagctcaagaacaagctgggtcataaataaataaaatatattttctaaaaa

SEQ ID NO: 168561 - DNA, 374 bp, Arabidopsis thaliana nossen
ctacctttcagtgtgatgatggacatatagtttgcaatttttgctttgcgaaagtgagtaacaagtgccctggtcctgggtgtgatttacccattggtaataagcgatgcttcgcaatggagagggttctcgaatcagcctttgttccatgtcaaaatactgagtttggctgcacaaaaagtgtctcttatgaaaaagtgtcaagtcacgaaaaggaatgcaactactctcaatgctcttgccctaacctcgaatgcaattacactggctcatataacatcatctacggtcactttatgcgtcgccatctttacaatagtacgatcgtttcctccaaatggggatattccactgttgatgttctaataaacatc

SEQ ID NO: 168562 - DNA, 396 bp, Arabidopsis thaliana nossen
  unsure (1)..(396): unsure at all n locations
ccgagatattattacagtgaaggatgaacaaaactctagaacttnggttgaaaagcttctagttttatgtgcccctgangaattnccaaaccatctgactcttcacacattccaatatgaagggttagtcaatcaaataatagataggaaatgcgtcggtttgaaaataaatgaattgcttgtcgtagaatattactctcgacagacttaataaacctaacttaagtaaaaaaaaaaattactaaaaacaagagttcggacaactccccttttccattaaaaataaaaaggcacaaggtaagggattttgtcaaagaatatttttcctattcatgtatcatagattggtagggagattgggatcccttgtttgctcttcccagcattttccatatg

SEQ ID NO: 168563 - DNA, 389 bp, Arabidopsis thaliana nossen
agcagctgcaaacatggcaagaggattgaagaagcatctaaagaggctcaatgctcctaagcattggatgcttgacaaacttggtggtgccttcgctcccaaaccatcttctggacctcacaagtcgagggagtgtcttcctcttgtcctgatcatcaggaacaggttgaagtatgctttgacttaccgtgaagttatctctatcttgatgcaaaggcatatccaagttgatggcaaagtcaggactgacaagacttaccctgctggtttcatggatgttgtatccatccccaagaccaatgagaacttccgtcttctctacgacaccaagggacgtttccgtctccactccatcaaggatgaggaagcaaagttcaagctttgcaagg

SEQ ID NO: 168564 - DNA, 390 bp, Arabidopsis thaliana nossen
  unsure (1)..(390): unsure at all n locations
agaaagcagcacgaacaccaactcttaaggaaaacatctaanttgtgggggagtaattgcatgcggtttaaagctacctgtccagcttaagacactcaagtctcacatctgtccctttttacttcgacttcgcttcttttggcttcttttaaactctctctatctctctctttcttcttcacactttgttgttaatttcaagtgtttgatcataatggcaacatcagctcgtagagcatacggtttcggtagagccgatgaggctacacaccctgactccattagagcaactttagctgagtttctctccacttttgtcttcgtctttgcagctgaaggctctatcctctctctcgataagttgtattgggaacatgcggctcatgcggg

SEQ ID NO: 168565 - DNA, 398 bp, Arabidopsis thaliana nossen
aaaaagccacattaagttcttactctgctgcattaactgatggctagatgcatggcttacaatctttatccacaaatgttggctctatgcataacagtagcagtaatgttccttggtgtgagatcagaattgagtcaggatataaagggatgtcaggatgcgatgtctgatctctactcttgtcttccttttgtcactaacaaagctaaagcaccagactcaacatgttgcagcacactcaaggtaaaaatagacaaagggcagaccaggaaatgtctatgtactctagtcaaagacagggatgatcctggtttggggttcaaagttgatgccaaccgtgcaatgagcctcccttccgcttgtcatgtccctgcaaacatctctcaatgcccagatct

SEQ ID NO: 168566 - DNA, 392 bp, Arabidopsis thaliana nossen
ctgcacaataatgtacacaagcgggacgactggagaacccaaaggtgtggtcttaaacaacgcgggagggtcggtccagggtttatccatagacaaaatgcttgaagtcactgatcgatcgtgtgacacgagcgatgtgttcttcttgtacttgccattagcacattgctatgatcaagtcatggagatttactttttatctagaggctgctctgttggatactggcgtggcgacattcggtacctgatggatgatgttcaagctcttaaacctactgtgttttgccgagatccaccagtttaccacaaactatatgccggtataatgcagataatatcagctactggcttgatacacaagaaactgtttgattgtgcttataactacaaat

SEQ ID NO: 168567 - DNA, 343 bp, Arabidopsis thaliana nossen
cccacgggtccgatttctgaggttggggtaaccacaatactcctttcagattcttacttgcaggtatgggtaaagagaagtttcacattaacattgggggcattggtcatgttgattcttgaaaatcgaccacaactggtcacttgatctataaactaggtggtatttacaagcgtgtcatcgagaggttcgagaaggaagcttctgagatcaacaagaggtgcttcaagtactcatgggtgttggacaaacttaaagcctaacgtgagcgtggtattaccatctatattgctctatggaagtgtcagaccaccaactactactggacattcaatgatgcccc

SEQ ID NO: 168568 - DNA, 395 bp, Arabidopsis thaliana nossen
cagatctggtggaaattttatcttttgaccccaccactggatctctctggatacacattcatctgagtaatagagtaaaaacgaaacacaagaagcaattatgaagaattgtgagagatttgctaatctcgctctcgcaggtttgacattggcaccactcgttgtgagagtaaatccaaatttgaatgttattctcacagcatgtatcactgtttatgtgggttgctttcgttcggtcaaggatactcctccaacggagacgatgtcaaaagaacatgccatgcgtttcccattggttgggagtgctatgcttctctcacttttcttattgttcaagtttctctcaaaggacttggttaatgctgtgctaacagcttacttctttgttcttggga

SEQ ID NO: 168569 - DNA, 394 bp, Arabidopsis thaliana nossen
  unsure (1)..(394): unsure at all n locations
gccgccgttagcactgtctccgtcgcgctacaatcgcgcanagtgtcgagtgtggtctccaggaatgtaggatgcgtatcttctctttcgtttggtttctttgagaaagaatattgctttaagagccctagccttcgtgtgtctgcagcagcttccatggacgccgtcactgctgagaaattttctccggcgagttttctagacaaaaaagaaaccggagttcttcactttgtgaaataccatggcctcggcaatgacttcattttggtcgataacagagactcatcggaacctaagattactcaagaacaggcggcgaagctgtgtgatcgaaacttcggtgttggtgccgatggagtgatttttgcaatgccaggagtcaatggtactgatt

SEQ ID NO: 168570 - DNA, 389 bp, Arabidopsis thaliana nossen
ctagattcagtttttttcatcaaagaagagcgtcttcataaacggcctgggtcttcttccttggggatgtagtttctttcttccacgaaaatgagagagtgcatttcgatccacattggtcaggctggtatccaggtcggaaatgcttgctgggagctgtactgtcttgaacatggcattcagcctgatggccagatgccgagtgacaagactgttggtggaggtgacgatgctttcaacaccttcttcagtgaaaccggtgcaggtaagcacgtcccacgtgctgtctttgttgatcttgagccaactgtgatcgacgaggtcaggactggtacttaccgtcagcttttccaccctgaacaactcatcagcggtaaagaagatgcagc

SEQ ID NO: 168571 - DNA, 397 bp, Arabidopsis thaliana nossen
ctctcactcccctaacactcttcatcatccatcacatctcctcttgcagaccaacgtaaaacactaactaagagatcaatatggctggagtgatgaagttggcatgcatggtcttggcttgcatgattgtggccggtccaatcacagcgaacgcgcttatgagttgtggcaccgtcaacggcaacctggcagggtgcattgcctacttgacccgaggtgctccacttacccaagggtgctgcaacggcgttactaaccttaaaaacatggccagtacaaccccagaccgtcagcaagcttgccgttgccttcaatctgccgctaaagccgttggtcccggtctcaacactgcccgtgcagctggacttcctagcgcatgcaaagtcaatattcctta

SEQ ID NO: 168572 - DNA, 393 bp, Arabidopsis thaliana nossen
ccggatttgttaatgtcatgcaagtcctcagccgctagcctcgcgcgcagcgctcggctctctccggcttgggtttgtctgacgccattgcttttttctcgattgcttgaaaattgatgaaaaaccgctttagaactttacgattttagaattctttaacttgtgctatcagttgagctgcttttgttacttcttatagtaatgctctgtttctgttgagacgctacgtggtagatagagggacgcaacagctgccacgtacaatttacttagctttatcttctacggacgtggtatgacacgtggacttttcatgcatggatcatgattcttgagtgttcatggcatgacttaagagctaagacataagcaagcaagcatcgatggtcggtc

SEQ ID NO: 168573 - DNA, 113 bp, Arabidopsis thaliana nossen
  unsure (1)..(113): unsure at all n locations
ggacggcgaacatccatgactgtatccatggcaacatctggccagtaatgggtggaggataccatacgatgcaggacacnacatacaagcataactatggtcattataccata

SEQ ID NO: 168574 - DNA, 397 bp, Arabidopsis thaliana nossen
  unsure (1)..(397): unsure at all n locations
acggttttgagcaagcctacgaagagtctatggatcaaaatataangaaacaaaaagagattataaattggctgaataaaaacagtgatcttatctacagagatggacatgtcaccttttgatccatctttcccttcgatcggtcactcgaatcagaagcagcagtattcactagtgctccctccgactgcattaaaattaacaccagaatttttgtttggtccataaaaaatcacactattttgaagaatataagtgataaaatctagccagattatgagctaaccccaagatcaggatgatctgtgtcgtcatctgttgagacatcagttctcggactggtatcagccatattactttctcaccacttttctgtactaacacttgataacaaaga

SEQ ID NO: 168575 - DNA, 401 bp, Arabidopsis thaliana nossen
ctcaagtaaacaaatgcaattttcccaaaatcaataatcaaagctgaatcatgaagaagacctgagtcgataacactgataatgctgcactagagaaatgctgaagtgctcgaaactgtgtgtacctaagatatccttcgttgacactatagagaagaagtaaagaaagaaacttggttaaaacacatgctttaaggctaaagcctagagactctctaaaaacaaaagttccaaactttgagttcacctgtatggataaccagaaggaaagaacttgttaaggaaagattcaaccatcttctgaggaacaggtcttgcatcatcaacaactttcatctaaaacgtgataattcacataatgattctacaagttgagagcaatggcataagagagacaagaa

SEQ ID NO: 168576 - DNA, 391 bp, Arabidopsis thaliana nossen
  unsure (1)..(391): unsure at all n locations
ctctttctgtggacgaaactaaacctgagagaaaaagccagaagggccgggctcagagtgttgggttgggattgaggganagctctacctctgtagaaaagaaggattcattcatcatatccagaaatggctctaaagtttaaccctttggtggcatctcagccttacaaattcccttcctcgactcgtccgccaacttcttctttcagatctcccaagttcctctgcctcgcttcttcttctccggctctcagctccggccccaaggaggttgagagtttgaagaaaccatttacgccacccagggaagtgcatgttcaagtcttgcactccatgccacctcaaaagatcgagatcttcaaatctatggaaaactgggccgaggagaacc

SEQ ID NO: 168577 - DNA, 392 bp, Arabidopsis thaliana nossen
  unsure (1)..(392): unsure at all n locations
actaaagccaccttcaagagttacaaaccagcgtgatgcanatcggggtgatttttgggaaatgttccgaaaagcaccagaaggttccgcaagaaaaacagaagctcagaagcaagtacttgaagccatgtctcacagacttcatattgacaatagcgtgatactcgtcggaaaaatcttgtttggcatttcgagaggtcctgaagtgctaaacaaagtacggtctgctgggcaacctctagtcgatgactggaactgccttaaaaatcaggtgagagctttcgagaggcactgtggatcgctgtctcagtacggtatcaagcacatgaggtcttttgcaaacatctgcaatgcagggattcaaatggagcaaatggaggaggcagcttcac

SEQ ID NO: 168578 - DNA, 354 bp, Arabidopsis thaliana nossen
attctcttcgtctcaacatttagggtttcagagatcggctgattttcacatccacaagtatggcgactcaaatcagcaagaagagaaagtttgtagcggatggtgtattctacgctgaattgaatgaggttctcacaagagagctagcagaggatggttactctggtgttgaggttagggttactccaatgaggactgagattatcatcagagctactcgtactcagaatgttcttggtgagaaggggaggagaattagggaattgacatctcttgtccagaagagattcaagtttccagttgacagtgttgagctctatgctgagaagggtaacaacagaggtctctgtgcca

SEQ ID NO: 168579 - DNA, 374 bp, Arabidopsis thaliana nossen
cttatgtaagactggagcttttgaaatgggatcctcttcatcaagatggggatttctttgacatgaaatggcatgggttgctttttgattacgggaagccagaagatggggatgattttgcaccagatgatactgatgccaaccttgtccctgagctagtagaaaaggttgcaattccaattttgcaccatcagatagttcgttgctgggatatacttagcacccgggagacaagaaatgctgttgctgctacaagcttggtgacaaattatgtttctgcttcgagtgaggccttagcagaactatttgctgctattcgtgctcgccttgttgaagccattgcagctattagtgttccgacatgggatcctctg

SEQ ID NO: 168580 - DNA, 399 bp, Arabidopsis thaliana nossen
atttagtctacatttagactatatatagtagaaagagtaccatgttgcgtgtggacttcaaacgggttagctttaaccatgttaattaattgtcccaatttttggttaatagagaatcaaagtaaagcggacttaccaaagaataacgaaaggctatggttctcaaatatgatttttttattcagaagtaattcgcgggattatgcactctttcctagttatagtgccactgggtgaatccagcctattcttgaaatgaacaactcacacacactccctttccaaaaaagatcaatacaccgaaaactacacttagatttattggatttgttgctaaaatatcggtattaaatccgaaactcccggcggatggccagtgacccaagtaaacgaaagaat

SEQ ID NO: 168581 - DNA, 395 bp, Arabidopsis thaliana nossen
caaggatcgaaaacattaagtagctagttaagagagagagagagatggagatgaacattaagtttccagttatagacttgtctaagctcaatggtgaagagagagaccaaaccatggctttgatcgacgatgcttgtcaaaactggggcttcttcgagctggtgaaccatggactaccatatgatctaatggacaacattgagaggatgacaaaggaacactacaagaaacatatggaacaaaagttcaaagaaatgcttcgttccaaaggtttagataccctcgagaccgaagttgaagatgtcgattgggaaagcactttctacctccgtcatctccctcaatctaacctatacgacatccctgatatgtcaaatgaataccgattggcaatg

SEQ ID NO: 168582 - DNA, 398 bp, Arabidopsis thaliana nossen
gagtcaggtaaccgttttaagtgatcaatacctttgaagtaatgctgggcattggaatattgataaagtgtggcccagcctcggttgctacagcttttgccagcattgtcttccccgtaccaggcggtccaaacaatagtataccctttgtaggctgcatgaaaaaaaaaacagttataattcagtttccatagaatattgaatgaaacaacgatttgattttaaaaagcaagaaaggtacctttgtaagttgacctttgccaaacaattcgggtctttgaagaggaagcatcaccaactccttcaaggtatctttcacattttccaaagccccaatatcactgaaagaaacaccgatatcacttggaggaatgacgtctgatagtagttttttctcg

SEQ ID NO: 168583 - DNA, 383 bp, Arabidopsis thaliana nossen
ttcttcttcttctttgagttttttttttttatcattcttgacgtgatgatgaagatactcagcggccggtcacaccattctcaaaccacaactcttaaaacagctgagatcttgtctaaatacagacccattgcaccaaagcccgggacgcctcgagtgaacgacgatgatccttcttcctctatgtctcacaaaatcagccaatctccttaccttcgtaacctctggcctcagcttcaagcgcgacctacaagaacccgcaagcgaggccgaggcgggatgggtccctcttctcttgctatgaagagaccaaagtcgtcatgcgggtcttctagtacttctactatttctacacaacgtgttcttggacctattaaaacact

SEQ ID NO: 168584 - DNA, 224 bp, Arabidopsis thaliana nossen
caggttcaaagctgattatggggctaaatccaccatttggagtcggtgcgtctcttgcaaacaagtttattaccaaagctcttgaattccccccaaagattctcattctcattggtccttcccagactggaagggtagattaaaagaaatcatcatatttgcctatattggaaggttaaaccgtcctatcttgaaattcattttacctgcctggttctgtcaat

SEQ ID NO: 168585 - DNA, 397 bp, Arabidopsis thaliana nossen
cataaacaagaaatgcgccgttatctctataatcaccagaatgaggacggggggtggggtttacatattgagggccctagcaccatgtttgggtctgtgttgaactatgttactctaaggttgcttggagaaggacctaacgatggagatggagatatggagaaaggacgagactggatactaaatcatggtggtgctaccaatattacatcttgggggaaaatgtggctatcggtacttggagcttttgaatggtccggaaataacccactgccacctgagatatggcttctcccatatttcctgccaatacatccaggaaggatgtggtgccattgtcgaatggtgtacttgccgatgtcgtatttgtatggaaaaaggtttgtgggtcccataa

SEQ ID NO: 168586 - DNA, 393 bp, Arabidopsis thaliana nossen
attctttttttagttattcttttcccctttactagtctattaataaccgaacgaattattccaatgtataaaaaaaattccaatggcttttgctactctaaccttccccaccactattttttgctaggtattttcctttactttgaaaggccttgatataaaaaaatagaataactacaaaacgtagtaaatagaattggataaatagtgggttccatcgtttctatggttacttctaaaacggtgaggtcctctctatacaccggagctccttcttttaattaatcaatactattggtaacttgtacaattcacattctttggctctaccccatgaatattccagtaataggtctttcacaatgagatcccctttatacagtaacggtattt

SEQ ID NO: 168587 - DNA, 392 bp, Arabidopsis thaliana nossen
atcgaacccacggccacgtggttaaaagccacgcgctctaccactgagcgaagacggcttcatgttatcaattcttattttactatattaataaagttcgagttatattcataagaccaataactcttgcctcctttacataatctggtctgaaacacctcttcaatcttcattatcatatctattgaacgattcagagtcttttctttgcaaattgagtatagtaatttagagtctttcgaattccgtttttcattcgcaaaacttggtgaatgatcaactcttgtttcttacattccagtcacaagtttgttttcttgtccgctttgctttgatacaaagttcactaaaggaagcaagatcttaaacacattccaacattgctcctcttg

SEQ ID NO: 168588 - DNA, 396 bp, Arabidopsis thaliana nossen
acgctctttgtgaaggtgaatgcggtagatggggactggagattctgcttcgagactgattctctggttctggttagggtttttgattctaggtgttggatttgtgcaatgtggagttacttatgaccggaaagcacttctcattaatggacagagacgaatcctcttctctggctccatacattaccctcgaagcactcctgatatgtgggaagatttgattcagaaggcgaaagatggaggcattgatgtgattgagacgtatgtgttctggaatcttcatgagccttctcctggaaaatacgattttgaagggagaaatgatttggtgagattcgtgaagacgattcacaaagctggtttatatgctcatcttcgaattggaccttatgtttg

SEQ ID NO: 168589 - DNA, 358 bp, Arabidopsis thaliana nossen
  unsure (1)..(358): unsure at all n locations
cccacncntgggcgggcgcttgggcgggcgggtgggctgacncgtgggttgcaagtggagaacattagtatagattaccaaaaaaaatcaaaataaataaataaatgaagtatagatatataatgattaatgaaccacctataatcccttcttctttatcggtgtagtcgcatgagcatcatcggactgtaattagttttgtaaaccgtgtatgtattaagaccatctccatcggtaaaactaagtaaaggttctcaaaaaaaaaagatttataatattttaatcaaaacaaatatattaattattatttaataggtgaactaagtattatgacaaccgtccaaattggatgagaata

SEQ ID NO: 168590 - DNA, 356 bp, Arabidopsis thaliana nossen
gtgaaagcggaaagattcgtgaaagtaaaaattacaagataagaactaagaggaatcgtagtaatttaataagttctaaggatttcgatataactcaaaactacaatcaattgtggattcaatgcgacaattgttatggattaatgtataagaaagtcaaaatgaatgtttgtgaacaatgtggacattatttgaaaatgagtagttcagaaagaatcgagctttcgattgatccgggtacttggaatcctatggatgaagacatggtctctgcggatcccattaaatttcattcgaaggaggaaccttataaaaaccgtattgactctgcgcaaaaaactacaggattgactgac

SEQ ID NO: 168591 - DNA, 387 bp, Arabidopsis thaliana nossen
attttagaaattttcagaataagtgaataacaatgttatatgacgcatagctagcttttgcgaaaccagaaaggaagataccgcatgatttatcttcgatagcaaaatttcaccaagttttcaataattaacttttgcgatcaaatcactaatggggtcatggagatattagaatataagcttttgacttatctaactcactctttttctctcttttattatttcaaactcaaaacatcaaagtttgacatagtgcttgaaactatcaagtccaacagcgaaataaggaaaataaatacatatagttcacaatgccccatcatttagcaatatttcgtcgatgcatagcatatgatttttcacacgaagccattacattagcctact

SEQ ID NO: 168592 - DNA, 393 bp, Arabidopsis thaliana nossen
gaaacccaaaccctcattccaaaaaatggggtctcgctctcaaaacctcgcctttatcgtcctgctcctgcttggcttcgttgccgtctcctatgcttgcgactgtacccctcctaaaccatcaccagcacctcacaaaccaccaaaacatccagtcaaaccgcctaaacctcctgccgtcaaaccacctaaaccaccggcagtaaaaccacctactccaaaacctcccaccgtgaaaccccatcctaaaccaccaaccgtcaaaccccatcctaaaccaccaaccgtcaaaccccaccctaagccacccaccgtcaaaccaccccaccctaaaccacccaccaaaactcacccccacccaaaacctcccatcgtaaagccaccaaccaagcc

SEQ ID NO: 168593 - DNA, 399 bp, Arabidopsis thaliana nossen
  unsure (1)..(399): unsure at all n locations
aattttcttccttttcacacagagacatcggaggagaaaaaaagggcaaggacaaaaaacaaaggtgcggaatttttcctctggaaatatctcagtgagtgtctgtgtaaaacaaaaaaaacaaggaagaaaatttactacatttctgtattatttagcattaaatggatctgttccaacgataattctctgtctgtgataaaagaaaaattgaattttttttcttctatctatctacctctgttcttcctcgtcatttcttacccagaaaattagaggataacaaaaatctgtttctttcgatgatcatcgtgacactttctctgtgatttttcctttcttctgttgttgttgatcatcgngatcatcgtctttccttacatgcgaacccncatgtca

SEQ ID NO: 168594 - DNA, 391 bp, Arabidopsis thaliana nossen
aacattaagagctttgatgcccattgacatgatcattatcgaggcccaggtaacatatttgtggaggtctcttcatcttaaagttttgtcaaatccaatctatttgatgattttttacactgcacgactagttgaggactccatcctagcaggtagcgacatctttaggttggtttgatagttatcattttcgaggtctgatggaaagcttatcacgggtttcatttgaggatattagtctcttactctctttaagaatttttgccttgtgaacccaatatcgtttcgctagtgatgtgatttatatcactgccttgttttgtctgtgtcttatgtggcgtatactttatccaccgagtttaagtacaaccatcacacaatcgcctacgcc

SEQ ID NO: 168595 - DNA, 385 bp, Arabidopsis thaliana nossen
gtaatgccaatataatcccgggacagcttctacgtccaacaccggacgggacatacctgttgtgatttccgttagcttccacgtgcgattcttcttcaaagaacctctctggtctaaactcttcaggcttcttccagctgttggggttgtttgctagccaccaagcattaacaaggattttgctttctgctgggatatcgtagccagcgagcttcgcatcatggaggttcatgtgaggcacgaggagaggaatcgccattctcagacgaagagtctccttaaccacagcttgaaggtatggaagtttgtgaagatcaggctcggtgacttgcacacccggtccaagaaccgtgtcgagttcgttccttagcttactctggatttc

SEQ ID NO: 168596 - DNA, 279 bp, Arabidopsis thaliana nossen
gtgaaccaagctcaggttttgtcttctatttgatcataccttggtcaggaatataaattttagggtgtatcccctataaaagagattgctctttaaccaacaaaccaccatatattctgtttcaacaagacaaacacgaatatcgttcctctttctcacgaaacccatcatcttctatcttatttgataaataggtcacaagattttggagaatcattaagatcgagcgacggttggatacaccataagctctgaagattgtgacttttttatctaaac

SEQ ID NO: 168597 - DNA, 409 bp, Arabidopsis thaliana nossen
  unsure (1)..(409): unsure at all n locations
ttcgattccgagtgaaccatggantgtagaggcatgggggatctgacgagtgatgagtctgcgngaggaaatctcaaaagaacgnnttcaattgaagtcggtgaaacaaagaacttgtacccgccgtcgtttccatcatacggcgacgtctagtgacccgaagcagaagacaaaaggtgtgataaagattgcnnggcaccaaacctaaatggaagcnnatcaaatgaagctcaaccgtcgatgaacgcagcggcgcgtgacacatcgtcttacttctctgttttcgagatncgtggcggatcgtcccatcagctggtgataaaacctgtcggtgaggttagcgttccggtgaaggagcttttggatcagaataaaggtgacgaggagaaaacggttacttacgccgtga

SEQ ID NO: 168598 - DNA, 399 bp, Arabidopsis thaliana nossen
atctcctcttgcaaaccaacgtaaaacactaactaagagatcaatatgggtggagtgatgaagttggcatgcatggtcttggcttgcatgattgtggccggtccaatcacagcgaacgcgcttatgagttgtggcaccgtcaacggcaacctggcagggtgcattgcctacttgacccgaggtgctccacttacccaagggtgctgcaacggcgttactaaccttaaaaacatggccagtacaaccccagaccgtcagcaagcttgccgttgccttcaatctgccgctaaagccgttggtcccggtctcaacactgcccgtgcagctggacttcctagcgcatgcaaagtcaatattccttacaaaatcagcgccagcaccaactgcaacaccgtgagg

SEQ ID NO: 168599 - DNA, 377 bp, Arabidopsis thaliana nossen
tgcacagtaactatcatattatactctctcttaatttcatctaccatctgctgcgattttattttaggagtagtctcagtctttcttcatacaactgagaaatagttccgctcttcaacagctttgtgtaaccagatcttacacaaacatgcttattccggaatgtgcttattacaagcttgcttttactcttctgaaaagaacaatacaccatccatgaacacttttcttcgatgtgttgtgtgcactttgccccaagtctattagatgatgacttaaacattttgatatcatattcggttttaagagaattctgaggagtgcatacttaaattcatctgcattggtgaatgtcttatgcaatgctaatagatcat

SEQ ID NO: 168600 - DNA, 400 bp, Arabidopsis thaliana nossen
  unsure (1)..(400): unsure at all n locations
aacaaatccttctctgagaaaaaacaacagatccgaattttatctttagtgagccggaaaaaatggtgggagcgatcganagacaacgcgttcttcttgagcatctccgaccttcttcttcttcttcgcacaattacgaggcttctctatctgcttctgcttgcttggctggggacagtgctgcatatcagaggacctctctctatggagatgatgttgtcattgtcgcggcacataggactccactatgcaagtccaaacgtggcaatttcaaggatacatatcccgatgatttgctcgcacctgttttgagggcattgatagagaagacgaatctaaacccaagtgaagtaggtgacattgttgtgggtactgttttggcacctggatctcagagagc

SEQ ID NO: 168601 - DNA, 402 bp, Arabidopsis thaliana nossen
ctgaaaacgaaaacgaaaataaaaagcggagagagagatggctagatacgatcgagcaattactgtctggtcccccgacggtcacctctttcaagtcgaatacgcccttgaagccgtccgcaagggtaacgccgccgtcggtgtccgcggtaccgacaccgttgtcctcgccgtcgagaagaagtccacccccaagcttcaggattctagatcagccagaaaaattgtgagccttgacaatcacattgccttggcatgcgcggggctcaaggctgatgcccgagtcttgattaacaaagcaaggatcgagtgtcaaagccacaggcttacacttgaggaccctgtcactgttgagtacatcactcgctacattgctggccttcaacagaagtatacccaaag

SEQ ID NO: 168602 - DNA, 386 bp, Arabidopsis thaliana nossen
gtttttgtctgctcaccaaatcaaaccaatttctcctgatagccgaggggtttgtccccatcatggaactcatgcaacattcttcacccactagctaactaacgacttccattcttattaatctctctcaattcttcatttctgagattcatcgctctctcttctctttgtcacaatgaatttcaattcttcttacaatctcactttcaatgacgttttcttctcttcttcttcctccggtgaccctatggtttcacggaggctgtttctcttgagagatgttcagattcttgagctccttattgccattttcgtctttgtcgcaatacatgccttgcgtcagaagaaataccaaggtcttcccgtgtggccgtttcttgggatgc

SEQ ID NO: 168603 - DNA, 393 bp, Arabidopsis thaliana nossen
ggaggacaatggcagatggtgacgcgatttctatctttgtatcgagtcatgtatggattgatcataactccttgtctcattgcgctgatgggcttgtggacgcagtcatgggctcgaccgcgatcaccatctctaacaaccacttaactcaccacaacgaggttatgttgctaggacatagtgactcgtacatgagggacaaagctatgcaagttaccattgcttacaatcattttggagtcggacttattcaaagaatgccgaggtgtcgacacgggtacttccatgttgttaacaacgactacactcactgggaaatgtacgcaatatgaggtagcgcatacccgacaatcaacagtcaaggaaaccgttacgccgccccgaaaaacccct

SEQ ID NO: 168604 - DNA, 391 bp, Arabidopsis thaliana nossen
ggtctttcccatcaaaggagacccaagcggagcttctgctgttgaatggcacttggactctcactgtcacgtgttccggtaatattagtgggcggaatgatagagaatgcggacagataggcgtgaataagatcccaggaacctgcaaaacattaagttacaatataatccattatctgttattgtataatgtatataacaccaaagctattgtgcaatctctcaaattcttcaatggcatatgaatttggagctttaacattttcgactttgttactaatatttgaattgtgaatcaaagaaccagcctcgcttgttgctacagatgtaaagatcattttggaatatttacctgaggatggaccattgaccctccagcagcaagtgaata

SEQ ID NO: 168605 - DNA, 378 bp, Arabidopsis thaliana nossen
aatatgtcgctcaagttcaaggcagaacatgtatcgtttttcttgtggccgttatttccttgtcaagttctcaagaaggaagaggaggagaagaaagccagagtaggcaccggacgcaaaatcaccattggtaattaacattagagcccagaaaatttgtttcatttatgaattggtagcttaatgttcggtctccttgtgtaaaggtaaagttgatggtccagatttgacaagctttgttcgccaatttccaccagattcaaaaggtattacattttctctgccaatagattaattgagtcaccatagatgctgatgactaacttcttaggaatcccttgtgtaaatttgatagagattatgatggatatgcgttta

SEQ ID NO: 168606 - DNA, 298 bp, Arabidopsis thaliana nossen
  unsure (1)..(298): unsure at all n locations
tcgcatttgcgtaatttgtattcttttttttagtcaattacatcttggggctgatgctttttgttcagttgtaacagtcacaatcttgntcgggagnaattgctggttcattatcttacaggtgttcataaccatttttcggaattcatcaaagacttcagtttaaggtccgtcactgttgattcatataacaattcaatccagtagagacacatcctcttctcatgtgatcctagtcaaggtaaacataacttactattcatattaaattatatcttaatgaatggtgagccaacac

SEQ ID NO: 168607 - DNA, 391 bp, Arabidopsis thaliana nossen
gctgtccagggagctattctcagcggtgaaggaaacgagaaggttcaagatcttctattgctcgatgtcactcctctctcccttggtttggaaactgccggtggtgtcatgaccactttgatcccaaggaacacaaccatcccaaccaagaaggaacaagtcttctccacctactcagacaaccaacccggtgtgttgatccaggtgtacgaaggagagagagcccgaaccaaggacaacaaccttcttggtaaatttgagctctccggaattcctccagctcctcgtggtgtcccccagatcacagtctgctttgacattgatgccaatggtatcctcaatgtctctgctgaggacaagaccaccggacagaagaacaagatcaccatca

SEQ ID NO: 168608 - DNA, 364 bp, Arabidopsis thaliana nossen
ttttagttggttattagtctcagctttatttatttgaggggctggaaaatctaaaaaaacattaaaggaagcaattaaagagcttaagaagaagagcttggtgtcatagacaacatggtctcttgctgactaaacttgatcctcttggcttcttcctcgttcactccatatgacgctttgatcacatccactggaactgctctcaagtacgatgtttggccgctcagtgtgttaatgtaagcgttatcgtttgtcttgaatgatatccactcgaaacccgtttcaccagccgtttttgaaactgcaaagccttgtggaatcacaatgatttggccttgtcccacttgctcattgaacaccgact

SEQ ID NO: 168609 - DNA, 403 bp, Arabidopsis thaliana nossen
ctttgacatttgtctaattttacaaagatgggtttcaaactcatctctctcctccttctttttcttccacttctaacagtcacaatcttgtcgggagtcgagcaggcctttgcttccgacaaggcactcctcgtgaccggccgcaacatcacggctgacggtggaaggtcgtcactgagagggaagaagcagaggagagcatcaggatgtaacttgttccaaggccgatgggtgttcgatgcttcttaccctttctatgactcgtccaagtgtcctttcatcgacggcgagtttgactgtctcaagttcggccgaccagacaaacagttcctcaagtactcttggcaacctgaatcttgcaccatcccaaggttcgacggtggggcatttctgaggaaataca

SEQ ID NO: 168610 - DNA, 396 bp, Arabidopsis thaliana nossen
ggaccaaaattgcctataaaagcaaagtccatctattccacaagaacaagaaaaggcagagaagagagaggctctgataaaaaaaaaacaaaaaaaaatgacaaaggcttattcaacacgtgtcctcacgtttctgatattgatctcgctaatggcggtgacactgaacctttttcccacggtagaggcaaagaagcggagtagagatgctcctatagtgaaaggtctctcatggaacttttaccagaaagcatgtccgaaagtcgaaaacatcatcagaaaagagctcaagaaagtcttcaagagagatattggtttagccgcagccatccttcgtatacatttccatgattgctttgttcagggatgtgaagcatcagtgctgctagctggatc

SEQ ID NO: 168611 - DNA, 380 bp, Arabidopsis thaliana nossen
catcgatggtcttgatctttcccaattatcctggctggtttgatataaatcgtgggagttggataccttgaacgcataatgggagcttaatcaccgtgtttaaacattgtgattaggcgaataagtcttgttggatagattttgacgtgtgaccccaaaagttagacacgtatcggatatagtagatggacatgttgataatggcaatcatgatgatggtgaatggggcatgaccatgggaaacaaatctttggaagagaatcgatttaaaattgccatgtcgttgccaccacaaacccaactgctcattatttcacgttttgctgaatattgttttctccatttacgtattaaatttaattggagcaaaaaaacaagta

SEQ ID NO: 168612 - DNA, 389 bp, Arabidopsis thaliana nossen
  unsure (1)..(389): unsure at all n locations
aaacaatnccgcatcaaaaccacgcgccggtcttcatatattgttgttgacgatccaaccaaacctgacctattccaaccgccgctannatcgctctaacccagccnnngtctgatggaaatgaaccggatgtaccttggctttcttgcggtcaagatcaactaacaacggaaactatatatcacttannatacgaatgtttcgtattaggaagaaaattgttctgggcattaagctaaaagaaatgatnctggtagtgacataattctctgataatggtaaaagatgatccaaatcaccagacaagaatccattatcatcaggatcagctgaaccagatatcattcagcggcgaaaagaatgcatcgactcccatgaatggtaaagat

SEQ ID NO: 168613 - DNA, 367 bp, Arabidopsis thaliana nossen
  unsure (1)..(367): unsure at all n locations
tactttccacaacttagaatgtgtttcgtttctgccaccagccggtnacaaaacaatttgtcgggaccaaccatncgnattcttcnaaagatggaccctaataatcagatacaggcaccagttgaaaattatgcaaacccaatgacatgtcttttccaaaaactcttcaagggtgctgcgttggcgttttacattctctctgctctcttcttcaacagctttgtcatcatctttgtagtcactgttcttcttgctgctcttgacttctgggtggttaagaatgtcagtgggcgtatactggttggtctcaggtggtggaacgagatcaatgacttgggagaaagtgtctggaaattcgagtctcttg

SEQ ID NO: 168614 - DNA, 380 bp, Arabidopsis thaliana nossen
ccatccaccgtttctgctcgctttaaactctcccctttcagaaccgggggggataaccgtggttttagaggcatcaaaagtggagtcggagtacgaggcggagatgccgggaagaaaaaagcagttcctaattctaattatgtagttcctattgataaattctcatcttcttcgtcgattactaggcctttgattgagatacttcgtgaccttaataagaagattcctgataacattgttaagagtcatgatcctccttctacttctgctgctacttctggttttatcccttggtaccatgcaaatcggatgcttagcttctatgctcctggttggtgtggtgaagttagagatgttattttctctgagaatggaaatgt

SEQ ID NO: 168615 - DNA, 413 bp, Arabidopsis thaliana nossen
ggaaaacccggcgcgacccacgcgtccgctctgttgaaaatgaaagaacttggtctaaatccgactacgagtacttacaacggtttgattaaagggtatgggattgcaggtaagcctgagagatcatctgagttactggatcttatgttggaagagggcaacgtcgatgttggaccgaatataaggacgtttaatgtgttggtgcaagcctggtgcaagaagaagaaggtggaggaggcgtgggaagtggtgaagaagatggaggagtgtggagttaggccggatacggtgacttataacacgattgcaacttgttatgtgcagaaaggagagaccgtgagagctgagagtgaggtggttgagaagatggttatgaaggagaaggcgaaaccgaacggaagaacgtgtgggat

SEQ ID NO: 168616 - DNA, 388 bp, Arabidopsis thaliana nossen
acgcgcgcgaaaatataaattttctgaagctttcgcattttgctgggggggtctctcggcggtcctctgagaaagaagctgcagttagctttcttgaaagcgtgattgagaaacttagagctactaaagagcctaggattactgaaccaatcatttatattgaaacacaaaaagctttattcaagcttgagcaaggtgatcagaaggagggcaaaaaaatcttggacgatggaaagagctctcttgatagtatgactgacattgatccatcagtctatgccaacttctattgggtgtcttctcagtaccataagtgccgtcaagaattttctgatttctacaaaagtgctctgctttatcttgcatacacgtctgtggaggacctttc

SEQ ID NO: 168617 - DNA, 364 bp, Arabidopsis thaliana nossen
  unsure (1)..(364): unsure at all n locations
ctcacttttttttcctctttaaacccacaaacgcgcggactataaaatattttttgctctnaaaaaaccnctactatgttctcacataaagacttgaactgtattatctagattcttctagtaacaaaatcatctttaagctcatcatctatcaacatagaagattcaatctcagatgcaacaatttaaaaaacagacctcaccatgttcttcaacagagtgatttaaacaacccttttcatcaccagaatttgtaatactccttctgacgctttttcaaaatgctaaagacccatttttttataactaagattatattcacacagatagaaacttagagtctttgaaagttttgaaacactaa

SEQ ID NO: 168618 - DNA, 260 bp, Arabidopsis thaliana nossen
taacatccctcccaaaaacaaccatctcctaaggctaataatctactttttattaacccatttacaaaaactccatccattactatccctataatccacatactaattaaccctaataacaacatacctcataacattcttaacaatcattatcctccttctacttcagctgctccttctggttttattccttgttaccatgcaaataggatgcctagcttctatgctcctggaaggtgtggtgaagttagagatgctat

SEQ ID NO: 168619 - DNA, 398 bp, Arabidopsis thaliana nossen
cggggcgttccacgcgtgcggggggaaaaaatcacactaacatttctgttcgagagaaaaaaatcggcgcgtggtcttttgctgtgtctagtacccaaaatcattttgttggctttagcatcttcgtttgtatattgttacgacccatctcctcttcaagactactgtgttgccaccaacgaaactaatggagtttatgtaaatggagagttctgcaaagatccaaaacgtgtaacaaccaatgatttttatacttccggcctaaacgtccccggaaacaccatcatcgggcccggcgctagaaacaccgtcgtggatgtcgaaagactgcctggtctcaacactcttggggtcgacattgcccgctatgactttgccccgggcggtctagacccacc

SEQ ID NO: 168620 - DNA, 405 bp, Arabidopsis thaliana nossen
  unsure (1)..(405): unsure at all n locations
aagacccggggcgttcaacacgtgcgctataatgtcttcatcatcatttatatcaaatcacaagannccaaacgcggtaatttaaaaaagtgtcgcgtaccaaaaaaacctaattcaaactaattcanctntcantatcanttccaattccaactcccacttctcaagattctttttacatctaanctcaccaacatcaaaaaccaaacaaggntttcttgcaaccgtccaagatagtatgaaccatgctctcttggctcgttctcttgctttcaacctcactctttctcatcgaaccgtacaaacccacacgttcgatcccatccacgactgcctcgagctgctcgacgacacacttgacatgttatctcgcatccatgcggataatgatgaacaagatgtcca

SEQ ID NO: 168621 - DNA, 373 bp, Arabidopsis thaliana nossen
  unsure (1)..(373): unsure at all n locations
atttctcacattttcntatccgtatgactcctttcanatncnnaccggccgcnannttaaaatgatagtggtcccaaaaacanccnnnncatnnntcatnttnattctnnaaaatcnaccacaactgctcactcgatctataaacttgtttttattgacaagcgaaaaaacaaaaggttcgagaaggaggctgctcagatgaacaagaggtccttcaagtacccatcggtcttcgacaaacttaacgccaaccgtgaacgtgttattaccatcgatattgctctatggaagttccaaaccacccaatactactgcacagtcattgatgccccaggacatcgtcatttcatcacaaacatgattactggtacct

SEQ ID NO: 168622 - DNA, 398 bp, Arabidopsis thaliana nossen
gggcgtctccacgcatgcgatttgccgatacattttccatctccggtggctcaacttccatctccggcgggcggctcaaaggtcctatgtagaaagctggctctttaggcaaagaaagagcgttgtttccatcaccgtatatcatggacacaacgtctaacatacttggtctatcgtctgcgttttgttctacacacaacagagcaacttgaacgcatctcaacacttgagggttctcaactgcagaatctcccaaagatggatcaatcacctcgcgaactcggttctctttaaacagattccacacctgaaaaaaacagagtttcagagatgcatggacaaaagaaggcaagctgagaatattaacatatgagagcattacatggactatgagattc

SEQ ID NO: 168623 - DNA, 404 bp, Arabidopsis thaliana nossen
  unsure (1)..(404): unsure at all n locations
ccggggggacccacgcgntccgataaaattgaccaaaacaagtcacagaggagaccccggaaaccaaacaggcggcggattacgaagattaggatcactgtcatgaccgccggtgaacaaatcatcactctcgatgtcgattctcaggagactgttgagaatgttaaagccttgctcgaggttgagtccaatgttccgattcagcagcagcagctgttgtataatggaaacgagatgggaaattccgataaattgagtgccttgggtgttaaggatgatgatttattgatgatgatggtttccaatgcctcatctggtgccactagtgcggcggggaatgatttgggcatgaatcctgatgggtcagctttgaaccctgcagcctttcaacaacacattcgtgg

SEQ ID NO: 168624 - DNA, 379 bp, Arabidopsis thaliana nossen
aagagaagagaggtgaggatctccggaaactgttgaccaagttgaggccggggcgtttccttaatacttagggcgaaaactgcaaaaatcgtcagaggaatcattgatgctgtggcaaagattcctggaacaactgatctccagatcactctctgcaaagagatggtcgaatggacccgcgctgagaagcgtactttcctcaggcagcgagtagaggctaggcttgcagctcttttgatggagaacaaggagtatgttgaagctttggcgctgttgagtactttggtaaaagaggttaggagattagatgataagctccttctggtcgacatagacttgctggagagcaaacttcacttctcattgagaaacttaccca

SEQ ID NO: 168625 - DNA, 287 bp, Arabidopsis thaliana nossen
  unsure (1)..(287): unsure at all n locations
ctatanntcaacctttttttacacattgangctaaaacanagattgctgctgatcagagttcattttcttaccgtctcgtgaaacctaaaattttaaactcatatagaggatccaatcaatctattcaatcttnnggngagagttctataactcatggttccacaaacctatctactactaaatctatggatggtaagaaaacctaagaataaaaagcaactgaacaactccatgttcattatcaacaagaacctctcatccaattctttgaatgtcctatattcca

SEQ ID NO: 168626 - DNA, 383 bp, Arabidopsis thaliana nossen
atttgacagctagtggaccaagaccaaacccgcaaggctcataccattaggggcgtataccgctcattgggacaattgtgttcggtagttcagccggacagataaacgggaaacaaagatatggtgtcaatagtgtgtcatttgtgccagctgatacccctctaaaactggctgacttcttcaagattagcggtgtctataagatcaacagcatctcagacaaacccacatatggaggtttataccttgacacctcagttttgcaagtcgactatcgaacctttatcgagattgtattcgagaaccaagaagatatcgtccaaagttatcatctcaatggttactccttttgggtggtcgggatggatggtggacagtggaag

SEQ ID NO: 168627 - DNA, 406 bp, Arabidopsis thaliana nossen
  unsure (1)..(406): unsure at all n locations
aagacccggggcgttcacacacgtgcgaaaaaaaataaaataaaaattaattacttaattagctctctcnaactcgcagctcttatactaagtggctgggtcccaaannctagcctaaatttcctcgagaaaacaagcaaaaaaacacaagaaagctagaatcttattttcttctttttctttcttggtttcttcaactttttcttaaaaacgttttcaaaaaatcatgggcaccggagaaaaaaccctgaagagcttccagttacatcgcaaacaatcagtcaaagtcaaagatgttccaaaagggtgtttagcgatcaaagtgggatcgcaaggagaagagcaacagagatttatcgttcctgttttgtattttaaccatccattgttcatgcagctcctgaaa

SEQ ID NO: 168628 - DNA, 386 bp, Arabidopsis thaliana nossen
caaagttttatgtgcttctcgtgattggcgttttgtgtgccattgtcactgcagggcaggtggaagaggtgtccaaagagaccaaattaggtatctctactccaaaaactactatcaaaggcgtcggagctcagctttctgctaggggcagaactttcagcaactctgggggctctagctttgctagagctactcatggtcgcaaaggtccagaggcttatgcatccgaaggtggctccacaagtaccggcggagaaatcattgccaagggtcgaaagacaagagtttcttctaaaagtgcttcagtctcaaagggagggtctaaagctgcagcgaatcgcaaagctgctgctgcttctgcaggtggtgccacaggttccgaatcc

SEQ ID NO: 168629 - DNA, 409 bp, Arabidopsis thaliana nossen
  unsure (1)..(409): unsure at all n locations
ggaaaaccggccgggacccacgcgtccgctcttttaacacttgttcttttaaggcaaaaaggctcgagccacanagaggtggggttctcttaagtgagatgtgatcgccgaatctcataatctcccatcgaagcagaatggagacttttctattcacatctgagtctgtgaacgagggacacccagacaagctctgtgaccagatctctgatgcagtcctcgatgcctgccttgaacaagaccctgacagcaaagttgcttgtgagacatgcaccaagaccaacatggtcatggtctttggcgagatcactaccaaggctactgttgactacgagaagattgtccgtgacacctgtcgcgccattggattcgtctctgatgatgttggtcttgatgctgacaaatgcaa

SEQ ID NO: 168630 - DNA, 417 bp, Arabidopsis thaliana nossen
  unsure (1)..(417): unsure at all n locations
gggcccgaaanncccggggggacccattcgtccgtaaagaccgataaaccatctccaacacctatatcacgtacaattctccaagggggcatgcatcaactgtggcggcgaaactgactacatattatattatgcttgataaatttaaactttatgaattaataagcccaatgatgaagcaagcacatgcctaaatctcactaactctcatatatgtcataaagaactttgaagtttttaaactaagtaattgtttatacaaaaccaagtagacataatgttatgtctaaactgaatgggttttcttaattgaagcatgcaaagcattaaacaattaactaaaggctcttagtcaatactaatctactccttttttcttctagaccactgcaataatatgcattcatatcaactcaa

SEQ ID NO: 168631 - DNA, 412 bp, Arabidopsis thaliana nossen
acagaaggcccggggcgatccacgcgtgcgcatttgcaaagatgactcgtgagttctaatctatcgacctctctcggttgctcgcatttgcggtgtctgaggattatataataggacaaagagagagagacaacatgcactctcttaagactacttgcgttgggcaaatatttgctctagctaagcctcacgattctgtaggcaagaggactcgtaatcggattcctaaagaagagagaaagacactggttgaatcttttataaagaagcatcagaaactaaacaatgggagttttccttcacttagcctcacacacaaggaggttggtggatctttctacactataagggagattgttagagagattatccaagaaaatagagtccttggtcctggtgacttgctacttga

SEQ ID NO: 168632 - DNA, 381 bp, Arabidopsis thaliana nossen
attcaagaaaagactactcaaatcttgctagagttgataagaccgggggggatttacgcaacggttgatgctgttaacttgcctaaagaagatagtcatcagttattgaaggggtctacagtttccatgaaactgaaagggaagatttttggtggatatcttgatctgtttcctaatcaagatcactcccacaatagaggaggagtaaggctgcagtctctagaaagctcaaaggatactcaagaagatggaccgagaaaaaatgaatcatcggcagagactaataccttagaaatggatagacttcagactatacatctttccggctccatttcttcgtcatcaactaagggaaaaggaataaaaggctactcagccatt

SEQ ID NO: 168633 - DNA, 385 bp, Arabidopsis thaliana nossen
  unsure (1)..(385): unsure at all n locations
gagaaaacaaaggaaagcccaggtgcgccatgggaatttgttggcttgtggccgggttttgatccctttggtcgggacagngctgaaacaattcgacgggctttgaatcttggtgttaacgtcaagatgatcactggtgaccaacttgctattggtaaggaaactggtcgcagacttggaatgggaacaaacatgtatccatcttcggctcttcttggtacacacaaagacgcaaacctcgcatccattcctgttgaggagttgattgaaaaggctgatggatttgccggagtcttcccagagcacaaatacgaaattgtgaaaaagttgcaggagaggaagcatattgttggaatgactggtgatggtgtcaatgatgcccctg

SEQ ID NO: 168634 - DNA, 380 bp, Arabidopsis thaliana nossen
caggaattaaaccaagacggcccttttaactcagtggtagagtaacgccggggtaaggcgtatgtcatcggttcaaatccgataaggggcttttacgttctttactttctaatagtcaaaatttcatttgaaagtctataatttaatttcaaattttgttaatttcattctaataaatttcattctaataatataataactaataataaagttagcgagtaatttaaaaaataaaaatgaacatttgtatattataatacaattacaatgaataatgataagtcgtctcttgaatcgccaaatatatattctttttttttcgatttttcgatagattagaaatcgacaaatccaaaagaaaaagtaagtggacctaaccc

SEQ ID NO: 168635 - DNA, 396 bp, Arabidopsis thaliana nossen
  unsure (1)..(396): unsure at all n locations
gggcgatccacgcgtcggattaataacaatcaatccaacattgaatggagattgaagaacccaggccggaaagtttacatgttgtgtgcgggttcaaaattcnncgcccgaagaaagtaaactgggttcttatcgctaaagcttccaaacgccgtggctcatctgtttcttctcctgctctcctcaacatcttctcttttgaccccattactgcttctctttcatcctctcctttggcaacacacacgcttaaggatagtgatggtgatcctgtggctgtttcagtgcaccctggtggggattactttgtttgctcaacctccaaaggtggttgcaagttatttgagcttgtcggaggagcaacaggtattacgatcttagccaaagaactccttc

SEQ ID NO: 168636 - DNA, 296 bp, Arabidopsis thaliana nossen
  unsure (1)..(296): unsure at all n locations
aacaanncnacnnnctttnaatcttnntcttaacctcaatattatcactggtgaccaacttttttttttttannaaactaaaaaaaaacattcaatcctaacaaacatctatccatcttactctcttcttcntacacacaaatacncaaacctcncatccattcctntttaccaattcattcaaaaggctgatggagttgccggagtcttcccacagcacaaatacgaaattgtgaaaaagttccacgagaggaatcatattgttggaatgactggtgatggtgtcaatgatgccc

SEQ ID NO: 168637 - DNA, 381 bp, Arabidopsis thaliana nossen
gttttgtacaatttcaatcaaaaaaggagtctttatgtcacgttaccgagggcgtcgttttaaaaatttgcgccgtctgggggctttaccgggactaactagtaaaaggcctaaggcaggaagcgatcttagaaaccaatcacgctccgtaaaaaaatctcaatatcgtattcgtttagaagaaaaacaaaaattgcgttttcattatggtcttacagaacaccaattacttaaatatgtgcgtatagccggaaaagccaaggggtcaacaggtcaagttttactacaattacttgaaatgcgtttggataacatcctttttcgattgggtatggctttgactattcctcaagcgcgccaattagttaatcatggacatat

SEQ ID NO: 168638 - DNA, 384 bp, Arabidopsis thaliana nossen
cacaaacacaatctaatcccaaaaatcaaaagatgaatgccacaaagttgggggtgcttctcgtgattggcgtgttgtgtgccattgtcaccgcaaggcaggtcaaagatttgtccacggagaccaaattaggggcctctcttccaaaaactactaccaaaggcattggagctcagctttctgcaactggcacaacttacagcaccagcagtgtcgttagctatgctaatggttttaacaatcccaaaggtccaggggccaatgcattcgaaagtgccaacacatttaccagcggacaagtcactgccaagggtcgcaaggcaagagtttcttctacaagtgcttctgccgctgaaggcgatgctgcagctgcagtgactcgca

SEQ ID NO: 168639 - DNA, 382 bp, Arabidopsis thaliana nossen
  unsure (1)..(382): unsure at all n locations
ctcagcttcaacagaagaaggattagaagacaatgtgctgcaattggggggggggcttacgcttttgtgcgactgccaaanagcaattcgctccttcttcagcgctacgtgtcaaaacattgatttcatcaacgcccatttctctggttccactataggacacaactttgaagcagtactcagaagctggagctaatccagagacaacaaatcttgtgtttggagtaaacaatgtgcaagtcgatttctccgggtaatctttttctggtaccttacgatgccaaatactgtagtgaacgatgtttggaggtgagggaatttcattagaggcgagaaccactgtaagtgaagtcgcgtttacatcctcgaacctgatcttggt

SEQ ID NO: 168640 - DNA, 376 bp, Arabidopsis thaliana nossen
agcagactctccaaaaacacccagtcattgtctctgtggatattccctcgggtgggcacgttgaagtttgagaccatgaaaatggaggaattaagcctgatatgttggtatctttgactgccccaaaattatgtgcaaagagatttcgtggcccttaacactttttaagggggaaatttgtaccaacttttggtgcaaaaaaatataagctggagctccctagttaccctgggacatctatgtgtgttagaattggtacacctcccaaagttgacatctctgctatgagagtgaactatgtctcttcagaattgcttgaagagcaaggttaaaattattcttacggtcaattttcttaattggttgattaagcaat

SEQ ID NO: 168641 - DNA, 379 bp, Arabidopsis thaliana nossen
tccttttttaaggttttagtttggtaccaataagtcaaacaacactaactgcaaaagtaagggtaaagatgtttactcttataagcttcaagctgctgaagtaaaatttctagtttagtgatttgtcacggtctactcgaaacttaatcctttaaatttgttaatgatttgacttttttgcgtaaaagaattaacctatattggtttaatcatacttcatccgtttcctaatagtgaatatataaaaggttaaagaatttcatcgtacgtagtgatagtgaactataagctatgctatatttttgtacgaaacttacataaacaagtttaattttgaagcgatattgttcgtgtactaaagcatatgtacgtaaatttc

SEQ ID NO: 168642 - DNA, 378 bp, Arabidopsis thaliana nossen
tcctttattaaggttctagttttataccaataagtcaaacaacacgcgcggcaaaactaatgttgtgggtgctcaccccaataagcttcaagctgctgaagtaaaatttctagtttagtgatttgtcacggtctactcgaaacttaatcctttaaatttgttaatgatttgacttttttgcgtaaaagaattaacctatattggtttaatcatacttcatccgtttcctaatagtgaatatataaaaggttaaagaatttcatcgtacgtagtgatagtgaactataaactatgctatatttttgtacgaaacttacataaacaagtttaattttgaagcgatattgctcgtgtactaaagcatatttacgttaatta

SEQ ID NO: 168643 - DNA, 281 bp, Arabidopsis thaliana nossen
ttatcattgactccaccactttacgctttaaggcgggtatctctaatcattttcagacccgagaacacacacttcttgctttcaccctcggtgtcaagcagatcatttgctgtcgtaacaagatcgatgccaccacccccaaatactccaaggctacgaaccatcaaatcatcaaggaggtgcctacatacctcaaaaacgtggcatacaacccagacaaaatcccatatcaaccaatcacccgattccaaccacacaacatcatttacaggtcacccaac

SEQ ID NO: 168644 - DNA, 414 bp, Arabidopsis thaliana nossen
  unsure (1)..(414): unsure at all n locations
ggaaancccggggggacccatgcatccgcaaaacaacaagaaaaaatggcaataaccaacaaattaatcataacactgggncgccttatctacatgtggtgggtccacagcttatccttccgtgtggagatcgacgagttcgagccaccacagcaaggagaacaagaaggtccccgtcgtcgtcctggtggtggctctggcgagggatgggaggaagagtcgacgaatcatccataccacttcaggaagcggagtttcagtgattggttccagtcaaaggaaggttttgtgagagtgctgcctaagttcacaaaacatgcaccggctctcttccgaggaatcgagaactacagattctcgttggtggagatggagccaacaactttctttgtgcctcaccatttggatgccgat

SEQ ID NO: 168645 - DNA, 408 bp, Arabidopsis thaliana nossen
gaagggcggggcccacccatccggaagaacaatggcttcctctatgctctcttccgctactatggttgcctcgccggctcaagccaatgtggtcgctcctttcaacggacttaagtcctccgctgccttcccagccacccgcaaggctaacaacgacattacttccatcacaagcaacggcggaagagttaactgcatgcaggtgtggcctccgattggaaagaagaagtttgagactctctcttaccttcctgaccttaccgattccgaattggctaaggaagttgactaccttatccgcaacaagtggattccttgtgttgaattcgagttggagcacggatttgtgtaccgtgagcacggtaactcacccggatactatgatggacggtactggacaatgtggaa

SEQ ID NO: 168646 - DNA, 378 bp, Arabidopsis thaliana nossen
atccgtacaaacgttgtgtggctgaagccttcaatggtttcactccatccgctgtgcatctagttgtgggacttctcactatagaccctgctgatcgaggaacttctacctcggcattgaatagtgaattctttactactgaaccgttaccttgtgatccttcaagtttaccaaagtatccaccttccaaagaactgaatgtaaagctgagggacgaagagttaagaaggcaaaagggtcttgctggaaaaggtagtggtattgatggagctagaagaataaggtatcgaggggatcgcactgggcgagctattccagccccagaagctaatgccgagagtcaagcaaacttagatagatggagatcgatatcacaaa

SEQ ID NO: 168647 - DNA, 406 bp, Arabidopsis thaliana nossen
cccggggcgttccacgcgtccgcaaaaactttttcttcttcttctttaacctttgcttcaatcttcaacaacgccgtttttataatgatttgtgcggttaagagaaaacctacaaaaaccaaacatggtggttttgccacagccagtcactttagataaccacatctccctaatccccacatacaaaccgattccggttctcacttcccattcaatccccgtcgtcaacctagccgatccggaagcgaaaacccgaatcgtaaaagcctgcgaggagttcgggttcttcaaggtcgtaaaccacggagtccgacccgaactcatgactcggttagagcaggaggctattggcttcttcggcttgcctcagtctcttaaaaaccgggccggtccacctgaaccgtac

SEQ ID NO: 168648 - DNA, 362 bp, Arabidopsis thaliana nossen
  unsure (1)..(362): unsure at all n locations
cttcatctgantctgatttaagcaaatccgagcttctaaaagggcgggggcaaaaatagtcgggggctataaaanaananaatatggctaaagaagcttatgcagagaaagagcacttggtgaagagatggttgaagcaagcttcatagctttttgggtataagcaatggttacaactgcttcagctagaagcactttacctccaaatcaagaacaaggagattgacaataaaaacaacgacgatccagggatttccatcccttgggggagcaatggcaaaacaagaaaagaggggagaaagagaaaaaaccaaaagggttaacccaaaggaacaaaataccccggtgggttaacaatgggg

SEQ ID NO: 168649 - DNA, 369 bp, Arabidopsis thaliana nossen
  unsure (1)..(369): unsure at all n locations
tccgtttttggatggttgatatgattttattagagaatcatctaagacaagccgcgaggcttaaaaacatctggtttgccgaaaaganagagatcattgaaaattctcttgaagaagaacacgctcctctcaacaaacgatccaagctattgattcaatggaacaagtgtctaaaagattagtctacttgaggagccaagtcctttgggtttgagtttaaaaaagagcccatcttttcaagaactgattgagatgaaactttctcaaagtggtgatgactcaaattcggttaagaaagaaagttttggttttggtggtgtacgaaccgttgagaagcttaaagcttctaactttcctgctactgttctc

SEQ ID NO: 168650 - DNA, 380 bp, Arabidopsis thaliana nossen
  unsure (1)..(380): unsure at all n locations
gaaaaccggcgcgacccactcaacggaaataacaaaatggctcgagtctttttcttctcctttcttcttaacacgggcgacctaaaaatttgtgcggcaaaaacaaggtcancanggtcagcagtttccgaacgagtgccagctcgaccagctcaatgcgctcgagcctttacacgtactgaagagcgaaactggtcgcatcgaggtgtgggaccaccacgctcctcaactccgttgctcaggtgtctcctttgcacgttacatcatcgaatctaacggtctctacttgccctctttctttaacacctcaaacctctctttcgtggctaatggaccaggtcttatgggaaaaatgatccctggatgcccccaaacattcc

SEQ ID NO: 168651 - DNA, 413 bp, Arabidopsis thaliana nossen
  unsure (1)..(413): unsure at all n locations
caaaaggggcggggtggataaacacgtgcgcaaagaaagagtttttttaactttcttagctcaaagtgttngcnncggacgtgaataacaaggtgcgttgccataaccaaccannangtcangccactgaccagtaccgaaacccgatccancatcagtgggacgagtacggaaattttatgggaggaggaggatacagaactggtggtggtggaggagctacaggtggccaaggatacggaacaggtggccaagggtacggatcaggtggccaagggtacggaaccggtggccaaggatgcggaaccgggaccggtactgaaggctttggaactggcggaggagctaggcaccacggccaagagcaactccacaaggaaagtggtggtggcttgggaggaatgcttcaccgc

SEQ ID NO: 168652 - DNA, 153 bp, Arabidopsis thaliana nossen
  unsure (1)..(153): unsure at all n locations
cattanaccaactttaactgaatttctctccacttttgtcggcggctttgcaacttttttctctatcctctctaaaaaaaaaatgtattgggaacatgccgctcatgcggggacaaacacaccaagagggctgattttaataacattggctca

SEQ ID NO: 168653 - DNA, 386 bp, Arabidopsis thaliana nossen
accgcacagagttaaattgagtttgtgtctcttaacttatcctgtgagccaaaggggggaaagcaactaattgtgaggggaagatcgcctacgataccaagctatgtcagcttatcgatgagtacacccagatcttggtcgttgcggccgataacgtcggatcaactcagcttcagaacatcagaaagggtcttcgtggagactccgtcgtgcttatggggaagaacactatgatgaagcgttccgttaggattcactctgagaacaccggaaacactgcaatcctgaatctgcttcctctccttcagggaaacgttggtttgatctttaccaaaggtgacctcaaggaagtgagcgaggaggttgctaagtacaaggtcggtgcc

SEQ ID NO: 168654 - DNA, 400 bp, Arabidopsis thaliana nossen
  unsure (1)..(400): unsure at all n locations
ataccgggggggactcacgcatgcgcgcaacaaaaaagagagaaagaaaaagtaaaccgaaagcgaaagcaagcgggaggtttcatggatttttaagttacaaganaagattacgaacacgcaagaataacgcgagatcttgattagagagagttcttgcaaaaagtgtctctgtattttgttattaaattcttcaatcttgtttctgtaaatttcggatatttttgaaaacaagcaaagatgtgtagtttggctacaaatctgttactaccatcgaagatgaaaccagtttttccagagaaactgagcactagctcactctgtgccacccctagaagatccaagatgaagaaccgatctgttgttcctgttgcaagattgtttggaccggcgatttttg

SEQ ID NO: 168655 - DNA, 273 bp, Arabidopsis thaliana nossen
  unsure (1)..(273): unsure at all n locations
ggtcanacaagtttntatcagggggtttagttagaattttttattgaaaagagaaaataaaaggagaagctgatgttttcattggggatataacagatgctgatagcattaaccctgcgtttcaaggaatctatgcgcttgtgattctcactagtgctgtgcctaaaatgaaacctggttttgatcccactaaaagtggaagacctgagttcattttctaagatggacagtatcctgaacaagttgattggattggacagaagaatcaaattg

SEQ ID NO: 168656 - DNA, 372 bp, Arabidopsis thaliana nossen
ctacaacccctgaattctaccattacttgcactctcatcaaactcgatcagacgctctcttatttttcagtgcttaatcataataacacgagcaattagctatctcggtctttcctcaacaaccaattcattaataaagcaggcctctttattccgagatggatcctgagcgatgataattagactctcaccaatcacttactaaactaatgaacctccagagttacagacacaatcattactcacaatttaaagaatccagcagctgactacttctctcccaccagattacatactgattacactacaaaaacaattagcaaggcatgctttcttcgcttgaatctcgttctccgcacagacctggaacta

SEQ ID NO: 168657 - DNA, 369 bp, Arabidopsis thaliana nossen
gctttatactctagagcggctgcttatccggtctaagtgcaataccggtgtttttactggttatgttgggagaaaagatgcaacattcacagcaggcctgaaaaaactgaaattggatcctaacaaccgactcgcaacacactcttactccaagcaagaagaggccttgagatcttattcgcatacgtacaacaacaatcttggaagtcattcttgagatgctgatattgtccctctcaagaactactagcatactcatctctatagagagattgctattggtactccaccgaataagttgactgacatttttgataccagaagctctaacctatgggtgccatcaggaaaatactttttctcgctgtc

SEQ ID NO: 168658 - DNA, 300 bp, Arabidopsis thaliana nossen
  unsure (1)..(300): unsure at all n locations
cggggggacccacacgtccgccaaactngcctctccaccaccacttcctctacctatctaannccgaancgtgaaatagaaaggtggttgagccccaaacaacnatnaanntnnntcataagatcaaatccctgaccgatcaaggccaaacagctttctccttccactttttcccaccgaaaacagaaaataccgtcgagaatctctttcaacgaatggatcgattggtctcttatggacctacctactacgatatcacttggggtcgctgctggatccacaactgatctcactctcgag

SEQ ID NO: 168659 - DNA, 154 bp, Arabidopsis thaliana nossen
  unsure (1)..(154): unsure at all n locations
gagagaatgattatttataagatggtcataaaaatagataatggagatgtgtttaaagaaaaattttttgtgatgtncataatctaaaattaaaatatagaactaagctgttacaataatattttttaaactcatactacaacaacaacatcaa

SEQ ID NO: 168660 - DNA, 403 bp, Arabidopsis thaliana nossen
  unsure (1)..(403): unsure at all n locations
ccggnccgaattccggggcgcccacgcgtccgaaaacgttgtgcagattgattctgggtttatcagttccttaccaccataagtcttggcaagcttctcttggtctaagtgaatttggagttatgcttctgtcagcacttttaacttcagtgggaatcaatcttggcctctgttttctcttcttcactttgtattcaatattgagaaagcagcctagtaatgtcactgtatacggtccacgtcttgttaaaaaagatggcaagtctcagcagtcaaatgagttcaacctcgagaggcttttgcctactgctggttgggtcaaaagagcattggaacctaccaatgatgaaatcctctccaatcttggcttagatgctttggtcttcattcgtgtctttgtctt

SEQ ID NO: 168661 - DNA, 403 bp, Arabidopsis thaliana nossen
aggtaccgaaccgcagttccggccccgacctacgcttgcttcatcattaccaaatcatcaacttaatcgtttctctcaaatttagggttgtctcttttctcgaaagtcgtgcggttttctgaatcatctctatctggtttgagggtttcgtttgatatctggagaaaggggtttctggaaacaaggagttcataattcgcgatcttgatctatcgatcttcatttatatataaaagcgtgaatgagattatgatggagtcgaaaggtggtaaaaagaagtccagcagtagtagttccttattttacgaagctcccctcggttacagcattgaagacgttcgtccaaacggtggaatcaagaaattcaaatcttctgtctactcaaactgctccaagaggccat

SEQ ID NO: 168662 - DNA, 371 bp, Arabidopsis thaliana nossen
gcaagacgtacttctatttatcgacaatatcttccgtttcgtacaagcaggatccgaggtatccggcgtattggggagaatgccttctgctgtgggttatcaacccacccttagtaccgaaatgggtactttacaagaaagaattacttctacgaaaaaggggtccataacctctattcaagcagtttatgtacctgcagatgatttgactgaccccgcacctgccaccacatttgcacatttagatgcgactaccgtactatcaagaggattagctgccaaaggtatctatccagcggtagatcctttagattcaacgtcaactatgctacaacctcgaatcgttggcgaggaacattatgaaactgcgc

SEQ ID NO: 168663 - DNA, 373 bp, Arabidopsis thaliana nossen
  unsure (1)..(373): unsure at all n locations
gctaaaccctccaacgattttccatgattcgaagatacagagccttagcggtgaagaaaaagccctagtttctagggcttngatctctccgaaatcggagtttctttctttgtttggtaaatttggttttcgaaatgtataagaaccagctacatgagttggctcagaggagctgctttaatcttccttcgtatacttgtattagggaaggtcctgaccacgcgccgcgattcaaggctactgttaactttaacggcgagatctttgagagtcctcagtattgttctactcttcgtcaagctgaacactctgctgctgaagttgctctcaatgctctctctaatcgtggtccttctcactctcttgccgccag

SEQ ID NO: 168664 - DNA, 368 bp, Arabidopsis thaliana nossen
cttttctctcagtgatcggataaaattctcggcgaagaactgaaggatggggcgatcagaggtggtgtggataacgagaaggatcatgaagtggagtggcttgaagctcaaaagatcgaaataagcgttgacttattagctgcagcgtaacaacaccttttgttccttgaaactgttgataggaatcgatggctctacgatggtcctgcgcttgaaaaagccatctacaggtacaatgcttgttggcttcctttgcttgttaaatactctgagtcatcatcggatagtgaagggtctttggtccctcctcttgattgtgaatggattcggcattgtcacaggcttaatccggtgaggtataattctga

SEQ ID NO: 168665 - DNA, 367 bp, Arabidopsis thaliana nossen
actatgagcagactgagcctgctacttacaacaatgcaccactccttggtgttcttgctcgtctcatcagtggtcattccggttatagccagtttcttccagtggttcctgctcctgttgtccgaagaccaatgcctattcgtagaccgaaagtgactactccagtccgagcttctggtccagtggctatagttcagaagataactagttcatgggtctcaaagggaaggacttactacagatactcaacaactgtgattaacaaatcttctagacctctgaaaagtctcaacctttcgatcaagaatctctatggaccaatctggggactctcgagatcaggcaactcgttcggtttaccctcgtg

SEQ ID NO: 168666 - DNA, 365 bp, Arabidopsis thaliana nossen
  unsure (1)..(365): unsure at all n locations
ttttcaactctctccatcggcgtcntatctgtgactctcnnaccatctgttgaaaaaaaagatggatggtggccaaaaagttcttcntcngaagcaactggaaatgtaacggaactgctgaggaggtgaagaagattgtgaacactcttaatgaagctcaggttccttcacaggatgttgtagaggttgtggttagccctccatatgtttttcttcccctggttaagagcacattgaggtctgacttttttgttgcggcacaaaactgttgggttaagaaaggaggtgctttcactggtgaagtgagtgcggagatgcttgtgaacttggatattccatgggttatccttggtcactctgaaagg

SEQ ID NO: 168667 - DNA, 337 bp, Arabidopsis thaliana nossen
ctaaaccagccattattattgattccgatgccaaccataacggctgttagaaatcagggaggcaccgaaacgtcacgaaatccccagcgcttcggggatgccctacgacaggaacatgtactcggtgttactatcacccccaaaaaaccaaactctgttacgtaaagttgccagagtacgattaacctcggattgaaatcactgttatatacctggattggccataattaaagaacatttgagtcttagtaagagggggaagggttaagatttacccgggtgagatatcacattgttcgagaaccctagatgctgcggagaaaggatcgtaacaagg

SEQ ID NO: 168668 - DNA, 370 bp, Arabidopsis thaliana nossen
  unsure (1)..(370): unsure at all n locations
caaagtttgaacttcttaaccttgcttcaggaattccttcttcttcccgaatggagatgttactggaggtgcgccangaggccttccaattccgatcaatgcaacaacttttgccaacaaaagccagggaataggttttagaacgattgcaataatggggtggccagggttgtgcccaatctggggttggggggggccatttctataatcgcgaaaagggagaaaattgggaagtgatctaatgctgttggtgcggctttggctccatcgattaacaaaaggcctggtaattttcaccctctgacttcttaacgcttctatagctttaaaagaacctgtttctgaaaaatttatacgccttgcaggtgct

SEQ ID NO: 168669 - DNA, 378 bp, Arabidopsis thaliana nossen
ataaaaacgagtcaaagtggattgtccaacactagcacttccgcgtaataattctgcaagaggtgatcctattagcggaatagcgtcaggtacacctgttacaattttgaccgcccaataaccaatttgatcccaaggtaaagaataacctgttacaccaaaagatgcggtcaatacacccagaaccacaccagtaacccaagttaattcgcgaggttttttaaaaccaccggtgaggtatacacgaaatacgtgcaggatcatcattaggaccatcatacttgccgaccatcgatgaactgatcggattaaccaaccaaagttagcttcagtcattatatattgaacagaagcaaaagcttcagtaacggttggacg

SEQ ID NO: 168670 - DNA, 367 bp, Arabidopsis thaliana nossen
tttctttagctcagaaaaagcccattctttttttctattcttgtttatttgaatcatactgtgcgtttcgacaaagtttgttcctttcttcttcaactctctcactcacggtcacagactcacagagatctgtttctttcttttatttttgctttcactcttctcttccagtgagagagagtgagagaaaacaaaatggtgaagcttttgttagtagcgtttgttgtggctggtataatactgggaactcaagcaaatgaatatttagatttcaatgtgacagaaatagatcgcattgaggaattagagtttggattttccaaatatagctccaatttgaaccctttaatggttggtctcaccctta

SEQ ID NO: 168671 - DNA, 370 bp, Arabidopsis thaliana nossen
gttctgctgttcccggccaatgaagattctcgtcgccgttaaacgtgtctgcgactacgccggttttatgcgagtcaaacccgataagactggtgtagaaacccaaaatgtgaagatgtcaatgaatccattttgtgagatcgcactttatgaagcgcttcgaatcaaagaagctggttttgctaaagaggttattgcagtgagtattggaccttcacaatgtgtggatacacttcgtactggtttagctatgggtgctgatcgaggaatccatgttgagaccaattctagttttcttcctttgacgattgctaagatcttgaagagtttagctgatgttgagaatcctggattgattttcttagggaaa

SEQ ID NO: 168672 - DNA, 372 bp, Arabidopsis thaliana nossen
tagagatcatcctggaatgatacaggtgttcttaggccatagtgggggtgtgggtaccgatggaagtgagctgcctagactcatctatgtttctcgtgaaaagcggcctggatttcaacaccacaaaaaggctggagctatgaatgcattgatccgtgtatctgctgttcttaccaatggagcatatcttttgaacgtggattgtgatcattactttaataacagtaaggctattaaagaagctatgtgtttcatgatggacccggctattggaaagaagtgctgctatgtccagttccctcaacgttttgacggtattgatttgcacgatcgatatgccaacaggaatatagtctttttcgatattaacat

SEQ ID NO: 168673 - DNA, 400 bp, Arabidopsis thaliana nossen
  unsure (1)..(400): unsure at all n locations
tccggaatnccggggggggccgaggcgtccggacgctgaaactgataaccctcaaaccgagctccagcctggaatcgaccgtctgggtcctgttgatgagcgtgggttcgacatctatgatagatatgagcctgtcaacgaacccactttggacaactgcttcataacaacgagttatgatgctacaacacactttgacacaactgttgttgatgtgttgaacatgtataaattgatcaccggaaaggaactggatctaagtgtggatcttaacgcagctagtgctgcagaggaggaatgatggaaaatattgcaagctctgtctctctctgttagtcaccaaatgatgtaaccggttctctttctccctcttcttaaaagttgtctcaccaaatgttct

SEQ ID NO: 168674 - DNA, 372 bp, Arabidopsis thaliana nossen
  unsure (1)..(372): unsure at all n locations
agaatttgcacatggctgcaaatcaagggatggaaggaacatnngggagtgtaaatcttgtatgcggggggccgctctatgacataaacgagcttcgctccattgctccagtagatcacaaacagcaatttgatgtgcggtctattattgcccggattgttgatggaagtgaatttgacgagttcaagaaacaatacggcactacgcttgtgactggttttgctagaatttatggtcagacggtgggtattatcgggaacaatggcatactgttcaatgaatctgcactaaaaggagctcacttcatcgaattatgttctcaacgtaaaattcctcttgttttcctccaaaacatcacaggctttatggtgg

SEQ ID NO: 168675 - DNA, 372 bp, Arabidopsis thaliana nossen
ccgaaccctctgattctcgtatagacacacacatacctatacatgcgcagtttaacacttatgtgtggggagtatagccatgggagaaggagaagcaaaagcagagcacgcagccaaagcagatcacaagaacgctccctccgcttcttcaacgccagaatcttactctaaagaaggcggaggaggcggtggagatgctcgccgcgcaatctgcggcgcgatcttcaccatccttgtcatactaggtatcatagccttaatcctttggctcgtctaccgtccacataaaccacgtctcaccgtcgtcggagccgccatctacgacctgaatttcacagcgccgccgttaatctcaacctccgttcagttcag

SEQ ID NO: 168676 - DNA, 374 bp, Arabidopsis thaliana nossen
gtcattgtttagaattaaaaaaaaagaaggtaaaagagtcagagccgcctagagaaatcgatcacatattgagaagaaaagaacagagaaaacagaggaagaggttgagatggaggagcttgtagggcttctgagaatccgagtgaagagagggatcaatcttgctcagcgagacactctaagcagcgacccttttgttgtcataaccatgggatcacagaagctgaagactcgtgttgtggaaaataactgcaaccctgagtggaacgaggaattaacccttgcgttaagacatcccgatgaacctgtgaatctgatagtgtatgataaagatacattcacatcgcacgacaagatgggagatgcaaagatag

SEQ ID NO: 168677 - DNA, 371 bp, Arabidopsis thaliana nossen
aaaaaatatcttgtgaaaactgcaactgtgatccatggcggaggatgtgggtgccgacgaaggttcgggtgcctcctcaaaaggttcttatcatctccgctggtgctagccactccgtcgctcttctctctggtgacattgtttgttcttggggtcgaggagaggatggacagttaggtcatggcgatgcataggatcgaccttctccgactcagcttagcgctttagatggccaccaaattgtttccgttacctgtggtgctgatcacactgttgcttattcacaatcaggcatggaagtctacagttggggatggggtgattttgggagattaggccatggtaactcaagcgacttgtttactccgcta

SEQ ID NO: 168678 - DNA, 372 bp, Arabidopsis thaliana nossen
caaatctctccctccctatctctccgatctcagatccattcaacagtcgtgtaacaacataggtcctgtgtctccatagagtaacacctctctcgtctccgtagatccacagatccacgacctaatctagaaggacaaacgtcggcaatgtcgaggaatcgaacttatcacttccgagaatttcacttccttcgccgtcatctaagctctcggaagtgccttaaccaacaaatactccgaaggtattcctggcaatcgttattacggacgtaacgaattcatcgatgagatcgataatctttgccgttcaagagctctcgaagctttccattgtgatccagcagcgtcgggcgttaatgttcagccgtattc

SEQ ID NO: 168679 - DNA, 374 bp, Arabidopsis thaliana nossen
gtccctttggagatgttggattgcgctctggtatgcatcggtattccaatgtgtggtttgtttggttgtcgtcgtgtctcatatcccgtggaggctgcaggggtgtttctcatgctctgcctaatgtagtcgtggaagtatttggagccgatggtgatgatgacgaagacactgtcactggggattatgttgagacattgtacttgtatcgatcccttgatggcccaaggaaggatgctccaaagtttgtaacaattttatgagaaaaactttggtgcaaatgaggccatgattggggaaaagcaaaactagcaagcagaagataatgtgtttgtaaactgtaagtgcttcaggtacactgcatgatttgtttt

SEQ ID NO: 168680 - DNA, 375 bp, Arabidopsis thaliana nossen
ctgcaggcacgcactccgtgttctctccacaggaaactgttttcaggtccgtgggtggtatcttccagttatgtggcgcaggatcagcacgtcgtttagcaagacgttcagaagtaacgctgaggatcatggagagagagttcagcttctgcagaatctggtttcgactctggtctcagaatcggctaaatcgaaggagaggctagatattgcaactgagcaaacctccatcctcttatcccgtatcagagagcagcctgtctcctcacttgctatcagagacatttcttcttctgtgcagaggaatttttgataccacaaatgctatgcgtgtctaactatttttagataacataattactttattaacctaat

SEQ ID NO: 168681 - DNA, 376 bp, Arabidopsis thaliana nossen
gacatacaaaattctatcaagaccagctaaccctaacggctagtagggggtgggggattattctcactagtgtggtgcgtactcagtttccctaacggcaagtaggtgcgaatatggtttcaaaatacaagatcaaagtattaagttcatattcgattctagtccgtaagtccctatcactcagcgggcgtgcaacggttaaagtttcttagataaccgttgagctagttaaggcaaatatacaagattctgcgaagtataaaatacctaagctcatgtactacgtggcattccggacatacatgcattacgattaaactcaactaaaaagaatagtgtaaacgatcaaacaaaaccatataaaccaccaacgtat

SEQ ID NO: 168682 - DNA, 378 bp, Arabidopsis thaliana nossen
gaatcagacagaagttgcagagaaaagagaattaattgattggtgtaatggagagggcagttcatttatccaccggaaatggacccaaggttccaggagagccaacgaagaccggaacctccatggttgacacggcagcttcagccgtacaaagcttcgctccgattaaccaaatccaccaacatctctgcgcgtttcatttctatgcatatgacatgacccgacaagtggaggcacaccatttctgtggtcacatcaacgaagacatgcgccagtgtctgatctacgacggtcctgatgccaacgctcgtctgatcggtctggagtacattgtgacagagaagctctttatgacattgcctgacgatgagaagaagc

SEQ ID NO: 168683 - DNA, 376 bp, Arabidopsis thaliana nossen
acaaaacaaaacacacccaaatatgcataagcttttgttttctcttctctgcggcgtctcactctcatttgtccgcttcttccatggcgccgaggcacgccagcgagaggcgccgtttccaaacgcctgccatttcagccaaatcaacagcctcgcgcccgctcaggcgacgaagttcgaagccggtcagatggaagtatgggaccacatgagccctgagctccgatgcgccggtgtaacggtggctcgcatcacccttcagcccaattccattttcttgcccgctttctttagcccacctgcccttgcttacgttgtccaaggagaaggagttatggggacgattgcttctggttgtcctgagacttttgcagaa

SEQ ID NO: 168684 - DNA, 374 bp, Arabidopsis thaliana nossen
ctgaggatgaagctcggttctacagtgcagaagttgttgatgctcttgggggtatacataatagtgggacggatacatcgagatattaagccggagaatctgttgttaactttagatgggcacataaagattgctgattttggtagcgtaaagccaatgcaagacagccaaatcacagtgcttcctaatgcggcttctgatgataaggcgtgcacttttgtcgggacggctgcatatgttcctcctgaagttctaaactcctctccagcaacgttcggaaatgatctctgggcactcggctgcactctgtaccaaatgctttcaggaacttccccattcaaggatgcaagtgaatggctgattttccaaagaat

SEQ ID NO: 168685 - DNA, 372 bp, Arabidopsis thaliana nossen
aaaagatcagattgaggtagaaccgagatttcatgatcacaccaaaaagggtatgttgctcaggcagacatgtcttaactagaatccgttggtgcattgctatcttgcgacgaggagaacaaggtgctaaacggccacgggatcgagaatccgcttccgtcattgttctcgttctcctcctcttcctcctcttcttcttcttcttcttggcgccggtttccatcgctgttctcagctccatggctggttgtagcagaagcactactgcttccattgttatcgctcgttgttgttactgaatcagtcttggcttcatctgcaggtaactgatatctgcaaaccgggcatgaactgtgaagctcaagccatggt

SEQ ID NO: 168686 - DNA, 369 bp, Arabidopsis thaliana nossen
  unsure (1)..(369): unsure at all n locations
aaaatatattaaaaaaaattaactcgatatgaatcataacccctgagagggttacatatcaaagtgttggggccaaacaagacngataatcatgcaatcataaccttcacctatggaagcacatcattccatggatacatcttctctacttctatccaaacttgatcatatttcttcctctcatcttcgtcataatatttcttcatcttatcatggttatcattattatccaccatttatgactctgacttacattcaacatattcagttcatttgggattcgcctacaacaacacacataatcataatctagatcctacattaattgattttttctgactcatcgaaatcaaactgacctaaccaggc

SEQ ID NO: 168687 - DNA, 375 bp, Arabidopsis thaliana nossen
  unsure (1)..(375): unsure at all n locations
tctaaagaaactggagaggtatctgtggttgataaagtgatttccaagggtgagggtganaggcgtgttggcagggctcctaatcatacttgcacacatatgttgaattatgccctgaaggaagtgctcggggatcatattgatcagaagggatcaattgttcttcctgaaaaactgcgatttgatttttctcatggcaagccggttgatcctgaagatttgagaaggatcgaatccatagtgaataaacagatcaaggatgaattagatgtgttttccaaggaagctgtgctttctgaagccaagcgcatcaaaggtctaagagcagtgtttggagaagtctaccccgatcccgtcagagtggtgtcaattggg

SEQ ID NO: 168688 - DNA, 375 bp, Arabidopsis thaliana nossen
gatcagaattcgtacaggagaagatcgtctccgatcagaaccaccaccggggggtgaaagtccgttggttgctgggaactacttcaaatgaagtatctcagctccggtacgatgaagctcacgagaaccttcactacttgcttgatagtcttctctgtactagtagcattctcaatgatctttcaccaacacccatctgattcaaatcggattatgggtttcgccgaatctagagttctcgacgccggagttttcccaaatgttactaacatcaattctgataagcttctcggagggctacttgcttctggttttgatgaagattcttgccttagtaggtaccaatcagttcattaccgtaaaccttcaccttac

SEQ ID NO: 168689 - DNA, 377 bp, Arabidopsis thaliana nossen
atggctagggagattggttacgagatcaaaagaaattggtcaagggattatccggggaatttgtccagacgcaaggcaaggaacttgctgagcacgctacatctccttcaaacaaacacaaagccaaaaaagaaaaggaggaagacaaagacctaagaacgttgtggactcctttcaatctctttgcaatagatccaatctactccaacgactttggtcatttccacgaggcacatcctaagaattataatcaactgcaagaccttcacatagccgccgcttgggctaacatgacacagggatccttgttccttcctcattttaactctaagaccacatttgtaacgtttgtggagaatggttgtgcccgcttcgag

SEQ ID NO: 168690 - DNA, 378 bp, Arabidopsis thaliana nossen
gaaaagaagaacgctgttgtctctgaggagaagaaaagacttgttgcttaccatgtggctgggcatgcttgagtgggtgcacttatgccggagtatgatccagtggccaagatatcgattattccacgtggccaagctggggggctcaccttttttggctcctagcaaaaagaggctagaagtccggatggtatagcagaagctaccttgagaaccaaatggctgttgcacttggtggaagggttgcagaagaggtgatctttggagacgagaatgtgacaaccggagcatcaaatgatttcatgcaagtgtcgcgggtggctcgccaaatggttgagagattcgggttcagcaaaaagattggacaagttgcagttg

SEQ ID NO: 168691 - DNA, 360 bp, Arabidopsis thaliana nossen
catcctctaaaaaaaaatctttctggtgagtaacgaaagggatgtgtccggtggagaacaaatggttaaaggtgggtcaaaaaggagctggtcctggggctagaagctcacatgccatgaccgtcgttgggaacaaagtttactgttttggtggtgagcttaagccaacgatccatattgataacgatctttacgttttcgatcttgagactcaagaatggtcgatagctcctgcgaccggagaggctcctttcccctgttttggtgtctcgatggtaacgatcggttcaacgatctatgtctacggtggccgtgacgataaacggagatacaacggtcttcattcgtatgatactgaga

SEQ ID NO: 168692 - DNA, 371 bp, Arabidopsis thaliana nossen
agattattcagttcttggataacatcttccatggatggtctttggtttgtggattcatgagtgcagagaagaccaagtctagcgagctgagccgcttctacttccgggaagttctttcgaagatttggatccatgaagtcttcattcagtcttcctgactctacagcttgtaagatcatcaaatggctgattttgcttttaccactcagtatctgcaacagaatcataccaaatgcataaacatcgctcttatcagtgaacctccctgtagttatgtactcaggagctaagtatcccattgccgcacttgctttgagcttcgagaaaacgatatcatctgtgaaaagcttgtgaagaccggaatctgcaag

SEQ ID NO: 168693 - DNA, 371 bp, Arabidopsis thaliana nossen
  unsure (1)..(371): unsure at all n locations
ctctataatccgatctgagaaatttcgccggagctaggtnnnggtgtttggcgatcaatcctttagtcgggggcaatggctgttttccgtcgcgaagggaggcgtctcctcccttcaatcgccgctcgcccaatcgctgctatccgatctcctctctcttctgaccaggaggaaggacttcttggagttcgatctatctcaactcaagtggtgcgtaaccgcatgaagagtgttaagaacatccaaaagatcacaaaggcaatgaagatggttgctgcttccaagcttagagcagttcaaggccgagctgagaactcccgtggactttggcagccatttactgcacttctaggagataatcccagcattga

SEQ ID NO: 168694 - DNA, 373 bp, Arabidopsis thaliana nossen
gccttgacctccctcaactcaaagccttccttcactattcctatggtgccgtcaacacaactgtgggcggggtcttctctgctccaccggctaagcctggcggatggatcgcgtgggcgattaatccaaaagctaccggtatggtcggatctcaaacccttgtcgcttacaaggatccaggtaatggtgttgccgtggtgaagacgctaaacattagctcctatagctcgctgattccgtcgaagctggcgtttgatgtttgggatatgaaagccgaggaggcagcaagagacggaggaactttgagaatctttgctagggttaaggtcccggctgatttggtggcaaagggaaaggttaatcaggtttggca

SEQ ID NO: 168695 - DNA, 375 bp, Arabidopsis thaliana nossen
catttttcgtcaccctagccgctttactctcttgcgatatctctgagatgtgtgtgacagtctctagccgtgggtaaagagaagtttcacatcaacattgtggtcattggccacgtcgattctggaaagtcgaccaccactggacacttgatctacaagttgggtggtattgacaagcgtgtcattgagaggttcgagaaggaggctgctgagatgaacaagaggtccttcaagtacgcatgggttttggacaaacttaaggctgagcgtgagcgtggtatcaccattgacattgctctctggaagttcgagaccaccaagtactactgcactgtcattgatgctcctggccatcgtgatttcatcaagaacatg

SEQ ID NO: 168696 - DNA, 375 bp, Arabidopsis thaliana nossen
atagccacaagttcaagggcttaatgggtgacatgaagaggtctgtaccattgtgggagaagtttcagacgatccggaatgagtaagtttttgtgtatgttgtcttcattaaacagtgatcgatgatgattttctattccaaaaaagggtacagcgaaagaaaaaaaaagactcgataacttaaatttctcaatcggcgaagaagaatttttttaatatatgctttcttcattggacctttgtttgtttgttgttgccgtctcgctgttttatttttgaggggttttagccttttgttttgcctttcgatgattttttgagttttgaatatgtttcgtacatcttaaaattgagtacaaacggcatgcagtcgtc

SEQ ID NO: 168697 - DNA, 379 bp, Arabidopsis thaliana nossen
aacgcaagctaccacagatttagagtttatccaccttatctttcgccgagatccggcaatggctgatgtggaaccagaggttgcagcagcaggagttccaaagaagagaacgttcaagaaattcgccttcaaaggagtcgatctcgatgctcttctcgacatgtctaccgatgatcttgtcaagctcttctcttcccgtattcgcagaaggttctctagaggattgacgagaaagcctatggctttgattaagaaactccgcaaggcgaaaagagaggcaccagctggtgagaagccagaaccagtgagaacccacttgaggaacatgatcattgtgcctgaaatgattggaagcatcattggtgtgtacaatggaaag

SEQ ID NO: 168698 - DNA, 369 bp, Arabidopsis thaliana nossen
gttttctattttgtcgttcccggtaaattttgccggcgaagattgagactgttcctaacgatgctggcagcggcgaatcttccgacgatatggaatctgtcgcttcgtgggtcatcctctaaagtccatatagtgaaccctaggcatcgaaagtctcacgcgcttcattgtttgaggttttgagtttcgtctccttcgtgagatttctctttctgctctgttcgatccgaattcttcaggttgatagtaatattagtgtagcattttacagaatttagttaatttcatgaaatcattgcttatctagagtgaacctttctcaatctttctggtttgtgtagaagaatattttgtgttgcaagaattgat

SEQ ID NO: 168699 - DNA, 368 bp, Arabidopsis thaliana nossen
aaactatatactctcgttttgttttgacgacttttttttcaatactggtttgtactataccttccgggagctcattctccttagaactctatttcaaatattttcgtggatttcttccaatccccttatttttttatgtcattctaaattgtataaagacaactcctatttaatagagctatttgtgcaagtattttccgattaagaagtaattgcttcttgtatagatagtgtatgaattcattataactatagaatacccccatttcgtgaattactgcatttattcgagtgatccataaacggcgaaaatctctttttattttacccctatcccgatgagccgaaactaaagctcttattctctg

SEQ ID NO: 168700 - DNA, 371 bp, Arabidopsis thaliana nossen
caagtccacggctaacagttggaacgtcatttgaatctttaagatcatgtggtttgaaccaagccggtctgtgtgcgattccaattttcccacctttaacctacaaaatgtccattaacacaacacaaaacaaattatattcatatccaaaacctgatagttaattttgatatatatatctaatgtaaattaccttttggcggaaaacttcaacagcttctgcatgagcgttgaggaggttgtgactaactagataagcctcataacctgatcgtccatctcggtcttcacaacctttaaggtagcgagaacaacgtcctggcgccttcttgcctacgtcgtaacctgcatgagcgaagacccatggctcg

SEQ ID NO: 168701 - DNA, 376 bp, Arabidopsis thaliana nossen
gcaaaaagaacaatggcagcgagtgcatttccaatggcgagccacctaaggtgcaggttctccggcggttcgctggctcagcgactcgccgtcccgaagggcatctccggtgctcctttcggtgtttctccgaccaaaagagtctcttccttcactgtccgagctgttaaatccgacaagacaacattccaagtagttcaaccaatcaacggtgatccattcatcggaagtttggaaactccggtgacatcaagcccattgatcgcgtggtacctttccaacctccctggttaccgtaccgccgtcaaccctctcctccgcggtgtggaagtgggcctggcccatggtttcttcttagtgggcccgttcgtcaagg

SEQ ID NO: 168702 - DNA, 385 bp, Arabidopsis thaliana nossen
acgggaaaagaacaaaatcaaatctagcaaataaaatggattcacaagcgcagtggcagtgtactcatgggcatgaccgggcacaggagccaataaggattcaccatccagaggaagaagggcatcatgaaaaaggaccatcaaaagttctgaagaaagtgaaggaaaaagcaaagaagatcaagaatgttcttactaaacatggacatggtcatgagcacgatcgtggagaacacatccctgacgatcacgatctagaccaagaagacgatgaagatgactacaacgacaaccaactccacggcggtgcaccagcacgaggaaaagctcatattccggtgaaggaggagatagtccctccaggatcgaaagcttttccagttgt

SEQ ID NO: 168703 - DNA, 379 bp, Arabidopsis thaliana nossen
gaactccaggccataagaattacggacttagtgttcttcaacagcatgtgtcctgcttcgatatcgatgggaatggcatcatttacccttgggagacctactctggactgcgaatgcttggtttcaatatcattgggtcgcttataatagccgctgttatcaacctgacccttagctatgccactcttccggggtggttaccttcacctttcttccctatatacatacacaacatacacaagtcaaagcatggaagtgattcaaaaacatatgacaatgaaggaaggtttatgccggtgaatcttgagttgatatttagcaaatatgcgaaaaccttgccagacaagttgagtcttggagaactatgggagatgacaga

SEQ ID NO: 168704 - DNA, 380 bp, Arabidopsis thaliana nossen
atttcggatgttttctctacactggagacttccggtgggattctgatgcggcaggcgaaactagaaccagtctcgttgctgctattgacgagtttccagtcgacattctctatctggataacacttactgcaatccaatttacagttttccttcccgtcaagtcgctgttcaattggttcgacctaaaccctaatccaaaagccttaaaccctgaatcatgtttctctttgttatattcctcatctcctttacttgcaggttgctgatataattgcttctcatccttcacatgatatcatcatagcagttgactctttgggaaaagaagacctccttgttcatgtttcccgcattctcaatatcaaggtttcttatagta

SEQ ID NO: 168705 - DNA, 378 bp, Arabidopsis thaliana nossen
cacgcgccgagttttcctcacttgtctctcaatagaatctactctctctggtgttgcgtctatcgctgggcatgtgggcgcctccagatctcgattccaatctctctctccctctctacttccttcaacagaaatggaaacgttcctatttacctctgaatccgtcaatgaaggacacccagacaagctttgtgaccagatttctgatgcgatccttgatgcttgcttagagcaagatcctgaaagcaaagtggcgtgtgagacatgcaccaagaccaacatggtgatggtgttcggtgagatcactaccgctgcgaaagttgactatgagaagatcgttagatccacttgcagggagattggtttcatctctgctga

SEQ ID NO: 168706 - DNA, 369 bp, Arabidopsis thaliana nossen
tttagctgtagatgcggttctctctgttatagatccggaaaagcctgagattgtggatttgcgtgatattaagattgttaagaagcttggtgggactgtggatgatacacatactgtgaaaggtttggtttttgataagaaggttagccgtgctgctggtggaccgactcgtgtggagaatgctaagattgctgtgattcagttccagatctcacctcctaagactgatatcgagcagagtattgttgtctctgattatactcagatggataggatcttgaaagaagagaggaattacatattggggatgattaagaagatcaaagcaactggttgcaatgtgttgttgattcagaagagtattttgag

SEQ ID NO: 168707 - DNA, 374 bp, Arabidopsis thaliana nossen
ctcaaaacaagacccatcgataacagcgatcatggtggctaaagccttagggcagttgataacatgcatgggtctgattctgccacgttgtagcttccgtagaagacctcaccatacgccaagtcacggccgacaatcggcgaattcgcccgaatcttctcgggactcacacagagagtaaattccggcttttcatgtccgattacggcaagaactactccacgagggaggagtacatccaccgcctcggaatatttgccaaaaacgtccttaaggccgcagagcaccagatgatggacccctccgccgtccacggagtcacacagttctctgacctcacggaagaggagttcaagcggatgtacactggagta

SEQ ID NO: 168708 - DNA, 371 bp, Arabidopsis thaliana nossen
  unsure (1)..(371): unsure at all n locations
aaaacacannacaaacttaattaacaagnnagatatnaaaacattttgtgtttcaaagaaagtggtctgcccatnaaaaacccaacnnnnnanattcctcccacaaagcttcttttatcttccaagagttttccttctgattcttctttccctcgctcgccgaataaacataactggaacaaaagcaacaagattacatctgaacatgaataatacaactaagacaacaacagagagaataaagagtactgttatgattctcactctgatgatccttacgcaagtgatcatttccggatgttcgaattcaagatccgtcgttgcactcatagccgaagccacgattggactgattgtcctttttctcatcc

SEQ ID NO: 168709 - DNA, 380 bp, Arabidopsis thaliana nossen
cttgaacttggaggatcaatggccgacgttcgcacacactcgcaccagcttcaagtgcaccctcaacgcgagcatgaaggaggcatcaaagtcctttatcctcagagtggcccttcttccactcaggtgctagccgtgtttgtcggtgtaccgataggaggaacgctgctgactatagccggtttgacattagccggttcggttataggactaatgctagcattcccgttgtttctcatctttagtccggttattgtaccagcagcctttgtcatcggtctagctatgactggattcctggcttcaggggccataggtctcaccggactatcatccatgtcgtgggtactcaactacatccgccgggccgggcagcatat

SEQ ID NO: 168710 - DNA, 379 bp, Arabidopsis thaliana nossen
  unsure (1)..(379): unsure at all n locations
ccatccatcgactgggttgagggaactaaactgaatgagcaactacccatttagagtgaacaattgaaggttgtggatctcacnaatacaggaatccagtgtagcctaaggcaactcttgaagtatggctttttccatgctgaccctcatcctgttaatctcttggcaacacctgatggaaaacttgcctttctagactttggcatgatgagtgagacaccataggaagctagatttgctatcataggccatgttgtccatttagtgaaccgagattatgaagccatggcacgagattactatgctctgaagttcttgtcccctgatgtggatgttactcctatcataccagctctcagagacttctttgacgatgcac

SEQ ID NO: 168711 - DNA, 390 bp, Arabidopsis thaliana nossen
  unsure (1)..(390): unsure at all n locations
tcttacgcaaaggattatatgatgctggagatcatataaagtttggttttccaatgggtttcgctgctacagaagtgttatgggcgatnctcgagtacggtgatcaaatgaatgcagtgaaccaattggatcctgctaaaaactctctccggtggatcactgactatcttatcaaagctcatccttctgataatgtcctctatatccaggtaggagatcccaaagtagatcatccatgttgggagagaccagaggatatgaaagagaagagaccacttactaaaattgatgtagatactccagggacagaggttgctgcggaaactgctgcagctatggcttcagcgtctttggtgtttaaggatagtgatcctacatattcagcaacgg

SEQ ID NO: 168712 - DNA, 370 bp, Arabidopsis thaliana nossen
gcaaaaactcggttcaagctgaaatcgaaactcgaaccggaccggggtggttgtttacgatggcggggggcgagtgaagctcaacgtcggcggcgagatcttcgaaaccaacgcgtcgaccattcaatcatcttgcccagactctctcctcgcagctctatcgacttcaacctcccatggatcgaatccggttttcatcgatcgtgacccggagattttcgccgtcattctcaatctcctccgtactggtcgactcccagctaattcctccggcgttttttccaagcaagagctactagatgaggctatgtattacggcgtcgaatcactcctcagattggcgatgttaccgccgccgctgctaggtttc

SEQ ID NO: 168713 - DNA, 370 bp, Arabidopsis thaliana nossen
ccaaaacacatcacaaacaaaaaaaacaagttagatattatatcatgatgggtgtcgtttgtacggggcaggaaatgaggaagccaacggtggagattcctccgagaaagcttcttttatcttccaagagttttccttctgattcttcttcccctcgctcgccgcgtaaacataactggaacaaaagcaacaagattacatctgaacatgaagaagacaacgaagacaacaacagagagaataaagagtactgttatgattctgactctgatgatccttacgcaagtgatcatttccggatgttcgaattcaagatccgtcgttgcactcgtagccgaagccacgattggactgattgtccttttgctca

SEQ ID NO: 168714 - DNA, 384 bp, Arabidopsis thaliana nossen
gccccgtaactcttcctcagcctggcttgggcagaatagcggagcaagtgtgaggagcatagctaaaatgcgttcctcatcattaagtcattaaattcatatgtttgctcgcggtaattgtgaactctcgggagaatcgatgactgcatcaaagatgcacttgttagtacatctgaaaattctgaattggctagttgtaaatagccccaggactatagaataaaggattatcccgaacctacaccgaggtattgacggtgattctcaaatatcacagaacagaatgtgatacgatgagatagaatgcaatagaaacaaagacacagggaacgggttaccgactcttaacggtcaaagcgaacccgttcattcttacattctgaa

SEQ ID NO: 168715 - DNA, 373 bp, Arabidopsis thaliana nossen
tgcctatatgactgactgacaacacttcactatatatgagaatttgacatgtatggtaagaaaattgaacgtaaaaaaacaagaaatactgccgttaccccatatttaggaaaggagaagtctgatgagcgatcatgtaaaaatgggggtgttgaaatggttgtggctgtggtacatcgtcgacgctgcggttcagctgctcacattgggtttgttttgtccttaggatgttttccctctcctttatctataccgattacacacgccaagaaaattatataagcattatctttatatagattctcatttgcaactaatcagctatttgcatttattcaagaaacttcaattttttattcttatactttttttt

SEQ ID NO: 168716 - DNA, 374 bp, Arabidopsis thaliana nossen
gaacagcaacaacctttctagttaccaccataagcagttctcctcatcagcctcatgaattcatccgtggtaacttcaccatcacctgcagttttcagtaatgtatcatatatctttagtcaaaccaagcattgtgccacaagagaatgagaaaaaaggtttaggacacttacggtctcggtctgcttcttcaaccatctctcgtatctcagcatcagtgaaattctcacccaagtcctttgccatgcgtttgatatcatccggagatatcttcccctgaaaatttggaagaaaaatagtttagcttctgacaaattaagatcaaatgaaataactaactaagttatgagtaaatacatttttgtcaagatcaa

SEQ ID NO: 168717 - DNA, 409 bp, Arabidopsis thaliana nossen
aaccggagggccggggctcgtcccaggcgtgcgtctgaatcgcattataagtctctgtgttcttatctttggtgaatgagctcagctcttaattcttagcgtctgtgatccttctctcaaatgggttgtctgatttctcctgtaatgaaactccgtcgtctctcctcagccgactcgcggcgatttgcataccggaatctcgccgagaatatggaagatccagtcataagggtggtggtagggaaggagaagaaggagttcatggtcgaaccgtatgtactcgaagagtacccgttcagagtcttgataggttcagctagggatcgtgccaagaaccggttaaaccggaccggtagagtggtgtggcttgatcatgtcgactcgatcttatttgagcacttgctatggc

SEQ ID NO: 168718 - DNA, 379 bp, Arabidopsis thaliana nossen
gcggacaaagttaaaaactaaagattttcctataaatatgatatgataggggggttggaaaccacttaaaagggaaaataaaaaaaaatagatatttaaaactaatttcaatcttcacaaacccagaaaaaaatcaatatgaagaactcttctatcatgttcgtactaattgtcgtttttcttatttcttcatcaggtactatattattaattatttaatatattaattttcatcatttaacctgcaaaaatcggattgacatatgttgttgtgttcttggttggaactgataaaaagtaaactaaaatataaaattaagagaaaaaataaaatatgttaatacaatgatttaaatcttgttttgatatatagagaacc

SEQ ID NO: 168719 - DNA, 369 bp, Arabidopsis thaliana nossen
  unsure (1)..(369): unsure at all n locations
tcaaggggaggataaaaaagcatcacgaactccttctcttaaggaaaacatctaagggaatgtttattaataatttgtctaggtcaaacaacnnnnccancttaanacactcaantctcacatctntccctttttacttccacttcncttcttttttctttttttaaactctctctatatctctctttcttcttcacactttnttattaatttcaantntttaatcataatnncaacatcanctcntanancatactttttcnntatatcctatnantctacacacccttactccattanancaactttatctnattttctctccacttttatcttcntcttttcatctaaaaactctatcctctctct

SEQ ID NO: 168720 - DNA, 327 bp, Arabidopsis thaliana nossen
  unsure (1)..(327): unsure at all n locations
gaagaaaaatgtctactcttaatgttttttatnctgntcctgcccccacggaaggtgcntaactaaggtgaacggccaacaaannannnnncacnaaccacgactttatcatatcaatcttgactcacaaaagtgctgaacaaaataaatttatcatacaagcataccaaaaaacctacggcgaacaccttctcaagactcttgacaaggagctctctaactacttcgagagagctatcttgttgtgaactcttcaacccactcaccgtgatactttattggctaattaatctacaaaaagatctacttcaatcaaccaattcctta

SEQ ID NO: 168721 - DNA, 358 bp, Arabidopsis thaliana nossen
  unsure (1)..(358): unsure at all n locations
tatatttcctacaaggnaaagganngaggcgagggtttcactttataatgttaggaatcccaccacataactaaaagtgatgtggtaagaatcccttctggtgtcaccaactttatcaccaacactaaccatactgttcctctccgcctcacccagatcaccgtccctgtcaacaatcccggcaactacaaggattacttccctgctgcatcccaatttcagcaatcctacttcaatggatttaccaaagaagtcctctctaccaatttcaacgtgccggaagaattgctaggcagatcggttactagatcaaaaaaaataggtcaaggaattatccgaaaaatatctccagaccaaa

SEQ ID NO: 168722 - DNA, 263 bp, Arabidopsis thaliana nossen
  unsure (1)..(263): unsure at all n locations
tatnnaaaactaatttcaatcttcacaaacccaaaaaaaaatcaatatcaagaactcttctatcattttcatactaacaaacaaaactcttatttcttcatcaagtactatattattaattatttaatatattaattctcatcatttaacctgcaaaaatccgatttacatattttcctatttccttcattgtaactcataaaaaataaactaaaatataaaattaacacaaaaaattaaatatttcaaaacaataatttaaa

SEQ ID NO: 168723 - DNA, 381 bp, Arabidopsis thaliana nossen
  unsure (1)..(381): unsure at all n locations
gcgaaataattgaacgagtaatttttgtttactttttgtgttctttttattcgttttgttcgttttttcgtgttcgaggctttctttntagtatttgaccaagttggtctattctattttattagtattccgttataccatgccttcgacaacgtgaacaagcaaacaacaatatttcgtaatcgaatcaatataaattgtgaaattgaattttttcatagaaaataatttaaaaatccatttttgcttttgctgttgtgtctggtcaaatcctatcatgtaactccataatgcaataactgattttttcaagtggctctactctcttacaattacaacttgcaatgttattgttatgtagataatgttattgctgtaaat

SEQ ID NO: 168724 - DNA, 348 bp, Arabidopsis thaliana nossen
  unsure (1)..(348): unsure at all n locations
atcctaatccgnttaccccgtgaaagtttaatagtacggatggaggaacttnaacaannnncancanatattttcctcnnccaaaatctananttttnaaaatggcgagggtatcaagaagactatctactctaaaccccgacgcacctctttttattccggcagctgtacgacaagtggaagatttctcaccggagtggtggcaattggtgacaacttcgacttggtaccctgattactggatcagtcagcagcagcaaggcgcggatggtttctatgacaacggagagaatgagaatggtggaggtcatatcgatgtagctgatcttcttccagaatcatttgatt

SEQ ID NO: 168725 - DNA, 376 bp, Arabidopsis thaliana nossen
  unsure (1)..(376): unsure at all n locations
gcgattttgaaagctgcatctttttaagtatctaatgtttctgtgagggaatggaagctctttgctgggttcgatgggatcttccnggccttctctttttctcggcatacacgctgcttgtgctgttctgggcagagatatatcaccaggtacctaaaaagaaatttttgatgtgtgttgactgtcttttaaacctgccaacaagctctgagtatatattttgttgccactaatgagcaggctagaagcttacctacagataagctgcggataacctatatttctgtcaacgtggctgtatatttggctcaggttcatatctgatttttagcttttttttttttttaattcccgtttatgttgtagttgctgagtt

SEQ ID NO: 168726 - DNA, 365 bp, Arabidopsis thaliana nossen
  unsure (1)..(365): unsure at all n locations
gggtaccctcctcccccgccgtttacattttactctcctcccccgccgagtacagtgtactctacttttattccgaccaccnccncctcccccaactttctcaccttccccatcaatacctccaccaccncctcatacatattctcccttccctccacctccacctcctacaactcaaacatactatccacctcaaccatctccatcacaaccccctcaatctccaatttactacactccccctccttcccctataccttacttnccatcacccccttaatttatattcctaccaccaccatccccttactaatacatctaaccaccacctcaacctccaccttcaacattacattataatcctc

SEQ ID NO: 168727 - DNA, 384 bp, Arabidopsis thaliana nossen
ctccttataaattccaaagagggcaacaacaatggccaggacaaggacaggaagaagaagaagatatgtgtgaaaacgtacacaaagttgtgtcacgagtgtgtaaaggcgaagtttttatcgttccggcaggtcatccattcactatactctcgcaagatcaagactttatcgcggtagggtttggtatttatgcgaccaacagcaaaagaacgttccttgcaggggaagagaatttgctgagcaacctcaacccggcggcaactagggtaacctttggtgttggaagtaaagtcgcggagaaactgttcacgagccaaaactattcctactttgcacctacgagtcgtagccaacaacaaattccagagaaacacaagccat

SEQ ID NO: 168728 - DNA, 359 bp, Arabidopsis thaliana nossen
  unsure (1)..(359): unsure at all n locations
acanctacatcctttttattttccaccataagcagttctcccggtcagcctcattagtaatctgttggtcacacaccatcacctncanttttcaataatgtatcatatatctttagtcaaaccaagcattgtgccacaagataattagaaaaaaggtttaggacacttacggtctcggtctgcttcttcaaccatctctcgtatctcagcatcagtgaaattctcacccaagtcctttgccatgcgtttgatatcatccggagatatcttcccctgaaaatttggaaaaaaaatagtttagcttctgacaaattaaaatcaaatgaaataactaactaagttatgagtaaatacatttt

SEQ ID NO: 168729 - DNA, 290 bp, Arabidopsis thaliana nossen
  unsure (1)..(290): unsure at all n locations
taangtgctacatgggatggaaggttactgtgtgaagtctttggctgaagctctcgaatttattccttacacactaaccaaaaatgcagggttaaaccctatcgccattgtgactgaactcatgaacaagcatgctcaaagggaaatcaacgcaaggatcaatgtgaggaaaggacagatcactaacatcttggatgaaaatgttgttcaacccctgcttatgagtaccattgctatcactttagcaactgaatgcattatgatgattcttaagattgatgacatcgcaa

SEQ ID NO: 168730 - DNA, 383 bp, Arabidopsis thaliana nossen
  unsure (1)..(383): unsure at all n locations
gcttgatctgttctttgggttttgatcctgtgtggtaaagaangacacggaatggtgaataatgtggtggttggggaccaaaaccaccnanaatttaaagaccagagaataaagatacaaaccatggtctgagcagaagaagccttgccggcatctggagcaagagtcttatgttgctgcattggcatctggagatgaagtaggagccgcaacaggatgttttggaaccgatttggccagaactggtttctcagttgtgtgtttacctgttttacatcttcattgcaagaaacatcttcagtgtttgcaatcaactacaatatgtaccatgaaagacagaggaattattatgagggggtacaaggatattagttaccctggaa

SEQ ID NO: 168731 - DNA, 376 bp, Arabidopsis thaliana nossen
  unsure (1)..(376): unsure at all n locations
gcgaaagcatttcgcattcttcgatatggcttaccaaggttttgctagtggagatccgtcgagagatgcgtagtccgagcangatcttncttgaagatggtcatcatattggaatttctcagtcctatgcaaaaaacatgggactctacggccagagggtgggatgtctcagtgtgctttgtgaagatccgaagcaagccgtggctgtgaaaagtcaattgcagcagctagctagaccaatgtacagcaacccacctttgcatggtgctcagctggtctcaaccattcttgaagacccagagttaaagagtctgtggctaaaagaagttaaggtcatggctgataggatcatcggcatgagaactacttttcgaga

SEQ ID NO: 168732 - DNA, 343 bp, Arabidopsis thaliana nossen
  unsure (1)..(343): unsure at all n locations
gggggttggactcaagcggagagaccaaatgaaaagcatgtttaaactctgtctcgttctcnncnaggtttgggcanaaaattcgtgtgcgggcaaaaccanntcttgtanttgctccaggaatatatcatcgagcgatgtcgatcgagttcatttcgcgatgaacttgtatttcaccgaggcaaaaaacttcttgaaaggggctaccggaaaaggacttgatgcctataacgcgacacttgctaaaggcggaccaccgccggtaggggccaagaaagccaaccttgatcctataactaaccgaatcatctaagagtatggttatcaagaaatcagtcatctt

SEQ ID NO: 168733 - DNA, 386 bp, Arabidopsis thaliana nossen
  unsure (1)..(386): unsure at all n locations
gggcgtctccacgcgtgcggttcatgatgagagagtctaggcaagtgatcaaatcanaaggnggggatgtgagagttgtgtgttttccgagaggaaggatcattgagaagccaatgcacattgggtttctaacaatggaacctaagaccctctttgtccctcagtatcttgactcaagccttctcatctttattcgtcaaggtgaagcaacccttggagtgatatgcaaagacgaattcggagagaggaaactgaaagcaggagacatctactggattccggctggttctgtcttttatttacataacacaggcctaggtcaacgccttcatgtcatttgcagcattgatccaacgcagagtctcggcttcgaaaccttccaacct

SEQ ID NO: 168734 - DNA, 338 bp, Arabidopsis thaliana nossen
  unsure (1)..(338): unsure at all n locations
aactcattanacatttgctataccaatgaacanattangaggaaagttcaaatcaaaagaaggaggccaaaaaacnanccnctnnaaaccactaacaaatccagataataattatacttcaactctgccacataacaaaattcttctaaatggggatacaaaaacaaatgctactaaccaaactgcctcaggacacttatataacacaccaacaatattacctaatacgaaccaactgcaaataaaagttcctcaaaaaacaaagccacatcaaagtttaccaactaacaaaaaaaaaaattcaccacatatatttctatacttacaaaatctaaacc

SEQ ID NO: 168735 - DNA, 380 bp, Arabidopsis thaliana nossen
  unsure (1)..(380): unsure at all n locations
gcgagctgctgctgcttccttctattcagtcactcaaacctcctcgcagttcgcaatccaaaaccgtgtgtcggggagttnctttccgtctctctgctaagcccaagcttcgctttctctccaagcctagtcgcagtagctaccctgtggtgaaagcacaatctaacaaggttagtactggtgcatcatcaaatgctgccaaagttgatgggccatcatcagctgaaggaaaggagaaaaactcattgaaggagtcgtctgcttcttctcctgaattagctacagaagagtctatttctgagttccttacccaagtaacaactcttgtcaagcttgtggattcaagagacattgttgagttgcagttgaaacaactcgac

SEQ ID NO: 168736 - DNA, 379 bp, Arabidopsis thaliana nossen
gcgcggtgttcccttcaccaaaggtttctgatactgtggttgagccttacagggctgctctgtctgtccatgagctggttgagaatgctgatgagtgcatggttcttgataatgaggccttgtacgatatttgcttcaggactctcaaactcactacccccagctttggtgatttgaaccacttgatttctgctactatgtctggtgtgacttgctgtctgaggttccctggtcaactcaactctgacctccgaaagcttgctgtgaatctcatcccattcccccgtcttcacttcttcatggtgggttttgctcctctcacctcaagaggttctcagcagtaccgttccctcacagtccctgagctcacccagcaaat

SEQ ID NO: 168737 - DNA, 378 bp, Arabidopsis thaliana nossen
gaaaaaaaaaactaaaccgcttcatcccggtttaggatgggttacatacagatagggtttcagggttttgcggggtcaatcatctggttttgatgctaaacgacgtcgtatagagtaagatgtctttctttctctctcagaaaaactcgacagtcatttcttcgacggcacgtttctcttatgaattaaccctaaaaacgccgtcttagtctctcttcgagcctactttcaaattcgaaactttcgttcatctgttctctacgtaagtctttgctttcttcttttccctgctgttgttgattctttacggtttttcttctcaatgattatggacaatcttacgctcactgtctccatggatgatcaacacatacttat

SEQ ID NO: 168738 - DNA, 371 bp, Arabidopsis thaliana nossen
  unsure (1)..(371): unsure at all n locations
taaaatttactatactttatttaaataaacacacaaaaanaaacgacggaccntaagataagtggaggatccaaaaaancnnntatttncntnnccactacaattntaagtttanccatatatcttggtgcaaatacatttaacactcttcaaaattgtataaaaactcatacttattgataatctctacctcttgaatctatcttgagcctggatatacctcaaattttgcccaatgatgaacaaaaaagaagcaagcatttcttcaactgaaacattcattgtatctcttaaacccatcttcacttgaaatatactgcataatttcatgaattcttctagatacatactatacaaatgtcgaaaatgat

SEQ ID NO: 168739 - DNA, 375 bp, Arabidopsis thaliana nossen
ctctaatttctcgatctctccgtccaactatgtctgccttcaccagcagggtcgccgatgagttgatcggcaacgctgcctacatcggcacacctggaaaaggtattttggctgctgatgagtccactggtaccatcggaaagcgtcttgcgagcatcaacgtcgagaacgttgagaccaacagacgtaacctccgtgagcttctcttcaccgcccctggtgctcttccatgcctcagcggtgtcatccttttcgaagagactctgtaccaaaagagttccgatggtaagcttttcgttgatatcttgaaggaaggaggagttcttccaggtatcaaggttgacaagggtaccgttgaactagctggaaccgacg

SEQ ID NO: 168740 - DNA, 375 bp, Arabidopsis thaliana nossen
gaaagaagatcttttgtctcgtggtagcctgctccagtccccttacgaaggtttcgttattggttgagcgatacacttcacatgtttctagcgattcacatggcatcatcaaatgatacaagtcttggataagaatctacaacgcactagaacgcccttgttgacgatcctttactccgacagcatctagggttcctcgaacaatgtgatatctcacaccgggtaaatccttaacccttccccctcttactaagactacagaatgttcttgtaaattatggccaataccaggtatataagcagtgatttcaaatcccgaggttaatcgtactctggcaactttacgtaaagcagagtttggttctttgggggtga

SEQ ID NO: 168741 - DNA, 388 bp, Arabidopsis thaliana nossen
ggggcgtctccacgcgtgcggttataacacttctcatctctggtttgatctatgacagtcacccgggaagtgctccttgtttgtgttcgcggccgccgccagattctgttgagttgaaggtgtttggaatcgttaatgagaacggaacaatgtctgatgagtttcagattggtgattacgacgttgagtcggcggagacgttggggaatcagacggaattcgagagtagcgacgacgatgatattaaatccaccacagctagagttagtgtgaggaaatttgagatttgttcggagaatatgactgagtacattccttgtttggataatgtagaagccatcaaaaggcttaattcaacggcgcgtggtgagcgattcgaacggaattg

SEQ ID NO: 168742 - DNA, 400 bp, Arabidopsis thaliana nossen
  unsure (1)..(400): unsure at all n locations
cggggggaccgcactcgtccgaagaggaagaaaaatgggtcgagtctcatctattatctctttctctnggggactgttgatcctcttgtatggcgacactgcccaacagtggcccaacgagtgccagctcgatcaactcaatgcgctcgaaccatcccaaatcatcaagagcgagggtggtcgcatcgaggtctgggaccaccatgcaccccagctccgttgctccggctttgcctttgagcgtttcgtcattgagcctcagggtcttttcttgcccactttcttgaacgccggcaaactcacgtttgttgttcacggaaggggtctaatgggaagagttattccgggatgcgccgagacgttcatggagtcaccggtatttggagaaggtcaaggtcag

SEQ ID NO: 168743 - DNA, 396 bp, Arabidopsis thaliana nossen
  unsure (1)..(396): unsure at all n locations
gggggaggcactcaagcgaagacttcaataaataacaaaattattcttctcatcagatctcgagccaggatgtttcaaagactgtaggggggcaaaccaaanaacatatattacctttacgacgcgggtcaccttttagacatttcacatggaggttgaaaacaatgttgttcttttcatttggctaatcgttttctatgacacaaagattaacaacaacaaaattaagcgtgacacaaagagtttatatgcttaatgagatggatcacattccacataatatttcttaccagataaatattcaaagagtctcagatctgcggcaattgtattaagacccaacctgtgagcaagaacttcgtcttgaataacctatgtcttgttagctacatacac

SEQ ID NO: 168744 - DNA, 381 bp, Arabidopsis thaliana nossen
  unsure (1)..(381): unsure at all n locations
aaaagaccgggggctttccacgcntgcgcttacaattttaaaaatcttattttaagctctcctctctncncncgccagaatcnttcaaagagtggagggccacaaaaannnnnnctccnntttgatccccatttgtttatattctcntctctatgcgagatcaataatttcctatttcatatcggatcttctaaaaccagctatgacctgtcttttctccgtttttaacgaaacttgatctctatctccatcgttgctcacccatcgatctcaacgttttcttccaagatttttgttgtctccatttcttcatcgattaacatcttcttcacctcctattgctcaaaactcaagatcaaaaatgtactttacactacatca

SEQ ID NO: 168745 - DNA, 385 bp, Arabidopsis thaliana nossen
  unsure (1)..(385): unsure at all n locations
aaaagaccgggggcgttccacgcgtgcnnaaaanaanaactctnttttcttttacgagaagaaaacacccnngggcagcttnatacaaggtggttgcaccccaaacacttatnccnnaatataatccattacccaatatatcaattattccacgaggccaagctgatggactcacctttttcgctcctaacaaaaagaggctagagtccggattgtataacataagctaccttgagaaccaaatggctgctgcacttggtggaagggttacagaagacgtgatctttgtagacgagaatgtgacaaccgtaacatcaaatgatttcatgcaagtgtcgcggatggctcgccaaatagttgagagattcggtttcagcaaaaagat

SEQ ID NO: 168746 - DNA, 370 bp, Arabidopsis thaliana nossen
cggacgcgtgggcgcacattgttaacggaaggaagagagatatttggcagggagagaaaacgttggtaggaaggattgatatttgttggacttttggatcgaaaaattgaaaggtaaaagaggtagagaagctctggattccgtctcttcccgtcgtcggcgacggtggttttgcccgttggctctgaggttatatcaggcttcaatttaagtggattgtcatcttctgagatatggaacaagtttttgtctggccaagctgctaccactatcggcttttctcattccaagaagcgctcgattggcggtttcttgtacgttctgatttccttgtgggctctttcgttaactgcacttagtggtcaaaccc

SEQ ID NO: 168747 - DNA, 383 bp, Arabidopsis thaliana nossen
ccagctccattttgcaagaccttcacccagagatcaataagagagcatagagagggtagcaaaactatgtgacgtgtttaaatcaccacttggtgtgctgtggaaatacaaaagaaaacgaaacttacatcctcaaacaagcgagtttctttgggggaattagtttcagagacttctgcatagttgctaaatgggctttcttttgtggtttcctcgggtgaaatgtcttcaaaggctgcatccaaaagtaaatcagcttccaagttagaagcttggaaaatgagaaaggaagaaagtcaaaattgagaatacaaatgaaaagacgttgatttctgaaacagaaaaagaatctaccatagttcttttcttctttcttctctttg

SEQ ID NO: 168748 - DNA, 398 bp, Arabidopsis thaliana nossen
  unsure (1)..(398): unsure at all n locations
cggggggtcgcacgcgtgcgcgtacacaaagttgtgtcacgagtgtttaaaggcgaagtttntatcggtgcgggttgtcatcgattttcgatgctctcgcaagatcaagactttatcgcggtagggtttggtatttatgcgaccaacagcaaaagaacgttccttgcaggggaagagaatttgctgagcaacctcaacccggcggcaactagggtaacctttggtgttggaagtaaagtcgcggagaaactgttcacgagccaaaactattcctactttgcacctacgagtcgtagccaacaacaaattccagagaaacacaagccatcgtttcaatcaatcttagactttgctggtttttgaaaatgcttttttacagtcctaagaaaggaaagagt

SEQ ID NO: 168749 - DNA, 383 bp, Arabidopsis thaliana nossen
cgcgtccgaccaggtcgtctcaaccagtaataaaaatgggaaattaagaaacgactgcgtggcatataaacaatgtttgacggttgtaaggaagaacaaatctaaagattcaagataaacagtctgatactaatgcctggccaaaggggtagcctttgaatgggtagcatactaacgttgcgagagaaggaatcaattgggaatttaaacccaagtaaatccaggagccaaaataaaaagaactaaattcatattcgagaaatactaaatggaacaactaaaatgagaactcacaggaggcccatatatgagaatatgtccaggtgatggaatcttgaacttgctaaaccacattccagctgcaggagacaacaacacggtca

SEQ ID NO: 168750 - DNA, 334 bp, Arabidopsis thaliana nossen
  unsure (1)..(334): unsure at all n locations
gttattaatttattatgaactcttgtattattaatgtttagaacaagntgttcacatgtattatggttcgtctaataaananctttttggttttgttaaaaaaaaataaattaaataataaataactaaaaaggaataataattttttaaataaaaataataaggacttccaatcaataagatccaagattactccaacttacatacaacaaaataactctaatataaaagaaaccaaaatacaaataaactggccgtccttttacaaaggatccaacttgaaaaacccttgcattacacaacttaattctcttatagaacaacccaatttcaa

SEQ ID NO: 168751 - DNA, 384 bp, Arabidopsis thaliana nossen
  unsure (1)..(384): unsure at all n locations
acgcgtgcgggaaacaccgatgaatactttgttgggcaattgacaggaaaccggggatgtatnttggtcagttggtgcggcgccnngaatgtncgtggtgtgccagaagatgaagaactcgaagatgctgatcaagactaacatgtgctgatgacactgaattctcaagtttgtgtttttactttgaaagtaacaacaagccatttagttttatgccatactaaacaaaccttcctgttgttttttttaaccatcttcaatttacggcctgttataagccatgatatgttatgtgatcctcgagggatgttaccttcacgatcttcatattcttcttcgagttctggccttcatttgttcacttataatactctgtgatgtaat

SEQ ID NO: 168752 - DNA, 376 bp, Arabidopsis thaliana nossen
ctcatcaggatccttcgcctagacatcgcctgacggtgtctctcaccgtgcatttttgattttttaaaagtctccgatgatccaaatggttaccaaagtgttacatttccgtattaccgatcgtccgattccgcctgaaaaccggagatctgcaacaaaatttaatctccagacgatgatgaatctagaagatgaagaaacacacatcttcgttatgaaccgtttcgaatcttcccttattttttcaaggggcaagatcgaaatatcttcttaacaggtcttagtttctcttcttagggtttagtgtttgtgtaggagtatttgtgtatagactttttactagttttcgtatcttttctctgtatcttcgggtttt

SEQ ID NO: 168753 - DNA, 340 bp, Arabidopsis thaliana nossen
  unsure (1)..(340): unsure at all n locations
cgggggggtctccactcgtgcgcttacaatgttttccagttgttttctatctatgaacacagannancagttcatgtctnnaagtggtgtggtaagncaangaccagtggggcgttgagctaggaaaagttctggctactcaggtcaggaaacagcttcattcatcactcactcaaggaaccgctcccgagggattcaattacagtaccaccacacttttgaaacgatatctcgagacaagttccgagccccagatgtgatgaccaagcccaagtttctctccttcgaccaaacgtgaaccatttgagcatttttcacccttggtctttctttttttcac

SEQ ID NO: 168754 - DNA, 414 bp, Arabidopsis thaliana nossen
  unsure (1)..(414): unsure at all n locations
cagaatacccggggggtcccacgcgtgcgcaaatacacaacttgcaacttctatatatattactttcaaagaagagagatggtgttaaagatggagttgggcatgaagnnnccagnagtagacttgtccaagctcaatggggaagagagagaccaaaccatggctctaatcaatgaagcttgtgagaattggggcttctttgagatagtgaaccatggattaccacatgacttaatggacaagatcgagaagatgacaaaggaccattacaagacatgccaagaacaaaagttcaatgacatgctcaagtccaaaggtttggataatcttgagacagaagtcgaagatgtcgattgggaaagcactttctacgttcgtcacctccctcaatccaatctcaatgacatntcagat

SEQ ID NO: 168755 - DNA, 306 bp, Arabidopsis thaliana nossen
  unsure (1)..(306): unsure at all n locations
ctcccacctatcaccttcttttaatggaatcgccgnacactgtacgtccttaaaaggaaagttgcaggcccaacaacnncctcatactcaaccatcaccccaagttccattaatagccaattcttcaaatcctatcaagaatcctttctttcaagctgataaaaacaactaccacatcaatataatcttatccaaaagaaacacattataagttaaaacatatgcttaaacaaaaaaacattcatctacacactgaggtaacattatgtcaaaaaagatatattcaacaaattcctgattatacct

SEQ ID NO: 168756 - DNA, 340 bp, Arabidopsis thaliana nossen
  unsure (1)..(340): unsure at all n locations
actacantaatnnaaaatgatgttttttgatcaacggctgaaatnngaggtcataccctatcagagttgttggganccaaaancnnnnatcaccccaaaatccctctcacttcttctctttctctctctacttcttctaattctaccacctttcctaccnccacttccaccacctcctncnacactcctcctccttcctctactcctcattattctcctcattttcttaactttttctccttctaataaacccancctctccattaaacctctcaacccctaatatcttcaacttccttttcaaaccatccatacatacataatatacattacacaaata

SEQ ID NO: 168757 - DNA, 388 bp, Arabidopsis thaliana nossen
  unsure (1)..(388): unsure at all n locations
cgcgtncgaactaatctaaaccagcccattatttatatgattccgtatgccaaccatgtaacgagcttatgagaaatggaagacagccaatccgaaacgtcacgaaatccccagcgcttcggggatgccctcagcgacgaggaacatgtactcgggtgtatactatcacccccaaaaaaccaaactctgctttacgtaaagttgccagagtacgattaacctcgggatttgaaatcactgcttatatacctggtattggccataatttacaagaacattctgtagtcttagtaagagggggaagggttaaggatttacccggtgtgagatatcacattgttcgaggaaccctagatgctgtcggagtaaaggatcgtcaacaagggcg

SEQ ID NO: 168758 - DNA, 372 bp, Arabidopsis thaliana nossen
  unsure (1)..(372): unsure at all n locations
tgaaaatacatttagaaactgataatatcggttgaggtctatncgggttgttgctgtttcatgaaggtagttgaaaccngatattgaacctgaatttaccgacaaattatgtatacgtattatttcgagttacatgtatccgtttgagtttcgatatttcaggtatctgttcaggtttcagatcctacacgaaccaaaccaaaatcccaaaataaacactttagatccactcgaaccaaagcgaactaggtttttcgggcttcggattttatggtcatgcctagttttgtcctttgaaacattaaaattagaagtaaatctacatatacatttttgcagtcattttaacaaaataattttgtacttgtattt

SEQ ID NO: 168759 - DNA, 275 bp, Arabidopsis thaliana nossen
  unsure (1)..(275): unsure at all n locations
tctccnaccttcttcttcttcttcgcacaattaccaggcttctctatctgcttcttttttcttggctggggacaaaactgcatatcagaggacctctctctatagagatgatgttgtcattgtcacagcacatatgactccactatgcaagtccaaacgttgcaatttcaatgatacatatcccgatgatattctcgcacctgttttgaaggcattgatagagaaaaccaatctaaacccaattgaactatgtgacattgttatgagtactgttt

SEQ ID NO: 168760 - DNA, 378 bp, Arabidopsis thaliana nossen
gaaacccaaaccctcatttcaataaatggggtctcgctctcaaaacgtctgctttatcgttcttctgctggttggcttcgttgccgtctcctatgcttgcgactgtacccctcctaaaccatcaccagcacctcacaaaccaccaaaacatccagtcaaaccgcctaaacctcctgccgtcaaaccacctaaaccaccggcagtaaaaccacctactccaaaacctcccaccgtgaaaccccatcctaaaccaccaaccgtcaaaccccatcctaaaccaccaaccgtcaaaccccaccctaagccacccaccgtcaaaccaccccaccctaaaccacccaccaaaactcacccccacccaaaacctcccatcgtaaa

SEQ ID NO: 168761 - DNA, 380 bp, Arabidopsis thaliana nossen
acttcatgttaattccagaacgatctgaaaaatattccataaatcaatttgattgaacaaatgcaaaaaccatgagtacgtaaaattaacctataaaaaaccagaggttatttattgtcttgatttttgatctgcgataacatctgctgagttttgagttatacaaaccactcaagtctcaacattgagattttttcaggtccatttggataaaacaatagttgaaacccataaagatagtgcgcgtcaaaagtaaattatacattgagactcaaactgtgaaaacgatcggatacaaattacatgtcaattattattacttaaagttcattttatagcaggtataccaaaaagttaagtccaaattcgcagttttagag

SEQ ID NO: 168762 - DNA, 377 bp, Arabidopsis thaliana nossen
ctgggtgttgctggatggggagttggcggtatagaagcggaagctaccatgcttggtcagccaatgtggatgggcctacccggtgttgtgggtttcaagctaacgggaaagttaagagatggaatgacagctactgatttggtcttaacagtgactcagatgttgaggaaacatggagtagttggaaagtttgttgaattccacggggaagggatgagagaattgtctttagctgaccgtgctacaattgccaatatgtctcccgagtacggtgcgaccatgggattcttcccagtcgatcatgtcactttgcagtatctaaggttgacaggcaggagcgatgacactgtctccatgatagaggcgtatttacgagc

SEQ ID NO: 168763 - DNA, 378 bp, Arabidopsis thaliana nossen
gagcagtctttgaaagttcaacgaatttgtagttggttttttttttttcggtttgttttttggggacaggtgtgctaaaaactggatattttatccacacgttatcgttctatgagtttggtatcagtggtttgtaatcagttcctaccttgcccatgtctccaaaaacaatgattattagatgtagagaaagatggtaaaggttgttatttctcattaaaggataaaaatgatttacagtttatatactaaataagattacaaatattaaactatattgtatatgtatatgaactatacactatactctaatacccttccctcaattcgaattattcaagaaggaagaaaaagacttgaaaaaacatatcgagacat

SEQ ID NO: 168764 - DNA, 377 bp, Arabidopsis thaliana nossen
gaagacaaagaagaagaaggtgagatgggagttgattattacaagggtttggaggttgatagaagcgctgacgacgatgaccttaagaaagcttatagaaaactcgctatgaaatggcatcctgataagaaccctaacaacaaaaaagacgctgaggctaagttcaagcagatctctgaggcctacgatgttcttagcgatcctcaaaagagagctgtatatgatcaatacggtgaggaagggttaaaagggaatgtgccacctcccaatgctgctactagtggagcatcctacttctcaacaggagatggatcttcgtctttcagattcaacccgagaagtgcagatgatatattcgctgagtttttcgggttctc

SEQ ID NO: 168765 - DNA, 370 bp, Arabidopsis thaliana nossen
  unsure (1)..(370): unsure at all n locations
aacccaaaccctcatttttttatacggcgnctcgctcccaaaatgtctgcttnataaaactttgtccgctccccaaaannnccnnctcctatccttaccactatacccctcctaaaccatcaccatcacctcacaaaccaccaattcatccantcaaaccaactaaacctccttccntcaaaccacctaaaccacctncantaaaaccacctactccaaaacctcccaccntnaaaccccatcctaaaccaccaaccttcaaaccccatcctaaaccaccaaccatcaaaccccaccctaaaccacccaccttcaaaccaccccaccctaaaccacccaccaaaactcacccccacccaaaacctcccat

SEQ ID NO: 168766 - DNA, 381 bp, Arabidopsis thaliana nossen
ctcttcctctttgaaaaaccttttctttacgatttctccatagcagacacgtattgatactctgtgtttggctgaaggtagaagaagcagattcacgatcccaattcccctattaacggccattgaagatggtcgggagcaacaacaacgccaagtcatcgacgaacaagcctccagcaacttccatccccaccgctgcagcttcatcttcacagaaccataaacctcgtgtgaattcaactaacaacgatggtggaatcagtaacaacaacaacaacaacaagaaagaaagcaagccgatgatgataggtgtccagaaaaccgccgataagaaaccactgaagcctaatccatctcctaagctagctccgatcccgaaac

SEQ ID NO: 168767 - DNA, 372 bp, Arabidopsis thaliana nossen
atttacgcgcatgtgtttcactgtcaaagttttacctgcatacgcgaaaggggatcggcacatgcgcttggttgtgacctattgtttgagaaattttgtcgagcctgatcaacctcagagagttccgctggagagcctgcgttggcatcaaactcccatatctgccttcccaagaagttgttggtggtgcacaagtgagggtcatctcctgccttagctccgatcctcagcctccacattttgtaataactctcctagaaagaacaaacatattttgtgttaataatgtctatttccttgcacttatgtataccaggttatattccctaccacacacggggagagaaatttgattgttaaaaatacttcatt

SEQ ID NO: 168768 - DNA, 376 bp, Arabidopsis thaliana nossen
  unsure (1)..(376): unsure at all n locations
aacaaacaaaaagaaaatggctaagcacagcaaaccccccnacgcgttcttttgaaaacttattgggtcggaacacacccatgcnaggcaaacacttggggttcctcctcaactacagaacgagtgtaacctcaacaacctatatgttctacaagccaccgaaactatcaagagagaagccggtcagatcaaatactaggaccacaaccaccctcagctccgatgcgttaggcttcaccgttgctcattatctaatctaacaagaacaaacattacttgcccacctaattcacttccccaaaaacttactaataccatcaaagaacccctaccacacacagagagacacctggatatgccaagaccaccatagact

SEQ ID NO: 168769 - DNA, 369 bp, Arabidopsis thaliana nossen
  unsure (1)..(369): unsure at all n locations
gtttctctgatgagagacaacgtaattcactaagcagcaaccctttgtttgcactacgggatttgggtggtacaatgcctnanatcnnntctcctttagtagctgaaaactctcaagaacaagaagaaagtgtgttaatttcattggatattgaagaagacaagttgtttctcttacatttcatcataggaacttactttggacaagatttaagaaaacaacatcatcgtccaaagcaatcagcttttcagattcaagcgttgaagaatgttgtggtagatgagttaagtggctcacttatgaagagagctgagctagaacgtgtgtattatcacattattagaaatgttgatccgtctctagtcatga

SEQ ID NO: 168770 - DNA, 374 bp, Arabidopsis thaliana nossen
cacattattttcactgagcgcataacatttttgagacaagagactgtctgtttctctcggatgtcgttggctccccctctctccggcgatggttgttgctatggaccaacgcaccaatgtgaacggagatcccggcgccggagaccggaagaaagaagaaaggtttgatccgagtgcacaaccaccgttcaagatcggagatataagggcggcgattcctaagcactgttgggttaagagtcctttgagatcaatgagttacgtcgtcagagacattatcgccgtcgcggctttggccatcgctgccgtgtatgttgatagctggttcctttggcctctttattgggccgcccaaggaacacttttctgggcca

SEQ ID NO: 168771 - DNA, 374 bp, Arabidopsis thaliana nossen
attttcactgagcgcataacatttttgtgacaagagactctctctctctctcttgtctctttctctggctgtcgctccggcgatggttgttgctatggaccaacgcaccaatgtgaacggagatcccggcgccggagaccggaagaaagaagaaaggtttgatccgagtgcacaaccaccgttcaagatcggagatataagggcggcgattcctaagcactgttgggttaagagtcctttgagatcaatgagttacgtcgtcagagacattatcgccgtcgcggctttggccatcgctgccgtgtatgttgatagctggttcctttggcctctttattgggccgcccaaggaacacttttctgggccatctttg

SEQ ID NO: 168772 - DNA, 392 bp, Arabidopsis thaliana nossen
  unsure (1)..(392): unsure at all n locations
cggggggacccactcgtccgggaaaccttaaggttttatatctgggataaaactcgcatccgcttcaatggcatgggaacgggatgttggggggagagaanaaacaagantcacacactctgtgtcagatgtggccgtcgcagtttccacatccaaaagagtcgttgctctgcttgtgcttatcccgccgctcgcaagaggacttacaactggagtgtgaaggcaatccgtagaaagactactggaactggaaggatgaggtatcttcgcaatgtgcctcgcaggttcaagaccggcttcagagagggtaccgaagccaagccaaggaacaagggagttgcttcatcagcttaaacttgtttttgagcatcaagggagagagaattctgagt

SEQ ID NO: 168773 - DNA, 377 bp, Arabidopsis thaliana nossen
  unsure (1)..(377): unsure at all n locations
tgaaatctctgtagttttttttttgttcctttcttaaatttcnaaagaaggacgtttattaaaccaatggaacggtttanatcattgcaaggaaaaatgttgaaaagtgcaagtccaatggcattctacgatatcggagagcagcaatactctactttcgggtacattttaagcaaacctgggaacgcaggagcttacgagattgacccttcgatcccaaacatcgacgatgcgatctacggctcagatgagttccgtatgtacgcttacaaaatcaaacggtgtcctcgtactcgtagccacgactggacggagtgtccctacgctcaccgtggcgagaaagccacacgccgtgatcctcgccgttacacttactg

SEQ ID NO: 168774 - DNA, 395 bp, Arabidopsis thaliana nossen
  unsure (1)..(395): unsure at all n locations
cggggggacccacgcgtccgaaaaaaaaatctttctggtgagttacgaaaaaaatgtgtcccgtggagagttagtggttaaaggtgggtcggaggggaactggncctggggctaaaaactcacatgccatgaccggcgttgggaacaaaatttactggtttggtggtgagcttaaaccaaccatccatattgataaccatctttaccttttcgatcttgagactcaagaatggtcgatagctcctgcgaccggagaggctcctttcccctgttttggtgtctcgatggtaacgatcggttcaacgatctatgtctacggtggccgtgacgataaacggagatacaacggtcttcattcgtatgatactgagaccaatgagtggaaattgttggct

SEQ ID NO: 168775 - DNA, 373 bp, Arabidopsis thaliana nossen
gtgactcgtgctcgagcagatgttgcttattgtattcacgccctttcacggcgtgttgcataaaaccaggagttggacggttgctttgaaaacactaattgtgatacatcggcttctaagggaaggagatccaactttcagagaggaactattgaatttttcgcagagagggcggattttgcaactttctaattttaaggatgattcaagtcctattgcttgggattgttcagcttgggtacgtacttatgcattgtttcttgaggaacggcttgaatgcttcagggttttaaaatatgatactgaggccgaacgtcttccgaaatctaacccagggcaggataaggggtatagtagaaccagggatttagat

SEQ ID NO: 168776 - DNA, 372 bp, Arabidopsis thaliana nossen
  unsure (1)..(372): unsure at all n locations
gctaagtgctcatccaccacctttctcctcctccttcttcccncaccttttttgtttctttcgtgttgtgtcttnncattaattannntttcncattttcaatcaccatcatcccaccacnttttcnttaatgaactgagagcattttctagggatctcaatggcaatggagaaagatctcagtccaaattctccacggattagaaagctaagggatactagttaccctactacaccaacgtctcgaatgaatactaataaccagagagataaccattatcctaacattcctaattcaccaagggattacaattatactcctagctctccaacagctcgcattcgacaccgcaggcgatcaagcgagaattt

SEQ ID NO: 168777 - DNA, 244 bp, Arabidopsis thaliana nossen
  unsure (1)..(244): unsure at all n locations
actccctaatattaacttttttttnacaacaanaccaataaattcaattacaccattcctaaaccaattctataaacacccaatcatacatatcataattcaactaaaataaacttatccaatacatatcttattatctccccatcaaccctcaacactcttttccttttnatcctntaanaataatcaaaacaccaaacacctttcctattattaaaaacccaattttactaaaaaccataac

SEQ ID NO: 168778 - DNA, 399 bp, Arabidopsis thaliana nossen
  unsure (1)..(399): unsure at all n locations
ccgggggggttcgatgcgtccgaaaaaaaagaaatcacaaaaactttgattataatggcttcctcaaccagggtttggttctaccgtgtgttggcgggaaaggcagnnaancctgccgcatcagatgtcctcggaagcggccgtgtgaccatgaggaagactgtcgccaagccaaagggtccatcaggcagcccatggtacggatctgaccgagtcaagtacttgggtccattctccggcgagcccccgagctaccttaccggtgagttccccggtgactacggatgggacaccgctggtctatccgccgacccagagaccttcgccaggaaccgtgagctagaagttatccacagcagatgggccatgctcggagccctaggctgcgttttccctgag

SEQ ID NO: 168779 - DNA, 370 bp, Arabidopsis thaliana nossen
atgaaatggaaggttaacgtcatttatactaaaggtttatgactaacgtgtgtgtttagagccaggtttgtcagatgacgtcttataagctgacttaatatcagaatttatgaaagtaacgtcggtttaaaagcaacacaaaatttttatagaccatttctactaaatttttatataatttgtttttatcaaatctaaataaaatttgctgtcaacaaaagaaatcttttacctaaattagaaagacaatcgaccgaaatgatgatatttatattgtttgaatatactaattttacataaagcataactttgtccttgatatgtggaactgttgtattcaaagccacttcacgaagtctttataagctga

SEQ ID NO: 168780 - DNA, 377 bp, Arabidopsis thaliana nossen
gtaggatgctttgccaaccttccctgatgcagaggcatttgcttgcattgtgtgtgagttggatttgtgcgctagagaccattttctcgtctgtatctcctgagccaatcgcagcagctagtcttggccaggtttacaaagctcagctgaggtattcaggtcaggttgttgctgtcaaagttcaacgccctgggatcgaagaagccattggccttgatttttaccttattagaggagttgggaaactcattaacaagtatgtagacttcatcactaccgatgtccttacccttatcgatgagttcgcctgcagagtttatcaggagctaaactatgtccaggaggcccaaaatgccagaaggtttaaaaaattgtat

SEQ ID NO: 168781 - DNA, 376 bp, Arabidopsis thaliana nossen
cttttgcagactacaatgacctgatggaaatgactgaggttatgtagagtggcgtggttaaggaattaacaggtggttataaaatcaagtataatgctaatgggtatgacaaggatccaattgaaatcgactttactccaccattcaggaggattgagatgataggagagttagagaaggttgctaagctcaatataccaaaagacttggctagcgaagaagctaacaagtatctgattgatgcatgtgcgaggtttgatgtcaaatgccctcctcctcagacaacagctcgtctgttagataaacttgttggagaatttctggaaccgacatgtgtgaacccaactttcatcatcaaccagcccgagatcatgag

SEQ ID NO: 168782 - DNA, 391 bp, Arabidopsis thaliana nossen
  unsure (1)..(391): unsure at all n locations
gggcgttccacgcgtccggtcacgcgccgtgctagaacaattgaggttagttcaagatatanatgacgtgctcctactaagtctgggggacgnccttcacctattgtcaccaggactgcgccttcttcatcacctgaatcgttcttgaaaagagcggtttcagcgtttaggaaccgtggtccttcaacaccaactacgccggttagtgatgtattggtagatttaccggtttcttctaggagactatctactggtcgtttacctgaaagcttatggccttctactatgagaagcctcagtgtttcttttcagtctgattcagtgtcagttcctgttagtaagaaggagaaaccgcttgttacttcttcgactgatcggacattgagaccgt

SEQ ID NO: 168783 - DNA, 375 bp, Arabidopsis thaliana nossen
atttcattgagcaaaagagaaaataactaaaatagacggaaatgctatagcactcacgatccagtggatgtatgttccctaagtccaagaatggatggatgtctaacaccatcatgttttgtaagaaattcttgaagcaaattcctcatctttaacgcttcctccatgtaattatcctgaataaaaatggcattataagaaacttaatatcaacttgaagtatcgaaataactagaaggctgagcaaaaagaacaagtgcatacctgattcatatcgattgtctgtaaaccttctccacgggaaaaaatgatagcatgattttggttttctggctttccttctccaagaatagcaggtccaggaagcctaatcct

SEQ ID NO: 168784 - DNA, 398 bp, Arabidopsis thaliana nossen
  unsure (1)..(398): unsure at all n locations
aggccgggggcgttccacgcgtccgatttcattgagcaaaagataaatttactaaaatagacggaaangctgttggtctcacgattctttggatggatgtnccctaagtccaanaatggatggatgtctaacaccatcatgttttgtaagaaattcttgaagcaaattccttatttttaacgcttcctccatgtaattatcctgaataaaaatggcattataagaaacttaatatcaacttgaagtatcgaaataactagaaggctgagcaaaaagaacaagtgcatacctgattcatatcgattgtctgtaaaccttctccacgggaaaaaatgatagcatgattttggttttctggctttccttctccaagaatagcaggtccaggaagcctaatc

SEQ ID NO: 168785 - DNA, 361 bp, Arabidopsis thaliana nossen
  unsure (1)..(361): unsure at all n locations
cagtttttgtctgctcactaaattaaaccaatttctcctgnaagcgtatgtttttaagctcttttggaagcccatgcaacattcttcacccactagctaactaacaacttccattcttattaatctctctcaattcttcatttcttatattcatccctctctcttctctttgtcacaatgaatttcaattcttcttacaatctcactttcaatgacgttttcttctcttcttcttcctccggtgaccctatggtttcacatacgctgtttctcttgagagatgttcaaattcttgagctccttattgccattttcgactttgtctcaatacatgccttgcgtcagaagaaataccaacgtc

SEQ ID NO: 168786 - DNA, 378 bp, Arabidopsis thaliana nossen
  unsure (1)..(378): unsure at all n locations
tatttatctcgtaataaattttgcccaagtttatgtttcttaataacacgtgtgtgtattactattttggagggatactncatattacggaataattcttcttatattttcattaaatccgagagtgtgcaacaacaatacatatatactcacgggccaaacatatgaattaatttgttattcatttttttattattaaaagatgaattaattatcttatcttataatactaaatcgaggaaagttctaaatttataatagactgataactaaataaaagttatgttgagaaaaaaaaaacaaatcatcgatattttattcaatacgagaaatgaacaaattatttgcgatacaacaaaaagtaaacaacacaaaccc

SEQ ID NO: 168787 - DNA, 398 bp, Arabidopsis thaliana nossen
  unsure (1)..(398): unsure at all n locations
cggggcgtctccacgcgtcgcgcgctattttaacaaaatcactgtctactcccttttttaacactaaaaaacgttatcactattcgtcgtggcgaatctctcttcgngtaaatcgacgatccttctctatctctgcaactatgtcttcatctactaagaaggttttgattcccgttgctcatggtacggagccgtttgaagcggtggttatgatcgatgtgctacggcgaggcggagcggatgttacggtggcttccgttgagaatcaggtcggcgttgatgcttgccatggaatcaaaatggtcgctgatactcttctctctgatatcaccgactcggttttcgaccttattatgctccctggaggacttcctggtggtgagactcttaagaattga

SEQ ID NO: 168788 - DNA, 400 bp, Arabidopsis thaliana nossen
  unsure (1)..(400): unsure at all n locations
caaaaggcccggtgcgttccacgcgtccgaaaccttttctctcttcttgagttaaactgcggaagcaacccntactggtttttcaaaggtatttggtgtcgagcaacnaacnnncatnncacctcccttctgcttcttctaactatcataataacatgtggagagccactgaagtatccttttaccccaacatcatcacacagaagagcatttatcgactgccaacatctctccagcccattgaacctgacattaggcggaccttctcataattggactgacactattcccatcggtaatggccgtctcggagccactatctggtgcggctactcctctaacattctcaacatcaatgaagacacaatttccactggagtaccagcagactacacaaacc

SEQ ID NO: 168789 - DNA, 374 bp, Arabidopsis thaliana nossen
  unsure (1)..(374): unsure at all n locations
caagcttcgagcccagctcggaaaacaaaattggaacttgctgcataaagtgttgtttttttattgtttgtgggagggatgancgggaatccagtaattcaagttccatcatcactaatgccatcatcctccatgattgcttgtcctcgagtttcacccaatggggttccttatcttccaccaaaacctagaactaggcatttagtggtcagagctgcatccaattccgatgctgctcatggtcaaccatcgtctgatggggggaagaatcctctcaccgttgttttggatgtgcccaggaatatatggagacagactttaaaacctttgagtgattttgggtttggtaagagaagtatttgggaaggtggtgt

SEQ ID NO: 168790 - DNA, 405 bp, Arabidopsis thaliana nossen
  unsure (1)..(405): unsure at all n locations
ggaaaacccggggcgatgcattcgtccgcagactcctagcctaactcgtgtttcttctcacaagaatcanacacaagggggatgtttttcggtggttgtgggggccnncaagncactttcagattcttggttttcttcatgctatgcttatcttctcagctgagtgccgcaaaacccatttgctgaacgataatgatgtagaatctagcgacaagagtgcaaaaggcacacgatgggctagtttagttgctggatcaaatgaatattataactacaggcatcaggctgacatatgccacgcgtatcagatactccgaaaaggccgtttaaaagatgaaaacatcattgtgtctatgtatgatgatatcgcgttttcctcggagaatcctaggcctggagttatca

SEQ ID NO: 168791 - DNA, 376 bp, Arabidopsis thaliana nossen
ccggggggttccacgcgtccgcaaaaagagagagaagagaacgttagaatcatcgagaaacgaaacaactattgtcgtctcatggtttctgggccctaccaacttctcctcctcctcaatctccggctttcaatgccgttctgatccagatctcgtcggttctcccgtctgtggatcatctcgccgtcgtgtccatgcctccgccgggatttcttcctcattcaccggggacgctggattatcctccaggatcttaagatttcctcctaatttcgtccgtcagctgagcattaaagcccgtagaaactgtagcaacatcggtgttgcacagatcgtggcggctaagtggtccaacaacccatcctccgcgttacct

SEQ ID NO: 168792 - DNA, 379 bp, Arabidopsis thaliana nossen
  unsure (1)..(379): unsure at all n locations
gttcataagcctcgtcccattttttttgagactttgactatcacccaagtgcttgtcttcatgttgttgtgcagccgnctgatgcanttcaaggtcaaagatctgatgatcgacaagcggcggctggtcgaagttcctgataatgccactctaggggacgccttgaacactatggtggcaaaccgagttagagctgtaccggtggctgccaaaccaggccaatggctgggagccgggggatcaatgatagtagagttggacaaacagagcggaagtgcaagaaaacagtacataggaatggtgaccatgctcgacgttgtggctcacatcgccggcgatgacggcgagagtgggcttgataagaaaatggctgcccctg

SEQ ID NO: 168793 - DNA, 384 bp, Arabidopsis thaliana nossen
agctgctgctgcttccttctattcagtcactcaaacctcctcgcactttgtgtatgtcaaaaccgttctcgcggaggttctttccgtctctctgctaagcccaagcttcgctttctctccaagcctagtcgcagtagctaccctgtggtgaaagcacaatctaacaaggttagtactggtgcatcatcaaatgctgccaaagttgatgggccatcatcagctgaaggaaaggagaaaaactcattgaaggagtcgtctgcttcttctcctgaattagctacagaagagtctatttctgagttccttacccaagtaacaactcttgtcaagcttgtggattcaagagacattgttgagttgcagttgaaacaactcgactgtgaa

SEQ ID NO: 168794 - DNA, 379 bp, Arabidopsis thaliana nossen
gtaaaagcaaagaatcttgcaaagcaagaagaagatcaaatccgacggctgtcgggatcattgatggagaagcagctacataaactagaagcaaagctatctatcttcaatgaagctgaaagcttgacaatgagggtaagagagcaattagaaaggtcaaggcaacggctatatcatgaaagggctcagatcatagcagctcgactaggtgtcccaccttcaatgtcctcaaaagcatcgttaccaacaaacagaatcgctgcaaattttgctaatgtagctcaaaggcctccaatgggcatggcctttccacgcccaccaatgccaaggcccccaggtttccctgttcctggttcttttgtagctgctacaacaatga

SEQ ID NO: 168795 - DNA, 396 bp, Arabidopsis thaliana nossen
  unsure (1)..(396): unsure at all n locations
caaaaggcccggggcgttccacgcgtccgcatttncntagtttcaagacttttttcagatccttacttccaacggtgcgtatttataaaatgttgtttgacataaaaancatngnccatnttaattctggaaaatcaaccacaactggtcacttaatctataagcttggtggtattttcaagcgtgtcatcgaaagattcgagaaggatgctgctgatatgaacaagaggtccttcaagtacacatggatgttggacaaacttaacgcctagcgtgagcgtggtattaccatcaatattgctctatggaagttcgaaaccaccaagtactactgcacagtcattgatgccccaagacatcgagatttcatcaacaacatgattactggtacctccc

SEQ ID NO: 168796 - DNA, 376 bp, Arabidopsis thaliana nossen
gaagaacaatggcttcctctatgctctcttccgctactatggttgcctcggctggtcaagccactatggtgggtcctttcaacggacttaagtcctccgctgccttcccagccacccgcaaggctaacaacgacattacttccatcacaagcaacggcggaagagttaactgcatgcaggtgtggcctccgattggaaagaagaagtttgagactctctcttaccttcctgaccttaccgattccgaattggctaaggaagttgactaccttatccgcaacaagtggattccttgtgttgaattcgagttggagcacggatttgtgtaccgtgagcacggtaactcacccggatactatgatggacggtactggac

SEQ ID NO: 168797 - DNA, 376 bp, Arabidopsis thaliana nossen
  unsure (1)..(376): unsure at all n locations
tgcgtccaaattttgatctttgttcttctcaaagcgaatatgggtgtcatggtttctgccgtgtggacagctcctatngatggccagaaaccaggaacttctggtcttcgtaagaaggtgaaagtgttcaagcaacccaattatctagagaattttgtccaagcaacattcaatgctcttacggcggagaaagttaaaggtgccacacttgtggtctctggtgatggtcgttattactcaaaggatgctgttcagatcataattaagatggcagcagctaatggtgtacgacgtgtgtgggttggtaaaaacactctgttatcaactcctgctgtatcagctgtgattcgtgaaagatcaggggctgatggatcga

SEQ ID NO: 168798 - DNA, 376 bp, Arabidopsis thaliana nossen
  unsure (1)..(376): unsure at all n locations
cgaaaggaaaagcatgtttaaactctgtctcgttctcgncttggttgttggggtaaatgcaaatgcgggggagtccggttcttgtagttgctccgggaatatatcagcgagcgatgtcgatcgagttcatttcgcgatgaacttggagttcaccgaggcggagttcttcttgaaaggggctaccggaaaaggacttgatgcctataacgcgacacttgctaaaggcggaccaccgccggtaggggccaagaaagccaaccttgatcctataactaaccgaatcatcgaggagtttggttatcaagaaatcggtcatcttagggcgattacggatatgacgggaggaattccacgtccgctaataaatctgacgaga

SEQ ID NO: 168799 - DNA, 376 bp, Arabidopsis thaliana nossen
  unsure (1)..(376): unsure at all n locations
caagagagatgtatgttaaagctacatatggtactgcatattatgtgggtgggtggataaaggtctgtaaatgggtgtggnnacnncnnnanggcgacgacatggggatgatcgcccncccggctaacaacggcagtacttccatcactttcttcggcggcagagttaactgcatccaggtgtcgcctccgattggaaagaagaagattgagactctctcttaccttcctgaccttaccgattccgaattggctaacgaagttgactaccttatccgcaacaagcggatttcttgngttgaattccagttccagcacggatctgtgtaccgtgagcacagtaactcaccccgatactatgatggacggtactggac

SEQ ID NO: 168800 - DNA, 245 bp, Arabidopsis thaliana nossen
tacatcttcatcatgctcccctaatctaaccacctgagtcccgcaaaaccttttttctgaacgagaatgaacatacaatctagcgacaacgagcgcaaaaagcacacaatgggctactctagctgcccgatcaaaccaatactataactacaggcatcaggctgacatatgccacgcgtgtcagatgctccgaaaaggcggttaaaaagatgaaaacatcattgtggtgataccatgatgcacat

SEQ ID NO: 168801 - DNA, 412 bp, Arabidopsis thaliana nossen
  unsure (1)..(412): unsure at all n locations
aaccggaanacccggggggatcgacgcgtccgcgatcaggtccatttaagcaacgtacattgaaaaaagatgattgatccaggggggtgaacgggtttttgtgtcgcgctctgnncaagaagatttcaatcgccgtcgtagccttcaatcaatctccgccgtcttacctgaaggagctcctgaagttgacccgagaaccaaccgtctcaagaaacccgcagctccagtacccgccggatctccaccagctcttccgatccaatccgctatggcccctggtccgtcgctagctccggcaccagctccgggacctggaggcaagcagcaccacttcgacggtgaggctcaagtcaaagatttcatccatacactgttacattacggcggttacaacgagatggcagatattctc

SEQ ID NO: 168802 - DNA, 394 bp, Arabidopsis thaliana nossen
  unsure (1)..(394): unsure at all n locations
gggggttccacgcgtccgctcacatgaagccaaacagcatttttggtttatcacacgggtnnctgcttttgcatttacaggttttggggctcganaacccaaagaacatcantgtggtcgctgtatgccctaagggaatgggtccttctgtgaggaggctttacgttcaaggaaaagaaattaacggtgctggaatcaacgccagttttgcagtccaccaggatgttgacggtagagccgccgatgttgcattgggatggtcagtagcacttggttctccgtttacttttgctactactcttgaacaggagtacaggagtgacatctttggagaaagaggaattttgcttggtgctgttcacggaatcgtggagtctctgtttagaagatacac

SEQ ID NO: 168803 - DNA, 401 bp, Arabidopsis thaliana nossen
aaaaccggcgcgcccacgcgtccgaagacatgactggctgtgtgaattctatttctccgccgccggtgactttgttgtggtatcgtgcgtctgcgtgacggtcgtccttctcattatccggcgatgccgtacactctctttaccggcaccgacgtgtatcaagatcttcgtcgattatcgcccccaaatttcagattgtggcggctgaaaaatcggagcctctgaaaattatgatatcaggagctcctgcttctggtaaaggtacacaatgcgagctgattactcacaaatatggtttggtgcatatctctgctggagatttgctgagggctgaaatcgcttctggaagtgaaaatggaagacgtgctaaagaacatatggagaaaggacaattggtccct

SEQ ID NO: 168804 - DNA, 392 bp, Arabidopsis thaliana nossen
  unsure (1)..(392): unsure at all n locations
ggggcgactccacgcgtccgcagccatatggctgtatcatgctttattattcgcgactcacgggtggagtgtcagtgagatgtgtgtaggaaagnncatgctanaagaaggtgctgagatgcaatggaaggaagagagagaagtacctgcaaatggtggaccgctagatgaatttgcaaagatgattgtggcaggagcttgtaggggagatgcatatgtgaagtttccaaactggtacgatgtctttctcctctatcgagtcttcacaccgaatgtactgagatggacattcaagttgttactgtctactgagggtacacgtagaagctcccttgttggggtcgggtcaggtatgcctgtggatgaatcctcttcacaaatgaaacttatgc

SEQ ID NO: 168805 - DNA, 355 bp, Arabidopsis thaliana nossen
  unsure (1)..(355): unsure at all n locations
ggccggcccattccacccgtncggaccaaacccttcgacccaaccttagactcccacgtggcannnctggctggtcctttcggcagtcgggcgagctccncaccncaccgncacgcgccgcctcgcctccgcctctccttccaccgtcttctctttcttcaacaccgcacaatccaactcttcgttatttccctccggtgacgaagcagatcgtccggcgaacatcagagtatacgatattgccgacggtgttccggagggatacgtgtttagcgggagaccacaggaagcgatcgagctgtttcttcaagctgcgccggagaatttccggagagaaatcgcgaaagcggagacg

SEQ ID NO: 168806 - DNA, 304 bp, Arabidopsis thaliana nossen
  unsure (1)..(304): unsure at all n locations
gggaaggcaannacaangctactccataagacaaagcattacatcatggctgataaaactggagcaagtgatttatgtattgcgaaagctggacaccaacggctccaactgactcgctattatctgaatgagagaagtaaaaagtatggaaacttgctagtgaaatgaccaacataacatgtgatgcatcttcctcgaggaactgtagctggagactttctcgatactctaactagccaaatgaatatgcttataaagatgtatggacatgctcacaaggggaaaaaacacatgtgtctcatca

SEQ ID NO: 168807 - DNA, 397 bp, Arabidopsis thaliana nossen
  unsure (1)..(397): unsure at all n locations
ggcgggacccacgcgtccgaatggagtcacgcgtgctgttacgcgtcaccgcgaatgtcgttggaattgcgtggttgaaacgaccaatcggagcgatccaccgncaattcagcactgcatcgtcttcctcgttctcggttaaaccaatcggaggaatcggagagggagcgaatctgatctccggtcgtcagcttcgtccaattcttcttctcgattcgtcggcgatcaacggaggagagaaaagagagattctcaaaccggttaaagccgccgctgctgaaggtggagataccgctggggaagctaaagttggattcctcgccaagtatccatggctagtcactggattcttcttcttcatgtggtacttcttaaatgtgattttcaacatccttaa

SEQ ID NO: 168808 - DNA, 378 bp, Arabidopsis thaliana nossen
gtaagagataatgtcggaagtagagggcgaaaaccgggctatcgtgtgtgacagtggaactggaatgatcaaggcaggatatgctggagaagatgcaccaagtgttgtgtttccaagcactgtgggtcgtccaccacatacgggagggatggtaggaatgaatgagaacgatttatttgtgggagacgacgctgaagccaggagcggtatacttacacttgactacccaatggagcacggtgttgttagcaattgggatgacatggagaagatttggtaccatacgttttacagtgagctacgtgtggctcctgaagaacaccctgtgcttctcactgaagctcctcttaacccgaaagccgatcgtgagaagatgac

SEQ ID NO: 168809 - DNA, 383 bp, Arabidopsis thaliana nossen
cgaagatttggctcatcttttctccaatgagttgattaaacaagaagcagcgacgtgagaggtttattgggatcgctgaagaagttcttgaaatctataagctttggcgtccaactcctctaatcagagcaaagagattagagaagcttcttcaaacaccggcaaggatttacttcaagtatgaaggtggtagcccagctggttcacacaaaccaaacacagcggttccacaagcttattacaatgcgaaagaaggcgtcaagaacgttgtgacggaaaccggtgctggtcaatggggaagttctttagcctttgcttctagtctatttggtctcgactgcgaagtatggcaagtagccaactcgtaccatacaaagccatat

SEQ ID NO: 168810 - DNA, 379 bp, Arabidopsis thaliana nossen
tgaaaatacatttagaaactgataatatcggttgaggtctattcgggttttgggtggttctcaaatttaggtgagacctgatattgaacctgaatttaccgacaaattatgtatacgtattatttcgagttacatgtatccgtttgagtttcgatatttcacgtatctgttcaagtttcagatcctacacgaaccaaaccaaaatcccaaaataaacactttagatccactcgaaccaaagcgaactatgtttttcgggcttcggattttatggtcatgcctagttttgtcctttgaaaaattaaaattagaagtaaatctacatatacatttttgcagtcattttagcaaataaattttgtacttgtatttacaatgt

SEQ ID NO: 168811 - DNA, 376 bp, Arabidopsis thaliana nossen
gacccatgtagctagctacattttctgatgaacttgaaccgagagttcttgtcgataaagtggtagtgagtgattgctgtaagttgtccatcccttgagacaaagcatcttctgcttgctgagaagactgttgcaagttatttatgtctagcgattgttgttctgtcaagggctccaactgactcgctataagctgtagtagagaagtaaaaagtttggaaacttgctagtgaagagaccaaataaaccgaacctggtcgtgtgttttttaccttgagaagttctgatgaacggaaaccgccgagccacaagaaacatctctcagctggggttttccacatccctgataataaatggaagacatcactcttagctg

SEQ ID NO: 168812 - DNA, 371 bp, Arabidopsis thaliana nossen
gaagattacaagatggttgtgatttatctcgagactactcatgagcgtggttaagtctctggtgttgagggcggagcgacagtgcagaatgtttttgcggctgagtcagatgcaattccttcattagatgatatcaagaagttaccaaataaggtccttttatggtgtgggtctcggagctcaaatctattgagacatatctacaaagggttcttacctgctgtatgctctcttccggttcctggttatatgtttgggagagcgatagtgtgttcagatgcagctgcagaagcagcaaggtatggttttacggctgtggatagaccagaagggtttcttgtattagccgtagcatcacttggtgaggaagt

SEQ ID NO: 168813 - DNA, 367 bp, Arabidopsis thaliana nossen
  unsure (1)..(367): unsure at all n locations
tccncnacttggcgttttttttacaaccatccatgaanncggtgttctttttttcaaagtttttcgctcncacaacnccncnatctncnaattcatcccccanaanaaacttnaanacttttctttacccctttcnccccattttctctnccaaaatccctatacctccnataaatccaaannatcctttcctctccacactcncttctattaccncaaattctccnnaaaancttctcaatctnccttttaaccctaatataccaccatatcttaacatctttnactcccctcanctcatntcttctccttcacannttaaaaaatcantnncttataactaccacctaccnaaaactcctccacc

SEQ ID NO: 168814 - DNA, 51 bp, Arabidopsis thaliana nossen
cttatatgtccaaggttcaatattgaaataagaatcttttgtctcgtggta

SEQ ID NO: 168815 - DNA, 163 bp, Arabidopsis thaliana nossen
gagaacctaaaaagaagagaagagaaagagagatccgaaatgtcggtgacatcaacggtggaggagaacgcaccagaaaaatccatcaacgccggcggcggtggaggagaagaagaagaggagatgggtgttttgggatagaaggtggaggagattaaattat

SEQ ID NO: 168816 - DNA, 375 bp, Arabidopsis thaliana nossen
ccaatcggagcctatatttttgtgtttgctttagtttttgcttgtagttatagaatgcaattattcttcactttttgaggatatgtaaaacatctatccatttccaatgttgcttttgagagagattgcaaggagttgattcaagttttggacattctggatgagtggtcggcatttgcttcagaattagaagatttcaatattttaatccttggttttcctcatttctttttattttgtattctacttttaaacaatgtctgtacagattgtctcgctaagaagacaagatcacgtgattctatatttttctatgtaaactcttttacaccaaactggttttctttagaagaaaactgccggtttctatcttaa

SEQ ID NO: 168817 - DNA, 385 bp, Arabidopsis thaliana nossen
agacgttatatatagagagagagatttcaataacttgaattggaaaaatctcgtaggttaccgagagagactgaaccgggtttacttcgagataagaatgcatcaaagaagctcatagatttggggttaaagttcatttccatggaggaaatcatcaaggaaggtgtggagagtcttaaaagcaaaggatttatctcttaatacctacctctgtaactctgtttgattgagcaattaacacaatctcgaggcagcagaaacatttcatatgatatacgattttgcacttttgtaataaataagctggcctatggtatggtatgaacatccaattaatatttattaatctggcctctctgagatttttctttaaagtttgaacatg

SEQ ID NO: 168818 - DNA, 350 bp, Arabidopsis thaliana nossen
aagaccctctttgtccctcagtatcttgactcacgccttctcatctttattggtcaaggacgaagcagcgcgtggagtgatatgcaaagacgaattcggagagaggaaactgaaagcaggagacatctactggataccggctggttctgtcttttatttacataacacaggcctaggtcaacgccttcatgtaatttgcagcattgatccaacgcacagtctcggattgaaaaccttacaacctttctatataggtggaggcccttagactgtactagctggatcagatcctcacactataacttgagcattcaacggttacgtacctgagctgcatcaaatgatgatga

SEQ ID NO: 168819 - DNA, 409 bp, Arabidopsis thaliana nossen
  unsure (1)..(409): unsure at all n locations
aacggancggaaataccgggggggacccacgcgtccgggcgaacagttcaagtggatcgaattcaaaacaaacgaaaacgcacaggtcagcacactcgcgggtcgtgcgtcantcatgaaaggtttgccgcttgaggttataaccaatgggtaccagatctctcccgaagaagctaaacgagtaaagtttagcacgattgagaccacactgacccatagcagtccaatgagctacggaaggcctanggcttgaggcttgatgagcgcgtggtggaatagcgtttgaatctaaagttcggtttggtacgacttgtaatatgaaataataatgtacaaagaagttctacgcttaagggaactgttttgttttgagctttgtattaagacgtctaatgtacaaaaacgaacg

SEQ ID NO: 168820 - DNA, 374 bp, Arabidopsis thaliana nossen
gagaaaatgagaaaccttagcttcatcgtcttatttctattgaccctcttcttcattcatcatttgggtgatgcttctttgctagtgaagtctcttcctggttttgaaggtcctcttccttttgagctcgagactggatatgtgagtattggtgaatctggagatgttgagctcttttactactttgtgaaatcagagaggaatccagaaaatgatcctctcatgatttggctcactggtggacctggctgcagctccatctgtggattgctcttcgcaaacggtcctttagcttttaaaggggatgagtataatgggacagtacctcctctagagttgacatctttttcatggacaaaggtggctaacatttt

SEQ ID NO: 168821 - DNA, 380 bp, Arabidopsis thaliana nossen
cgtctctctcacagcttcttcttccttcaaatacttccattttccttctctggaccgatctatctgtgattccccaaacttctccttcaccaaatcccttatcctcaatccaaaccacctctccttcaaatccaccttaaattctctttcaccgtctcagtctcagctctacgaggaagaagacgacgaagaagaagaagaagaagacgaagatgatgatgacgaagctgctgacgaatacgacaatatctccgatgaaattcggaatagcgatgacgacgacgacgatgaagaaaccgaattctccgtggatttgccgacggaatcagctcgggaacgagtggagttccggtggcagagagtggagaagcttcgtagtc

SEQ ID NO: 168822 - DNA, 381 bp, Arabidopsis thaliana nossen
catttctttagctcaaccttcattactaatctccttttaaggtttcttgcgtgaatcagatcggaaaaatggaatcttttttgttcacatctgaatccgtcaacgagggacatcccgacaagctttgtgatcagatctccgacgctatcctcgatgcttgccttgaacaagaccctgagagcaaagttgcttgtgagacttgtaccaagactaacatggtcatggtttttggagaaatcaccaccaaggctaacgttgattacgagcagattgttcgtaaaacatgccgtgagattggattcgtatctgctgacgttggtctagatgctgacaattgcaaggttctggttaacattgagcaacagagtcctgacattgcac

SEQ ID NO: 168823 - DNA, 354 bp, Arabidopsis thaliana nossen
tgagaagcttgtggatgttttaagatatatacaacagacaaaaggggtgctgaaaacaaattttgggggtctaaacaaacaacgacacaacagaacacaacaacaacgcacataccgacaagctatgtgatcacatatccaacactatactaaagacttgcctcaaacacgaccatgcaaacaaactatcttgtaagactcaccccaatactaacatgaccatgatcattggacaaatcaccaccaccgctaacacatattacaagaccatcgatcgtacaccatgccaacagataagattcccatctgcttgacgatgaactacatgctaacaattataaagttctccttaac

SEQ ID NO: 168824 - DNA, 381 bp, Arabidopsis thaliana nossen
gcaggcctttgcttccgacaaggcactcctcgtgaccggccgcaacatgacggctgacggtggagggtggtcactgagagggaagaagcagaggagagcatcaggatgtaacttgttccaaggccgatgggtgttcgatgcttcttaccctttctatgactcgtccaagtgtcctttcatcgacggcgagtttgactgtctcaagttcggccgaccagacaaacagttcctcaagtactcttggcaacctgaatcttgcaccatcccaaggttcgacggtggggcatttctgaggaaatacagaggaaaacgagtcatgttcgtcggagactcactgagtttaaacatgtgggaatcgttggcctgtatgatccatgcgtc

SEQ ID NO: 168825 - DNA, 374 bp, Arabidopsis thaliana nossen
gtaaataaaaaattagtgatgataaaataataaataaatatttaacccgtgttatatcaatccaaatgcgctccactatataacttgtctcatgatatttttattattatttgttttttgggcaaaatattttaattattttagaagtttaaatttggaaagatttaaatgattttaagttaattttaagttagtgtgtagtatattttagtttagatttgaaaagatttaaatgatttttgtgactatttttctttttgttttctaaattttaataacaaaattgatttatattcagatttgagaataaatttattaaaatattaaatgctaatagcattggattgtaaataagcctaatcttcaggatttaa

SEQ ID NO: 168826 - DNA, 355 bp, Arabidopsis thaliana nossen
cacagagagatgtttcgattcaatttccgtcgtgaaatctccaaatataccggaatttatcaccggaagatacacagcggtctagaagatgccggtccgatggcgtctcgccttaaatcacgttccgttgtccggtttagcggaccggatacggttaagtttcttcaaggtttgttaaccaacgatgtacggagattcggcgaatcctccggcgagaagaactcggcggttcctacgccgaacatggcttccgttacgaatccgcctatgtacgcagcgttgttaactcctcaaggaaggtttctatacgattttttcttgtatagcccttcgagacccgatgaaaagcttgatc

SEQ ID NO: 168827 - DNA, 379 bp, Arabidopsis thaliana nossen
cgtatctccaaatttagtttctttctttgcatgattggttccaattcactttgaaaaatagccaactccctcagaatattatgttgagtgactaacaactcattgtaaaaaccgtcttcgcgcttatttgtcctggtagtaagtaaaacaaataagttcatgatcaaatggtagatggcaagaaggtgcaatgaaacaaatgttgtaaaaaacaacaccaacgtacccgagatgaacaagtttaagcagattctgggaagcaagctcattaaggtataacatgaacttgttagtactagaactacctctaccatataattccatccatatgtcaattataagcgaagcacgtatcttttggtcctgaagaaatgaaccc

SEQ ID NO: 168828 - DNA, 374 bp, Arabidopsis thaliana nossen
attcggtgaagaagaagaagatgaactgcagaagcatattcgacgggcaccaccaaacctgttcgggcggattttcactctccgtttatcgaacatctgagatctctctccacttccgtcaccgaagatgcattccagtcatcttcttctcgaggagccgatcaggatggcttcaatcctcgagccttccaaatctagtttcttcccggcattgactaagatcgtcggaactctaggtcctaaatcccgatccgtcgaggctctctccggctgtctcaaagccggcatgtctgtggctcgattcgatttctcgtgcggagatgctgattatcaccacgagacacttgataattagaaacttgctgtgaggagca

SEQ ID NO: 168829 - DNA, 382 bp, Arabidopsis thaliana nossen; identical to SEQ ID NO: 132043

SEQ ID NO: 168830 - DNA, 363 bp, Arabidopsis thaliana nossen
cttttgctctcgcagtgttagtaacacaaggaagcatttttagtttgtggttggcctcctatgtgttctgcaaactctgatcctaattggtttcatcattggccgccgtttaaatggggaccaaaatttccatattctccacctaaaccgccgccaatcgagaaatatcctccaccggtgcagtatccaccaccgatcaagaagtatccaccgccaccatacgagcatccaccggtgaagtatccaccaccgatcaagacttaccctcatccgccggtgaagtatcctccaccagaacagtatccaccgccgattaagaagtatcctccaccagaacagtatccaccgccgattaagaagtat

SEQ ID NO: 168831 - DNA, 353 bp, Arabidopsis thaliana nossen
cagccgtctgtcttacctccagaagtcgacgacaacaatggcaccgaagaagggagttaaagtgggttgaaagaagaagccggagaaagttaccaacccattgtttgagagacgccctaagcaattcggtattggtggcgctttgcctcctaagaaggatctttctcgttacatcaaatggcctaagtcaatccgtcttcaaaggcagaagcgtatccttaagcagaggttgaaggttcctccagctcttaaccagttcaccaagacccttgataagaatctcgccaccagcctcttcaagattcttctgaagtataggccagaggacaaagccgcaaagaaggaacgccttt

SEQ ID NO: 168832 - DNA, 369 bp, Arabidopsis thaliana nossen
ctcgtgtcacactcacacaaaacacaatcttcctcaaaaaaaattttgtgcaatcagaaaaatttcaaacctcatctgatttgattttcactgtctttctaagtttcgaaacggtggattttgtccgtacgtggttttgattctcgtagatgtcgaaactctgacgtaagattagagtttcgatttctaggtttcttataactatggcggtggaatatgaatgctgcgggaccagcttcttcatacacatcgctgtgatagtgttactagtcttgttcgctggactaatgtctggtcttactttgggtcttatgtctatgagtctcgttgatcttgaggttcttgctaaatccggtactcccagagatc

SEQ ID NO: 168833 - DNA, 344 bp, Arabidopsis thaliana nossen
aaaaccggcggcgggccacgcaagcgaaccagagaagctcttataaatttttttcaaaaaaaaatgacaaaggctggttgaacacgtgtccttgcgttgctgatattgatctcgctaatggcggtgacactgaacctttttcccacggtagaggcaaagaagcggagtagagatgctcctatagtgaaaggtctctcatggaacttttaccagaaagcatgtccgaaagtcgaaaacatcatcagaaaagagctcaagaaagtcttcaagagagatattggtttagccgcagccatccttcgtatacatttccatgattgctttgttcagggatgtgaagcatt

SEQ ID NO: 168834 - DNA, 384 bp, Arabidopsis thaliana nossen
gaaaaaacttaacgagtttggggaagttctgactatgatcattgggttaatgtgtgcgttagtgtgggtcggcaatgtcaaatactttctgtcatgggagtatgttgatggctggcccagaaactttaagttctccttcgagaagtgcacatattactttgagattgctgttgcactggcggttgctgcaattccagaaggtctgccagcagttattaccacatgtttggctcttggcactaggaagatggctcagaagaatgctctggttaggaagctacccagtgtggagactcttggatgcaccaccgtgatatgctctgacaaaactggaactcttacaaccaatcagatggctgtttcaaagctcgttgctatgggttc

SEQ ID NO: 168835 - DNA, 331 bp, Arabidopsis thaliana nossen
gtagattttttttcaatactcgtttttctttctattccaatcaaaatcggcgggaaaaaaaataatttttgtggattctcaccatctctgtaataagtaaatgcctctttttctccggaagttgtcggaatcactcgtaataacatatcgcctacaattgcaaaggttttatcaataaaatttccatttatacgcgaccttggcatacgtagtaatccattctctaactctctttatccccttaacctattattttgcgaaaacattttgagccatacctaaaagcccattctggcaatcctgtataaaagcggacttactaaaccaaacc

SEQ ID NO: 168836 - DNA, 385 bp, Arabidopsis thaliana nossen
agagaggctctgataaaaaaataacaaaaaaaaatgacaaaggcttattcaacacgtgtcctcacgtttgtgatattgatctcgctaatggcggtgacactgaacctttttcccacggtagaggcaaagaagcggagtagagatgctcctatagtgaaaggtctctcatggaacttttaccagaaagcatgtccgaaagtcgaaaacatcatcagaaaagagctcaagaaagtcttcaagagagatattggtttagccgcagccatccttcgtatacatttccatgattgctttgttcagggatgtgaagcatcagtgctgctagctggatcagccagtggaccaggagaacaatcatcaatcccaaatctgacactacgtcaac

SEQ ID NO: 168837 - DNA, 392 bp, Arabidopsis thaliana nossen
  unsure (1)..(392): unsure at all n locations
accacgcgtccgaaaccaccgtctatgtcatcatttatcttttaaccaacacccnncnntggtggacattcagttctttggtcggaaacatgtaatcaagaaaaagaactaactttatctgttttagctgagcttcttggtttcgatgactacattacaccgtattccgaagcaaggggagaagatatcctaagaggagtaaactacgcttctgcagctgccggaatccgagaagaaactggtcgacaattggtaatttagtccttaaaacagaatacacaattttggtttgatgtcatgagatatcatttagacttcagtttttaaaactaggaaacataaatcttttgtccatttttggttcaaggagctagaataacatttgcagggca

SEQ ID NO: 168838 - DNA, 376 bp, Arabidopsis thaliana nossen
  unsure (1)..(376): unsure at all n locations
gtggtggttctcaactattggaagcaaaagaaggattatgaagacaggttgaagattgattagggggtagcagatganaggaagaaaatgagggagttggaaagggagatggagggaattgaggaagaggatgaggaggttgaggaaggtacgggtgagaaaaatccttacttacagatggcgatgcagttcatgaagtcaggtgcacgtgtgagacgagcatcaaataagaggttacctgagtatcttgagagaggtgtggatgtcaaatttacagatgttgctggacttgggaagattcgtcttgaacttgaggaaatcgttaagttttttactcatggagagatgtaccgcaggagaggggtcaagattccag

SEQ ID NO: 168839 - DNA, 223 bp, Arabidopsis thaliana nossen
acgggtgagaaaaaaccttacttacagatggcgatccatttcatgaattcacgtgcacgtgtgatacgagcatcaaataagaggttacctgagtatcttgagagacgtgtggatgtcaaatttacagatcttgctggacttcgcaagattcctcttgaacttcaccaaatccttaagttttttactcctccagagatgtaccccatgagacgggtcaatattc

SEQ ID NO: 168840 - DNA, 393 bp, Arabidopsis thaliana nossen
  unsure (1)..(393): unsure at all n locations
cccacgcaggcgattcgtacatcatccttcaaagtgcttctagttccgaaaagactaggcgggttcaactaacattatctggttgttaaanagaatgtcaatccaacctgaattactctatcgttcggcaactttcatgaccgttctcctagaaggctagatagttttgtacgtctcattgtctattctaaatcgattctctaattttcttgctccttttcattccttcctcttatttttttccgtaaatcattctaaattatggctccgtacacaaaaaagcacaagaagagaaagtggaatatataccacatttaataaaagaaaaagttcacattttgagttgttgttacactataaattaataatgttagaccttgaaatttattaatt

SEQ ID NO: 168841 - DNA, 374 bp, Arabidopsis thaliana nossen
cgaaaaaatgccggcggcgaataggactcccaaggttaaccgtaaccctgacctaatcaggggagttggtgggtattcgaggtctcaaatgtaccacaagagacgttagtgggctatcaacgccatgaccgtggtgctagaacgctagataatgctgaaccaatgattgactattctaaatcgaagctctaattgtcttgctcctttgcattccttcctcttatttttttccgcaaatcattctaaattatggctccgtacacaaaaaagcacatgaagagacagtggaatatataccacatttaataaaagaaaaagttcacattttgagttgttgttacactataaattaataatgttagaccttgaaattt

SEQ ID NO: 168842 - DNA, 375 bp, Arabidopsis thaliana nossen
gtcaaccattatatagaattgtgattttcttctctaaacaagtcctttggtgtgaaatggtttccaaagctttgtgcattctggtgagaatactctccatagtctttctcatagactgaatctcattctctgtgtgctttatctttctttccctcgactctatcttcttccttcttcccacaactgtcttcctctgttgctcaccttctaactccattgcctgtatagtatattacagaattggctaattcggtaaatcatatattcataataaaatggaatcaagaaatccgggtagacctgaatctggtcgcgtaagttcttggtagaaggtaacgatttacacagagaggctgtagatggcgcattaacaaa

SEQ ID NO: 168843 - DNA, 378 bp, Arabidopsis thaliana nossen
gcacaatattcgactcggtactctctctttcttcttcttattgcaaaaagattctctttttatctgttttgtggatatagagattctggataaaaacaatcatcttttttctctcaaaaatctctgcttaagaactggtattcttcaaaagctcttctcttgtctgatttcttctgaatttcccctctaagtctctccaattcttctccattagctataaagtcgattcctttatcaccgttctgaagaatttggtcgaaagttttggcctttagtacccaattttcaatcctggcgataactgaattgaaaagggttccaaaagttacatcacctgaaaacaacagtgcttttgattgtgttggtggtttggagtgc

SEQ ID NO: 168844 - DNA, 372 bp, Arabidopsis thaliana nossen
  unsure (1)..(372): unsure at all n locations
gtggtggttctcaactataggaagcaaaagaaggattatgaagacaggttgaagattgagaatgctggggcagatgaaaggaagaaaatgagggagttggaaagggagatggagggaattgaggaagaggatgaggaggttgaggaaggtacgggtgagaaaaatccttacttacagatggcgatgcagttcatgaagtcaggtgcacgtgtgagacgagcatcaaataagaggttacctgagtatcttgagagaggtgtggatgtcaaatttacagatgttgctggacttgggaagattcgtcttgaacttgaggaaatcgttaagttttttactcatggagagatgtaccgcangagaggggtcaagatt

SEQ ID NO: 168845 - DNA, 373 bp, Arabidopsis thaliana nossen
attgagcagagggaatgaaggaagctcttcacagtagaaattattacctttgtgctgtttttaataatcaaatgaaaacgtgctcttacaaaaccaaaagacacatttaacatcttaaaccatgttacttaactaatatacctcttgagatttgaaatgattggatcatataatcataggatacgtatcaccgtaccatgccatgttatttccactaatgttggaataattgatttatgacttgaccaacttatgcattaaagggttcatcgtcagctacatgccagctctttgcactctatgtatgagtcattttcggtccttttcgtattctttataaacttaatgggttccaaaaagaaaaatccaattc

SEQ ID NO: 168846 - DNA, 377 bp, Arabidopsis thaliana nossen
aattaaagttgctcgcaaagagaattgatgatggagcatgaattgaagctttcttgtaatttatctcaatgtcttccacctaaaccaaatcttatttgtctaattactgtgaaaaagaaagaaaaagcctatcttgaccatgtttaatgaatgttaattacttattaaattaaacagggagaatagttagttgccacatgaaagaatacaagaagtgggcaatgatgcaagcatctatactatgtaacacataaacattatattcataagtctaatcttcaaaacaagatcttgggcaaatcttcataaagcatgagaagacaatattgtatacagaatgaacactgatgttaaagaaaggtatagattattctatt

SEQ ID NO: 168847 - DNA, 376 bp, Arabidopsis thaliana nossen
gcccactaggccttagaaagaattcatctctaacacatttctcctacgcttaagcaacgccgtaacagcttctccgtacatacaatcgtcgccatctccggcgaacgcctccgtcaccagctcaacatcgttatcatcggaagccacaccagtcggccttacgaccaccagcgtcgctgcttcgagacaaatcccgctcttcagcatcagcgacggcgcgtgtctcatactcatcctcacgctaggtaccacagttcgttcccccacgcgctctgattctttattatccccacgcacctccgtctctctgtattctttcatccccgccgcgtccatcaccaccgtaccttcgccatcactgtcacgcacaatcaat

SEQ ID NO: 168848 - DNA, 384 bp, Arabidopsis thaliana nossen
ttcttcttcttctttgagttttttttttttatcattcttgacgtcatgagaaagatactcaacggcgagtcacaccattctcaaaccacaactcttaaaacagctgagatcttgtctaaatacagacccattgcaccaaagcccgggacgccttgagtgaacgacgatgatccttcttcctctatgtctgacaaaatcagccaatctccttaccttagtaacctctggccttagcttcaagcgcgacctacaagaacccgcaagcgaggccgaggcgggatgggtccctcttctcttgctatgaagagaccaaagtcgtcatgcggttcttctagtacttctactatttctacacaacgtggccttggacctattaaaacactg

SEQ ID NO: 168849 - DNA, 383 bp, Arabidopsis thaliana nossen
gaaaagtatttggtgtgataaattccctctccagcttctcggtgacacagatattttgcttccaaatgggaggagtccggtcactgccgctcactgacttcgtcttcctccatcttcgatccattggtttaacaagcgcgtgagggccagatagaccgagaatcatgggaaacggaaactcaacggagacgaaagagtcgcgccgatcaaagatgcgtaagaagattcaaaactttcgcagccgccgccgtcttagtcgtccaggatccggaagcgtctctggattggctagtcagagatctgtgagcgcagatgatttcgccggcattgctcttctcactcttatcggcgcggagatgaagttcaaggacaagtggctcgcc

SEQ ID NO: 168850 - DNA, 249 bp, Arabidopsis thaliana nossen
aacactaccgctcactgacttcaacttcctccatcttcaaaccattggtttaacaagcgcgtgagggccatatagaccgagaatcatgggaaacggaaactcaacggagacgaaagagtcgcgccgatcaaagatgcgtaaaaagattcaaaactttcgcagccgccgccgtcttagtcgtccagaatccggaagcgtctctggattggctagtcagagatctgtgagcgcaaaagatttcgccgccat

SEQ ID NO: 168851 - DNA, 302 bp, Arabidopsis thaliana nossen
aacaaacacagagaatcttcttctttaacgatgccgtactataccagaggtgacaacgacgtttgtgagttggatgagtttgatccaacgccgtacagtggtggttacgacatcacggtgatctacggccgtccgattccacctttcgatgagacttgttatcctctctcatctggtgtcgatgatgatttcgaatacgagagacctgaatttactcagatccatgagccttctgcttacggtgatgaagctcttaacacacagtacaggaggtatttttgacccaagccactacccgtatt

SEQ ID NO: 168852 - DNA, 379 bp, Arabidopsis thaliana nossen
aggaaactgaaagcaggagacatctactggattccggctggttctgtcttttatttacataacacagggctaggtcaacgccttcatgtcatttgcagcattgatccaacgcagagtctcggcttcgaaaccttccaacctttctatataggtggagggccttcgtctgttctagctggatttgatcctcacactttaacttcagcattcaacgtttccctacctgagctgcaacaaatgatgatgagtcaattccgtggcccgattgtacacgtcaccgaagggccacaaccacaaccacaatcgacggtatggacccaatttttggggttgagaggggaagagaaacataagcaactcaagaaactcttggagacta

SEQ ID NO: 168853 - DNA, 383 bp, Arabidopsis thaliana nossen
atccctcctgccgtagcattataaactgtattgttacttttgctaccatcaggataaatctgaccccttcccctgtttccacctacatatataggatattttaagaagtgaacatctttattagtagcagggtctggagcaagaataggaaaggttatttcactatatttttgaccaggaacaggacctatcacaagaatattttttttattgggacgataattctgaaaagaaagatttcctatcttttctttcatctcgggtgaaatacgatcggggggggctaattcaaaaccctgcggtaaaataagaacagctcccacattcaaagccccttttttaccattagctagaacttgttttagttgcatatcataaggaat

SEQ ID NO: 168854 - DNA, 376 bp, Arabidopsis thaliana nossen
gttggatcacggttcaatgccggtttggtattggtttaaacaaaagatgaaatcagtttcagattaacagaaggatcagaagactattgcctgattagagggtttgactttgtctctgttataaatagtctatttattactttgatagttgactaagaaaattattatttgactactatttctttgtcacgcgatctaacacattgtgtcttagggctaatgaaacattaatatatttagagctttaagatcttgagctattccacatctatacttatacctacatgtaaaagcgtgatgatgtcgtatatgaataacatcttcttgtgcttgcctgacacatatgtttggtttgatctgtgcacatatatcatgt

SEQ ID NO: 168855 - DNA, 301 bp, Arabidopsis thaliana nossen
tagaacattaaatccatactctcttagaaaaagaaaaaaagaaatggcggatcatcaacaacatgagcgacaacaacaaccaataatgaggagtctccatgaatcatcaccatcgactcggcagatagtgagattcgtaacggcagctacgatcggcctatcactcctcgtgctctcaggactaacactaaccggaacggtgatcggtttgatcgtagcgacgccgctgatggttctgttcagcccggtgttggtacccgcagttataacaatagggcttttgacgatggcattcctattc

SEQ ID NO: 168856 - DNA, 270 bp, Arabidopsis thaliana nossen
tagaactttaaatccattctcttttagaaaaagaaaaaaacaagtgtcggatcataaattttgtgtgcgtcaacaacaaccaataatgaggagtctccatgaatcatcaccatcgactcggcaaatagtgagattcgtaacggcagctacgatcgacctatcactcctcgtgctctcaggactaacactaaccggaacggcgatcggtttgatcgtagcgacgccgctgatggttctgtacaactccaaagatattacccgcagccataa

SEQ ID NO: 168857 - DNA, 382 bp, Arabidopsis thaliana nossen
cgttgataccagtcgatgccatctacatttgcatgaatatagaagggtggactgccatgatttcgatcgggtttaacgctgcgattagtgtgagagtatcgaatgagctgggtgcaggaaacgcagcgttagccaaattctcagtgatagtcgtctccataacttcaactcttatcgggatagtgtgcatgattgttgtcttagccacaaaagacagcttcccttatcttttcacttcaagcgaagctgtggcagcagaaaccacgagaatagccgtcttgttgggcttcactgtcctcttgaacagcctccagcccgtcttgtcaggggttgcggttggagcggtgtggcaggctctggttgcatacgtgaacattgcgtg

SEQ ID NO: 168858 - DNA, 368 bp, Arabidopsis thaliana nossen
gggaaaggagaaactttttcgccacagcaactacaagaagctcatgatgattatgaaaacgagacgactttatttgttttccgtttaaaatccctgaaacaagggcaaacacgtagtcttttgactcaggcagcaaggcaccatgcagcacagttatgcttcttcaagaaggctcttagttcccttgaagaagtggacccacatgtacagatggtaaccgagtcacagcatattgattaccatttcagcggattagaagatgatgacggggatgatgaaattgaaaacaatgagaacgatggttctgaggtgcatgatgatggagagttgagttttgaatatacagttaatgacaaggaccaagatgc

SEQ ID NO: 168859 - DNA, 378 bp, Arabidopsis thaliana nossen
attagatcttctcaaaaacttcacctttttttgtttttccagtttctcagaggagatcttccttcaaagctcaaatccttttgtctgaattgtgatactgctgtccccatttttctgcaagttgggaaatttctgtcaaagttttgtgggtctgttaaaaagatctgagctttgaacatggggagctcaatggaggagaaagtggtggctgtgatcatggtcggtggtccaaccaaaggcactcgatttcggccattgtcgctgaatattccaaagcctctgtttcctattgcgggacaaccaatggtgcatcatccaatttcagcttgtaaaagaattccaaatttagctcaaatatatcttgttggcttctatgag

SEQ ID NO: 168860 - DNA, 378 bp, Arabidopsis thaliana nossen
gaagaaagttggctttggaaggaataccaacaagggattgaataaacccggattaccaaatggcctggggccgttggaagcttcaatcttaacttttaaaccgcgctgaaaaaagcttggaattctggtaccaacctccagtttggtgaagcatggctgaaaacatatttggggacaagaaacggatggattttttatgatggattccgcttcttttatgcttgaggagtataacatactcaggcaggaaagagaagaagaacaccggtcgcaacgggatcagaaaaagcttcaaggacagctcatagcagaacaagaggcactttacgggtccaaacccagcccatctaaaccccttggtggtaaaaaggctccaag

SEQ ID NO: 168861 - DNA, 387 bp, Arabidopsis thaliana nossen
  unsure (1)..(387): unsure at all n locations
ccacgcgttcgatcaaagtgatttagagaactttattctctttttttttcattacatgccgattgacataacattgtgtgcttttcnaaancctgganaaggagatacatcttgggttgacatatagtgcgacttgtcagatatatcgggctatatgggatttccccattttctccctcgatcgagatatcctctgtttcgctcaaaaagattgattgaattatcaaaaatttgtaacgcgaagcgcaaaaaataaagtggaattaaatgcagggagtatttagattgatattagattatcaaaatttttttatggtttacgtgatcggactaataaaatgaagtatccnagctccgtttagcaaaaacccaattgataataatata

SEQ ID NO: 168862 - DNA, 269 bp, Arabidopsis thaliana nossen
agcgcatgcaaagtcaatattccttacaaaatcagcgccagcaccaactgcaacaccgtgaggtgatgagcgacggtcaaatgaagctactagcggatgtttcgaatattatataatcgatgagataatattaaataaagatgttcgaatggctgtactcttttcaatttcctgtctttttttatcgtggcgtttctattatgtgatcgtctgtactatgttcgcaaacaacgttctttgaatttcagacttgaagtttaagttattct

SEQ ID NO: 168863 - DNA, 380 bp, Arabidopsis thaliana nossen
gtgacttatctgtcaacttttccactatcacccccaaaaaaccaaactctgctttacgtaaagttgccagagtacgattaacctcgggatttgaaatcactgcttatatacctggtattggccataatttacaagaacattctgtagtcttagtaagagggggaagggttaaggatttacccggtgtgagatatcacattgttcgaggaaccctagatgctgtcggagtaaaggatcgtcaacaagggcgttctagtgcgttgtagattcttatccaagacttgtatcatttgatgatgccatgtgaatcgctagaaacatgtgaagtgtatggctaacccaataacgaaagtttcgtaaggggactggagcaggctacc

SEQ ID NO: 168864 - DNA, 380 bp, Arabidopsis thaliana nossen
gaagaactgcagaagcatattcgacggtcaccaccaaacctcttccgtcggattttcactctccgttgatcgaacatctgagatctctctccacttccgtcaccgaagatgcattccagtcatcttcttctcgaggagccgatcaggatggcttcaatcctcgagccttccaaatctagtttcttcccggcattgactaagatcgtcggaactctaggtcctaaatcccgatccgtcgaggctctctccggctgtctcaaagccggcatgtctgtggctcgatttgatttctcgtggggagatgctgattatcaccaggagacacttgataatttgaaagttgctgtgaggagcactaagaagctttgtgctgttatgct

SEQ ID NO: 168865 - DNA, 173 bp, Arabidopsis thaliana nossen
tttatttccccttactcaagaattttcatttctcttttaacttatattgggggattatattttatctgtgtgactagataaaatccacttaaataggcgggcgtaagaaataaataaaaaatttcttataatatgtgaattctaatagtgatccaaacctttttcattttata

SEQ ID NO: 168866 - DNA, 369 bp, Arabidopsis thaliana nossen
  unsure (1)..(369): unsure at all n locations
acccacgcgtccggtcattccccctaactcaaaaatttttattcctcttttaacacatatgcggtggttatatataatttgtttgtctaaanaaaatccacttaaataggcgaacgtaagaaataaataaaaaatttcttataatatttgaattctaatagtaatccaatctttgttcattattactcttcatttcaaatctaatcaaattttcacaagagagcgatcaagaataaaatttaattatttacgtcatgacaacaaactgaatattaattctatatattttatcttaatggataagagcctcaaaaaaataaattctacatattccatcttcttaaagatatcaagtttgtctggaaaaca

SEQ ID NO: 168867 - DNA, 380 bp, Arabidopsis thaliana nossen
  unsure (1)..(380): unsure at all n locations
gagaaagagacacaaaacttttttttttcaaaaaaaaaaaactaacacggtgttaaaaatactattgtgcggtttttcattctcaatcactatanaaaatgggagtcatgatcaatcaccatttcctcgcttttatcttccacatcttactaaacgtaatatccttccttatattcctccctccaatgccaactttttatataatatacaatagaaaatctacagacagtttccagtctctaccgtaccaactctctctatttaactgcatgctatggctctactacacattcattaagaaaaacacttacctcctaattaccatcaactcctttctctacctcttcgagactctctacataaccattttcttcccttac

SEQ ID NO: 168868 - DNA, 318 bp, Arabidopsis thaliana nossen
  unsure (1)..(318): unsure at all n locations
atggcgtcttaccagaaccgttcaggaggtcaggccactgacgagtgcggaaacccgatccatcggcggtatgacnagtacggaaatccgatgggaggaggaggatacggaactggtggtggtggaggagctacaggtggccaatgatacggaacaggtggccaagggtacggatcaggtggccaagggtacggaaccggtggccaaggatacggaaccgggaccgggactgaaggctttggaactggcggaggagctaggcaccacgggcaagagcaacttcacaaggaaagtggtggtggcttgggaggaatgctt

SEQ ID NO: 168869 - DNA, 377 bp, Arabidopsis thaliana nossen
atcaaagtgaaatagagaacttcattctctttttttttcatttcatgcctattggcgttccaaaagtaccttttcgaagtcctggagaaggagatacatcttgggttgacatatagtgcgacttgtcagatatatcgggctatatgggatttccccattttctccctcgatcgagatatcctctgtttcgctcaaaaagattgattgaattatcaaaaatttgtaacgcgaagcgcaaaaaataaagtggaattaaatgcagggagtatttagattgatattagattatcaaaatttttttatggtttacgtgatcggactaataaaatgaagtatccaggctccgtttagcaaaaacccaattgataattaatata

SEQ ID NO: 168870 - DNA, 377 bp, Arabidopsis thaliana nossen
gtgtggagtatgtagatataagcaggaccagcttctcgggttcactgggtctgggtctagcaaagtcaggctttgtttcctcaattcgtcatttgaacgtaagtgggaattctttggtaggggagctatttgctcatgatggtatcccctttttcgatagcttagaggtgtttgatgctagcagcaatcaattgtctggttctgttccagtcttcagctttgttgtctctctcaagattcttcggttacaagacaatcagttgtcggcttctttaccaccgggccttctgcaagaaagttcaaccatcttaactgaccttgatcttagcctcaatcaacttgaaggtcctatcggaagtataacctcttcaacacta

SEQ ID NO: 168871 - DNA, 290 bp, Arabidopsis thaliana nossen
cgaaaatttaacatggatggtatatataactaggaatgggagacacaatggagtttgcggcaggggtttatgaagcattgggtcggaggagacaaatagagacagaaaacggtattgacaaagaacaactcaagctgttttgggaatgacatgatcaagaaagacctcgattgtcgtcttcagatcttcttcgacatgtaatttcactcaatcttatatgttttcatatatacacaaatgcggttatttatttttatttttaaatgcggttatttagtttaaccattgtt

SEQ ID NO: 168872 - DNA, 202 bp, Arabidopsis thaliana nossen
cggacgcgtgggttctaagaaaacaacaggtagttcggatcgcagcggggcttgcaaaacttagaacgtggcgaggggtttgaagaagcatctgaagaggcttaatgcgcctaagcattggatgcttgacaaacttgggggggcatatctcccaaaaccgtctaatggaccacatgactcacagcagtgacttgccctactc

SEQ ID NO: 168873 - DNA, 376 bp, Arabidopsis thaliana nossen
ggctgttgtattggacaaggagcaggttatagcaacagtgcagtcagagcgcaaagactgatttgaaatgagcttttctatacttctggagttcctctgtcatctgtgctgttcttttgtctgtatatgttgtagttcatatgctgcactgtgagcccagcaaaatccaagggtttgaattctatgggcttgatttgcctgatagttttggagagctattcagtagtggaatacttgttcttcttctggagcgtgtttacataatgactgtgcacttcgtacaagctagattacatcgaggaagagatcagggagtcaaagcaaatggtaaggggtggattctgacaatcgctttaattaatggcccaaatttcgc

SEQ ID NO: 168874 - DNA, 379 bp, Arabidopsis thaliana nossen
  unsure (1)..(379): unsure at all n locations
cgttcgaagaccatttcttgttctttggacgaccatcggcgacagtgtggagtctagagtcttcgtcttcttcggcgtaattttttccccggcttgaaaaatgggtctatccttcggaaagttgttcagcaagctctttgcaaagaaagagatgcgtatcctcatggtgggtctcgatgcagctggtaagactacgatcttgtacaagctcaagcttggagagatcgtgactacgattccaaccattggtttcaatgtggagactgtggaatacaagaacattagctttaccgtgtgggatgtcgggggtcaagacaagattcgtccattgtggaggcactacttccagaacactcanggacttatctttgtggtggac

SEQ ID NO: 168875 - DNA, 383 bp, Arabidopsis thaliana nossen
atcaccacctctgtcatctgtttcatcggaaccatcggaatctcccttggcgtctacctcattctcaggcacactatcatcgtcccccgaacttctgctttcaccaccaacatttccactctcgacatcactccccagatattcgtactcgagattatctgggtcactctcatacactaacccttcatcgaaagacattgaataaagaccccaacacacccaaattagaatcgagaacccaaaacccccaaaattcggccaaccctacaaataatacttcaagttttaaatatcgtttttaagattgtcactttacaaacataatttatctttattccttagttatttttgatattttattaacagatggatttttcaaagaa

SEQ ID NO: 168876 - DNA, 373 bp, Arabidopsis thaliana nossen
  unsure (1)..(373): unsure at all n locations
caactagcgagtagaatcaactatcaagcaatggcatcgatgaccatgaccgctaccttcttcccggccgtcgccaaggttccctcagccaccggcggacgaaggctctccgtagtcagagcctncacgagcgacaacacacccagcttagaagtcaaggaacagagcagcaccacaatgaggagggacctcatgttcacggctgcagctgcagcggtttgttctttggctaaggtagccatggctgaagaagaagagcccaagcgagggacagaggcggccaagaagaaatacgcacaagtgtgtgtcacaatgcctacggccaagatctgccgctactgattcaacaacccaccttctgcatgtctatctc

SEQ ID NO: 168877 - DNA, 378 bp, Arabidopsis thaliana nossen
cggacgcgtgggttctaagaaaacaacaggtagttcggatcggagctacgcttgcaaaactcaaaacatggcgaggggtttgaagaagcatctgaagaggcttaatgcgcctaagcattggatgcttgacaaacttggtggtgcatttgccccaaagccgtcttctggaccacataagtcaagggagtgccttcccctcgtccttatcatcaggaacaggttgaagtatgctcttacctaccggggaatgatttcaatcttggtgcaaaagcatattccaattggtgggaaagtcaagacggacaagacctaccctgctggtttcatggatgttgtgtctatccccaagaccaatgagaacttccgtcttctctatga

SEQ ID NO: 168878 - DNA, 367 bp, Arabidopsis thaliana nossen
atataatctagaaaaaaaaagagaagagagaagagagaaatgtcgagagctttgtcagtcgtttgtgtgcgtgctcgccatatccttcgtctgtgcacgtgctcgtcaggtgccgggagagtctgatgagggaaagacgacgggacatgacgatacaacaacaatgcccatgcatgcaaaagcagctgatcagttaccaccaaagagcgtcggcgacaaaaaatgcatcggaggagttgctggagtcggtggattcgccggagttggtggtgttgccggcgtgggaggtctagggatgccactcatcggtggtcttggcgggatcggtaagtatggtggcataggcggtgcagctggaatcggtgga

SEQ ID NO: 168879 - DNA, 268 bp, Arabidopsis thaliana nossen
cacagaacaagtagccactctctcatctcaccacccctctttctctctacttgctctctatctctctctgtgtctctccactttctcttcttcttcttcttcttgctctagagatctctctatctccattcttttctctctctgtttctagaaagacaacagtgacattttgtctgaacgcatctatggctgctctggtgctttcacttctccttctatcccttggctggacattctagtgcctcatggtgtgtgtgtaagacagggc

SEQ ID NO: 168880 - DNA, 367 bp, Arabidopsis thaliana nossen
cacgaggcgagtaggagttttttaagagcgagaggtgccttagtgggactttggctagagggttcacgagtgtagccgaagaggaggtcttatcaacagatgttgaggaagagcctgaggtagatgaattgttgaaggagatgaagaaagagaagaagagagaaagtcatcgttcgtggcggatgaagaagcaagaccaatttggaatgggtcgtaccaagttccagaatttatggagaagacaagttaagatcgagactgaagaatgggaaagagctgctgcagagtacatggaacttttgacagatatgtgtgagcaaaagcttgcgcctaatctgccttatgtgaagtctttatttctgggttg

SEQ ID NO: 168881 - DNA, 362 bp, Arabidopsis thaliana nossen
cggacgcgtgggttttaaattaaatctttatacatgagattaatttaatcaatcacatagataccaattatagcggattcataaataaattaacagaatccttctttttgagatctaaatttagatttttttctaaaatgaagaattaagaggttgataattaaattaagatccttgtacaaaaaaactaccattattattactgatcagtaaaattaatatctttcaattcatattaaaaggggaaggatttctttttatgataaaaaatatagtcatttcatttgaagaacaaaaagaagaaagcaggggatccgttgaatttcaagtatttagtttcactaataagatacgaagactta

SEQ ID NO: 168882 - DNA, 361 bp, Arabidopsis thaliana nossen
accagttctcacttctcggaactagcttgttaagaaggagaaggaataacaacttctccgtgaggtcttgtggaagccaaacaacgacgacccatgaagctaaacagtcttctccaacaagggttgctccaaaaaaccacaaaagcaaccaacttgatgagattctgagagattacgaagctgtaattgggatagagactcatgttcagctctctacattgacaaaagccttttgtagttgctctaacaattacggttcttatccaaacacaagtatttgtcctgtttgtatgggtttgcctggtgctttgcctgttttgaattccaaagttgttgaatttggtgttagattgggtttagc

SEQ ID NO: 168883 - DNA, 360 bp, Arabidopsis thaliana nossen
ttttccctttaggcgggtgtttggaaccttctttacggtggaaagagttgctcaatctgttcgtgtgacttcaaggatcttcttctccaccggagaatggattagggttctcccttatactcgttctaaaagattgatctgttctactcgtgctgctcataatgaagaagccgccgcgaaagctgcaggcttctgttgctgacaccggagctccgaccatatttgacaagattatagcacaagagattacctcagatattgtctatgaagatgaaaacgttttggcattcagagacattaaccctcaggctcctgttcatgttgtggtcattcccaagttgagagatggcttgacctcgc

SEQ ID NO: 168884 - DNA, 364 bp, Arabidopsis thaliana nossen
agctaactgactctctggggtatcgctctctccgcatttccattaaccgtccaattttcccgcctttgtctcactctcttcccgccttgcactcgccggggactccatggttcagaagcagcaagcctccgccggtccgggtaccgagcctaagaagcgtcgccgtgtcggattttctcccgccgatactggtgtcgaggctaacgagtgcatcaaaatttatctcgtttcaagcaaagaggaagttgattcctctgatatttccagcgtgaagccagttgacttgaatgatttctttgatggagatggcaagatttatggttaccaaggtttgaagataaatgtatggatcaatagcatctca

SEQ ID NO: 168885 - DNA, 369 bp, Arabidopsis thaliana nossen
catagctgtaaagttgcatcacgatcaacacagcaagagattcccagacattatccagcaatggggctttagagttgtaacccaaataaaagtagagatcaatgaatccagataaccaaagctgcaagctgacaaagctacttaagcagtagataaacataaacaccaaaactgcatatgctttcaaagggaaccacaagcgtctcttagtttcttcaaacagttgtcttccagtaatccagagcaagagaaggaaaatatatccaaatgatacataattgggtttgaccaggtatacacttatgagaatagtgatgaaagcaatgtatgttccacacgatcggtacatagacagaaacttttgcccaa

SEQ ID NO: 168886 - DNA, 345 bp, Arabidopsis thaliana nossen
  unsure (1)..(345): unsure at all n locations
ggggtcaaagacggagatgatggagagagacgcaatggctacggtggctccctatgcgcctgtggggtaccatcnccgtgctcgtgttgacttggatgatagacttcctaaaccttatatgccaagagcattgcaagcaccagacatagaacacccgtacggaactccaggccataagaattacggacttagtgttcttcaacagcatgtctccttcttcgatatcgatgataatggcatcatttacccttgggagacctactctggactgcgaatgctttggttcaatatcattgggtcgcttataattaccgctgctatcaacctgacccttagctatgccac

SEQ ID NO: 168887 - DNA, 360 bp, Arabidopsis thaliana nossen
atcatttcatcatcaccattcccacacatgtttcaactatataacaaattttaacttttgactcgttaatgatgccaaatccgcacgctcagagcaacataagcaacgacttcttgtggtaatactattttattatcatcagattttgttttttttccgggagtttaagacatctttattaggtgtaatatataatattttcttgtataatggatcttccatcgtccggattatcactaacatcggctgacaatatcagtactagcatgaatattacttccactacaagtccttttttctttcacaataagatatagaatgattgttggtgttaatttgatacataaataaccaatatta

SEQ ID NO: 168888 - DNA, 308 bp, Arabidopsis thaliana nossen
  unsure (1)..(308): unsure at all n locations
aaacatttcattttcaccattttttacacaccccccaactatanaacaagtgtaacttaaagcgtgntgtgtttccaaanccncacnctcaaaacaacataancaacnacttcttgtnntaatactattgtattatcatcagatttttttttttttccgggaataaaacacatctttattaggtgtaatatataatattttcttgtataatggatcttccatcgtccggattatcactaacatctgctgacaatatcaatactagcatgaatattacttccactacaaaaaccttttttctttcacca

SEQ ID NO: 168889 - DNA, 363 bp, Arabidopsis thaliana nossen
gcaaagatgaaaatgccttcaaaaacgcaatcgactcaaacatcagcctcgatgacgatactgtagccagtattgaaaaagtctgggagcttgctggtcattgctgtgcccgtgagccttaccagagaccagacatggctcacatcgttaacgtcctttcttcactcaccgttcaatggaaaccaactgagaccgaccccgatgacgtctatgggatagattacgatatgccgcttccacaggtgcttaagaaatggcaagctttcgagggacttagccagaccgcggatgactcgggatcttcgtcttcggcttatggaagcaaagacaatacgcagacaagtatcccaactcgcccatctg

SEQ ID NO: 168890 - DNA, 361 bp, Arabidopsis thaliana nossen
ctctcacttaaatacagattatatatggctacatctagctagaatagcatatggaccttggagagctgacgaggccactaaccctgactccattagagccactttggctgagtttctttccaccttcgcctgcgtctccgctgcagaaggctcaatcctcgctctagacaagctgtattgagacacggcggctcacacggggacaaacacgcctggcgggctagttctcgatgcgttagctcatgcattggccttgatcgcggctgtctctgcagccatcaatgtctctggtggccacgtcaaccccgctgtcactcttgctgctctgatcggaggcaagatctcggtcattccagctatc

SEQ ID NO: 168891 - DNA, 349 bp, Arabidopsis thaliana nossen
gatcgttggttctctcaaaaatcagatttttatttctgggttttgttcgattctgtgatcatggcggtcattgacagcgtcggagctaatactactgtggaagctggtggtttgaactcgccgtcgccgacgtcttgcttcacctgtctataatcaagagtatcttctaacaacgatcactgtggaaatggaatccatgattagatcggagtccacatggcgagatcctactgctgtgagagctccaagcgtaatatgagagagcgtgacgagctcttgtctaagcttaattctatggctaaagaggatatttctacttcacttactaagcccagtgttaatggtttta

SEQ ID NO: 168892 - DNA, 357 bp, Arabidopsis thaliana nossen
gtcctcaccggaacgcgcctactctctttccacatcgtacgtttcgtctctctaaattcttcaacgttaaaggtgataagaattgaatctttcccacaacccacaagaaaattcgaatcctttctctctttctatctcttagtcacgctttcgatcagcaatctcctcgaattctggttggttccgtctctgttttctgtacacaaagccctgctgctgttgatacacgtgagccgccattaatgcccctttgttttcttcttccagctgatttaggaagttggtgatcaaattacatctagtgtttgtttccgccagctgaagtgaatcaaaatgtttagttttggccgagcaaga

SEQ ID NO: 168893 - DNA, 360 bp, Arabidopsis thaliana nossen
gtttgtaagaccacgactgatcctgaaaggaatgaatggaaaaaatagcatgtcgtatcaagggagaattcagataacattttttttttgctttcctgatcggtacaatcttattttgatgtcgaaaaaaaaaaaaaaaaaaagaattccaatttgggtcaagtgaataaatataaatggatggataaaaaaaccagttttccttattccaggaaaaaaaaagaaacgagcttccattcgtaatttgaaaaattaccccaactaattaaatgttaaaaatagattagtgcctaatacgggtatgggaaggcatttttttcttgcgtgttattatcaattttttcatgagtcctaattatt

SEQ ID NO: 168894 - DNA, 363 bp, Arabidopsis thaliana nossen
cacgtcccttttatttatgagaagaaagagccattacaagtgaggtgggggagacacatattgttttagtgttctttcaaaacgtaaagtccactgaaataaacaaacacatcatactaactctaccatagctgctgatgcagcagctgacgtatgattaagccttgggtactctgttatctgcaaaacctcaagcatgtcagtgtgcaatgtcattgcttaagatgtttccttagaatttttaagagcagtcagctttaatttgctaggcagaaagcgatcgtgcatgtctctgtagttactattgaaaccaggtaaggccaatcacagaattgcacacaatactacgcaacccaaaagtga

SEQ ID NO: 168895 - DNA, 361 bp, Arabidopsis thaliana nossen
gggaagcctttgacggacacaaaagatgataaaagcttaccagtctgctggaaaggcaaaaaacctttgaaatcacttgatgaggttaagaaatacttcaagacgattactttacgatttgggaatcaaaagaatggtcagctatttcaggttccacctgagtcgtatctcataatcaccgtaagtcacacatatactggcctagatatgacttgtatctccataaaaatctatagctgagaagtctgtttcttctggtttgttttctcaggaaaaaggaagagtatgtttgggtattctgaatggaactgaaatcggtctcgagggctacaatatcattggaggtacgtatatatatact

SEQ ID NO: 168896 - DNA, 364 bp, Arabidopsis thaliana nossen
caaattctcgtttgtagagatttaccaaacaactttctttgccccatgtatttgaaagcgtgtgttgttttttatagacctacaaggtaaaggagtgatcgagtttgtgacggataaaacaaaagaatcgttccacataactaaaggtgatgtggtaagaatcccttctggtgtcaccaactttatcaccaacactaaccagacggttcctctccgcctcgcccagatcaccgtccctgtcaacaatcccggcaactacaaggattacttccctgctgcatcccaatttcagcaatcctacttcaatgggtttaccaaagaagtcctctctaccagtttcaacgtgccggaagaattgctaggg

SEQ ID NO: 168897 - DNA, 366 bp, Arabidopsis thaliana nossen
ggaacccctgttcttacacattttcgaccccgtgggaacaaacacggcggttcactgccattttgctgtgtcaagaaagtcaatgcgacggagcttgacaagaatatttcctcatctgctgtagactcagagcagaaagggaagttggatgatgcacctaattcagggacagagaatggcaaaacagtacggaaggtaacaagaatgattccacgtcccaaacaaccgaaaaagaaaattttgcttaagaagaagttaaaaatcggggttgtgtcagcaacttacccaacaaaagacgatgaagaaattgttccttccttggactctagtgccactcaacttctctgccagagatgtcactgttcg

SEQ ID NO: 168898 - DNA, 365 bp, Arabidopsis thaliana nossen
ctctaagtttggtaagcgttcttcaagtggtaccaaccactgtccagaggaattaacttcactagccatagctctttactacttacttgctctattccgtattcttatttaatgaccctctttgcttctgcttccttcttatcattcactcacgacactaaccatgaccaaattctccgagccaatcagagactcccacgtggcagttctcgcgtttttccccgttggcgctcatgccggtcctctcttagccgtcactcgccgtctcgccgccgcttctccctccaccatcttttctttcttcaacaccgcaagatcaaacgcgtcgttgttctcctctgatcatcccgagaacatcaaggtcc

SEQ ID NO: 168899 - DNA, 356 bp, Arabidopsis thaliana nossen
cggacgcgtgggctctcctctccctttgagaaatccctaactctttgctcttctcttcccggcgggcgatctctccgatttgggtattgaaatggcaactcctatggttgaagatacgtcaagcttcgaagaggatcagcttgcttccatgtccaccgaaaatatcactagaactactcgtcttctcgaccaccagattccaattcttaagggagaccccccaagaacaaatctagaatgtgattcttacaaggagaagattaaggagaatcaggagaagattaaactcaacaagcagctgccttacttggttggcaacattgtcgagattttggagatgaatccagaagatgatg

SEQ ID NO: 168900 - DNA, 362 bp, Arabidopsis thaliana nossen
ctctgaagtaaaatgacgttcccttctctttctgtctcatttctcttctttgccttcatattcgttacgcatgcattcgacctcagcatcatccagatgcaacagggaacatgtccgtacacggtggttgtcatgacaagctgtctttctccggagtcgacaagagatcagatcagcattgtttttggcgatgccgacggtaacaaggtgtatgcaccgaaactagggggtttggtaagaggaccagggggtttggggaagtgttcaacgaacacattccaagtcagaggtcaatgtttgaatgaccctatctgctctctctatatcaaccggaatggacccgacggttgggtcccggagtc

SEQ ID NO: 168901 - DNA, 362 bp, Arabidopsis thaliana nossen
tgttgtctcttcaagcttctctctctgttcctcttattaccttttatctgtcacttttaaactgtgtgaatctaaactcagctttggattcaaacgctggtttttgcactccttacccatgtaaccaaccgcctcaaccaccgtcctctacaggctactctccatatggtaaccctcctccaccgtctccacagtattcaccacccccaccgccttcacagtcttcaccgccacgttctcgctgccctcctgttccgacgacaggctgttgcaaccaaccaccaggtccaccaccttcgacgatgtattctcctccgtatccttacttttatactccttcttatccttacggtactattggc

SEQ ID NO: 168902 - DNA, 360 bp, Arabidopsis thaliana nossen
cggacgcgtgggtttggatcttatatactagctgctatggatcgagctatacttgatggtgttgatgtgctttcgatatctcttggtggtggttctgctccgtattatcgcgatacgattgcgattggagcgttttcggctatggagagaggtgtttttgtgtcttgttctgctggtaatagtggtcctactagagcttctgttgctaatgttgctccttgggttatgactgttggtgctggtactttagatagagattttccggcttttgcgaatctcggtaaccggaaacgacttaccggtgttttgctgcatatcggtgtgggaatggggaccatatcccttgaattggtttataat

SEQ ID NO: 168903 - DNA, 362 bp, Arabidopsis thaliana nossen
ttctgaggtatattaagattcagtctccaattaatatttcggcgaccaatcggtcctaattcacacttgtggggaaagaattttttttgtaattccttacataaggattcagaaaatataggatccccacctacacaagaaaattgttgataaaactccaaaatagcattttcttttgatcctattttttttttctccttatcggtcaagaaagataagaaaatttcagggtagcaaacattctctagaatttctcgtagattcaaacccatagctgatgatagaactagaatagatattttttgtttcctactcacccgagcccatattcttgcttttttatcaatctctaattctaacct

SEQ ID NO: 168904 - DNA, 274 bp, Arabidopsis thaliana nossen
ttttccaaaaaaaataaataccacccggcggccccataaaaatttttcgggtttccaaaaccttattctgataataaaaattacccttccactttatctgctagtaagcatccttctactcaccatctaaatgaaattctgtatagaattgactccctataattcagcatcacaaagaggaaagcgaagctagtcaaacacatagatcccctcttttacctaacattaacccataatcatcaacaatattccaatactacaaattccatgcaac

SEQ ID NO: 168905 - DNA, 363 bp, Arabidopsis thaliana nossen
ttctcactttttcgaacctttaagactccttacagattctcactgggagctatgggtaattagaagtttcacataaacattgtggtcattggtcatgttgattctggaaaatcgaccacaactggtcacttgatctataagcttggtggtattgacaagcgtgtcatcgagaggttcgagaaggaggctgctgagatgaacaagaggtccttcaagtacgcatgggtgttggacaaacttaaggccgagcgtgagcgtggtattaccatcgatattgctctatggaagttcgagaccaccaagtactactgcacagtcattgatgccccaggacatcgtgatttcatcaagaacatgattact

SEQ ID NO: 168906 - DNA, 360 bp, Arabidopsis thaliana nossen
cgacgatggagagaatggagagagacgcaatggagacggtggctccatatgctccggtgacttatgagggccgtgttcgtggtgacttggatgacacacttcctaaaccttatttgccgagagcactacaagcacctgacatggaacacccacaaggaacaccagatcatagacataatggccttagtgttcttcagcaacatgtcgctttcttcgatttggacaataatggcatcatttatccctttgaaaccttctctgggttccggttactcggtttcaatttactcgcgtcgcttatcttggctgctggtatcaacatagctcttagctatgctactctcccgggatggttaccgg

SEQ ID NO: 168907 - DNA, 359 bp, Arabidopsis thaliana nossen
aattcaccaagtatcttcttctttttccatttctccattgacgacaacggagaaacgtcccatcttgcgtgagatagccacaccaatcctcctttttcttcttcttcttcctcctgcatttttggttttggtggcgttgagacatcatcatgtctagcgcagaggatgtgaaagagcaaggaaacctcaccaacgaggcagagaagtcaatgccatcatcacagcaggaggaggctgttgtaaagaagaagtatggagggctcatgccaaagaaaccacctctcatttccaaggatcatgagcgagcatactttgactcagctgattgggctcttggaaagcaaggtgttgcgaagcca

SEQ ID NO: 168908 - DNA, 322 bp, Arabidopsis thaliana nossen
cgctaccatggctaagtcttgctatttcagaccagctcttcttcttcgtttagttcttttgttttaggccgagtcacccggtcggttcgagccaaagattcttatgccgacagaggaagctaacccggctgaccaagacgaagatggtgtcggtacaagatgggcggttctcgtcgctggttcttctggatatggaaactacagacaccaggctgacgtgtgtcacgcatatcaaatactaagaaaaggaggtttaaaggaagagaacatagtcgttttgatgtatgatgatatcgcaaaccacccacttaatccttgtccg

SEQ ID NO: 168909 - DNA, 365 bp, Arabidopsis thaliana nossen
  unsure (1)..(365): unsure at all n locations
cattttcatcttcaaacaatggcggtttcaaagcttacattggctgctacgagcggtaagagctgcaaaatactcttagggctgagattacttgccttctcagccacgttatctgcagctattgtaatgggactcaacaaagagacaaagacttttcttgtgggcaaagttggaaatactccaattcaagctacttttactgctaagttcgaccacacaccagcttttgtgtttttcgtagtagctaatgcaatggtgagcttccacaacttgttgatgattgctcttcagatatttggagggaaaatggagttcactggttntcggcttctctcagtcgccattcttgacatgctaaatgtgac

SEQ ID NO: 168910 - DNA, 363 bp, Arabidopsis thaliana nossen
cgataatgggttcaagagttttggcttccttctttgctttcttaatctggacggtcatcacattgtttgccactatccaagcttgcactccttgtactcgtcctcatcctccggttccgaaacctccacaacacggcggtggtggaggtggtggtacctatcctgctacacatcccagtttaaattgtggctgcataagcagattaatgtcacgggttctacataaatatatgctagaacggttcaataaaaaaacacctatttaaacttcatatttctgaccttcaaatgtttccgaggtgggcctattgaacttctctcatagtcatactcatatgcattaaataccaattatttttcctt

SEQ ID NO: 168911 - DNA, 267 bp, Arabidopsis thaliana nossen
  unsure (1)..(267): unsure at all n locations
gccatatgtggcccacatgagacccagccgaacgatgaagtttatnatagcaccgtactctgccattataggaccaaccgtgactcgaccagtanntgcttggaactgaaaaatatcgttcatgcgttctcttcgctcctatctcgttgtgtggattgttcaaacagatgtatatnccagtgtccgtaacaatgaaataagtgtcacttgtctttgaactagattcgagacttgtgaaaagtcatactcatttgcgtcaaatacgaa

SEQ ID NO: 168912 - DNA, 358 bp, Arabidopsis thaliana nossen
gttcctcacatctctaattagtaaagtatgcttaattattggagtaaatggcctaaaaaagacttttcgttttcctttttgcctttataatcatgcacaatttacatgagagtatatataaagattagttaaataaaaaataaaaaagagggaaagagattgattattcaatggccgagaaagaagagggtgtgaagcttatagggtcttgggcaagcccattcagtcgtagagtcgagatggctctcaagcttaaaggcgtgccgtacgattacttggacgaagattatttggttgtcaagagcccgttgctactttaactcaacccgttttacaaataagttcctgttttgtttca

SEQ ID NO: 168913 - DNA, 359 bp, Arabidopsis thaliana nossen
acgcttgtctagctacttgtgcttacaccttgtaccatcgaaagcatagtgtgcagagaaacactcaaggaagaatctgtgatcgaacaaatcatacatgatgcagaagccatagtgcccacagagacagccgaagatgagtttataagcaccgtctctgccattatggacaaccggctcgaccagtatgcttggaactgaaaaatatcttcatcgttctttcgctcctatctgtttgtggattgttcaacagatgtatatccagtgtccgtaacaataaataagtgtcactgtctttgaactaatccttggcttttgaaaacaatggtttgctaatgaatatgatgattggattataa

SEQ ID NO: 168914 - DNA, 250 bp, Arabidopsis thaliana nossen
  unsure (1)..(250): unsure at all n locations
actgcttatccttccgtgtggagatcgacgagttcgagccaccacagcaaggagaacaagaaagtccccgtcgccgtcctggtggtgtttantaacaagggatgggaggaagagacgacgaatcatnntntnttnttntggaaataaaagaaaaaagaataagaaaaaattaaataaaaataaaaaaaaccataagaaaaaaaaacacaaaaatataatatctaaaaaaacaaaattaaaacaccaccct

SEQ ID NO: 168915 - DNA, 364 bp, Arabidopsis thaliana nossen
atcctaattatttaataattaagggattatccgtgatccaaaatcgattaattaattttatttcagtacctgtttttttaatccgatactaactatcgctatcgatatttagatcttataatacctcaggagctaatgaaactattttagtaaagtttaattgtctcaattcccgtgggatcgccccaaaaactcgagttccttttggatttccttcttgatcaatgacaactgcggcattgtcatcatatcgtattatcgtcccattgttacgtttgagttctttacaagtacgtacaattacagctctaatcacttctgatctttctagaggagtatttggtattgcttctttgattacagc

SEQ ID NO: 168916 - DNA, 184 bp, Arabidopsis thaliana nossen
aagtttttgaccaaccttttattaaattatttatatgtttagtatttgagattttatatctaagagtgggattcgaaatttaatttaattttctcttttaacatttcgaaatattattattatttattaaaaaaataccaaattttatttatttattaaaaacaaaaatgatttttaattaaaa

SEQ ID NO: 168917 - DNA, 370 bp, Arabidopsis thaliana nossen
agccttccgtggaaggtccattgtttcaacttggagttagtgcatatgtcgattggatgcaggatttgatccttgaaatgaaagatgggactatacgcacagctattgacactggttgtggggtaagtttatatttttgtggaatttaacttggcaaatatcggattagatgctctcttcttcaactccattgatcttgttctgttttcaaggttgcgagctggggaggtgatttgttggaccgtggtatccttacagactcacttgggatatgaaactttgagtatgctcaagtccagtttgctctagaacgtggaattcttgctatcataggcatcatttccactcaacgtctccctttcccttcaaa

SEQ ID NO: 168918 - DNA, 392 bp, Arabidopsis thaliana nossen
  unsure (1)..(392): unsure at all n locations
taccgggggggacccccacgcccgcgatcgatactgtaaaaggagtgtttacaaatttaatcccaaaaaacacggttattccaaccattgaagctgatgtnnncacaacntaccaagaccagcataccaccgtctccattcatgtctttgaaggtgaacgaagtctcaccaaggactgcaggctactcgggaaattcgacctcactggagtcccaccggccccaagaggaacccctcaaatcgaggtcacatttgaagtggacgccaacggtattcttaatgtgaaagcagaggacaaggcgagtggtaaatcagagaagattacaatcacaaacgagaagggtcgtctgagccaagaatagattgaccggatggtgaacgaggcataggag

SEQ ID NO: 168919 - DNA, 392 bp, Arabidopsis thaliana nossen
ggggcgacccacgccttccgggaaaccggctttaaaccctttattcaacctaagaaaaaggattaaaggaggcttcccaaggtttttccggtcaatcctgcatccaagtttccttcaccgttacctaattttactcgaggtgatggttttgcgaaaggaaccattgacttaggaggtggtctcgaagttagtcaagtttcgacattcaacaaagtttggtccacttatgaaggaggaccagacaatctcggagctacattctttgaaccatcctcaatcccttccggtttctccatccttggctactacgctcaaccaaacaaccgtaaacttttcggttgggtactcacagctagagatctctcaagcaacaccttaaaaccaccagtaga

SEQ ID NO: 168920 - DNA, 361 bp, Arabidopsis thaliana nossen
cacatcaacaaaacaacaagaaaaaatggcaataaccaacaaattaatcataacacttcttctccttatctccatagctgtcgtccactgcttatccttccgtgtggagatcgacgagttcgagccaccacagcaaggagaacaagaaggtccccgtcgccgtcctggtggtggctctggcgagggatgggaggaagagtcgacgaatcatccataccacttcaggaagcggagtttcagtgattggttccagtcaaaggaaggttttgtgagagtgctgcctaagttcacaaaacatgcaccggctctcttccgaggaatcgagaactacagattctcgttggtggagatggagccaaca

SEQ ID NO: 168921 - DNA, 361 bp, Arabidopsis thaliana nossen
gaagagtcacaaaattccctgtggtagaataaaatatctctcatatctcgctcgaataaagctaaattctttgtttttttttccaaaataatgttggtatgttgccgtgaacaatgcaccaatcctttgttgaatccggtcccggcggggatcaccccccctagaacaacattttctttcaggcctttcaaccaatcgatacgaccccgaagagcagcttttgctaaaactcgagcagtttcttgaaaacttgcttcggatataaaactttgagtattcaaagatgctcgagttattcctaataaaacggctcgataacagattgcttcttctaaagcacgccccgttcgttctgctcgta

SEQ ID NO: 168922 - DNA, 362 bp, Arabidopsis thaliana nossen
atttgttgaagtcatgtataggtgtcaatggtacataaattagataacgagaagaaacaatcttacatggacaatagaacgcttcagtatatgatccaatactacataacttgcatcgctagaaacaataacaatgcgtaagtaaagaccaaaactttgagaagtataaaacagttaaaacaatagttggacacagaacatctcgtatataggtcaaaagaaacaattgagaggagacagagctgaaactaaagctgaattcatttgtttatttaccaaaaccaacaaaagcaaaacactcttacgtcatcctaaggctgtgaattgaatcatcaaactcaagaactgaaattttggcgtcg

SEQ ID NO: 168923 - DNA, 365 bp, Arabidopsis thaliana nossen
gagaatagtacgtggtctgaatcaagacataaggtagttcacaagtcacctgggagatagcataaggtatagctgagtacatcccagcagctttttctctgtagaacactgttctttccactgccaccattggttgtactgttgagcagttgtttataccaacgaatacaactgctgcgtagattgctccgatcaccatcgttagatcttgtacgtttgatctcttacctccgatttgccagaagacagagccgatcatgagagatgttgccaatgtgaagatgaacctgacaaggttgtagtcaggagatctccaataagtccaccactgcttccatagacatgatttgaattgtccccatgtg

SEQ ID NO: 168924 - DNA, 365 bp, Arabidopsis thaliana nossen
gttttataactccagttttgtttttgtcaatttctcaattaagtttcatagttgtaacgtcgcgttgaactctaatttttgtgtttttctccgatccagtcaaatgtctgatgacccacacccaccaagacaccgacccatattactcctcattgaatacatcttataattaagtagttaatattgtttctttgtcgagaattataattagagtgtatgttgttaataaaccataatttccacccgctcatttatcattattgttatgaaaaataaatttatgttgtcaaatattaagatataggcttatagtttcggttaattggataaaaagagtttgcattaattacagtaagaaaaagtaa

SEQ ID NO: 168925 - DNA, 369 bp, Arabidopsis thaliana nossen
gcgcacattattttcactgagcgcataacatttttgagacaagagactctctctctctctcttctctctttctctccccctctctccggcgatggttgttgctatggaccaacgcaccaatgtgaaccgggatccccgcgcccgggacccggagaaaggaaaaagggtttgatccgagtgcacaaccaccgttcaagatcggagatataagggcggcgattcctaagcactgttgggttaagagtcctttgagatcaatgagttacgtcgtcagagacattatcgccgtcgcggctttggccatcgctgccgtgtatgttgatagctggttcctttggcctctttattgggccgcccaaggaacacttt

SEQ ID NO: 168926 - DNA, 371 bp, Arabidopsis thaliana nossen
  unsure (1)..(371): unsure at all n locations
acttaacgtctctctctattcctctgcttctctctttctccctgtgaaaaaatggactcggtggctctctactgcaccgctggtctcattgccggcgccgtctactggttcatatgcgtcctaggtccagcagaacgaaaaggcaaacgagcctctgatctctccggcggctcaatctccgcagaaaaagtcaaagacaactataaccaatactggtctttcttccgcaaaccaaaagagatcgaatcagccgagaaagtacctgacttcgtcgacacgttctacaatcttgtcactgatatctacgagtggngatggggacaatctttccatttctctcctcatgtccctggaaaatccgacanagacgc

SEQ ID NO: 168927 - DNA, 360 bp, Arabidopsis thaliana nossen
acacttaaagcataacatattttatcagaacagacacacataaagagaaaccatttttcttaaagaggggctagaatcttctccttctctacctcctcatgtgatgctcctatctttgtcagggcaaggccacgttaatccacttcttcaacttggtaagctcttaccttcaaaggatcagctcataaccttcgccaccactgagtcatgggcgcaaaaagatgcgaatctccaacaaaatccaagaccgtgttctcaaaccggttggctaaggctatctccggtctgatttcttcaacaactgacttcctgaagacaactatgctttcatatccaacttaaccatccttcgtccacatc

SEQ ID NO: 168928 - DNA, 357 bp, Arabidopsis thaliana nossen
ctggaatcgggctatgtagtatctctttagattttactataatgtttttggtcgaacttgaactagtcacaaaatatgatctcgttacaaatacttatacaaaagttactttcaacaacaaaaaaaagttctagtttacttacttttaaaaatgatagtgcacgaactactacgagtggttttcatttttcgcataatttaatttcatagtatgctaattgctaagtaagtaatttatatttgttgttttcttattgtcttctcctacgtaatgagccaaaaggaacgattttacaagaattcttaaagatcttccaaaacttcaaaatcacaaaaactcggttagaatcactgatt

SEQ ID NO: 168929 - DNA, 371 bp, Arabidopsis thaliana nossen
cacacttaaagcaaaacaaaacaaaacaaaaacagagcacacaaaaagagaaaccaagttttcttaaaaatggagctagaatcttctcctcctctacctcctcatgtgatgctcgtatcttttccagggcaaggccacgttaatccacttcttcgtcttggtaagctcttagcttcaaagggtttgctcataaccttcgtcaccactgagtcatggggcaaaaagatgcgaatctccaacaaaatccaagaccgtgtcctcaaaccggttggtaaaggctatctccggtatgatttcttcgacgacgggcttcctgaagacgacgaagctagcagaaccaacttaaccatcctccgaccacatctagagct

SEQ ID NO: 168930 - DNA, 358 bp, Arabidopsis thaliana nossen
gttcttccttctcctcataactggaaagagcaacaacttcaacctaaccatcaaagaaagaaacagccatgacattcctgaaatttggaaatccttcttgctaataagcctagctgtaacataacatacattgaaaaagtcacttagaggagtttccttgtgtgcttcaggctttggaacagaatcccatatctgccacaatgaagaacaaaacaaaacggtgatcagcttatcaacttggaattagctgaaagtcactcactcctcttttaccttctgaatatcttctcttaagacaggctctaaattttccaacggtgtctgcagccaaaatcatcaatagacaatgtatgtacca

SEQ ID NO: 168931 - DNA, 360 bp, Arabidopsis thaliana nossen
ctcaaacaaacatattgacatctgagtcttgtcatcatggcaacttctctccaagccgccgcaacttttcttcaaccggcgaagattgccgcttctccttctcgtaatgtccatctccgatcaaaccaaaccgtgggcaagtcctttgggttagactcttcacaagctaggctcacgtgctctctccactctgacctcaaagacttcgctggaaaatgctccgacgccgccaagatcgccggttttgctctagccacctctgctctcgttgtctcgggggccggtgcggagggagcaccaaagaggctaacgtacgacgagatacagagcaagacttacatggaggtaaagggtaccggt

SEQ ID NO: 168932 - DNA, 344 bp, Arabidopsis thaliana nossen
cggaaagccactggtgatcgatgaagtggaggttgctccaccgcagaaacacgaagttcgtatcaagagtctcttcacttctctctgtcacaccgatgtttacttctgggaagctaagggacaaacaccgttgtttccacgtatcttcggccatgaagctggagggattgttgagagtgttggagaaggagtgactgatcttcagccaggagatcatgtgttgccgatctttaccggagaatgtggggagtgtcgtcattgccactcggaggaatcaaacatgtgtgatcttcttaggatcaacaccgagcgaggagggatgattcacgatggtgaatcaagat

SEQ ID NO: 168933 - DNA, 360 bp, Arabidopsis thaliana nossen
ccgccgttaaacttccaaccgctgttctctcaacttcagttaaagccaaagctagggctaagaaagaagcagagcaaaaagctattgctgagaaaacatctggccctgaaaagcctgtcaatgaaagtggatctggaaaaggaaaagcatcaactgagaaggaaggagactctatgcaggtcgatagcccagcagcggtcgagaagaaagcacctgagcctgagccagcgtttgagattttagtgaacccagctcgagtagtcccagctcaagagaaatacataaagttacttgatgacagcagatatgtaccagtgaagctagcaccgtcaggtttcgttcttctcaaagacttgcgtg

SEQ ID NO: 168934 - DNA, 360 bp, Arabidopsis thaliana nossen
agaaaaatgggtcgagtctcatctattatctctttctctttgacactcttgatcctcttcaatggctacactgcccaacagtggcccaacgagtgccagctcgatcaactcaatgcgctcgaaccatcccaaatcatcaagagcgagggtggtcgcatcgaggtctgggaccaccatgcaccccagctccgttgctccggctttgcctttgagcgtttcgtcattgagcctcagggtcttttcttgcccactttcttgaacgccggcaaactcacgtttgttgttcacggaaggggtctaatgggaagagttattccgggatgcgccgagacgttcatggagtcaccggtatttggagaa

SEQ ID NO: 168935 - DNA, 368 bp, Arabidopsis thaliana nossen
ctcccttactaaatttccttctctaatctctactttgtccaaaagcatttaactttaaccggaaaaatcttatatttttttcctcctggatctctctctctatatctgcagattcacactacagctgatttagatctatttcgtaagtgggtctttcaaagtcgtctcctttgatctactttgattcaagggtcgttgatttggtgataagtcagtagaaatggataaggagaaatctccagcacctccttgtggaggtcttcctcctccatctccatcaggtcgatgctctgcattctcagaagctggtcccattggtcatggttcagatgctaatcgaatgagtcatgatattagccgtatgcttg

SEQ ID NO: 168936 - DNA, 355 bp, Arabidopsis thaliana nossen
cccatataattggaatccagttctttatcgagacagacattgaccttggacctgttcttggatcttcaacaaaagaaaagtcaattgatgggatatactcagctttagctgctggggagcggaatgtttcccgaggaatgtgtgggttattccagctgagtgacgaggttgtgtctatgaagatattgtcacgcctgacaccaagagacgttgcatctgttagctctgtgtgccgcaagctatatgtgctgacaaagaacgaggatctttggcgaagggtttgtcagaatgcatggggaagtgaaacaacaagggtattagagactgttcctggtgctaaaagactcggttgggg

SEQ ID NO: 168937 - DNA, 371 bp, Arabidopsis thaliana nossen
ataaaaatgaacatttgtatattataatacaattacaatgaataatgataagtcgtctcttgaatcgccaaatatatattctttttttttcgatttttcgatagattagaaatcgacaaatccaaaagaaaaagtaagtggacctaacccatcgaatcatgactatatccactattctgatattcaaattcgatagagattaaattgaaacagtagattttttttatttcatatttttgtattaggaaatccgtcgatatctcttattgaatcttcttgtttctatatatttcataggaaatatattgcgttcctgcctagagaaagagagtctttttgcaaagtaataactaaaagggcgtttcaatatt

SEQ ID NO: 168938 - DNA, 358 bp, Arabidopsis thaliana nossen
ctctaatacgagaagaaaaaggcgaaaacctcgccaatccgattacgcgaaaaatcaaaggtttttggatatggcgtcgaagcggatcttgaaggaattgaaggatctccagaaggatccacctacatcatgtagcgcaggtcctgttgctgaagacatgtttcactggcaggcaacgataatgggtccttcagagagtccttatgctggaggtgttttccttgtaaccatccatttccctccggattacccattcaagcctcctaaggtggcctttaggaccaaggtgttccatcccaacattaacagcaacggtagcatttgcctcgacatcttgaaggagcagtggagtcctgcg

SEQ ID NO: 168939 - DNA, 170 bp, Arabidopsis thaliana nossen
gagtataacagaattccatactcgatttcagagatacatatataattctgtggaaagccgtattcgatgaaagtcgtatgtacggtttggagggagatctttcatatctttcgagatccaccctacaatatggggtcaaaaagccaaaataaaagatttgagcccttata

SEQ ID NO: 168940 - DNA, 363 bp, Arabidopsis thaliana nossen
ctctgtgtttctattattcacatgaaacaatggaaccacatgaccaaactcacggcggcgacggaggagaaggagagaactgttcagtttccggattcgattcagctgaaaaagtcatcatccgatgggacgcgacggcgtcagaagaagcaagagagaagatgatattcaacgatccacaagaagttaacctttacctcaacgccgtcgatgaaatccagaaatatgtatcttccggcggagagattgagaatcgagctaattcagctatccagatagctatggctcgtcttgaagacgagttcaggaatattctcgtttctcatagttctccgatcaactctgattcgttaatgctgtctt

SEQ ID NO: 168941 - DNA, 371 bp, Arabidopsis thaliana nossen
  unsure (1)..(371): unsure at all n locations
gaaagacgacattaaaagaaaaaagataaaaaacagacgagataatggagagatctacgctcaaacgaacatcgagttttccagatattgaggctgttcaggggtgttcgactttgaatttgctgccaaaagccggatctagatctacgctcaaacgaacatcgagtattcctgattttgagcctgttaagtctctgcgttcgactttgattctgcagccaaaagccggatctccattgctgatgctgattgcagaagagtatggttgtcgtatttacaacccagaagatggtagggtttacgagccgaagagtgacttttcagggtatcgattcctgggaagctcangtaagtggtttctggtggtagat

SEQ ID NO: 168942 - DNA, 368 bp, Arabidopsis thaliana nossen
cgaattctccgattccaaaagcagcagaagaaaaaatgtcagccatggaagcactgattctccagctgcatgaaatcggcgccgtgaaattcggcaatttcaagctcaaatctggaatcttttctccggtttacatcgaccttcgtctcatcgtctcttatccatccctcttaacacagatctctcaaactctcatctcttctcttccaccttctgcaaccttcgacgtcgtctgtggtgttccttacactgctctccctatcgccactgttgtctctgtttccaatggtatccctatgcttatgcggcgtaaggagattaaagactatggaacatctaaagctattgaaggaatcttcgaaaaggat

SEQ ID NO: 168943 - DNA, 361 bp, Arabidopsis thaliana nossen
acttatttaataaggtcgattggtttatgcgaattgattttctgttacgataaattgacgagactatagctaatccaatagctgcttcagcggctgcaattgctataacaaaaatgcagaaaatttccccttttagttgggaattatcaaaaaaatcagaaaatgttacgaaattcatattaactgcattgagtataagttcaagacacataagagccctaaccatatttcgacttgtgatcaatccataaagaccaatcaaaaataaataggcactcaaaacaagtacatgttcgagtatcattcagcaactccttatcaattttgattcatttcaatatgaaaaataattcaccggatt

SEQ ID NO: 168944 - DNA, 362 bp, Arabidopsis thaliana nossen
attcatgataagttcctcacaccaaaataaagaaatagttaatgatacaatcattcaatgacttaggacggaattctaattaagtaatcgctaagattaatccagccaaaaaaaccaaaaactttaattgaaatatgaaataatataataaaattattgaatcataagaattactttgatagtagttcctatccgcgggatttttaaaaatccataatatatatacgacttttttatgccattttttttatgaaccattctttgaattcttcgttctttttttatcattttttcagccaattcacagataaaaaggaagaacttctaatcgaatccctatctaaatctaaatagaaattcac

SEQ ID NO: 168945 - DNA, 179 bp, Arabidopsis thaliana nossen
caaaaagactcatatatataaataattagagtcattaaatgtggattcatcattaaatgaaacaactcttcttctctgtacaatttctcttcacaccttcaccaaattctttgacttcaaaaatcttataaaatttatatatctccaaaaccataaaaccaaaacgagttttcacaaaa

SEQ ID NO: 168946 - DNA, 232 bp, Arabidopsis thaliana nossen
  unsure (1)..(232): unsure at all n locations
acaaaaatactcatatatttaatcacttacagtcataaaaccncggagtcatcattaaataattttggtagacctctctattccatttctcttcacaccttcaccaaattattaaactccaaaaatctcataaaatttatatatcttcataaccatataaccaaaaccattacccattttattcaaaataaatggcctccattttatattatccaaacatacccacccattc

SEQ ID NO: 168947 - DNA, 367 bp, Arabidopsis thaliana nossen
tatttctcacattttcgtagccgcaagactcctttcagattcttacttgcagctatgggtaaagagaagtttcacattaacattgtggtcattggtcatgttgattctggaaaatcgaccacaactggtcacttgatctataagcttggtggtattgacaagcgtgtcatcgagaggttcgagaaggaggctgctgagatgaacaagaggtccttcaagtacgcatgggtgttggacaaacttaaggccgagcgtgagcgtggtattaccatcgatattgctctatggaagttcgagaccaccaagtactactgcacagtcattgatgccccaggacatcgtgatttcatcaagaacatgattactg

SEQ ID NO: 168948 - DNA, 369 bp, Arabidopsis thaliana nossen
aggaaacgttctagttgctcttgaataccttctttcaaaaagctttctgcttcagcggttaatgtcttggtagaggctatgatttcttgaaactgaggtttattcgtttttaagtaagtgcgtaattgaacgagaaattttcttacttgtccaatttctaatccatccagataaccatttgttccggtataaatggtcattatctgttcttccactgtgaggggggctgattgggattgtttcagtaactcacgcaatcgttgacctcttgccaattgattctgagtagctttatcgagatcagaagaaaattgggaaaaggcttctaattcagcgaattgagccaattccaattttaattttccagct

SEQ ID NO: 168949 - DNA, 367 bp, Arabidopsis thaliana nossen
ggagatgttgaatccgggtagaagcgatgaatcaagaagctattcgcaggcagagatgtcggttcatgatgggaagctcagaaccagaaatgaggcggaagaagactggttcatacgtaaccaagctggtccagaaacagatccaagtcttgtcaaaacatttgtaggagaccatttccacttaaataagagcagtgagagagatgtcctgaccgatgactctttcatgatccattctcgtgttgagaaccaagtagaagattctcggttaaggacagaaatcatggacttagacgtttacggaaccacccaacaagaaaacagtgccccggagaacactccgcatgaaccagatgacctatacatg

SEQ ID NO: 168950 - DNA, 353 bp, Arabidopsis thaliana nossen
aatgggtgttcatggtgacagcgcaaactccgacgaacattgcggtgattaagtattggggaaagagagatgaagtccggattctccccgttaacgatagcattagcgtaactcttgatcctgatcatctctgcacagtcactactgttgccgttagtcctgcttttgatcgggatcgaatgtggctcaatggcaaggaaatatctctttctggaagtaggtaccaaaattgtttgagggaaatacgaagtcgtgctggtgatgttgaagacatggaaaaggggatcaagataaggaagaaagattgggagaaattgaatctacatattgcttctcataataacttccctact

SEQ ID NO: 168951 - DNA, 369 bp, Arabidopsis thaliana nossen
atcagaagatatctttgtaacatctttgaatttcgctaaaggaaaagagagagatttggtaaaaatgcagtcgatgaaagaaacagcttcgaatattgcagcttctgcaaaatctggcatggacaaaaccaaagctaccttggaggaaaaggcggagaagatgaagacacgagaccctgttcagaaacagatggctacacaggttaaagaagataagatcaatcaagctgagatgcagaagagagaaacgcgtcagcacaacgcggccatgaaagaagcggctggagccggaaccggtttaggtttggggacggccactcactcgaccactggacaagtcggacacggcactgggacacatcagatgtc

SEQ ID NO: 168952 - DNA, 359 bp, Arabidopsis thaliana nossen
ccgcgaccgcccaaaaaattctctgatcagacggtcgattggatcggagatttaaggtaaagaaaaaatggcgcaacaatcgttgatctacagttttgtagctcgcggcacggtgatcctcgttgagttcactgatttcaaaggtaatttcacctcaatcgctgctcagtgcctccagaagcttccgtcttcgaacaacaagttcacctacaactgcgacggtcataccttcaattaccttgtcgaagatggattcacctattgtgttgttgcggttgattctgctgggaggcaaattcccatgtcctttttggaaagagtaaaagaagattttaacaagcgatatggtggtggaaagg

SEQ ID NO: 168953 - DNA, 366 bp, Arabidopsis thaliana nossen
ttgttcttgacaggaacttaacggtgactagagagcagagtttcagagatcgatttttggtttgtgattcacatatttgcaatgaattctaaaggagagattattggagagcttttgagtcagtgcagccactactgttcccaatttccggcaattctatgtaccaaagcaacatatgcattgacattgtataggattaagtagtaacaagctggacctaaccaatccggtttttccataaagttccggtttgcttggttatcgtgtgtaaacaaaaatagaacacaactttcagatttttcagtaaaaaaataaacagtttagttttctcattctgtttagtagacaataaaaccaagaaaaccc

SEQ ID NO: 168954 - DNA, 368 bp, Arabidopsis thaliana nossen
ccaaatctcatttcttcttcttcttctttttccacattttctgattagcagatcaaatgatgcttgttcgatctgtatttcgatctcagttgcgaccctctgtctcgggtggtctgcaatctgcttcttgctattcttcattatctgctgcttcagctgaagctgagaggactatcagagaaggtcccagaaacgattggagtagagatgaaatcaagtctgtttatgattctcctcttcttgacctcctcttccatggagctcaggttcatagacatgttcataacttcagggaggtacaacaatgtaccctcctctccataaagactggtggctgtagtgaagactgttcatattgtcctcaatct

SEQ ID NO: 168955 - DNA, 352 bp, Arabidopsis thaliana nossen
ggaatctatggaggaaatcaaacacttcagaaggaaaacgagatccatgagaatcaccctgattacgacaaaacgcaaggtagcgaatcgaaggagaaggagaaagcaaggaaccagacacaatcccactgctaaagaaaaaatgatgatttagtgtctttgttctttatgctttaataaaatcagacttgtgctctgtagttcgtagactctggttagagttttttttttgttaattgcgttttttgacccgtaacctttaccgggtttttgttggttatccttatcacttttgtaacactcgttgaattagtagtttttgttgattgttgaacattcccttaatttgact

SEQ ID NO: 168956 - DNA, 347 bp, Arabidopsis thaliana nossen
ctgcattgtatatttccggaatatgagtgtgtgacttgttagaattgaccctatggatagtacagagaatggggtctgtcatctttatcaagatggttttacttcgtcggatattcattcgagtatctggagcacgaaatagatcaaatagatcacaaagtattcgaactatgattcataacttaaatactcaaacctcgtagccggacttctttccgttctatcttataaactttaataaatcaaaaaaattttctgcttttaaactcttatttggatcaaaggacaaacgcttctttgtattttatgtttttagtcattatagctttttttttattgaataagtg

SEQ ID NO: 168957 - DNA, 370 bp, Arabidopsis thaliana nossen
gttaaacaccacccactcacttctctttctcttcatcgcctcgcccacaacaactaaaaatactcatcaacggaaaacaaacaaactcgtttaaattaaacgttcgttaaaaaccttattactaaaacaaagaccaaaccacccaccatcttccattttagagtctctccctctctcaatatctaaaatgtaggtacaagtccgaacccactaaagataccaccatgaccaaccacatcattgctctcatttgtatccgtccgcttcgcaaaccgtcccttgattctcggtctcatttccgcatacgctttccttgaagcataccttatagtcttctcaaacttcctgttcttcctcttctctctgtacc

SEQ ID NO: 168958 - DNA, 275 bp, Arabidopsis thaliana nossen
tccaaattaaaagcaacttacttaattacatatcgttcgtgtttttttcttggaaaaatggcgtctaagcagctgagcacagaacagcttgatgagaaggcgaagcaaggagagaccgtcgtcccatgtggcaccggtggccacagcctcctagctcaagagcatctcgctgtaagcaggagcatgggaagcctgacgaggatcgagctccatagacatgaatgttatcacgtgatcggccacaaatgtataccggcgatgaaagatcatacagg

SEQ ID NO: 168959 - DNA, 366 bp, Arabidopsis thaliana nossen
cgtgagctgaatgctatacaagaaagaacaatgagtcacattcaaaagatagttgatgatcatgagaaattgaagaggctgttggagtcagagaggaagaaactcgaaatcaaatgtaatgagttggcaaagcgcgaagtgcacaatggaaccgagagaatgaaattgtctgaagatcttgaacagaatgcatctaagaatagctctcttgaactagctgccatggaacaacaaaaggcagacgaggaagttaaaaaacttgctgaagaccaaaggaggcaaaaggaggagcttcatgagaaaatcataagactagaaagacagagagatcagaaacaagcgattgagctagaagttgagcagttg

SEQ ID NO: 168960 - DNA, 352 bp, Arabidopsis thaliana nossen
cgatactggtgtttggcccgaaagacctagctttgatgaccgtggtcttggtcctgttcccattaaatggaaaggccaatgtatcgcttcccaagattttccggagtctgcttgtaaccgtaaactcgtcggagctagattcttctgcggtgggtatgaagcaaccaacgggaaaatgaatgaaacgactgagtttcgctctccgcgtgactccgatggacatgggactcacacagcttcaatctccgccggccgttacgtttttccggcgtcaactctcggctacgctcacggcgtcgctgctgggatggctccaaaagctagactcgccgcttacaaagtctgttggaac

SEQ ID NO: 168961 - DNA, 365 bp, Arabidopsis thaliana nossen
atcaatttgtgtttttctcatactttcattgaaatagccgctaaaacagtaaacacagacctccaaatcctgaagccaaacttttactttctcccgctgccgtctccttgcattgtcacctctatctactacttcttcggaaattagcttgttacattccataacaagttcaccattgcaattttcacaatgaaaagaatcgtcttccatagaaattaatctcagggcatccagtgcattatatctataccagaaatgagaatctatacaggtttagtgaaaataatacaactcaccatgtaaagatttaaaaacataaagaatagtggactttactttcttttgcagttaggacagccatactc

SEQ ID NO: 168962 - DNA, 364 bp, Arabidopsis thaliana nossen
aaaatggttaagctcagcaatctcctcgttgcaaccttcggggttctcctcgtccttaacggctgccttgcgaggcagtcacttggggttcctcctcagctacagaacgagtgtaacctcgacaacctagatgttctccaagccaccgaaactatcaagagtgaagccggtcagatcgagtactgggaccacaaccaccctcagctccgatgtgttggtgtttccgttgctcgttatgtaattgaacaaggcggtctttacttgcccaccttcttcacttccccaaaaatttcctacgtcgttcaaggaacgggtatcagcggaagagtggtccctggatgtgccgagaccttcatggactcgc

SEQ ID NO: 168963 - DNA, 370 bp, Arabidopsis thaliana nossen
gttattttgacgtaaatcgaatatgctccctatatgtttctcagtctctttctccgattgatacatctctcgttactctcgaaataaagctcatcatctgaggaaattcatcaatttgccggtgactttagttcaattccgaccctccgatgggctcgacgttcagagatcggacggtggagcttcattcactgtcccaaacattgaagaagatcggggcaatcccgtccgttcatcaagatgaagatgatccggcatcatccaaacggtcgtctccgggatccgaattcaataagaaggcttcccggatcgggttaggtattaaagaaacgtcacagaagatcacgaggctcgctaaattggcaaaaca

SEQ ID NO: 168964 - DNA, 363 bp, Arabidopsis thaliana nossen
atcgttgaacttagaaaagcggattaagggttggaacaagtgtataacaagaattcttggaattccttggggattcttgattggtgctgagttaactatagtgcaaagtcgtatttctttggttaataagattcaaaaggtttatcgatcccagggggtgcagattcataataggcatatcgaaattattgtacgtcaaataacatcaaaagttttggtttccgaagagggaatgtctaatgtttttttacctggagaacttattggattattacgagcagaacgaacggggcgtgctttagaagaagcaatctgttatcgagccgttttattaggaataactcgagcatctttgaatactca

SEQ ID NO: 168965 - DNA, 368 bp, Arabidopsis thaliana nossen
gaaaagctccattctccttatattcttgtttaagtgaagtctcgatgtgtatagatcctcggtctgacagaacactcggtttcttggagaaattagttgactttgcagaaaatgaccggcaacaagtattggggttccatcggttaggttgtatgaggctattgaggaaagaataccgggaggctgaagaagcttttgaaacagcttttaacttaggccatgtgtattccgctactggtttagcaagactaggatacatccaagggcatcggctttgggcttatgagaagctaagctcggtaatctcctctgtttcgccgcctctcgggtggatgtatcaggaaaggtctttctattgtgagggtgac

SEQ ID NO: 168966 - DNA, 359 bp, Arabidopsis thaliana nossen
tctcgatatcatctaaatctctctcgatctcaatttcgcaaaatggctgacaagaagatcagaatcggaatcaacggtttcggaagaatcggtcgtttggttgctagagttgttcttcagagggatgatgttgagctcgtcgctgttaacgatcctttcatcaccaccgagtacatgacatacatgtttaagtatgacagtgttcacggtcagtggaagcaccatgagcttaaggtgaaggatgacaaaactcttctcttcggtgagaagccagtcactgttttcggcatcaggaaccctgaggacatcccatggggtgaggctggagctgactttgttgttgagtctactggtgtctt

SEQ ID NO: 168967 - DNA, 378 bp, Arabidopsis thaliana nossen
  unsure (1)..(378): unsure at all n locations
accgcaaaagtgttcgtgaactttttggttaaagctcgtagntcgtgtatttcgtaataacagttattgtaatctgcgaactagtttcgatatgaattttggctcttggaaagtctcctgagttgggcttgtactatgatccaatagtaaataatcacttaaaaagcaacataaacgataaaaatatgataagtatgagccggctctaaaagtcaccaattttccattctcatgatcaaacataattagcaagtattatatttgagatctcataatagatcgtacgttttcattacttgttgaaataccaagattttaaaacaaacttatttagcttctacaccatcaatttttctaagcttatctaatcgaaacaac

SEQ ID NO: 168968 - DNA, 363 bp, Arabidopsis thaliana nossen
gtttcttgtcactcaagaaactatctaaactgaaataattgatctcttgtgaatagtacaaatttacaatcaatctatgtattaaccataatataacgattctaacttggacctttttcaattttgctcaccttcaggattctcaattcaattcagcaatatctcggcggacgcagatttggtcccatacctaaacacgacaaggacgtatctaggaaggccatggaagctatattcgagaacggttttcattaggaacaatatgagcgacgttgtgagacccgaaggatggcttgagtggaacgctgattttgcgttggacacactcttctacggagagttcatgaactacgggcctggttc

SEQ ID NO: 168969 - DNA, 335 bp, Arabidopsis thaliana nossen
  unsure (1)..(335): unsure at all n locations
tttttattaactctcaattttctacttaaaccgaaataatccaacgcttgggaatttaaaaatttgttcgatcaacccaccnattaaccataatataacaatttctaacttatacctttttcaatttttctcaccttcataattctctattcaattcatcaatatctatactttcacacattttttcccataccttaacactacacatacttatctattaattccattcaatctatattccataactattttcattaataacaatataatctactttttaaaccacaaatatatcttcaaacaaactcttatttttcttttactcactcttctac

SEQ ID NO: 168970 - DNA, 360 bp, Arabidopsis thaliana nossen
aatgatgctagctatgccgacgatgatgaaggatatgagaactttggaacttcttttgattatgagggtcaatccggtgatgttgatgaaaactttggccccaatgatgcagaaccaacatattcaaattttcatgaggttattaccatcgctcttctaatgatcttttttcttaatgaattttatttggtactgaaaacctgatgttttcactttgcaggaagatgaaccagcctccctgcaagacatggattcagatgacagactggagaatgttgatgactatctctttttgtcgttgggaatttcatctaagcaaaattcttgggcaggtcctgatcactggaagtatcgaaaaac

SEQ ID NO: 168971 - DNA, 364 bp, Arabidopsis thaliana nossen
agacatattgccggagaaactctctcggggggtcgcttcttctgcattttctgcttcccaatggcttccagaattgctgattctctcttcgccttcacgggcccacagcaatgtcttcctagggttcctaagcttgctgcttcttctgctcgtgtttctcctggtgtatatgctgtgaagccgattgatcttctgttaaaaggacgaactcatcgaagtagaagatgtgtagctcctgtgaaaaggagaattggatgtatcaaagcggtggctgctccagttgcaccgccttcagctgacagtgcagaagacagggaacagttagcagaaagctatggattcagacaaattggagaagatcttc

SEQ ID NO: 168972 - DNA, 366 bp, Arabidopsis thaliana nossen
gatgggttttaaataatgttagtctccatggagaattagttaattggtatatgattatacttatatgggttatagcgtgaaaaaaagaaacatctactttaagcaacagcagaaagcattaaagaatagataaccccaatttccgagaggaacgttaggagaaagtttttgaaaatttacaaaactttctgttagtagatgcttaatttcatcagtgttttccaagcaattttgaattaaggattaataaaattggtatgtatattatgaaataatgaagatatttcgctatctctagagtctaaagagattagcagttggtgccttggtggttgacaaaagaaaagaagaagagattagcagttg

SEQ ID NO: 168973 - DNA, 329 bp, Arabidopsis thaliana nossen
  unsure (1)..(329): unsure at all n locations
ccacccgttacaaacaataaacttatcttttttattataaaaagaaacaaaactcgagcggtaatttttataattgtgtggtaaaccctcaatttnacccaaaactactaacccaataatgcatatccaacatatcaatatgattcaaaagttattaccatccctcttctaacgatctacttacttaattaactctattttcttccgaaaacctacaataaacactttgcttcaaaaaaaaccaacctccaatctagacatacattcacatgacagactggaaaatgttgatgactatctctttttgtcattgagaatttcatctaatc

SEQ ID NO: 168974 - DNA, 373 bp, Arabidopsis thaliana nossen
  unsure (1)..(373): unsure at all n locations
acgctgcctcctttcgatttcaaatctcagatctagctcaacaatggcgttgctcgtcgagaagacctcaagtggccgtgaatacaaggtcaaagacatgtctcaagccgatttcggtcgtctcgaactcgagctcgccgaagttgagatgcctggactcatggcttgtcgtaccgaattcggaccttctcagccattcaaaggcgctagaatcaccggatctcttcacatgacgatccaaaccgccgtactcatcgaaaccctaactgctctcggtgctgaagtcagatggtgttcctgcaacatcttctccactcaagaccacgccgncgcagccatcgctcgtgactccgccgctgttttcgcctggaaa

SEQ ID NO: 168975 - DNA, 375 bp, Arabidopsis thaliana nossen
cgcggcctacacatattgccagattaaactctctctgggggacccttcttcctgcacgggcgcatttttatgggttgggagaattgctgattctctcttcgccttcacgggcccacagcaatgtcttcctagggttcctaagcttgctgcttcttctgctcgtgtttctccgggggaatatcctgagaagccgattgatcttctgttaaaaggacgaactcatcgaagtagaagatgtgtagctcctgtgaaaaggagaattggatgtatcaaagcggtggctgctccagttgcaccgccttcagctgacagtgcagaagacagggaacagttagcagaaagctatggattcaaacaaattgaagaaaatcttcc

SEQ ID NO: 168976 - DNA, 367 bp, Arabidopsis thaliana nossen
tcctgcggtaataaggttacagtatatctatctataagaagagttttcaaacacggcgattgacgatctggcgagacatgaatgtctaaagctttagcttattatcttttttatttacagggttctattacatgtttactatgagtatgatgcgggaagaaacctgatcatatcgaacggaatgtggccaacagtgagagttggatggagatatcagcggcctgcttcaatgtccagtattgctacattcctgatactatcatagccaatgctgctgctggtttcgccttgtgctgataatttttgaacaccaaccaagtgctcagtatcctcctgttcaggatactcatctgaccacttatgtttg

SEQ ID NO: 168977 - DNA, 255 bp, Arabidopsis thaliana nossen
ttggggcacaacataccttggggtctgttagaatttttgccggaaaaaatggagattgcagcaaagagtaactcgaaacctatgtattcatgggggggggatagtcacaatacccccaagaattctaaatggcttcaggacaatctcgcaggtatgtttctacttctactgttatcttatttgcaatggtctaaatttgatttcttgctttagcttgctcttttgttggcctatgatattttcatcgttaagctg

SEQ ID NO: 168978 - DNA, 367 bp, Arabidopsis thaliana nossen
tttctgtttggaatcttggatctttctttctgagatcattcgtcttttgtactgattttgagagatgggattgttgtttgtttaccgatccgtcgccgtggatttttgttttccgatgacgatcaaagatgagtcggagagttgcggtagcagagccgtcgttgcttcgccgtcacatgaaaaccctagacattaccggatgaaacttgatgtctatagtgaggttttacagcgacttcaagaatctaattacaaataagccactcttcctgatttcgaggatcaacttttggctccatttcaatcgtcttcctgctcgatatgctcttgatgttaaagtctagagagcggaagatgttctcacaca

SEQ ID NO: 168979 - DNA, 367 bp, Arabidopsis thaliana nossen
gccatctttgttctcggccacgactgtggacatgggagtttctcagacattcctctactgaatagtgtggttggtcacattcttcattctttcatcctcgttccttaccatggttggagaataagccaccggacacaccaccagaaccatggccatgttgaaaacgacgagtcatgggttccgttaccagaaagggtgtacaagaaattgccccacagtactcggatgctcagatacactgtccctctccccatgctcgcatatcctctctatttgtgctacagaagtcctggaaaagaaggatcacattttaacccatacagtagtttatttgctccaagcgagagaaagcttattgcaacttcaa

SEQ ID NO: 168980 - DNA, 250 bp, Arabidopsis thaliana nossen
ggttcaatctgttggggtagaaacgttgtcgtttcgataaaggcagccatttattgaaacgttgtcgtttagatgcctctcatttttgttgaaagccctagaaaatggaattagacgtttaaattgatttcatctttctcagcttttgctaaacgcaaataaacaggtttttttttgaggctgacgctaacgtgcaatgcaaatgtaatattcaaaagaaggatttaaagctaatatgctcgaatcaatg

SEQ ID NO: 168981 - DNA, 218 bp, Arabidopsis thaliana nossen
aaagttagggtgatttggtttgtctacagtctatttgtttccaggtaatttgttagatagattgggagagactgagactgaggattttggtgcacaacatccttgtggtctgttagaatttttgctggaaaaaatggagattgccgcaaaaagttactccgaacgtatgttttcatggtggtgggaaggcacaattcccccaagaattctaaatggct

SEQ ID NO: 168982 - DNA, 335 bp, Arabidopsis thaliana nossen
caaaaaccttgaaacctttaataaatcgaaactatggctaagctcattctcgttttcgcaactcttggcctcttcatcctcctagccaacgcatccatctaccgcacagtggtggagttcgaggaagatgatgacgtgagcaacccacaacaaggtaagtgccagagggagtttatgaagcatcagcaactaagaggttgcaagcaatggatccgcaagagagctcaacaaggaagaatcggatacgaagctgatgactttgagctcactcttgatgtcgatcttgaggacgatgagaacccaatggggcctcaacaacagtcatctcttaaaat

SEQ ID NO: 168983 - DNA, 231 bp, Arabidopsis thaliana nossen
atgctaccacataatatcctctatcgatctaagctaaatgtctatctatcataagtgtaacagatggctgacgagaaaatcagaatcagactcaacggtttccgaagaatcagtcgattggatgctagagttgaccatcagagggatgatgttatgctaaggcatgttaacgatcctctcattatcaccgagtacatgacctacatgtacaagaaggacacgacacacaga

SEQ ID NO: 168984 - DNA, 395 bp, Arabidopsis thaliana nossen
gaaggaagaagatccagacgaagtggtttgccttcagggaacgagagagagaaagagattttaacaaacgatgtcgctgaggccgagcacacgcgcggagctaaggaagaagatatacaagacaggcgtcgatgccgatgaggccaggcggaggagagaggacaatctcgtcgagattaggaaaaacaagcgtgaggatagtcttctcaagaagcgtcgtgaaggaatgatgcttcagcagcagctgcctctcggagctggccttgatggtccccagaccgctgccgccgttgagaaacgattagaaggtatcccaatgatggtacaaggtgtttattctgatgatcctcaagctcagctagaagcgactacccaatttagaaagttgttatcta

SEQ ID NO: 168985 - DNA, 393 bp, Arabidopsis thaliana nossen
ctcttgcgtgttcactgtctcctcggtgactaccacactgctctgcaaatggttgcagcccattgacatcactcagccaggtgtttacaccagtgtcattggttgccatatcgctactatctaccactatggatttgccacccttatgttgcggaggtatgtcgatgctgttcgtgagttcaacaagattctcctctacattttcaagactaagcagtaccatcaaaagtcacctcagtacgagcaattactcaagaagaatgagcagatgtacgctttgcttgctctctccctctccctctgccctcaaactaaactcgttgacgagtctgtcaactctcagctgcgagacaagtatggtgaaaagatgatgaggatgctgaggtctgacga

SEQ ID NO: 168986 - DNA, 396 bp, Arabidopsis thaliana nossen
gtgagtgagagagtatggagagaagtactccggtgagaaagccacacacatccaccgcagatctacttacttggtcggaagttccaccgccggattctccttcctccgcttctcgctccgccgttcgttcccaccagccatcggatgggattagcaaagtggtgtttggtggtcaagtcaccgatgaagaagttgagagcttgaaccgcaggaagccttgctcagaacataaaatgaaggagataactggcagtgggatcttttctcgtaacgaaaaagatgatgcgtcagagccattaccagtttatcagcaagcagttaatggtataagccagatatcatttggtgaagaggaaaatctatctcctaaaaagccggctactgtacctgaagtgg

SEQ ID NO: 168987 - DNA, 382 bp, Arabidopsis thaliana nossen
ctcaagcgacccctctgtgcctatctccgccgcggagatccatcgtgttttctacttctgctggtgtccatggattctgtcgttgaatccggttggaagtaccttgttacgcatttcagtgactttcaactggcgtgtattgggagttttatacttcatgaaagcgtgtttttcttgtctggactcccttacattttcctagaaaggactggttttctgagcaactacaaaattcagaccaaaagtaatactcctgaagcccagggaaaatgcattgctcgactattactttaccattgctgcgtaaacttgcccctcatgatggcgtcgtatcctgtattcagattcatgggcatggaaagcagttttcctctgccgtcct

SEQ ID NO: 168988 - DNA, 407 bp, Arabidopsis thaliana nossen
attcccggcccagacccacccgtccgaaacaaatcaaaaaatggatttttgttcaagaatgaaatcttattggaggtgtccatatacggttgatgcgtccgaaccatatcacatcccagatctgatgaaatacgatgaattgagacggtattttgtaaatacgtaattatcttgaatatattaactatttctttattttccgatcgcctgtaagggacaaaagaaacatctcgagctttcttcaacaatctctgatccctactggacctctcaataggatacgcacccagatgatgttctgaccatctgtcagagaaaaactaacgaatggctcttgtaccgattcccaagaaattcttcgctttctttcggaagcagattattattcattctcttctaacgttccg

SEQ ID NO: 168989 - DNA, 364 bp, Arabidopsis thaliana nossen
gtcctgctttgttggttgagaatggaaagtttcttctttctgcaaaacgcatgggaagaactacatacaccgagtacgtgatctctatgcacgccgacaccatttcgagatcaagcaatacctacattggcaaaatcaggtctaattttctggggacgaagtttataatatacgatacacaaccagcatacaacagcaacatcgctcgagcggtccaaccggtaggtcttagccgcagattctactcaaagagagtctctcccaaagtacctagtgggagctacaaaattgcgcaggtttcttatgagctaaacgttcttggtacccgtggtcctaggagaatgcattgtgcgatgaactcaat

SEQ ID NO: 168990 - DNA, 374 bp, Arabidopsis thaliana nossen
aaataaatcaaaaaatggatttttgttcaagaatgaaatcttattggaactgtccatatccagttcatccttcggaaccatatcacatcccagatctgatgaaataggatgaattgagacggtattttgtaaatacgtaattatcttgaatatattaactatttctttattttccgatcgcctggaagggacaaaagaaacatcttgttctttcttcaacaatttctgatccctagtggacctctcagtaggattcgaacccagatgaagttctgaccatctgtcagagaaaaaagaacgaatggctcttgtaggattcccaagaaattcttcgctttcttccggaagcagatgattattcattcgcttctcac

SEQ ID NO: 168991 - DNA, 321 bp, Arabidopsis thaliana nossen
aactaaatcaataaatggatttttgttcaagaatgaaatcttataggaggtgtacatatgcggttcatgctttccaaccatatcacatcccacatctgatgaaataggatgaattgagaccgtattttgtaaatacgtaattatcttgaatatattaactatttctttattttccgatcgcctgaaatggacataataaacatcttgttctttcttcaacaatttctgatccctagtgaacctctcaacaagattcgaacccagatgaagtactgaccatcttttagagacaagagatcgaatggctcttgtaagattccc

SEQ ID NO: 168992 - DNA, 336 bp, Arabidopsis thaliana nossen
gtgtggagtatgtagatataagcaggaacagcttctcgggttcacttgatctgggtctagcaaagtcaagctttgtttcctcgattcgtcatttgaacgtaagtgggaattctttggtaggggagctatttgctcatgatggtatcccctttttcgatagcttagaggtgtttgatgctagcagcaatcaattgtctggttctgttccagtcttcagctttgttgtctctctcaagattcttcggttacaagacaatcagttgtcggcttctttaccaccgggccttctgcaagaaagttcaaccatcttaactgaccttgatcttagcctcaatc

SEQ ID NO: 168993 - DNA, 388 bp, Arabidopsis thaliana nossen
ctttctctctctctttttctccgcggaaggaatctcttcttctggttgcgtttgagtccgttcgaaaacaaaagaaaagagagagatggcggaagagaagaaagctccaatcagtgtctggactaccgtgaagcccttcgtcaatggcggtgcctctggtatgctcgctacttgcgttatccagccgatcgacatgattaaggtgaggattcaacttggtcagggatctgcagcaagtataaccaccaacatgcttaagaatgagggcgttggtgccttctacaagggattatctgctgggttgctgaggcaagcaacttacacgacagcccgtcttggatcattcaagttgctgactgcaaaggcaattgagtctaatgatggaaag

SEQ ID NO: 168994 - DNA, 350 bp, Arabidopsis thaliana nossen
catatctctctctcactttcgaatatatcttaagataacagagacacatactcttaagtttggtgaagaataagaagacaatgacgaaggaagtggttggtgataagagatctttctccgggaaagactatcaagacccaccacctgaacctctattcgacgctactgagcttgggaagtggtctttctacagagctctcatcgctgagttcatagccactctccttttcctctatgtcactattatgactgtcatcggttacaagagccagaccgatccagccctgaatcctgaccagtgtacaggcgatggcgtccttggtatcgcatgggcctttggtggcatgatc

SEQ ID NO: 168995 - DNA, 377 bp, Arabidopsis thaliana nossen
gaaaaaatggcaataaccaacaaattaatcataacacttcttctccttatctccatagctgtcgtccactgcttatccttccgtgtggagatcgacgagttcgagccaccacagcaaggagaacaagaaggtccccgtcgccgtcctggtggtggctctggcgagggatgggaggaagagtcgacgaatcatccataccacttcaggaagcggagtttcagtgattggttccagtcaaaggaaggttttgtgagagtgctgcctaagttcacaaaacatgcaccggctctcttccgaggaatcgagaactacagattctcgttggtggagatggagccaacaactttctttgtgcctcaccatttggatgccgatgc

SEQ ID NO: 168996 - DNA, 357 bp, Arabidopsis thaliana nossen
aagagtttcattgaaaatttcaagaaccctagttaataacgataatgggttcgagagttttggcttccttctttgttttcttaatcttcacggtcatcacattgcctcccacgatccaagcttgcactccttgtactcgtcctcatcctccggttccgaaacctccacaacacggcggtggtggaggtggtggtagcaagccgcctccacatcacggtggaaaaggtggtggtaaacccccaccccacggcggaaaaggtggaggaccgccgcatcatgtgtgaggtagaggaagatgattcaaaatctcgacgttagttatacctatgagtgtaatgtagtattcttcacaaaaca

SEQ ID NO: 168997 - DNA, 391 bp, Arabidopsis thaliana nossen
cggacgcgtggggagatttgtaataatcaaatcatggggaagagaagaggtgtctccgccgtgaacgttgttttcgggtggctgcgacaacaatcgaacaaggttaaaatagctttaggaattatcatctctttgatcctcgtcgttcttctgaaattcaccgttaggaatcacaatcactttttcatcgcctccgagctcatccacgccgccggaatcttgatcctcatctacaaactcactcgccaaaagacttgctccggtctttctttaaaatctcaagaagtgacagcaatatttctagcggtgagattgatatgcagcataaacatggaaggtgatatccatacagttctcgatttcgccaccttggtttcgactctatgggtca

SEQ ID NO: 168998 - DNA, 390 bp, Arabidopsis thaliana nossen
ggtacattggtgtgggtgaggcagaggaagatcaaatgttctactacttcatcaaatctgagaggaatccagagaaagaccctcttcttctctggttaagtggaggtcctttctgttcttcgttcactgctcttatttatgagaatgggccaattgctttcaaggctgaggaatacaatggaagtatcccctctttggtctctaccacatatgcatggactaaggtggcgagcattctctatttggatcagcctgttgggactggcttctcctactccagaaatccacttgctgatataccaagtgacacaggggtagctaagccggtcaacgagtttcttcataagtggctagacaaacatcctgagttcttatccaatccgctctatg

SEQ ID NO: 168999 - DNA, 395 bp, Arabidopsis thaliana nossen
caaacattttcacaccgagagagaaagaaaatgccagatatgctgaactggtgtggttggtgcacttggtatgcattctacaccaatgtcacagccaaagacgtcaagcaaggtcttgagagcctcaaagctggtggggttactccaaagtttgtcataattgatgatggatggcaatctgttggcatggatgagaccagtgtagaatttaacgctgataatgctgccaatttcgcaaaccggttaactcacatcaaggagaatcacaagtttcaaaaggatggcaaagaaggccaccgggtggatgaccctgcattgagtcttggacatgttatcacagacattaaggagtaatattcactcaagtatgtttatgtttggcatgcgataacccg

SEQ ID NO: 169000 - DNA, 356 bp, Arabidopsis thaliana nossen
tgcagacaggattcccgaagctcatattcttgaaatggcagaacgatctgctggaaatcagaaactggtgatttgggaaaactatgttgaaggagaggaagtagtaaacggtagttctaaagtagaaaccaggcagaaggaaacactaaaggttgttgttacggaagtacttggaggcggtcgtttctatgttcagactgttggcgatcaaaatgtagcttcgattcaaaaccagcttgcagctgtgagtcttaaagacgctcccattattggatcgttgaatcctaagaatggtgacatctttcttgcaaaatttatcctggataacttctggaactcggcaatgattgttaatg

SEQ ID NO: 169001 - DNA, 241 bp, Arabidopsis thaliana nossen
aatcggactacgtgaagcgtccggtttcgagaaccggcctcggtttgatactgaagaaattggttgaggtggagaaagttgaaatgaattggaatccgtatggaggaagaatgggtgagatcccgagttcgaggacacctttcccacatagaggaggcaatttgttcaacattgaatatatcatagactggtcagacgctggggatgtttgggagaacgatcgtttggtacttgcaacacg

SEQ ID NO: 169002 - DNA, 412 bp, Arabidopsis thaliana nossen
gtaccggaacggaaggcccgacccgacccacgcgtacgatctcactacaatcccttagatcttcttttcaaatttcaaaggcggccggtgatgtttagtgtgggtgcttcattcaaacactagcatgggccactgatgacagagctcttgagactgccttcactcaatacggcgacgttattgattccaagatcattaacgatcgtgagactggaagatcaaggtgataccaattcatcacctaccacgatgagaaacccctaatggatccaaccgatggaatacaccgacgagaactacatgtcccaaacatgactcataacaaggctccgtcacgatgaccctgcattgactcttgcacatgttatcacagacattaagagtaataattcactcaagtatgtttatgttt

SEQ ID NO: 169003 - DNA, 394 bp, Arabidopsis thaliana nossen
ctctctctctcaatctctcaaaagatctccggtaacgttttaacgtcggtgaaaaaatgcggttgttgacggcggttaattcactactgaaacggaacaattatcttcttccgcgccatggctcctcacaaacagcagctcagagaacatcctccgtccgcgagaccgagaccgaaacaaaacttccgaaaatgcccccgttcaattattctccgccgccttacgacggtccatctacggcagagatcatcgcaaagcggcgagagttcctcagccccgctctttttcacttctacaacacacccttaaacattgtggaggcaaagatgcagtatgtgttcgacgagaatggacgtcgatatttagatgcctttggaggaatagcgacggtttc

SEQ ID NO: 169004 - DNA, 390 bp, Arabidopsis thaliana nossen
tccagcttgccttacagtttgtctcacgcttctcctttaatggcgtcgggtcttaagcttttgtgctggtctttcttcttcttctctactctttctctctatttcaaaccttcgatttctttccttttttgcaaaatcttaaaatcaaccaagacaatggaaatgaaattgctctttacatcggctttcacccaaatgttccgctactcgaaccatatggatcaagccagcaactgccaaagcacccgcaacaaaattataaagatgatgaagaaagaagaattcccaagtggattccaagtccctcttcactaccctaaatactccaagtctgattacgaagttatcgatgatctccgccttgacttgctcctcaaacaatatggattc

SEQ ID NO: 169005 - DNA, 399 bp, Arabidopsis thaliana nossen
cccaaaacacattttgttttttgtttcccatctaaaatgcgtatgagttgtaacggatgtcgagttctacgaaaaggctgcagtgaaaactgtagcataagaccttgtcttcaatggatcaaatccgctgaatctcaagccaacgccaccgtcttcctcgccaagttttatggccgtgcggggctcatgaacctcctcaacaccggtcctgaccacctccgtcctgcgatatttagatcattgttgtacgaagcatgcgggaggattgtgaatccgatatacggatccgtggggttattgtggtcaggaaactggcatctttgtcaagcggccgttgaggcagtaatgagaggctcacccgtgactccgatcgcatgcgacgcagcggttactggtcaa

SEQ ID NO: 169006 - DNA, 391 bp, Arabidopsis thaliana nossen
cactgtaatcccttagatcttcttttcaaatttcaatggcgtccggagatgttgagtatcggggctgcgttagaggtctaacatgggccactgatgacagagctcttgagactgccttcgctcaatacggcgacgtcattgatgtccaagatcattaacgagcgtgagactggaagatcaaggggattctgattcaaaaccttgaaagatgataaaaccaatgacgatgcgaatgacggaatgaactgacaggagatcgcggacgtagcattactgaatacgaggctaagtgacgatgcagtcggagatgtcgacggctctcctaatacaaaaatatgaaataaaaaaaatctactgtttcaatttaatctctatcgaatttgaatatcag

SEQ ID NO: 169007 - DNA, 395 bp, Arabidopsis thaliana nossen
ctcctgtatcatcactcttttacttccggcgatctctctccgacggccaatggacgccgtcctttactctgttccactctccttcactcccctacgcgaatcatcctctccttcctcgccgtatcttcttctgccgaggtttctctccgttcagccatgtcacaaattcaccttctctcgaagcttcccttccaaatcccggattccctcagcttcttccgccgccggttccacgttgatgacgaattcctcttcgccaagaagtggagtgtacactgttggtgagttcatgacaaagaaagaggacttgcacgtggtgaaacctacgactactgtggatgaagctctggaactccttgtggagaatagaatcactggatttcctgtaattgacg

SEQ ID NO: 169008 - DNA, 387 bp, Arabidopsis thaliana nossen
ccacgcgtccgctcctgtatcatcactcttttacttacgccgatcactctcccacggccgatggactccaaccgtgacgctgttccactctccttcactcccctacgcgaatcatcctctccttcctcgccgaatcttcttctgccgaagtcactctccgttcaaccacgtcacaaattcaccatctctcgaagcttcccttccaaatcccggattccctcagcttcttccgccgccggttccacgttgatgacgaattcctcttcgccaagaagtggagtgtacactgttgctgagttcatgacaaagaaagaggacttgcacgtggtgaaacctacgactactgtggatgaagctctggaactccttgtggagaatagaatcact

SEQ ID NO: 169009 - DNA, 391 bp, Arabidopsis thaliana nossen
aaaccaccgtcgatgtcatcagtaatcttttaaccaacacccttctttggtttacattctgttctttggtctaaaacatgtaatcaagaaaaagaactaactttatctgttttagctgagcttcttggtttcgatgactacattacaccgtattccgaagcaaggggagaagatatcctaagaggagtaaactacgcttctgcagctgccggaatccgagaagaaactggtcgacaattggtaatttagtccttaaaacagaatacacaattttggtttgatgtcatgagatatcatttagacttcagtttttaaaactaggaaacataaatcttttgtccatttttggttcagggagctagaataacatttgcagggcaagtagctaatc

SEQ ID NO: 169010 - DNA, 394 bp, Arabidopsis thaliana nossen
tatatatatatatatgataaaattagtgatcatttattcgtttctcaatgtatgatttaaagagccatagttcttctttagccaaaaaaaaaaaaaaaaagattgaaccataattctttcattaacaacaatgcagataatttcgttgatgatggttagtgtcctttttagttaatattggttcattactgaaaataaaataaactgatatgctacggctacctgttcacttttattttcaatttatgacaaaagctatatagcccatatgttctccaaggcccaagatatgtaaaattaggcctatgaaccaaacactggtttaataagaccggtaagcacaagttggattcggacattatttagaacaaaaccggttcaagagaatctacag

SEQ ID NO: 169011 - DNA, 366 bp, Arabidopsis thaliana nossen
cttcattatcatcatcaatggatgagataaaaccaaagaaagaagagaatttcaaacgacgtggtgacgtcaaacccatttgccgagaaactggagaccacgtccattatttttcaacatgcaaaaccaagcccaaacccacgcgtactcatcacgcgccaccaccgatcctcgactcaatcttcaaagtcactcacaagccacactactacgaatgcatgaagaatcacgccgctgatatcggaaccaccgcttactactgctgcggcgagtttgttagctccaccggtgaagaagattctttaaactgcgccgcatgtggctgtcaccgtaacttccaccgtgaagagttaatcccggagaacg

SEQ ID NO: 169012 - DNA, 396 bp, Arabidopsis thaliana nossen
ggaaactgtaaatgagagtttctttctcacatacaccttcgatcacatgacattgtcatctcggatgcatcaatatggaaatatttaattgatatctgaagccatgattatgattcgatttttgtttatttttaatacaaattgattcttaatacaaagagaatgtaggatcttgttatgttctcgaatcaaaaaaaatattgaaacgcccttttagttattactttgcaaaaagactctctttctctaggcaggaacgcaatatatttcctatgaaatatatagaaacaagaagattcaataagagatatcgacggatttcctaatacaaaaatatgaaataaaaaaaatctactgtttcaatttaatctctatcgaatttgaatatcagaatag

SEQ ID NO: 169013 - DNA, 361 bp, Arabidopsis thaliana nossen
ggttgatatgggaaatcctctaagtgttccagtcggcggagcgactctaggacgaattttcaacgtgcttggggaacccgttgataatttaggtcctgtcgatactcgcacaacatctcctatccataaatccgcgcctgcttttatagaattagatacaaaattatcgatttttgaaacaggcattaaagtagtagatcttttggccccttatcgtcgtgggggaaaaattggactattcggtggggctggcgtgggtaaaacagtactaattatggaattgatcaacaacattgctaaagctcatggtggtgtatccgtatttggtggagtaggcgaacggactcgtgaaggaaatgat

SEQ ID NO: 169014 - DNA, 358 bp, Arabidopsis thaliana nossen
  unsure (1)..(358): unsure at all n locations
gatgaaaagcttgatcggactggttcaggacccgggtcggattcgggtcgtgatgggtctgttgagttgtttgcagatgttgatgttgatgtcctcgatgaattgcttgaaactctcaaaaaatatcgcttgaggtccaaagtggatattgaaaacgttgcagaggagttttcgtgttggcagcgttacggtaggaatcttactggatcatcatctgttggttggggtggtggtgttgatcgtgctggtgagtctacagctagtggtnataagtatggatggcaatggtataaggatccgaggttggagtgtctcggttacagaagtatctttccgtctgatgcaactccgcctttag

SEQ ID NO: 169015 - DNA, 394 bp, Arabidopsis thaliana nossen
ctcatatttgaaacactttgaagaaaatacataacacttttaaattccaaagcacaaaaaaggaatgtggagaggcattttttcatcctccttataataacctcatggttgtcggagaaaattacttcacttgctgctgattctcgagtattcgatcgtcatggttttcccgataattttgtttttggaacagctgcatcagcttttcagtacgaaggtgcaacaagcgaaggtgggaaatctccatctatatgggattacttcagccacacttttccagaaagaaccagaatgcagaatgcagatgtagcggtcgatttttaccatcgttataaggatgacatcaagttgatgaaagagctaaatatggacgctttcagattttcgatttcgt

SEQ ID NO: 169016 - DNA, 394 bp, Arabidopsis thaliana nossen
ggataaaagtgaaattttgtagttatgatcacaaccaagaaaatatatgaggctgatactattgatccagtccaatcttgtttatttatgtaatagaccaatgaaagattctgcttgtggtcgacacttttttgtaatgatgattttgttttgggtaagtttatgtatatacagtggcacagagacagaataactattaaatgatataaatattattttttagtcaaaactttcttacttaattgaaaatgaaataaaatatttagcagcaaattatatcttataaactcacatgcttactcatatcttgtaatcgttttatcatttgcttcgttttatgcagtgttaataacatttgcaacggcaaatcgtcttttgagtaaaacatgtattg

SEQ ID NO: 169017 - DNA, 395 bp, Arabidopsis thaliana nossen
ctcctccaatccactccccttgcttaaacatttaaacacctcttgaccagaaaccaacggagagatattgtcagttctgccgtcaacttctaattggagtagatttttacatcccctggctttgagggtttttagattaggatttctgctaattacacgagcaagagccatccaagatatctgtaaaaatctccaagcattagtggggctaaattactatggactactgaatcagagcatcacatgaatgtggctatgtcctgtggaagtaagatatataatactataactaacgaatgaatgactgaccgtggtatttgaaatatcaagtgcttccaaggtagagccggggaattcacatagcacactgtctgaaacttttgtatcccttaagc

SEQ ID NO: 169018 - DNA, 386 bp, Arabidopsis thaliana nossen
  unsure (1)..(386): unsure at all n locations
ccgaagatgatccagactgtgtttacacattctacctgagaaccggatcgatctggaaagccggtacggattcgatcatcagcgcaagaatctacgataaggacggtgactacatcggaatcaaaaaccttcaagcttgggctggattaatgggacctgattacaattacttcgagaggggtaatctcgacattttcagtggaagagcaccgtgtttacctagtccgatctgtgccttaaacctaacctccgatggctccggcgatcaccatggttggtacgttaattacgttgaggtcacgacggctggtgttcacgcacagtgctcgacgcangattttgagattgagcaatggctcgcgactgatacttctccttatgagctc

SEQ ID NO: 169019 - DNA, 386 bp, Arabidopsis thaliana nossen
gttctgaagagactctcgccgtctaatgggaagctgttggtctgatggctcttacgctggtggaggaatggtcggtgttggtggtggggctaattcctccgccgccactcctaacgacgccgttgactactatctcaagtctcgtggctacaatggcctcttttctcagatcgagttatctttctctgcttccaatttgcgagaccgggacgtgatttcaaagagtgatgcaatggtggttgtttatacaaaaggaagagatggaacacttgctgaattgtttcgtagtgaagttgttttgaattctttgaatcctaaatggattaagaattttactattggttatcagttcgagattgtgcaaacattgctgtttcgtgtctatg

SEQ ID NO: 169020 - DNA, 387 bp, Arabidopsis thaliana nossen
taagaaagcagcacgaacaccaactcttaaggaaaacatctaagttatggttaagtaatggcatgcaagttaaagctacgtgtccagcttaagacactcaagtctcacatctgtccctttttacttcgacttcgcttcttttggcttcttttaaactctctctatctctctctttcttcttcacactttgttgttaatttcaagtgtttgatcataatggcaacatcagctcgtagagcatacggtttcggtagagccgatgaggctacacaccctgactccattagagcaactttagctgagtttctctccacttttgtcttcgtctttgcagctgaaggctctatcctctctctcgataagttgtattgggaacatgcggctcat

SEQ ID NO: 169021 - DNA, 386 bp, Arabidopsis thaliana nossen
aatacacttcactctgtagggagttaaaatcacgcagccatgtggtgagcacaaagcgaactattctgtcgccttttactaaagaataccgtgtgctctccacgctaagtggcatacgcctatttttggagggctctcactttacagtgggacccaacatctaccctagtgtaaactttttatgtgtggctaatggtctatcaatgggctcaaggcaccaaagctcattaaatgtggctatatatgttttgctatatcttcttaatttcttaaatgtggctatgtttctctctccgatattgtgagaattacccttatgttattatgtattaacgatctatcgaatgatatatccttttcttcttgttatgtcgcgttgattccac

SEQ ID NO: 169022 - DNA, 392 bp, Arabidopsis thaliana nossen
caaatagttactgggaagcagagctacccccaaactatgatagagttggaattgagaattttatacgtgcaaagtatgaagagaagagatgggtttctagaggggaaaaggctagatcacctcctagagtcgagcaggaacggcggaaatctgtggagagaagtgggccgggatatgagcatggacatagtagtagtcctgtaaatttgtttgaggagaggaaaactattccagcatctagaacaagaaataatgttgctgcaacgagaataaatcttcccgtgcctccccaaggacccagtcaggttataaagccacagcagaaaatggagtctgcagctactccagtagagagggagaaacaagcagtaaatgttgcaccagcatcagat

SEQ ID NO: 169023 - DNA, 223 bp, Arabidopsis thaliana nossen
cagacaacaaatagaaagaacattttcccccacactataactacaatgcgtggagtacacatactgatgcaaccgaccaacaacagatctcctcaactacatcttcataaccacacacaacacgccacatcgttctctaacctccgtctattccaccacctatacaccacagattactactatgcaattatcagcttcccaccacctcaggttcatgtctata

SEQ ID NO: 169024 - DNA, 213 bp, Arabidopsis thaliana nossen
taagaaagcagcacgaacaccaactcttaaggaaaacatctaagttatggttaagtaattgcatgcagtttaaagctacgcgtccagcttaagacactcaagtctcacatctgtccctttttacttcgacttcgcttcttttggcttcttttaaactctctctatctctctctttcttcttcacactctgtggttaatctcaagtgtttgatc

SEQ ID NO: 169025 - DNA, 391 bp, Arabidopsis thaliana nossen
caactcctcaatggcacgaaatcgggagggtttggttttggtgctcgatgtaggtcctgcgatgcgtagtgttctccctgatgttgaaaaggcatgttcaatgctacttcagaagaagttgatttacaacaagtatgatgaagttggaattgttgtctttggaactgaagaaactggaaacgatcttgctagggagataggtggatatgagaatgttacagttttaaggaatatcagagttgttgatgaattagcggcagagcatgtgaagcagcttcctcgaggaactgtagctggagactttcttgatgctttaattgttgggatggatatgcttataaagatgtatggtaatgctcacaaggggaaaaaacggatgtgtctcatcacg

SEQ ID NO: 169026 - DNA, 378 bp, Arabidopsis thaliana nossen
ggtgaatggacagctcagatgcccgttttgtgcaggcaagaagaagcaagattacaagtacaaggagttgtatgcacatgctactggggtttccaaaggttctgccaccagaagtgctttacagaaggctaatcatcttgctttagctatgtttttagagaatgagcttgctggttatgcagaacctgttccacgccctccagttgttcctcctcagttagacgagactgaaccaaaccctcataacgtctatgtctggccatggatggggattgttgttaaccctttgaaagaagcggatgacaaggaacttctacttgattcagcatattggctgcagaccctttccaaattcaagcctattgaggtgaatgcctt

SEQ ID NO: 169027 - DNA, 388 bp, Arabidopsis thaliana nossen
caaattttcgcgctcgattcgtcttttctgtatctcccggagctgcgggacttgagcatgatgaggagatgaacagcttgttcatcaggattgccgtgacatgcaccatactgtggaacatgtgagacgcggagacaaagtttgatatcactacaggttctggaaactgaatctacatctcacgagaacagccacttgggatgataaatcttttggacatcgccaactaccaaaaccaactcaactcgaaccctagagtgttccatttgggcggaaacaaccaacatggaagctttggcggttcacagcaacaacaagaacagaaaaacttgtggagcgggttcgacgcacaggtcatagctcaagcattgaaaattgacgttcagtt

SEQ ID NO: 169028 - DNA, 383 bp, Arabidopsis thaliana nossen
gagaaagagagagaaagctttagggtttcaaaaaaaaaaaactgagaccctttagaaatctcctgacaggaatttttttctcaatcgctatagaaaatgggagtcatgatcaatcaccatttcctcgcttttatcttcggcatcttaggaaacgtgatatccttccttgtattcctcgctccagtgccaactttttatagaatatacaagagaaaatcgacggagagtttccagtcgctaccgtaccaagtgtcgctatttagctgcatgctatggctctactacgcattgattaagaaagacgcttttctcctaattaccatcaactcctttggctgcgtcgtggagactctctacatagccatgttcttcgcttacgccac

SEQ ID NO: 169029 - DNA, 401 bp, Arabidopsis thaliana nossen
cgcaatttagcctcttcataagagagaagtcctctcagagaaacggcagccacatcaaccaacccaaacatcgaaagagagacacttttctctctctctttctctatctccttccaatctctctagggttttcgttacaacggcgaaaagatgttcggtagaggaccctcgaagaagagcgacaacactaagttctacgagatcttaggtgttcctaagagcgcatcaccagaagatctcaagaaagcttacaaaaaagccgctatcaagaatcatcctgataagggtggagatcccgagaagtttaaggagttagcacaagcttatgaagtgcttagtgacccggagaagcgtgagatttatgaccagtatggagaggatgcactcaaggaaagaatggg

SEQ ID NO: 169030 - DNA, 391 bp, Arabidopsis thaliana nossen
gccatggaaaggcttcttcaaccatcttcttcttcttcctcaatttctccttgcaaattcccttcacggacttctcctttccttccccgtctccgctcatcgggtctgagctttgtctcgactcaccggcccgagtcacgccgagtcagctcaatttcctgcaacaattcccagattccgtcactgtatacgcctataggatctaacacaactaacaattccttcaatgggtctcccaaatcggatgaatcgaaacctaatcccggatttctcacacggatcgcgacgtcggcttctgagcagcgaaagacgttatctactggaaccgttatactaatctctgcagtagctgtgcttttgcttaacccgcttcttgcaccacctgctttcg

SEQ ID NO: 169031 - DNA, 382 bp, Arabidopsis thaliana nossen
aaaaagagagagagaacctaaaaagaagagaagagaaagagagatccgaggtgtcggtgacagcaacggtggaggagaaccaccagaaaaatccatcaacgccggcggcggtggaggagaagaagaagaggagatgggtgttttgggatagaaggaggaggagaaacaattacgagataccgtcactgtatacgcctataggatctaacacaactaacaattccttcaatgggtctcccaaatcggatgaatcgacacctaatcccggatttctcacacggatcgcgacgtcggcttttgagcagcgaaagacggtatctactggaaccgttatactaatctctgcagtagctgtgcttttgcttaacccggcttttgcacc

SEQ ID NO: 169032 - DNA, 363 bp, Arabidopsis thaliana nossen
gaagatctcgacgaggtattctatttttgctcggcttgcgatttggctattaatttagctggtggtgggaaaccgctagagttatctatatgccgtccaaagcggcatgagcatactcttgctctgtttccaagacaatctactttacactgcagcctctgtagcttagctgatctaacctccccgatctatatgtgtccgccctgcgattatgtggtccatctaagctgtatcaacttaccgtctctcataaggatatctcgccatcttcatcgtatctcttttacgccttcttttgaccaaggaaattggacttgtcatatttgtcgcggaaagatcaacaatgattgcggatgttattct

SEQ ID NO: 169033 - DNA, 396 bp, Arabidopsis thaliana nossen
ctcttcgttcctttctctctctagatcttaagcccaaatgttgcacaaggcttctcccgctctctctctcttgagctccggctacaccggcggtggaaatctgtttcctccgtcgagaaattcgtcgaatcttctgttttctccgagtggatccaggttttctgttcaggcggcgaaaggaacgaacacgaagtcgttaaccggagttgtattcgaaccttttgaggaggtgaagaaagaaatggagctcgttcccactaccccttttgtttctctcgctcgccacaagttctccgacgattctgaatctgccatcaacgatcagatcaacgtggagtacaacgtctcgtatgtctaccatgccctgtatgcctactttgacagagacaatgtcgg

SEQ ID NO: 169034 - DNA, 390 bp, Arabidopsis thaliana nossen
ctggaaaaaaagagtaaatgggaagcgacgactgactcttcttcctcctgctcgtccacctcttgtgtgggttgttagcactgaaatttgatcagaaggtgttgacggtgtagagcttcacgaaacataaactttcatttcttctagcttcttgatttgctcttaaaggtgcatgttgaagtgattgaaagcgatttacatgtgacttgcagctcggtcagacattatacattacactcaacacgagattggaaaggatgcttgagaatccaaagttcgatttgcacgctgttggcaatcacaacaacgacaacaattactatgccttcacccaagacttttatcaaaagctcggggaagaaggtacaaacatgtctgttgacagtatgc

SEQ ID NO: 169035 - DNA, 392 bp, Arabidopsis thaliana nossen
tcaagcatgtctagactcagggaatgtaacagccaatagtatgaagcacgccgggtttcaaattgatgagtgcagagctacaattatgcacataaaagaaatggtcagaatcacatagatagtttttaaaacagcagatgctttcgatacagaaaagggaatttttattactgaaagtaaatagtggcaaaatgcagcagctaaagttatattaagtaatgctgcaaataggcaaaagatctcgaaagagactaaccgaatgcgttatattctcaagagaatcaacagtgcagtgggcataatcataactcggatagatacaccacttgtcaccagccttaggatgaggtgcgaactgcaaagcatattaacaagtcagacaggaaaagaag

SEQ ID NO: 169036 - DNA, 389 bp, Arabidopsis thaliana nossen
ctctgataaaatcttaaacccacctcgagatcatagtcttcatcaattagccggaaaaaagcacagtgcttgcttcaatcaaaccatcttcgtcttccttctccaccgctatctccggcagcgtaaggcggtcaattcctacgacgctcaatttttctcctttacccatcatcaaaaactgccataaccaaagctttcactctaatgttgtctcccatcaaaagcctctacacatttcatctgcttcgaatttcaaacgtgaggtcaaagtcgaagcttacgaggcagatcgatcccgtccactggacatcaacatcgagcttcccgatgaacaatccgcgcagaaactgaaaatcggaatctacttcgcaacttggtgggcacttaac

SEQ ID NO: 169037 - DNA, 389 bp, Arabidopsis thaliana nossen
ccacaaacagacaatttaattccaaaaaataaaacacaaaatcaaaagatatgaatgccacaaagtttgctgtgcttctcgtgattagcgttttgtgtgccattgtcaccgcaaggcatgtcgaagaagtgtctaaaaagaccaaattaggcacctctcttccaaaaactactaccaaaggcattggagctcagctttctgctgctggtattacttccagcagtagtgatgtctatagctctgctactggtttcaacaatcccaaaggtccagacgctaatggatacgaaagtggctacacaagtaccatcggacaagtcattgcaaagggtcgcaaggcaagagtttcttctgcaagtgcttctaccgccaaaggtgacgctgcagct

SEQ ID NO: 169038 - DNA, 320 bp, Arabidopsis thaliana nossen
tgcatagacagtgaaaatgaatttgagagcttgaattgtatgaccatgagcgttgcctgctgtttgggcgatcaaaggggttgcctacatacgatgacacaaaacacgttgctgaaaaccaagcggaagaagcaaagcacacatgcaattatggaaattgagcacagcatggacagaatgattgtgtacaaactgatgacggccttgatggcgaagaagaagaagaatgctaaaataaccaaggttgaatagggagaggccaaggaggacaaaaaggcggtggtggtggatagtcacgaggacaaagtggcagtgcctac

SEQ ID NO: 169039 - DNA, 269 bp, Arabidopsis thaliana nossen
gttaagctcattaatctcctctttgcaaccttcggggttctcctcgtggttaacggctgccgtgttaggcattcacttggggttcctcctcagctacagaacgagtgtaacctcgacaacctagatgttctccaagccaccgaaactatcaagagtgaagccggtcagatcgagtactgagaccacaaccaccctcaactccgatgtgttggtgtatccgttactcgtcatatataaccacagcgcaataagaacaggccaacctagac

SEQ ID NO: 169040 - DNA, 345 bp, Arabidopsis thaliana nossen
gggcaccatgcgcttggcatgttcccacaggcagctccggatatgtggcagtgtgatctttgcggcaccaagtctggaaagggatttgaggcaacgtttgatgtgcttgccagactaattgaaatcaaatttgcaagtggtattattgatgagctgttatatctggatcaccctcgagaaaacagatttcccaatggactgatgatgttagaatatagaaaagcagttcaggaaactgtacacgagcagtttcgtgttgtccgtgagggccatcttcgcatcatattttctcaagatttgaagatactttcttgggagttttgcgctcggcgtcatgaagagctt

SEQ ID NO: 169041 - DNA, 375 bp, Arabidopsis thaliana nossen
cttccctgaagattccgatgtatcatcagtagaaactttgtcaggaagaatcttggtgtgcacatggagacatgtgtgagtatgtgtgttctctggtcccggaggattacaagtgtgagtatgagtacaagcatgagaatctctcaaaagctcatcgaagaacgaatccatcgaacagctaggtaattcaccacccatgtttgaattcgaaaactcaagctcaccgtcgtccattactcaaaacccagtaacaaagaagtaacctttgactcttttgattgaatcttaaccaaaaagtatgagactttgtgatcaaaaaccaaacaacaacctaattgcagagtgaaaacacaatccaagcgattcagaaccaat

SEQ ID NO: 169042 - DNA, 376 bp, Arabidopsis thaliana nossen
cgtcggattcccgagggttgaaaaaacccttaatctcttttgcggtcactcatgggacccaagatgcctgtgggtcttcacattcaagggggtcaatgccggtaccagatcggggccaagttctgggaaaggggttgcgcccagcaccggatctatcccaccggaaggtacaccgggaaactatatctggtacttgagcgcatcaacgtttactacaatgaagcgaggtgcggtagattcgttccttgtgcagagctcatggatttggtgcctgggactttgggtaggtctcaaatctggacccgtccggcagacctttcgaccttgtaacttcaggctttggttaaatcggggctgggtaacaatctgggccaag

SEQ ID NO: 169043 - DNA, 299 bp, Arabidopsis thaliana nossen
caaaatgttgccttccttcgtttgcgatcattttcgtggtgtctgtaaccccaattacgggtcgaaggcattagcgaaagaaagagacttcctttgaaagagaagagtctcgttggctcggttttctgttcaaatcagcggatttcctcacatttaattgttcaatcatggcggctaccaatgttcatgcggcttgacgagagccttcttattgatccccaaagaggtgatacaagtgtttctcgtggtctctcgcttgagaagaaatttgaggcccttgatagcctggccggacaagt

SEQ ID NO: 169044 - DNA, 365 bp, Arabidopsis thaliana nossen
ctctcttttcgttccgccgtcggtggtcgtacattactctgggacgtcaagcaaacctcaccatgcaactggaccggcgtcttatgcgacggtggtcgtgttactgctcttcgtcttcccggtgaaacgctctccggtcatataccggagggtatttttggtaatttaactcagctccggacgcttagtctccgtctcaatggtcttactggttctcttcctttggatctcggaagctgctccgatcttcggcgtttgtacctgcagggtaacagattctccggtgagattccggaggttttgtttagtcttagtaaccttgttaggttgaatctagctgagaatgaatttagtggagagatctc

SEQ ID NO: 169045 - DNA, 253 bp, Arabidopsis thaliana nossen
ctgcactatatttttcccattttttctcactcaaactctcacacgaaggaggccggcaatttcttaggggattccatcaaccctctcctctgatatacccataaaaacacaaaataaactaaaagataaaaactttggctttagttatagttgattttgtcattcgattcgatttctaattcttctttcaaatcctagggttgtcgatttggattcagtctaataacgggtgtgaaggccaaaggaactaaaa

SEQ ID NO: 169046 - DNA, 224 bp, Arabidopsis thaliana nossen
attattttcactgagcgcatatcatttttgagacaagagactctctcgctctctctgggtctctttggggccccctctctccggcgatggttgttgctatggaccaacgcaccaatgtgaacggagatcccggcgccggagaccggaagaaagaagaaaggtttgatcccagtgcacaaccaccggtcaagatcggagaaataagggccgggattcctaagcac

SEQ ID NO: 169047 - DNA, 110 bp, Arabidopsis thaliana nossen
aacaaatcttaaacggatcactttgtgctgcactacccaaccacaaaggacaccttaacaatgtcttagtcctcccatgccttcgccagaaaggccaacaagctttgccc

SEQ ID NO: 169048 - DNA, 394 bp, Arabidopsis thaliana nossen
aacaaatcttaaacggatcactttgtgctgcactactcagcctcaatggccgcctcaacaatggctctctcctcccctgccttcgacagtgaggccgtcaagctttcccccgccgcatctgaagtccttggaagcagccgtgtgacaatgaagaagactgttgccaagccaaagggcccatcacgcagaccatggtacggatctgaccgggtcaagtacttgggtccatgctgtggcgaatcaccgagctaccttaccggagagttccccggagactacggatgggacaccgtcggactttcaggtgaccccgagacattcgcaaggaaccgtgagctagaagttatccacagcaggtgggctatgctcggagccctatgctgcgtcttccctg

SEQ ID NO: 169049 - DNA, 382 bp, Arabidopsis thaliana nossen
aggaagtgtaagagactgattaaacaaaatcgagactttatagtactcaggtttgtcggaatcgactgagtatcgaaattattgtggtgttttgtgaacagaaaccaaggattaaagatggttcaatctgtgttaatttcgcgtaacaagggtttggcggagcaagatctaactaagcttgatgtaacaaagttacatcctctgtctcctgaagtcatttctcgccaagcaaccataaatatcggaaccattggtcatgtcgctcacggtaaatcgactatagtgaaagctatctctggtgttcagactgtgcgttttaagaatgaattagagcgtaacatcaccattaagcttggttatgcaaatgcaaagatttacaagt

SEQ ID NO: 169050 - DNA, 366 bp, Arabidopsis thaliana nossen
cactatcgtttttcctgctttttcatgcattgaatgatctgatccatgttctaaaaaagggttcttggatcagtaaccgaagcaatggctcggaggtctggaaattgcatgagatgtctagtgatattctcggtggtttcagcattatttgtgtgtggacctgctctttactggaaattgaataagggtttcgttggatctgctcgtagcaccaactccatttgtcctccttgtgtctgctattgtcctcctcctttatctctccttcagattgctcccggtcttgcaaacctctttattacatggtgttgcagtgatgatccaaatcttatataggatatggagtagcccttttttggatctttc

SEQ ID NO: 169051 - DNA, 399 bp, Arabidopsis thaliana nossen
gtctttcaccatctgccagcggtcatggtgggacccatcagactagcgttccaagtaacggtcagttgcatactacacaaggtgtttttgatcactctgttcctcattcgtcgaattgggtatcaagcggtgtttcatctactgtggacactcattttagattgggtttagccgtccagttcctctcgatgatcttacgggaagcaactgcacccttaatgaattctgaagttgtttcatgtgagaaattctcacgatttcaacataagctacaaacagctttggagcaatttcaccagagattttcgctgtctgcatcttacctacgtaatatgatgattctgtcagcatacaaccgagggttactatccatgggacacaatatatttcaggaaaata

SEQ ID NO: 169052 - DNA, 387 bp, Arabidopsis thaliana nossen
tacacttcaacagttctccttttaaatagaaaattgtaaaggactgacccccacatcattttgacaatatccttctctggatctttgcagctttcccatttctccttcaatgtctgcaaataatctataatactaccagaaacaatggaaagaggagttacaatcatgtggacaaacatttcaagtgctcctataatttaaatagagaaaacagcacatactcttgatgatatttctctaaattcgagtaatatctccttttatcagccctcaggcattcctcccgtgaaacgatttgatctggatgagctttaccggagcagacagctgttcccctgaaaccacaatttagattcaaaacggagtcgaatttctgagcataaatta

SEQ ID NO: 169053 - DNA, 369 bp, Arabidopsis thaliana nossen
cggagagtgagagaagagagaaacatttcgagacaaatggccgccgccgctgctcgtcctctcgtcaccatccaaaccttggatggtgacatgtccaccgatcaatcctccaccgtcgtacttcccgacgtcatgacggcgccagttcgaccagacatcgttaacttcgttcacgcccaaatctccaacaacagccgtcagccatacgccgtatcgaagaaggccggtcaccagacctccgccgagtcctgtggaaccggacgtgccgtgtctcgtatccctcgtgttcccggtggtggtactcaccgtgctggtcaagctgcgttcggtaacatgtgtcgtggtggtcgtatgttcgctccaaccaag

SEQ ID NO: 169054 - DNA, 182 bp, Arabidopsis thaliana nossen
aacaaatcttaaacggatcactttgtgctgcactactgagcctcaatggccgtctgagcaatgtctttctcctcccatgccttcgacagtgatgccgtctatctttcccccgcggcatatgaagtacttggaagcagtcctgagacaatgatgacgactgttgtcaagccaaagggcccatc

SEQ ID NO: 169055 - DNA, 375 bp, Arabidopsis thaliana nossen
  unsure (1)..(375): unsure at all n locations
aagaaacttgcagagctttctatctcttatcctcttctctaccatcatttctccctataaatacgccaacgcacataagtgtttgcattcgaagagagttctagcaaaacaaaacaaaacagagcaaacagagtaagtgaaacgatgtctctagttccgagcttttttggaggccgaagaacaaacgtgttcgacccattttcactagacgtatgggatccgttcgaaggattcttgacgcccgggttgacaaacgcacctgccaaggacgtggcagcgttcacaaacgctaaaagggactggagggagacacctgaagcgcatgtgttcaaagcggacgtgcctgggctnaagaaggaagaggtgaaggtggga

SEQ ID NO: 169056 - DNA, 207 bp, Arabidopsis thaliana nossen
aagaaacttgcagagctgtctatctcttatcctcttgggtaccatcatggcttcctagtgaatacgccaacgcacataagtgtttgcattcgaagagagttctaacaaaacaaaacataacagagcaaacagagtaagcgaaacgatgtctttagttccgagcttttttggaggccgaagaacaaacgtgttagacccattttcact

SEQ ID NO: 169057 - DNA, 366 bp, Arabidopsis thaliana nossen
cccttgcaaacttcttgtctcttgggaaagaataatggcgtagttatatcaaaccaacttacccttttgtcaattacataaaattttacgagtttgaatctgaatagtaacttaacaacaatattagtataaacctcactattttatccaactgggccatttttaaaagccccttattttcctcattatttattttggattaaggggtattattaaattaaatagggagggcaataggtcatttaaagattgatgtgacgaatggccgtaatcactctggtggaagttgggttgaagttcgatcatttaaatttaaaacacttattttttatttgaaatatttaaataaaagagtttctaatttta

SEQ ID NO: 169058 - DNA, 380 bp, Arabidopsis thaliana nossen
gaggaaatgataatagcaaagcaatatcgttgcattcactcggcgacttgtcattgcacgaaaggacatcttagcgaagaagtattgtttcttatggttcagcatctaaactggaaccctaatgtgattgccactctatcttgtgtttgtaaatggtttgatgatctcgctaagcggttattgtggaaagaattctgtagagctagagcgcctaagatgatgagtgaccttcaatctagtggtagccatagtgttgatgggagttggagagcactagggaaacttttgatttactgctctggttcaagcaaaggtggactctttaatgatgttcaaatctctggtcattttgttcacagaacccgcttctctagaacatc

SEQ ID NO: 169059 - DNA, 397 bp, Arabidopsis thaliana nossen
gaaaaacaaattaataaaaaaaaaagatcagaaattagtttgtgcagaaatcgaattggagaaaccgagtaactatggtagccacagatgagttcatcgtttttgaccagatctgattgttttcgtctttgccgttgaaataatcctccgctccttcttctcatcgatttctccgatcgcgattttggtttctcgctctcctctctcgctgtggattttgactccgagagaaggtttgattttcggtggatttcatctgacagacatgtcagacgctctttctgcgattccggccgcagttcatcgcaatctctccgataaactctatgagaagcgcaaaaatgctgcgcttgagcttgagaatattgtgaagaatctaacttctccggtgatcatg

SEQ ID NO: 169060 - DNA, 349 bp, Arabidopsis thaliana nossen
ctttctttaacacagagaaagagcctgagagacaagtgagaaacgcaacaacaccaccgaaagagagagtccaaattcgaaagagaaaaagaatcaaattccttcttcttccttttttgattttcaattattactttaatcttctttcccgctctctattcttcttcttctttaggatcaatcaccgtttagctttcttcccatacgtctctccgtttacgaccagtatacagaggctggagctggggaagaaaaggattgtctatggagggagacgtcggaaaaggtttggtatgccagaatactatggatgggaaggcgagtaatggaaatggtttagagaagactg

SEQ ID NO: 169061 - DNA, 246 bp, Arabidopsis thaliana nossen
ctttctctaactcagagaaagttcctgagatacaagtgagaaacgcaacaacaccaccgaaagagttgagtccatatggtaaagacaaaatgattcaaattccttctccttacttaactgattttcaattatgacttcaatctatttttccgctctttattcttattattctctaagatcaatcaccgtgtagctttctttccatacttctttccgtttacgaccagtatacacaggctggttctg

SEQ ID NO: 169062 - DNA, 306 bp, Arabidopsis thaliana nossen
cttccaagattctactctatatcagttgaattccctgagtttagcaccaaggataagaccttggtcttccaatgttctgccaagcatgaccagaacctggacttgtggggtggttacataaatttggctatgggtgatgttgaccacacgaaatttgtaggagacactcctttcagcattatgtttgggccagatatttgtgggtcagcacttttaaagaacattgctttcctttctttcaatggatcctaccatttgatcaagaaagttgttccctgtttgactgatcatcttcttcacgtgttc

SEQ ID NO: 169063 - DNA, 406 bp, Arabidopsis thaliana nossen
gacccacgcgtccgtattactcaactctctgttgagaagtggttggagttaacacccagtaaaggtagtcaaacagatacgaaacccataagcctgcgagtcgctgtctcgtttactccaccagtacgcagtccatcagtcttacacatggttcaatcaagaccatcgtgcaaaggctcttgcttctttccaatcattggaaagtcccgtcttgctaaaagttcaacacacattgttgatgaaacccaaacagaggtgatcacacttcaaattaggaactccgctgatggaggaacacttaaagatgatcagagacaagttatgggtgtgacagactctggtgaaactcgcgtgcttgcggtttatactgggagtttctggtctttgctggactcgaaatggtcac

SEQ ID NO: 169064 - DNA, 380 bp, Arabidopsis thaliana nossen
gggacttcttggttttctttatattttccagctattgtattgctctttctgatctttgttggggtgtatgatgaacaatctcagccatcttgaatcagattactctgagtatgttgaagttgatcctactggaagatatggaagatacaatgaagttctgggtaaaggatcttcaaagactgtttacagaggatttgatgagtatcaaggtatagaagtagcatggaaccaagtaaagctctacgatttcttgcagagtcctcaagagctagagaggctctactgtgagatccatcttctcaaaaccttaaaacacaaaagcatcatgaagttctacgcttcttgggtcgataccgataatcgaaacatcaactttgtca

SEQ ID NO: 169065 - DNA, 365 bp, Arabidopsis thaliana nossen
gagacagagaaaaggattcgtgtaaggaaaagcttttaaacttctctttctatttatccctcctttcttctatctctctctctctcgatatcgatacaagagagatggagaaagaagaaggagaaacaacaacaacgatcggcgttgttccggcggcgccggcgaaattaccgactccgatatattctctgagcttttgggaggtcacggcagcttccggcgtcgttttagggtttattttgggtcttgtttgcgtttatctcacaatgcctcaatctgattacagctttctcaagctacctcgtaatctcgaagatcttcagattcttagagataatcttgagatatacacaagtgattacaca

SEQ ID NO: 169066 - DNA, 381 bp, Arabidopsis thaliana nossen
ctcacaagcagcaagcttcttcgattttgctttgacaccaccaatcggtgttttcgaatctttcagttttattacacaggtctcatacaagacacagtctctagaagcatgatatcgtcgactctgttttgagttacccagcagtggttgaagcttaaggcggaggttcttatgtgccttttgatatcatgattgaggttaagcgacctggttcttccacgcggatcaccacaacactccttgattctttcatgattctcttcagaaacaaacacatcttattcccaatctttgcctttatagcgatccctcttgcagccttacacctctccataactcttacctcctttcgccttaaaaaccatgtctttcgtttagaag

SEQ ID NO: 169067 - DNA, 384 bp, Arabidopsis thaliana nossen
caacaaaaaaaaaacagtgccctttcgctcacgctttgagtcgtatctgctctcttcttaatccgccgtctctcactttttcgccggcgtggttagatcgtacaaagctcagagagaatgttgggaatcttgaggcaaagagccatcgatggagcttcgactcttaggaggacgcgattcgcattggtttctgctaggagctatgcagctggtgcaaaagagatgacagtcagagatgctctaaattctgcaattgatgaggaaatgtctgctgatcctaaagtatttgtcatgggtgaagaggttggccaatatcaaggtgcctacaagatcactaaaggccttttggagaaatatggtcctgagagagtttacgatacccct

SEQ ID NO: 169068 - DNA, 395 bp, Arabidopsis thaliana nossen
taatttcatagctcctaacaaagcaatatcatttccaatttataaaagttaaagccatggctgcatctttctctgtcccctctatgataatggaagaagaagggagattcgaagcggaggttgcggaagtgcagacttggtggagctcagagaggttcaagctaacaaggcgcccttacactgcccgtgacgtggtggctctacgtggccatctcaagcaaggctatgcttcgaacgagatggctaagaagctgtggagaacgctcaaaagccatcaagccaacggtacggcctctcgcaccttcggagcgttggaccctgttcaggtgaccatgatggctaaacatttggacaccatctatgtctctggttggcagtgctcgtccactcacaca

SEQ ID NO: 169069 - DNA, 331 bp, Arabidopsis thaliana nossen
  unsure (1)..(331): unsure at all n locations
gggagagaagaaggatagagaaaaaaattgggaggcaaaggtgtgatgatggtggcgatactttgcctttgggcactctctgcaacatctgaagcagtaacagaggctgagccaggtttgatgatgaacttctacaaggacacgtgtcctcaggccgaagacatcgtccgtgaacaagtcaaactcctctacaaacgccacatgaacaccgctntctcttggctccgtaacatcttacatgactgcgccgttgagtcatgtgatgcgtcgcttttgctggattcgacacgaagagagctaggagagaaagaacacgacaggagcttcggac

SEQ ID NO: 169070 - DNA, 392 bp, Arabidopsis thaliana nossen
gtgtttgctgtgatgaaagctctctctttggttcatcctttgctgcttcaagaggagaagcaagtcaggggattgccaaggatgataaagttttcaccttttattgagactgtcgatgttcagtggccatcagagatgggtaaaggtcatgattttgttgctgttacggtctcacatcctccaggtcaatcatatgaacagaagcgcgaagatgacgagttggaaatagtttcaggcatgaccgcatgatcaatctgcgagttggtcaaggtggagaagcgggtttaagacagtgcacaatgtgtgagaaagctattcataaagatgagtctgtttgttgtagccattgccgtgcaaccatatactgtggtttagactgcgagaaacggcat

SEQ ID NO: 169071 - DNA, 388 bp, Arabidopsis thaliana nossen
ctaaaattcactcaaccaaaataaccaaccttttttttccatctaaatctttgaatatcacaatatttactatttacaatggcgccacaagaacaagcagtttctcaggtgatggagaaacagagcaacaacaacaacagtgacgtcattttccgatcaaagttaccggatatttacatcccgaaccacctatctctccacgactacatcttccaaaacatctccgaattcgccactaagccttgcctaatcaacggaccaaccggccacgtgtacacttactccgacgtccacgtcatctcccgccaaatcgccgccaattttcacaaactcggcgttaaccaaaacgacgtcgtcatgctcctcctcccaaactgtcccgaattcg

SEQ ID NO: 169072 - DNA, 391 bp, Arabidopsis thaliana nossen
  unsure (1)..(391): unsure at all n locations
caggaacagctagaagactcttcagggcacagagaaaacacccaccacaccgtcttcttcaacaaaatttaccaccagagatcgcagatatttcttcaatctctctcttttagatccgattcgatgccgtcccgtagacgtaccctcctcaaggtcatcatcctcggtgatagcggggtgggaaaaacctctttgatgaatcagtatgttaataaaaagttcagcaaccagtacaaggcaaccattggagccgacttcttgaccaaggaagtacagtttgaagatcgactnttcactttacagatctgggatacagctggacaggaaaggtttcagagccttggtgtangcctttaccgtggtgctgattgctgtgttcttgtatatgatg

SEQ ID NO: 169073 - DNA, 390 bp, Arabidopsis thaliana nossen
attccgtaagtaaaaaaaacaaaaaacaaacaaaaatggcttcccacattgttggatatccacgtatgggacctaagagagagctcaagtttgcattggagtctttctgggatggcaagagcagtgccgatgatttgcagaaggtgtctgctgatctcaggtctgatatctggaaacagatgtctgctgctgggattaagtatatcccaagcaacaccttttctcattatgaccaggtgcttgacaccaccgccatgcttggtgctgttccatctagatatggatttaccagtggtgagatcggtctcgatgtttacttctccatggctagaggaaatgcctctgttccagctatggagatgaccaagtggtttgacaccaactaccatt

SEQ ID NO: 169074 - DNA, 376 bp, Arabidopsis thaliana nossen
gtcttactcgtgccagccactcgcatttctccagattttattatccttcctcgaaacaagagcttagctaagatgacgaagaactacccaaccgtgagcgaagattacaagaaggctgttgagaagtgcaggaggaagctcagaggtttgatcgctgagaagaactgtgcacccatcatggtccgactcgcatggcactctgctggaactttcgattgtcaatcaaggactggaggtccattcggaacaatgaggtttgacgctgagcaagctcatggagccaacagtggtatccacattgctcttaggttgttggaccccatcagggagcaattccctaccatctcttttgctgatttccatcagcttgctggtg

SEQ ID NO: 169075 - DNA, 385 bp, Arabidopsis thaliana nossen
aaagagattctggaacaaacttacttatgctggcctccattaacagaatcacagtactttttcatccactgcataaactccaagttatccaatggccttcccttaacgagtttgctcacttcgatgtgctacacaaccaaattaaccaaacaaagtcagttctattatatgcctcctcgaattaaaacccccaaaaatcgataaaaatgaaggaagaagaaagaggaccttagtgatcttgagtttattaaacacatcctgaagaaccttatagttctgaatcatctcatattcactcttcgcatcaaagttaaccttgtgcatcggaacagtcccaggatgcaccgaatccatcagctgacaatgaacagcgcctgaacaagcc

SEQ ID NO: 169076 - DNA, 372 bp, Arabidopsis thaliana nossen
  unsure (1)..(372): unsure at all n locations
cgtccgcaaatagntactgccaagcattgctacccccatactatgacagagnnagagtcganaagagttttcgagcatagtaagaccanaacacacgggcttctagaggggaaaaggctagatcacctcctacagtcgagcaggaacggcggaaatctgcggagagaagtgggccgggatatgagcatggacatagcagtagccccgtaaatttgcttgaggagaggaaaactattccagcatctagaacaagaaaaaatgttgctgcaacgagaataaatctatccgagcctccccaatgacccaaccaaggtataaagccacaacagaaaatggagtctgcaactactccagtagaaagggagaaacaag

SEQ ID NO: 169077 - DNA, 407 bp, Arabidopsis thaliana nossen
ggaagacccacgcgtccgacaaagagagagagagatggggtcaaagacggtgatgatggagagagacgcaatggctacggtggctccctatgcgccggtcacttaccatcgccgtgctcgtgttgacttggatgatagacttcctaaaccttgtaaaacctttctctcgctacttgcatttttttatccctaattgatttcaatatattgcatgccaaaaaatatttgatatatggttgaatttaagaaacccttttaaatatatggaattgccgaccctcaaaatttttaaaacatgcatatagaatgatgttcatgatcttatagaagctataaattgtaaaatgatacatatcctgtatatgatggtaattaataatgtattacccatgaacgtgcatgaataa

SEQ ID NO: 169078 - DNA, 292 bp, Arabidopsis thaliana nossen
agaacctaaaaagaagagaagagaaagagagatccgaaatgtcggtgacatcaacggtggaggagaaccaccagaaaaatccatcaacgccggcggcggtggaggagaagaagaagaggagatgggtgttttgggatagaaggtggaggagattagattatgtgaaatgctcagcttctttcactgatcattctgtcgctctattggctccgttttatttcactaggtcggctctttgggtcacgtcgttgtgttacaccatgggtggtgttgggatcaccgtctcttatca

SEQ ID NO: 169079 - DNA, 387 bp, Arabidopsis thaliana nossen
  unsure (1)..(387): unsure at all n locations
atttgcactcagtctagagacaaagagagagagagatggggtcaaagacggagatgatggagagagacgcaatggctacggtggctccctatgcgccggtcacttaccatcgccgtgctcgtgttgacttggatgatagacttcctaaaccttatatgccaagagcattgcaagcaccagacagagaacacccgtacggaactccaggccataagaattacggacttagtgttcttcaacagcatgtctccttcttcgatatcgatgataatggcatcatttacccttgggagacctactctggactgcgaatgctnggtttcaatatcattgggtcgcttataatagccgctgttatcaacctgacccttagctatgccactcttt

SEQ ID NO: 169080 - DNA, 383 bp, Arabidopsis thaliana nossen
aagaacaaaataatggcggattcagctcgaggaacccatcacgatatcatcggcagagaccagttcccgatgatgggccgagaccgagaccagtgccagatgtccggacgaggatctgactactccaagtctaggcagattgctaaagctgcaactgctgtcacagctggtggttccctccttgttctctccagccttacccttgctggaactgtcatagctgtgactgttgcaacacctctgctcgatatcttcagcccaatccttagacgggctctcatcacagttgcactgctcatcaccggttttctttgctctggagggtttggcattgccgctataaccgttttctcttggatttacaagttcgcatcgggagagca

SEQ ID NO: 169081 - DNA, 377 bp, Arabidopsis thaliana nossen
tttcttactctttccagccactcgcatttctccagatttggttatccttgcttttttcaggagcttagctaagatgacgaagaactacccaaccgtgagcgaagattacaagaaggctgttgagaagtgcaggaggaagctcagaggtttgatcgctgagaagaactgtgcacccatcatggtccgactcgcatggcactctgctggaactttcgattgtcaatcaaggactggaggtccattcggaacaatgaggtttgacgctgagcaagctcatggagccaacagtggtatccacattgctcttaggttgttggaccccatcagggagcaattccctaccatctgttttgctgatttccatcagcttgctggtg

SEQ ID NO: 169082 - DNA, 384 bp, Arabidopsis thaliana nossen
gaggaaagagaaaagtgtctatttctcatatttctaaaaaactacctactttgcaaattatttgtagaaaaagtgtatacttccaacttatctctattataaaagccccgatcaaagtgcagatatcaacaaaaataaaattgtggaatgggtgtatatatttttgttgcagtatcttttatgtaatgcatttgcaacatcttttacctatacttctcgtgtttgtgtgtttactctcttttatgtcaagaagtgaatgtgtcaatctcgtaacataagtctctatttatattcatcgacatcttattatatagctttttctcaagttcaaaattgcaaaagagaggagcatgagaaaaaaatgtcgcgttaacgacaccaatg

SEQ ID NO: 169083 - DNA, 378 bp, Arabidopsis thaliana nossen
cgccgaaaccctaaatctcgacctcaaaccctgaaccatggctgaaggactcgtgttgaaaggcacaatgtgtgcccacactgatatggtcaccgccattgctacaccggtcgataactccgacgtgattgtaacttcgtcgcgtgacaaatcaatcatcctctggaaactcacaaaggaagacaagtcatacggtgttgctcagcggaggatgactggtcactctcacttcgttcaagacgttgttctctcctccgatggacaattcgctctctctggatcctgggacggtgagcttcgtctctgggatctcgctaccggagaatcaactcgtcgtttcgttggtcacacgaaagatgttctctctgttgctttctc

SEQ ID NO: 169084 - DNA, 413 bp, Arabidopsis thaliana nossen
agaaacctgggcaggacccacgcgtccgaataaatatcacttgttaaatggcctataccgaaatccaatccacaatgattttgctacacagaaactagcaactaaaaagaaaagtaagtggtcgaccatcgatcatggaccagcctcacgcgcttctagtggctagccctggcttgggtcacctcatccctatcctggagctcggcaaccgtctctcctccgtcctaaacatccacgtcaccattctcgcggtcacctccggctcctcttcaccgacagaaaccgaagccatacatgcagccgcggctagaacaatctgtcaaattacggaaattccctcggtggatgtagacaacctcgtggagccagatgctacaattttcactaagatggtggtgaagatgcgagccatg

SEQ ID NO: 169085 - DNA, 414 bp, Arabidopsis thaliana nossen
ccgggggggtcccacgcgtccgttacgcttggtttattggagttgctcttcctcaccacgagcttgtagagtggaagctgttgtttcacagttccttacacggtcaaagcttcaacacatttctcggacacacatcgtgagtgtttctcaactgtaaggtaaatgatcacgttttctctctgtagtctcacttttcgccccctctaattttagcgcagcctttgtcgcttggcatgcacaccagtgttcgtcaaagttcccaaatgaatgttctcaaagtaacaactttaatcgattaacttgctttttgtttttgaagaattgatttcagagtttgtttgatcatggaacgatggtccggcgttttgaagattccgttggatgctactactagcaactactacagggttgcag

SEQ ID NO: 169086 - DNA, 390 bp, Arabidopsis thaliana nossen
cagttattcattgaaattcaaacctgttttggacgttttcgtattcttagttaccaattagcaaaactgaagcttcagaacttgtatctatcttatgaaagcaaaagggaagttgttttcttggctgcctaacttttcacacatttctttgtttcatctgcagagcaaagcggcaagcttgagtgtctttcagttcttgcaaaattggggcctcttttcacaatctgttcaagagccgagagtcctgctgcaatggaggatttacctgtctggaagcatgaaaatcgtgttcaatctctgccaacaaaggacccagttcttgcagtatttggccagaaagctactcaagttgatgaacccgaaccacatgtggacgtcagtctaggtgct

SEQ ID NO: 169087 - DNA, 257 bp, Arabidopsis thaliana nossen
  unsure (1)..(257): unsure at all n locations
gtaaatgcgttgtcatcacctttggtaacgagnnnagagtgtccnccagggttttttagtagtataacgcgncacttacnctnttaaaatctgcaaccagacacagttgctgcaagaagcaaagtttggtctggctgatgcacagagttttgtcctgtctgggtctcacagcaatacagtttcagtccttcccaagtcagaacacgtcttaagttataagctagtgcctctgacttgcggtgaacagcaactcccaa

SEQ ID NO: 169088 - DNA, 354 bp, Arabidopsis thaliana nossen
gcagctgcaaacatggcaagaggattgaagaagcatctaaagaggctcaatgctcctaagcattggatgcttgacaaacttggtggtgccttcgctcccaaaccatcttctggacctcacaagtcgagggagtgtcttcctcttgtcctgatcatcaggaacaggttgaagtatgctttgacttaccgtgaagttatctctatcttgatgcaaaggcatatccaagttgatggcaaagtcaggactgacaagacttaccctgctggtttcatggatgttgtatccatccccaagaccaatgagaacttccgtcttctctacgacaccaagggacgtttccgtctccactccatc

SEQ ID NO: 169089 - DNA, 349 bp, Arabidopsis thaliana nossen
ctcgaaagcctcttttcagaaccgaagctctttactttcgtccaccgggaaatatgccagtcgacgtagcctcaccggccggaaaaaccgtctgcgtcaccggagctggtggatacatcgcttcttggattgttaagatacttctcgagagaggttacacagtcaaaggaaccgtacggaatccagatgatccgaagaacacacatttgagagaactagaaggaggaaaggagagactgattctgtgcaaagcagatcttcaagactacgaggctcttaaggcggcgattgatggttgcgacggcgtctttcacacggcttctcctgtcaccgacgatccggaacaaat

SEQ ID NO: 169090 - DNA, 390 bp, Arabidopsis thaliana nossen
atcggagaaaactatgcccaagcggctaaagacaaggctaacgaaggagcaagcaaagctgcagataaagcctacgagacaaaagagcaagcaaaggataaagcctacgaaactaaagagaaagcaaaggatacagcctacaatgcaaaagagaaggctaaggattatgctgaacggactaaagataaggtgaacgaaggggcgtataaggcagcggataaagcggaagatacaaaagaaaaagcaaaggattacgcagaggatacaatggacaatgcaaaagagaaagctcgacatgcaaaagagaaggtgaaagagtatggagaagatactaaggagaaggcagaagggtttaaggagactgtgaaaggtaaagctgaggaacttgga

SEQ ID NO: 169091 - DNA, 369 bp, Arabidopsis thaliana nossen
atcggagaaatctatgcccaatcggctaaagacaaggctaacgaaagagcaagcaaagctgcagataaagcctacgagacaaaagagcaagcaaaggataaagcctacgaaactaaagagaaagcaaaggatacagcctacaatgcaaaagagaaggctaaggattatgctgaacggactaaagataaggtgaacgaaggggcgtataaggcagcggataaagcggaagatacaaaagaaaaagcaaaggattacgcagaggatacaatggacaatgcaaaagagaaagctcgacatgcaaaagagaaggtgaaagagtatggagaagatactaaggagaatgcagaagggtttaaggagactgtgaaa

SEQ ID NO: 169092 - DNA, 381 bp, Arabidopsis thaliana nossen
aaagatggtagtgaagataatctggatctttccaaaggattatatgatgctggagatcatataaagtttggttttccaatggctttcactgctacagttttatcatggtcgattctcgagtacggtgatcaaatgaatgcagtgaaccaattggatcctgctaaaaactctctccggtggatcactgactatcttatcaaagctcatccttctgataatgtcctctatatccaggtaggagatcccaaagtagatcatccatgttgggagagaccagaggatatgaaagagaagagaccacttactaaaattgatgtagatactccagggacagatgttgctgcggaaactgctgcagctatggcttcagcgtctttggtg

SEQ ID NO: 169093 - DNA, 249 bp, Arabidopsis thaliana nossen
ctggattttttttgttcgcaatatcaaggaaactgccataaaggaaactgctgttgctaagcttaaatctgaccagtctgatttaggatacatacatggtcattattgatgattgctggaccaattagttacgcatctcaatgggtcaattggttcctcatactgaaaccttacgatcaggaataaagcatctagctgtttatgttcattcaaagggtgtcaaactcggcatatatcttgatgctggcg

SEQ ID NO: 169094 - DNA, 386 bp, Arabidopsis thaliana nossen
atttttcgtcaccctagccgctttactctcttgcgatatctctgagatttgtttgacagtctctaaccatgggtaaagagaagtttcacatcaacattgtggtcattggccacgtcgattctggaaagtcgaccaccactggacacttgatctacaagttgggtggtattgacaagcgtgtcattgagaggttcgagaaggaggctgctgagatgaacaagaggtccttcaagtacgcatgggttttggacaaacttaaggctgagcgtgagcgtggtatcaccattgacattgctctctggaagttcgagaccaccaagtactactgcactgtcattgatgctcctggccatcgtgatttcatcaagaacatgatcactggtacc

SEQ ID NO: 169095 - DNA, 395 bp, Arabidopsis thaliana nossen
  unsure (1)..(395): unsure at all n locations
atctaattaactttaagtaccaaaaatggcgggctacaacctcgaagctatcgaagcggcacctttgaaagacgatctggatattgtgatcccaaccatcagaagcctcgactttctagagcaatggagaccatttttgcaccattaccacctgatcattgttcaagatggagacccttccatcaagatccgagttcccgagggttatgactacgagctctacaaccgtaatgatatcaacaggatccttggtccaagagctaattgtatctcctacaaagatggtggttgtcgctgctttggcttcatggtttctaaaaagaagtatatctacaccattgatgatgattgctttgtggcanaggatccaagtgggaaagacatcaatgtgatag

SEQ ID NO: 169096 - DNA, 383 bp, Arabidopsis thaliana nossen
ataaagaggaagaaaaatgggtcgagtctcatctattatctctttctctttgacactcttgatcctcttcaatggctacactgcccaacagtggcccaacgagtgccagctcgatcaactcaatgcgctcgaaccatcccaaatcatcaagagcgagggtggtcgcatcgaggtctgggaccaccatgcaccccagctccgttgctccggctttgcctttgagcgtttcgtcattgagcctcagggtcttttcttgcccactttcttgaacgccggcaaactcacgtttgttgttcacggaaggggtctaatgggaagagttattccgggatgcgccgagacgttcatggagtcaccggtatttggagaaagtcaaggtcagg

SEQ ID NO: 169097 - DNA, 381 bp, Arabidopsis thaliana nossen
  unsure (1)..(381): unsure at all n locations
gtttttctgtggtgaagtcaatgacgctgatgacgtcatgtgtatatcgtaaatcttatttttttatacttcaaaaaatcaaattcatttgcatttaataaaattattagtatgaaataaacgcgttgacaattgttatgtccacttaattcgtttgatcaaattacctaggacaaatttcgaaattttactatgcgttaagtttcttgcatattcagtgaaaatgaagcaaagtagcaaactagtacaactctatttccctatagcataaagtttaatggacatacgactcatccaagtttaagaaaaaaaacaagaaatgatatgtatttgaattttgggaattatcaacattggggatatggttnttttttttctttt

SEQ ID NO: 169098 - DNA, 386 bp, Arabidopsis thaliana nossen
agactcgcagccagtttcctccgttgtttacatttcattcgggaccgttgcttacttaaaacaagaacaaatagacgagatcgcttacggtgtgttaaacgccgacgttacgttcttgtgggtgattagacaacaagagttaggtttcaacaaagagaaacatgttttgccggaagaagttaaagggaaagggaagatcgttgaatggtgttcacaagagaaagtattatctcatccttcagtggcatgtttcgtgactcactgtggatggaactcaacgatggaagctgtgtcttccggagtcccgacggtttgttttcctcaatggggagatcaagtcacggacgccgtttacatgatcgatgtttggaagacgggagtgaggc

SEQ ID NO: 169099 - DNA, 256 bp, Arabidopsis thaliana nossen
caaatctctatttgattaatctttttggggtcaatttctttctgttgtgtgtccgtttctgaataatgctcttactaaaaaaagagaagatcatttttgatgtatccttctctggatttgtatgtatgatcactatctcacttacataagcttctctagatatgatttcaaatatattgttcttactatttcttttcataattattttgactgccgtcataccgcttatctcatgctaattttagaacattcaaaa

SEQ ID NO: 169100 - DNA, 102 bp, Arabidopsis thaliana nossen
gtcttatcatcaaacgttacgttctcgttttctcaaattccaaacaataccaagaaacctctacttgaaaagagaagattatcgccgcgtggtgtgcctaaa

SEQ ID NO: 169101 - DNA, 332 bp, Arabidopsis thaliana nossen
agactcgctgccagataccttcgttgtttacatctcattcgggaccggtgcttacttaaaacaagaacggatagacgagatcgcttacggtgtgttaaacgccgacgttacgttcttgtgggtgattagacaacaagagttaggtttcaacaaagagaaacatgttttgccggaagaagttaaagggaaagggaagatcgttgaatggtgttcacaagagaaagtattatcttatccttcagtggcatgttttgtgactcactgtggttggaactcaacgatggaagctgtgtcttccggagtcccgacggtttggtttccccaattgggga

SEQ ID NO: 169102 - DNA, 280 bp, Arabidopsis thaliana nossen
gtccgggccggacccacgcgtcggcacacgcgtattggattaatcttttcggggccaatttctttctgttgtgtgtccgtttctgaataatgtttttactaaaaaaagagaagatcatttttgatgtatccttctctggatttgtatgtatgatcactatctcacttacataagcttctcttgatatgatttcaaatatattgttcttactatttttttttataattattttgtctgccgtcataccgcttatctcatgctaattttagaacattcaaaa

SEQ ID NO: 169103 - DNA, 373 bp, Arabidopsis thaliana nossen
tcggtcttatcatttaacgttacgttctcgttttctcaagtgcaaacaagggcttgtagcctctacttggaaagagaagattatcgccgcgtgtgtgcctaagagcgatggcgtctgataaacaaaaacaacatgcactacctggcaaagaacatgtcatggtattaagcccacaattctctagcttagattaccaaccttccaacaagcttcgtggtaaggtggcgttgataactggtggagactctgggattggtcgagccgtgggatactgttttgcatccgaaggagctactgtggctttcacttacgtgaagggtgaagaagaaaaagatgcactagagacccttctaatgttgaaggagggcaaaac

SEQ ID NO: 169104 - DNA, 396 bp, Arabidopsis thaliana nossen
aaggcaatgaagatggttgctgcttccaagcttagagcagttcaaggccgagctgagaactcccgtggactttggcagccatttactgcacttctaggagataatcccagcattgatgtaaagaagagtgtggtggtcactctctcttctgacaagggtctctgtggtggaatcaactccactgtcgttaaagtgagcagggctctgtacaaattgaatgctggtcctgaaaaggaagttcagtttgttattgtcggagagaaagcaaaggctataatgtttcgtgactcaaagaacgacattgtcctctctgtaacagagctgaataagaacccactcaattatgctcaggtgtcagttctagctgatgacatcctgaaaaacggtgaatttgat

SEQ ID NO: 169105 - DNA, 398 bp, Arabidopsis thaliana nossen
agagtgggttcttcctgagatcgatgacgacgacatcgtttcagcttttgaaggaaactcgaatctgttctgggcagagagatttggtaagcaggttctaggtatgaatgatctgtgggtgaaacactgtgggattagtcatacaggaagtttcaaggatcttggaatgactgttttggttagtcaagttaatcgtctgagaaagatgaaacgacctgtggttggtgtcggatgtgcttccaccggagatacttctgctgctctatctgcttactgcgcctgcgctggaatcccatcgattgtgtttttaccggcgaacaagatctctatggctcagctggttcagccgatagcttatggtgcgtttgctgtgagtattgacactgattttgatgggg

SEQ ID NO: 169106 - DNA, 74 bp, Arabidopsis thaliana nossen
gatttcaccatgtataaaatctaaaagttttgaaatatttatgataaaaatataaaagtttgtaaccgtattag

SEQ ID NO: 169107 - DNA, 400 bp, Arabidopsis thaliana nossen
caataatgctaaaaaaaactctgataaaaaaaataaataatgctaaagaaaactgctccaaactctccagaacgtcgccgttgttcatccttcgccgccgttgatctcgtcggatcagcaaacagaacgttcatggtttcagtttccctcccgaaagaactcatcctcgagattttgaagagattgcctgcaaagtcagttaagaggtttcattgtgtgtcgaagcaatgggcatcaatgcttagttgtccacatttcagagagttgttcctgaccaggtcctcatctgctcagccgcgtctcttattcgccatcgaaaaacataatcagtggagcttgttctcgttgcctcagcgtctgactccatatgagaagtcttcttcgtcgtctgttgtagtaa

SEQ ID NO: 169108 - DNA, 439 bp, Arabidopsis thaliana nossen
caggggcatttccggatatgacccactcgtccgacacgacactggagatttcatcaagaacatgattactggtacctcccaagctgattgtgctgttcttatcattgactccaccactggaggttttgaggctggtatctctaaggatggtcagacccgtgagcacgctcttcttgctttcacccttggtgtcaagcagatgatttgctgttgtaacaagatggatgccaccacccccaaatactccaaggctaggtacgatgaaatcatcaaggaggtgtcttcatacctgaagaaggtgggatacaaccctgacaaaatcccatttgtgccaatctctggattcgagggagacaacatgattgagaggtcaaccaaccttgactggtacaagggaccaactcttcttgaggctcttgaccagatcaacgagcccaag

SEQ ID NO: 169109 - DNA, 407 bp, Arabidopsis thaliana nossen
gaaaaaggtcaaaaaaggaaatagtgctaacgaagaaggtccgtttattgttgtggaatcttccaaattcaagacggtaggcgagaagactactttaaggccagatttagccatagctcttcaagttagagccttccagagagtcacaaggctgtggaaatgcgatgttgaagcattaagaagagagatgagagacaacaatgttcctgtatcctattccggcaatggaattcccacaaaatctataaggagaccaaacttagaagagattctccggcgtctgcttaatgtcctgaaacctgaaactttccaaggagctattaaggccataaacgagaaaatcctctcggttcttgatgattcaaggtcgggaagagtcgatttgggaatgttttacgcagtgattg

SEQ ID NO: 169110 - DNA, 299 bp, Arabidopsis thaliana nossen
gctcctgcaactctaatgcgtacttgggaagacgaagtcaggaaatggaacgtaaacattccattttataacatgaatagtctgcagttatcagggtatgaggatgctgaagctgtctcacgtttagagggaaataggcatcataattccatccgtatggttaagctagtttcgtggtggaagcagaaaagcattcttggaattagctaccctctgtatgagaagctcgcggcaaatatgaacactgaaggaatgcaagtgtttaggaggatgtcggcagaatcgccggggttgcttgg

SEQ ID NO: 169111 - DNA, 339 bp, Arabidopsis thaliana nossen
ataaatttgccctcaatttctccgtccctactactctttttgatcaatttctacgggaaaaagcacgaatctttaaacccgggcatgtccttgtaatcgagtatgttgtgtaagtgatgaatttgtggtgagatctggtgagaagtttcctcttttttctcagattgcggtaaaaaaaagagtttttaataaggaagagattgagattagattttatcgcttttgtttgtgtgatatgggtaacgtgaacgcgagagaagaagcgaatagttacaacgcttctgcttgtgaagacgaagacgctgagatttgttctcgtgaagctatgtctgctgcttc

SEQ ID NO: 169112 - DNA, 375 bp, Arabidopsis thaliana nossen
gagaaattgtgagaggattcacattgcgactcgaatcgagttccggtggaagaagagatccgggaaagaggagaggagggaagaggagagaagggaagaggagagaaggaggtgatcgatgtgggtttagttcattaagtttagatggataatggttgatgggtatatcataacccaacttcttacataaaccagctattatctcaacgaaaacttctctgtcttctctaacctttattttgcagagtggaaatcatcaaagttcttcttacggcaacgggggctctttcaatgtctgttggccatcaatctatcttgaatcatctggctttcttagtagggatgtccagctttacttcccgcgacgttcgtttt

SEQ ID NO: 169113 - DNA, 397 bp, Arabidopsis thaliana nossen
ctcagaatcaaagtttctatgttgaagaaaagagagctttgacgaaaaaatcatcctttagaatggcaaagactgatgtggatgatgagtatggtcttaaaccctctgagttatatggaaaaaatacatggaagattaagaaattttcacaaatcagcaaaagggagttcgctagcagtgtttttgaaattggaggctacagttggcatattttaatgtatccagaaggatgtgatgttagcaatcatctctcattatttctctgtgttgcaaaccatgatgaacttcttccaggctggagtcagttggctcagtttactatatctgtgatgcataaagatccaaagaagtctaagttttcagatacgctgcaccggttttggaagaaagaacatga

SEQ ID NO: 169114 - DNA, 392 bp, Arabidopsis thaliana nossen
aacaacacaacacacgcagaagagagagagagaacaaaaaaaagaaggagcggttacatattctctggtctgtcacaagaaaaatggatatctgtatggacaaggagccagatggtgtggtggtctatgcgaacggtgattcgtgtaatccaaaccaagaaaatgtttctgagcctctcttagattcagtatcacgcgatgatgctaatgtacatacagagcttcgatatggggaagagaacatcgaagtaaacgaatatgatgttaaagagtgtactagtgagatccccgttggttagccgataggagatgattttgagtctaaagatgtctctaagtcaagtttacatgcatagctttgcttataatcaggttgagggatttacaaatca

SEQ ID NO: 169115 - DNA, 369 bp, Arabidopsis thaliana nossen
aaatggcgtctggtttgatcggaagattggttggaacgaaaccgtcgaaattagccacggtggcgaggttaattccggtgagatggacctctacaggagcggaggcggaaacaaaagcttcctctggcggcggaatgatgatcgaacttgaagacttttcagatctatcgatggaatccagattatccagggtagcagagctttaaaattaccagttttatctcaaatgatttgtggaccaatggtattagatgctttaatttatttcataaagtgttttgacttattctctttacttttttaaataaatttttttaaaggtttttttttctaattttgtctattgttttttttttgtaaatttttttt

SEQ ID NO: 169116 - DNA, 264 bp, Arabidopsis thaliana nossen; identical to SEQ ID NO: 130058

SEQ ID NO: 169117 - DNA, 404 bp, Arabidopsis thaliana nossen
ctcggtttcatcgtccgctgtctcaacaatggcgtcattgtcggtaccttgcgtcaagatctgtgctctgaacaggcgggtcggatctctccctggaatctctactcaaagatggcagccgcaacccaatgggatctcctttccctccgatgtttctcagaatcattctgcattctggaggttgcgtgcaacaactaatgaggttgtttctaactccactccaatgactaatggtgggtatatgaacggaaaagcgaaaaccaatgttcctgaacccgccgagctctctgaatttatggctaaagtctctggtcttcttaagcttgtggattcaaaagacatagtggaacttgaactaaagcagctcgactgtgagatcgttattcgaaagaaggaagctttac

SEQ ID NO: 169118 - DNA, 376 bp, Arabidopsis thaliana nossen
gcaaagacaatgaagatgaattcgcgagctttaatagtttggtttctattgttgtcggctgttttcgccatcaaggttgttgcctccatcgatgacacaaaacaagttggtgaaaaccaagtggaggagtcaaagtcgacatgcaagtatggaaattgtgcacagtatggagagaatcattttgtagaaacagatgaagtccttgatggggaagaagaagaagaatccaaaaataaccaaggtggaattgggagaggccaaggaggacaaaaaggcggtggtggtggtggccaaggaggacaaaaaggcggtggcggtggtggccaaagaggacaaaagggtggcggtggtggccaaggaggacaaaaaggcggtg

SEQ ID NO: 169119 - DNA, 256 bp, Arabidopsis thaliana nossen
gttaaagacttgtatcgaggaataacacactttttgtataatcattagtttcagtattcttcctcttctttgattgatggagagacttcatctattattgatttgatatgtttatatgattagtaacgtatcttgttggttttaacattaagaattatttaatatcatgtaagaaagaccataaataatcgaattataaatcgattaatgatttttagtcgcgaaagccgttagtgtaaactatttatgatccaac

SEQ ID NO: 169120 - DNA, 278 bp, Arabidopsis thaliana nossen
tgcattgttactaacattgtttcattttcttcttctttagtggtgagctaggacgtcgtctaatgatccgtgactcaggaatgggattcctcactgtccaaaatcagaatcaacgcttcttcttctattgctttatctatcttcttgtagtgacggtgtgttgttcatttggattgtataaactgatttgcattctgatatctttgaagtgtgttgtgctgctcacttggattatgttacaaaactgatttgcagtctgatgcttttttatatgaagg

SEQ ID NO: 169121 - DNA, 401 bp, Arabidopsis thaliana nossen
ctctccaaaaacaaacgaaaagttgcgacttttgcctcttttggtctctccccttctccggagagatctgctctctctatctatctctcaatctgtaagaagaagattcccacttcagtaaaagccctaactttacttgggaaagttcttcatctatcatccttcaatcgtcatcatccatggctgatcaacaaaccctagattcctctactcctcctcctactcaatccgatgatctatctcactcccactctacttcctctactacttcagcttcttcttcctcagatccatcactcttgaggtctctctccttaagtcgactcaacgccggagctcctgagttcgttcctggtcgaactactcctccgctgccctaacctccgaggatgattatcccg

SEQ ID NO: 169122 - DNA, 291 bp, Arabidopsis thaliana nossen
  unsure (1)..(291): unsure at all n locations
gcgcctttaccagtaccttatgtcctgactatgatcngaccactcgaagaataggcagtttgatagtgttgcggccccccccacagctggtggttccctccttgttctctccagccttacccttgttggaactgtcatagctttgactgttgcaacacctatgctcgttatcttcagcccaatacttgtcccggctctcatcacagttgcacttctcatcaccggttttctttactttggagggtgtgacatttccgctataaccgtttagtcttggatttacaagtacgc

SEQ ID NO: 169123 - DNA, 370 bp, Arabidopsis thaliana nossen
attattttcactgagcgcataacatttttgagacaagagactctctctctctctcttctctctgtctctccccctctctccggcgatggttgttgctatggaccaacgcaccaatgtgaacggagatcccggcgccggagaccggaagaaagaagaaaggtttgatccgagtgcacaaccaccgttcaagatcggagatataagggcggcgattcctaagcactgttgggttaagagtcctttgagatcaatgagttacgtcgtcagagacattatcgccgtcgcggctttagccatcgctgccgtgtatgttgatagctggttcctttcgactctttattgggccgaccaaggacacttttctgggcca

SEQ ID NO: 169124 - DNA, 393 bp, Arabidopsis thaliana nossen
gacacgacaacgatgccagtgatgctattccactaaactctactctaatttagtaattttgatcaaattagattcctaaatttcatcttgtttaattttggcatttacgatgaaatatttggaaatacaagtaagagacggtatgatttaattttggtctagaaaagttagagttgaatggttatagtagtagccactatttatggtggataaatacttagtaaaatacaaaatacgtgacagctttttgggtgccagaagttataaatacattggtggacagtttttattgacaaataatttcttttcttttttttggcaaaaaataatttctttttactttgactaaaatatgaggagaacattactatgttgaaatgagtggaaaatcaa

SEQ ID NO: 169125 - DNA, 264 bp, Arabidopsis thaliana nossen
aatgaacggaaaaaatcataacatacacattgttttctttggtctttaataatttagaacattttttattgacgagccacagaaattgcacctatcaaagcaactaaaagaattattgaaatgagttcaaatggcagaaaaaaatctgttgataaatgaattcctatttgttgactattacttattaaatcttgctctagaatctggtttaattttgtagtccaaataaccccgtaccatgacgtatcgagaatagtagacatt

SEQ ID NO: 169126 - DNA, 391 bp, Arabidopsis thaliana nossen
ttcaagtgtttgatcataatggtaacatcagctcgtagagcatacggtttcggtagagccgatgaggctacacaccctgactccattagagcaactttagctgagtttctctccacttttgtcttcgtctttgcagctgaaggctctatcctctctctcgataagttggattgggaacatgcggctcatgcggggacaaacacaccaggagggctgattttagtagcgttggctcatgcgtttgctctgtttgctgctgtttcagcagccattaatgtcttcggcggacacgttaacccagcagtcacttttggtgctcttgttggaggcagagttacagcgatccgcgccatctactactggatcgctcagcttcttggagccatactcg

SEQ ID NO: 169127 - DNA, 380 bp, Arabidopsis thaliana nossen
  unsure (1)..(380): unsure at all n locations
gtcaaatagtctacaaattttgtattatattatatattattngtatttgatttgagcaacagttttagatcgccctgtttcaattttttttatagagtttttatcataattttgcatataatagaagtagtaattataaaaatattatatattaattatcaattgggtttttgctaaacggagcctggatacttcattttattagtccgatcacgtaaaccataaaaaaattttgataatctaatatcaatctaaatactccctgcatttaattccactttattttttgcgcttcgcgttacaaatttttgataattcaatcaatctttttgagcgaaacagaggatatctcgatcgagggagaaaatggggaaatccca

SEQ ID NO: 169128 - DNA, 238 bp, Arabidopsis thaliana nossen
  unsure (1)..(238): unsure at all n locations
acacattttaaaagaaaacaatctttcgttttataggcaatgactggaacatacatggtggatgtatccaatgtgttgtggagcgcacgnanaaacactacaagaagtggaggaacgaaaaccacgtcttccaagatgccgtcggccaccacatccaaggttgcactatgcatgacggtgactgggactcccactgctccatcagatcatggaatattacatgcgatggaaagccgga

SEQ ID NO: 169129 - DNA, 393 bp, Arabidopsis thaliana nossen
gtccgttaacgttatgctcctttaccgttacgtcttaaccaactttttcaacctctgtttgttcccgttaacggcgttcctcgccggaaaagcctctcggcttaccataaacgatctccacaacttcctttcctatctccaacacaaccttataacagtaactttactctttgctttcactgttttcggtttggttctctacatcgtaacccgacccaatccggtttatctcgttgactactcgtgttaccttccaccaccgcatctcaaagttagtgtctctaaagtcatggatattttctaccaaataagaaaagctgatacttcttcacggaacgtggcatgtgatgatccgtccttgctcgattttctgaggaagattcaagagcgttc

SEQ ID NO: 169130 - DNA, 391 bp, Arabidopsis thaliana nossen
cgtagccgcaagactcctttcagattcttacttgcagctatgggtaaagagaagtttcacattaacattgtggtcattggtcatgttgattctggaaaatcgaccacaactggtcacttgatctataagcttggtggtattgacaagcgtgtcatcgagaggttcgagaaggaggctgctgagatgaacaagaggtccttcaagtacgcatgggtgttggacaaacttaaggccgagcgtgagcgtggtattaccatcgatattgctctatggaagttcgagaccaccaagtactactgcacagtcattgatgccccaggacatcgtgatttcatcaagaacatgattactggtacctcccaggctgattgtgctgttcttatcattgact

SEQ ID NO: 169131 - DNA, 390 bp, Arabidopsis thaliana nossen
caaagattgtcctgtcgatgctaactcaggagaccctttgttcttggagcctttctggatgcaacaagcagagagaagcgcggttttggtctcgggatggcacaggatgagttatatttatgaagatgggacatatgtgtctcgagagctcgagaaggtcattagaaaacttcatagtgtagtgggaaatgcagttacagataacagattcgtaatctttggatctggtaccacacaattgcttgcagcagctgttcatgccttgtctttgacaaactcatcagtatcatcacctgcaaggcttctgacttctattccatactatgctatgtacaaggaccaagcagagttctttgattcagcacatctcaagtttgaaggaaatgcgtc

SEQ ID NO: 169132 - DNA, 402 bp, Arabidopsis thaliana nossen
ggacgaactcgattcattatttacaaaatatagatcgttcatatactctattgtgtctgaaacttatggtttacattggtgcaaatccaatcaactccattttttagaaaacccccaatgataacaaatgagtatccattaagcgggggaaattccattttttagaaaaaagattccactcttgaaagaaaagaacggactaacagggtaaatgacctaatcaattttcaaaatgaaataccgttactgtataaaggggatctcattgtgaaagacctattactggaatattcatggggtagagccaaagaatgtgaattgtacaagttaccaatagtattgattaattaaaagaaggagctccggtgtatagagaggacctcaccgttttagaagtaacca

SEQ ID NO: 169133 - DNA, 354 bp, Arabidopsis thaliana nossen
cacgcgtccgggaagaacaaccaacaacattgtacagtcttatcgctctacgaagaatgggaaaagagatcaaaagccacgattagacatatggtgctaaacgatcttcagagcaagaaagactcaaagctactaaggaggaatctaatgtctcagtagtagtagatgatacaactacacaatcaaagctctctgatgatgatgatcatgcagtgaatgactcttcagagaaaactgagaaggaagagactataaatggcttggcttgtgatgatgaagatgaggaggagaaggaagaaagccaaaaattagatgctataactcacgagaagacagattctgtatcttcttctg

SEQ ID NO: 169134 - DNA, 327 bp, Arabidopsis thaliana nossen
ctcgttctcatctttctctttaagagattttgtaggtgacaatcaaaagtgtgacaaaatggtgaagttgacagctgatgagcttcgaaggattatggactacaaacacaacatccgtaatatgtctgttattgctcatgtcgaccacgggaaatccactcttactgattctttggttgctgctgctggtatcattgcccaagagggtgctggtgatgtccgcatgactgataccagagctgatgaggctgaacgtggcatcactatcaagtccactggtatttctttctactacgagatgactgatgaatgctttacgagtttcac

SEQ ID NO: 169135 - DNA, 412 bp, Arabidopsis thaliana nossen
atttctcacattttcgtagccgctagactcctttcagattcttacttgcagctatgggtaaagagaagggggacatgaacattgtggtcattggtcatgttgattctggaaaatcgaccacaactggtcacttgatctataagcttggtggtattgacaagcgtgtcatcgagaggttcgagaaggatgctgctgatatgaacaagaggttcttcaagtacgcatgggtgttggtcaaacttaatgccgagcgtgagcgtgggattaccatccattattgttctatggaagttcgaagaacattctatgtctacttggttagaaattttttgtccccagtatattgtggatttttttttataggctgtttttctggtatttttcccaggctgttttttttgtgttttttttt

SEQ ID NO: 169136 - DNA, 253 bp, Arabidopsis thaliana nossen
gcggctcaacagggtcagcagggtcagcagtttccgaacgagtgccagctcgaccagctcaatgcgctcgagccttcacacgtactgaagagcgaggctggtcgcatcgaggtgtgggaccaccacgctcctcagctccgttgctcacgtgaatactatgcacgacacatcatcgagtgtaaggggctttacttggcctctttcaaggacaccgcgaagctctccttactgatttaagggccagggtgtacgg

SEQ ID NO: 169137 - DNA, 384 bp, Arabidopsis thaliana nossen
catggttccgctctgcaagaactccgaatcattctcttgaagctcatacttttcatcataaatgatccgcttgccccgaaatgacccggccgaatagggaaatcccaattcattaggcctttcgatacaatcaaatagaaagccccgagggcgccatattctaggagcccaaactatgtgattgaataaatcctcctctatctgttgcgggtcgaggactccttctccttccccttcttcaaactccgattcgtatttttcatagagaaatctctgatcaacgatagaacaagatccatcttgcatcatatataagggatcccttggttcggagcgaaaaagcaatgtcactcgatcattatcaaactgactgcaatctttttc

SEQ ID NO: 169138 - DNA, 382 bp, Arabidopsis thaliana nossen
cgagtacggaaatccgatgggaggaggaggatacggaactggtggtggtggaggagctacaggtggccaaggatacggaacaggtggccaagggtacggatcaggtggccaagggtacggaaccggtggccaaggatacggaaccgggaccgggactgaaggctttggaactggcggaggagctaggcaccacggccaagagcaactccacaaggaaagtggtggtggcttgggaggaatgcttcaccgctccggatctggatccagctctagctcggaggatgatggacaaggagggaggaagaagaagggaattacacaaaagatcaaagagaagttgccaggtcatcatgatcagtctggtcaaagctaaacgatgggc

SEQ ID NO: 169139 - DNA, 359 bp, Arabidopsis thaliana nossen
gtaaaaacaatttctcattagcttacaatggcggatacacaccgtgtcgaccgtactgatagacactttcaatttcagtcgccctatgaaggcggccgaggtcaaggtcagtatgaaggtgaccgtggttacggtggtggcggttacaagagcatgatgcctgaaagtggcccatctagtacccaagtattgtccctgttgattggagtccctgtcgtcggttcgctacttgccttggctggattacttctagctggttcggtgatcggcttaatggttgctttaccactatttctcctcttcagcccggttatagtcccagcggctctaactatcgggcttgcaatgacaggcttttt

SEQ ID NO: 169140 - DNA, 300 bp, Arabidopsis thaliana nossen
  unsure (1)..(300): unsure at all n locations
gcgatcccatcgcagtccgcttttcttctctcttcttnntttctccgcgagaagagaanntctcttcttcgtggttagcgtttagagttccgtaccgaaaacaaatagaaaagagatgagatggncggaagagaagaaagctccaatcagtgtctggactaccgtgaagcccttcgtcaatggcggtgcctctggtatgctcgctacttgcgttatccagccgatcgacatgattaaggtgaggattcaacttggtcagggatctgcagcaagtataaccaccaacatgcttaagaatga

SEQ ID NO: 169141 - DNA, 309 bp, Arabidopsis thaliana nossen
cggacgcgtgggctgaggttttggtgacgatggcgacggcggtagtgatgaacggctagctgtttaagcaacctcggccaggtaaaggcggctatcagggccgtggattaactgaagaagaagctcgagttcgcgccatatcggagattgttagcaccatgattgagcgttcacaccgcaacgagaatgttgacctaaacgcaattaaaaccgccgcttgccggaaatacggcctagcacgtgcgcctaagctcgtggagatgattgctgcgcttcctgattcaaagagagagactcttcttccgaagc

SEQ ID NO: 169142 - DNA, 263 bp, Arabidopsis thaliana nossen
cttaaacaatagtataaaaacatgaatcttattcctttaaattctaaggtgaattctaatttactttctaatttgtgtaaaaatataaaatatagaaaaatgggtgaacttgattatcaagaaaaagatccaaattggaaagctaaaatattattatttagaaggtagaaccaaaatttatgactaaaaatatttttctttgaataaaatatacctcatatggaaaatattttttcagacaaaaacataactccttttctttt

SEQ ID NO: 169143 - DNA, 396 bp, Arabidopsis thaliana nossen
ctcaagccttctcatctttattcgtcaaggtgaagcaacccttggagtgatatgcaaagacgaattcggagagaggaaactgaaagcaggagacatctactggattccggctggttctgtcttttatttacataacacaggcctaggtcaacgccttcatgtcatttgcagcattgatccaacgcagagtctcggcttcgaaaccttccaacctttctatataggtggagggccttcgtctgttctagctggatttgatcctcacactttaacttcagcattcaacgtttccctacctgagctgcaacaaatgatgatgagtcaattccgtggcccgattgtacacgtcaccgaagggccacaaccacaaccacaatcgacggtatggacccaatt

SEQ ID NO: 169144 - DNA, 184 bp, Arabidopsis thaliana nossen
ctcaagccttctcatttttatttgtcactgcgcaccaaccctgggagggatatgcaatagacgagggtggagagaggaaaaccaaagcaggtgacatatactggattgcggctggttctgtcatttattttcataactctaacctaagtcaacgccattttgtcataaacagcattgaaccaac

SEQ ID NO: 169145 - DNA, 336 bp, Arabidopsis thaliana nossen
aacagcttcgtcgtctcaacatccacgagtatcagggagctgaattgatggggaaatatggagttaatgtgccgaaaggagtagctgcttcttcgttggaagaagttaaaaaggctattcaagatgttttccctaatgaaagcgagttggttgttaagagccagattttggctggtggaagaggtcttggaacattcaagagtggtcttaagggtggtgttcacattgttaaacgtgatgaggctgaagagattgctggaaagatgctaggacaagtacttgtcaccaagcaaactggtcctcaaggcaaaatagttagcaagggttacttgtgtg

SEQ ID NO: 169146 - DNA, 346 bp, Arabidopsis thaliana nossen
aaacaatcatggcggagaaactcagtgatggcagcatcatcatctcagtccatcctagaccctccaagggtttctcctcgaagcttctcgatcttctcgagagacttgttgtcaagctcatgcacgatgcttctctccctctccactacctctcaggcaacttcgctcccatccgtgatgaaactcctcccgtcaaggatctccccgtccatggatttcttcccgaatgcttgaatggtgaatttgtgagggttggtccaaaccccaagtttgatgctgtcgctggatatcactggtttgatggagatgggatgattcatggggtacgcatcaaagatgggaaagc

SEQ ID NO: 169147 - DNA, 337 bp, Arabidopsis thaliana nossen
attcattcactaaaactataccaaaatgtgacattccttcttcaatatattcctaatgtctcttttactgtacatcaattgcattgcgcatcactatacattcacgggtagggaagttccatatacaaaactgtgtagcacgaaagcgattttaaccgttaatagtcagcttcctggaccgattataaagggtcacagaggagacactatttatgttaacgttcaaaaccgagctaggggaaacatcacaatgcattggcatggtgtagagcaaccgagaaatccgtggtcagatggtcctgaatacattgacacaatgcccgattcgacccgggtc

SEQ ID NO: 169148 - DNA, 359 bp, Arabidopsis thaliana nossen
gtcgacacatcttctctctttatataaacaaatctcacaaaccccaaaaattcatcaaaccctttcttcaccacattattttcactgagcgcataacatttttgagacaagagactctctctctctctcttctctctttctctccccctctctccggcgatggttgttgctatggaccaacgcaccaatgtgaacggagatcccggcgccggagaccggaagaaagaagaaaggtttgatccgagtgcacaaccaccgttcaagatcggagatataagggcggcgattcctaagcactgttgggttaagagtcctttgagatcaatgagttacgtcgtcagagacattatcggcgtcgc

SEQ ID NO: 169149 - DNA, 355 bp, Arabidopsis thaliana nossen
ctctctctctccaccgccatggattcctcctatggcgccacaaagttccttctcctgctcttcctcaccacctgcattgcgaccgcattacccgataacaaaccagtaccgggtcaaataaactcaaactcagtcctcgtagctctcctggactctcactacacagagctagcagaactagtcgaaaaagctctccttctccagaccctcgaagaagcagttggtaaacacaacatcacaatcttcgcaccacgcaacgatgccttggaacgaaacttagacccactcttcaaatctttcttgctcgaaccaagaaacctcaaatctttacaatctttattaatggtccacattc

SEQ ID NO: 169150 - DNA, 271 bp, Arabidopsis thaliana nossen
  unsure (1)..(271): unsure at all n locations
atcacccnataacaaaccagtaccgggtcaaataaactcaaactcagtcctcgtagctctcctggtctctcactacacagagctagcataactagtctaaaaagctctccttctccaaacccttcaagaagcatttggtaaactcatcatcacaattcttcgcaccacgcaacgatgcctttgaacgaaacttagacccactcttcaaatcttttttgctcgaaccaagaaaccttaaatcttaacaatctttaataatgttccacattct

SEQ ID NO: 169151 - DNA, 374 bp, Arabidopsis thaliana nossen
agcgattctcactaaaaccctcgaacacatcgcctttatctctttctctagatctactcgctatggctactatcaccgttgttaaggctagacagatcttcgacagtcgtggtaatcccaccgttgaggttgatatccacacgtcaaatggtattaaggttacagcagctgttccaagtggagcttccactggtatctatgaggctcttgagctgagggatggaggatctgactaccttggaaagggtgtatctaaggctgttggcaatgtgaacaacatcatcgggccagcacttattggaaaggacccaactcagcagactgctattgacaacttcatggtccatgaacttgacggaacccaaaacgagtgg

SEQ ID NO: 169152 - DNA, 395 bp, Arabidopsis thaliana nossen
cccaaaacacattttgttttttgtttcccatctaaaatgcgtatgagttgtaacggatgtcgagttctacgaaaaggctgcagtgaaaactgtagcataagaccttgtcttcaatggatcaaatccgctgaatctcaagccaacgccaccgtcttcctcgccaagttttatggccgtgcggggctcatgaacctcctcaacaccggtcctgaccacctccgtcctgcgatatttagatcattgttgtacgaagcatgcgggaggattgtgaatccgatatacggatccgtggggttattgtggtcaggaaactggcatctttgtcaagcggccgttgaggcagtaatgagaggctcacccgtgactccgatcgcatgcgacgcagcggttactgg

SEQ ID NO: 169153 - DNA, 131 bp, Arabidopsis thaliana nossen
gtcagagagcactatgtactaatgtacagtcatggatgccccacgacatcgtgattttatcaagtgcaggatcactggttcctaccaagctcattgcagcttttcttatcagtgactctaccactgtatgt

SEQ ID NO: 169154 - DNA, 375 bp, Arabidopsis thaliana nossen
ctccaaagtccaagctcacaatgaacacttccccaaaaatggaaatggaaatgaaaatggaaacgaaggcggctcctgaagctggtatgatcaaaaagtccaacgaggagtggcgtacggttctatctcctgaacagtttaagattcttagagagaaatctattgaaaagagagggtcaggagaatatgtgaagttgttcgaggaaggaatctactgttgtgttggttgtggaaatccggtttataaatcaaccactaaattcgattccggttgcggttggccggctttttttgatgctatttctggcgccatttaccgaaccggtaacctaatcttccctttttttttttttttttatgaatattgaaatttta

SEQ ID NO: 169155 - DNA, 306 bp, Arabidopsis thaliana nossen
acaaaaagaaaatggttaagctcagcaatctcctcgttgcaaccttcggggttctcctcgtccttaacggctgccttgcgaggcagtcacttggggttcctcctcagctacagaacgagtgtaacctcgacaacctagatgttctccaagccaccgaaactatcaagagtgaagccggtcagatcgagtactgggaccacaaccaccctcagctccgatgtgttggtgtttccgttgctcgttatgtaattgaacaaggcggtctttacttgcccaccttcttcacttccccaaaaatttcctacg

SEQ ID NO: 169156 - DNA, 218 bp, Arabidopsis thaliana nossen
cggacgcgtgggtataaatactctaaaagttaacgtaattttttttaaaaattatttaagaaaactaaaataaaaattaaaaagataaagacaaataaaataaagtaaaaatggtctctcatattatttttattctctctcaagataaagggtattatagtatttgatatgtattttgttttttagtctattagacatatccatctctcacaacaaaa

SEQ ID NO: 169157 - DNA, 393 bp, Arabidopsis thaliana nossen
gcaaatgatgcattaccttatgagtgtggtgtgaatatagaagaattgatcaagttagaagatgttatgtcggaacactcgcttggtcctaatggaggtcttgtatattgtatggagtacttggagaaaaacattgactggctggaatctaaactaaagcctcttctgaaggatcattacattctctttgattttcctggccaagtggaattgttcttcattcatgacagtaccaagaatgttctcacgaagctgattaaatcattgaaccttagattaactgctgtgcaactaattgattcccatctatgttgtgatcccgggaactacgtaagttcgctacttctctccttatccacaatgcttcacatggaaactccacatgtcaatgta

SEQ ID NO: 169158 - DNA, 386 bp, Arabidopsis thaliana nossen
tcggacgccgaaactagtatcaggaatgtctcaagagagaggggccagaaggtcaccctgaacagaggttttgcagacaatagaaagcagtaagcaagcatgttaccaaagttcgatccaacaaaccaaaaagcttgtctgtctcgtcttgaggatttgaccaccaacgtaaagcagattcaagattccgtattggaagcaatactttcacgtaatgctcaaactgagtatcttagaggtttcctcaaaggccaagtcgttaagcatgacttgaacaaatacataccacaacgtgacctacgaagattttaagtcttatatcgaccgtatcgctaatggagagccgtctgatctcatctgtgatcgacccatcagtgtactcttga

SEQ ID NO: 169159 - DNA, 381 bp, Arabidopsis thaliana nossen
gttatgcttggatcacttttggatatacctgaaagtggagatgattgatagtggcaaaagcacccaagctgttgtaaccgagtctgaagtatggattagcagcctcagcagccatgtgaactgcaagcaaaaggcttttgtgatcgatcctttgaggcaagcagtcaagaacacgaggaatcagcagcacatggccatactctatcggactaacctgttaaaaacaacaataaagaattaatcttttgctagcgaaaccaataaaaggaagaaaaaaaaaaccaagctctctgcacaagagtctttacattgatggcaacaacactgggagaattctcagggtcaataggcatgcaagggaagaactgaacttgggcattt

SEQ ID NO: 169160 - DNA, 387 bp, Arabidopsis thaliana nossen
ggataggcttgttagtgctccatacaagcttaactttagagatgagaaagactcagaggtgtactgtaaaaagaagcttagtagagaagaagttgaacactttcgaagagctgttgaaaaagattattactttcagatgtattatgatgatttgcctatttggggattcattgggaaggtggacaaagagagcaaatctgatcctagcgagtttaaatattttctctacaaacacatccagtttgagattttgtacaataaggatcgggtgattgaaatcaatgctagaatggatcctcattcgcttgtggatcttactgaggataaggaagtcgatgctgagtttatgtacactgtgaagtggaagggaactgaaacttcttttga

SEQ ID NO: 169161 - DNA, 391 bp, Arabidopsis thaliana nossen
cacagacactgcactcgatctttctcgtggccaaatcttttgattctccgttcattctccggttccgatctcgaagaagatgagagtagtagtaatatcttcctttgtctccgtctctttgcaactatcctttcttcttctccttgcttctgccattagatcaagctcgtctccaccgaacgatccgtttctcggcatttctcctcaagatgagaagtattacaagtcatcttcagagattaagtgtaaggatggatcaaagaaattcacgaaagctcagcttaatgacgatttctgtgattgttcagatggaactgacgagccaggtacctcagcttgtccaactggaaaattctattgccggaacgccggccactctccggtgattttg

SEQ ID NO: 169162 - DNA, 390 bp, Arabidopsis thaliana nossen
gatcttaaacagactttttacattgtgtatatttagagcggtgtattcaatctaataatttatgtaaaatttataaattttatgttatttaattatggattttaaattttttaatgaaattgagtgttattaaattaaagatttaaaaatcaacctttttactgttactgaaaatagttagtggatttgattcttattaattttgaaggatttgaaaggatttgagaagatttttttaattaaaaatacagaaatctaaatctcatagttttagatagaatttgaaaagactttacagtaaatcacatcaacttacctaaaatcatcaaaattatataaaaactcacttatatcttaccaaaaaatatgttctttaataattcagtacct

SEQ ID NO: 169163 - DNA, 378 bp, Arabidopsis thaliana nossen
tcggccgccgaaactagcatcaggaagctcccatctctctccggcctccgtcaccgacgtaatccactggaagataatccctacttccacccctccaatggcttctacatcactccttctgacgtcatcctcgcccaggtcgcctacgacctctccgcccaatcccaatcacgcgtggcctaccacagggctgggcctcgccgtgagatcatgtacgagccatcggctgtgaaggcggcgatcgtaacgtgcggtgggctgtgccctggcatgaacacagtcataagagaactcgtggtgggtctttgggagctgtacggtgtgagagagatatatgggataccagctggttacagaggcttttattccatggaagcc

SEQ ID NO: 169164 - DNA, 354 bp, Arabidopsis thaliana nossen
ggttatgacatctacggagctaatgtgaacgacaatgaaatggagaaataccgtctgagtgtgaagaatgggcttcctgaagcaattctgatcaagaaatgttacgaggagcagagagagaggaagcagaagaaatcccgtaactggaaactcaagtcgcttccaatggaaatggatgattcaagaggcagggttgatccagagaagacagacaaagaatacgaagagtttttgagggatcttgaagaaaaccctgagctaaggttcaacatatctttgtacagggacaaggattatcaagcttctgagactgctttaatgacagatggagaaggggcaccatctgttccaatt

SEQ ID NO: 169165 - DNA, 365 bp, Arabidopsis thaliana nossen
cggacgcgtgggtctatctttacgtcataataataacaaaaaattcgtaaaaagatgagttttgttaattacttctcttattataatcaaagttttgatttttattttccaataagtcgccgggaaaagtaaaataaaaagccgtcacgtctccgataaataatagagtatcgttagataggtagcttcaacgtaaggaatctaaattggttcagctcaaaaaacgaaaacgatgggttccatcgaagaagaagcaagacctctcatcgaagaaggtttaattttacaggaagtgaaattgtatgctgaagatggttcagtggactttaatggaaacccaccattgaaggagaaaacaggaaact

SEQ ID NO: 169166 - DNA, 369 bp, Arabidopsis thaliana nossen
gttcttggtccggtaactaaatgcataatctctgcaaaaaacatcacagaaaccaaatcatcaaccattagtagtacaacaaccagacaaaacataggtacaggcttttataaaaaaaaaaattctgagagacatgacacaacaaagaaaagtttgttctttgatgatactgagactcgttcagatcatggaccaacggatcaaagaatagtcaaaactcaataccattaagctccacataatcacagaaggtgaaataaaaataaaaataaaaagcattttgttttgaatctgacccatttagcaaaaatgaatggatgagaagaaaagatgtatcagtaatcaaacctaacaagaaagctaaagact

SEQ ID NO: 169167 - DNA, 366 bp, Arabidopsis thaliana nossen
ttataacatatgtatgtatacaaccttttataaatcataaatcaacttaaaccacaatgataagtacaacaaatttatccaaagatatgatactcatataatataaacattgtatatgcatttgttgagatatgatatatcatatatgtatatgtcatatttgatattcataaaaaaaaaaagtatagtatgataatcacaatcaatatactttgtgccctcattgaaagctaaatgttaagatcatcaagctttgatgatcttgattacaaccatgttttattattgttaagcaaaagacccaaaattttaatatcaagttttcaccaccgtcacaaagcgatcctttatggtaaacttctattt

SEQ ID NO: 169168 - DNA, 367 bp, Arabidopsis thaliana nossen
cttatttccaactctgtctctctcaattttctttttctttctccaaacatgaagttctctatgcgtttgatctcagccgttcttttcttggtgatgatattcgtcgccacagggatgggtccagtcacggtcgaggcacgcacgtgtgcgtcgcagagccaaagattcaagggtaaatgcgtgagcgatacaaactgcgaaaacgtgtgccacaacgaaggcttccccggaggtgattgccgtggattccgtcgtcgttgcttctgcaccagaaattgctgatccatcaatcgattctcatgcatgactcaatcgtcgatctattgcgttttgttacttctttccgtcgtctaatattccgaacgac

SEQ ID NO: 169169 - DNA, 321 bp, Arabidopsis thaliana nossen
cattattttcactgagcgcattacatttttgagacaagagactctctctccctctctcctctctacctctccccctccctacgccgacggttgtagctatcgaccaacgcaccaatgtgaacggagatcccggcgcccgagaccggaagaaagaataaaggctcgatccgagtgcacaaccaccgttcaagatcggctatatcttggcggagacatctaaccactgatgggataggagttctttggaaccaatgaagcacttccccagagacattctcgtctacctccgttttggccatagctaccggctatagtgattgc

SEQ ID NO: 169170 - DNA, 376 bp, Arabidopsis thaliana nossen
agcttatcatctttgtgcttcctgcaaatagctctttgttgttgatctttctcctccatcaacaaacatgggtaagacacgtggtatgggagctgggcgtaagttgaagagactccgaattaaccagaggtgggctgacaagcagtacaagaagtctcacttgggaaatgagtggaagaagccttttgctggttcttctcacgctaaaggaattgtccttgagaaaatcggtattgaggctaagcagcctaactctgctatccgtaagtgtgctagagttcagcttatcaagaatggaaagaagattgctgcctttgtccccaatgatggttgtttgaactacatcgaggaaaacgatgaggtcttgattgctgga

SEQ ID NO: 169171 - DNA, 363 bp, Arabidopsis thaliana nossen
attattttcactgagcgcataacatttttgagacaagagactctctctgtctctcttctctctttctctccccctctctccggcgatggttgttgctatggaccaacgcaccaatgtgaacggagatcccggcgccggagaccggaagaaagaagaaaggtttgatccgagtgcacaaccaccgttcaagatcggagatataagggcggcgattcctaagcactgttgggttaagagtcctttgagatcaatgagttacgtcgtcagagacattatcgccgtcgcggctttggccatcgctgccgtgtatgttgatagctggttcctttgggctttttattgggccgcccaaagaacactttt

SEQ ID NO: 169172 - DNA, 372 bp, Arabidopsis thaliana nossen
tcgcattattttctttgagcgcatttcatatccgagacaagagactctctctctctctctgctctctttctctccccctctctccggcgatggttgttgctatggaccaacgcaccaatgtgaacggagatcccggcgccggagaccggaagaaagaagaaaggtttgatccgagtgcacaaccaccgttcaagatcggagatataagggcggcgattcctaagcactgttgggttaagagtcctttgagatcaatgagttacgtcgtcagagacattatcgccgtcgcggctttggccatcgctgccgtgtatgttgatagctggttcctttggcctctttattgggccgcccaaggaacacttttctggg

SEQ ID NO: 169173 - DNA, 377 bp, Arabidopsis thaliana nossen
cggaagacaattatgatgatgagtagcagcagtagcagtagcaatagtagtagtagttatacaagatgcgttaaaactcggtcatctacaaatactaacattgggaagaaactgaaaggtggtgaaaatggtgttgtaaatcgaaaggcgttaaatcgagagaagataattactctgcaagaagatgttgaaaagttgaggaagaagctgagacttgaagaaaacattcaccgagcaatggaaagggcatttagtagacctcttggagcacttccccgtcttcctccgtttctacctccatcggttttggagttacttgcggaagtggctgttttggaagaggaaatggttcgcttagaagaacatattgtgcattg

SEQ ID NO: 169174 - DNA, 380 bp, Arabidopsis thaliana nossen
cggaagacaattattatgatgttttgccaccgttgccggtgccatagtggtagtagttatacaagatgcgttaaaactcgggcatttaccaaatcctaccattgggaagaactgaaaggtggtgaaaatggtgttgtaaatcgaaaggcgttaaatcgagagaagataattactctgcaagaagatgttgaaaagttgaggaagaagcttagacttggagaaaacattcaccgagcacatgtgaagggcatttagtagacctcttggagcactttcccgcgtttctctgcgtttacatccatctggtttggagagactcgcggaagaggctgttttggaagaggaaatggttcgcttagaagaacatatagtgcattgta

SEQ ID NO: 169175 - DNA, 342 bp, Arabidopsis thaliana nossen
gcaagcgcaggaccacacgccattcctagagcacttgcactaacaaaacccgcagaagcttgcatcctgatctttaacggtacacagtcgcttatatatctccggttcactgctctcgccgatcccaatctgaaaaaaacagtatgataagaatataagtaatccatcaagaagtgatactatgagcattttgaagtctaaagagacttacccacagaaaagccgcccgatcaagagaaccgctattgaattgaagtcaaaagctaatgcatataacaagttcccaatgaagagaacaatgctactgaatatgaatggtttgaagtaagatctattgggcca

SEQ ID NO: 169176 - DNA, 370 bp, Arabidopsis thaliana nossen
cggaaaggctcatatacaaatggtgaacgacaacggagaaagagtgttcgaccaagagatctccagcggacagttactagtcgtgccacaaggcttttcggtcatgaaacatgccataggcgaacagttcgagtggatcgaattcaagacaaacgaaaacgcacaggtcaacacactcgcgggccgtacctcagtcatgagaggtttgccgcttgaggttataaccaatgggtaccagatctctcccgaagaagctaaacgagtaaagtttagcacgattgagaccacactgacccatagcagtccaatgagctacggaaggcctagggcttgaggcttgatgagcgcgtggtggaatagcgtttgaatc

SEQ ID NO: 169177 - DNA, 369 bp, Arabidopsis thaliana nossen
gaaaaaatcaatacattcgactatggaacttttactcccacacgcttcaaactcatgtcctctcactgttcttggcttcttagaacgagccgcctctgtcttcggcgactctccttcactcctccacacaaccactgttcatacttggtctgaaactcattctcgatgtctccgtatagcttcaactctctcttccgcttccctcggaatcaaccgcggccaagttgtctctgttattggtccaaacgtcccatctgtctacgagcttcagttcgcagttccgatgtcaggcgcagtcctcaacaacatcaacccacgtttagacgctcatgcactctccgtccttctacgtcacagcgaatccaagct

SEQ ID NO: 169178 - DNA, 372 bp, Arabidopsis thaliana nossen
ctattttcacattctcttctctctcgatatcatctaaatctctctcgatctcaatttcgcaaaatggctgacaagaagatcagaatcggaatcaacggtttcggaagaatcggtcgtttggttgctagagttgttcttcagagggatgatgttgagctcgtcgctgttaacgatcctttcatcaccaccgagtacatgacatacatgttcaagtatgacagtgctcacggacagtggaagcaccatgagcttaacgtgaaggatgacaaaactcttctcttcggtgagaagccagtcactgttttcggcatcaagaaccctgtggacatcctatggagtgaggctggagctgactttagtgttgagtctact

SEQ ID NO: 169179 - DNA, 377 bp, Arabidopsis thaliana nossen; identical to SEQ ID NO: 132059

SEQ ID NO: 169180 - DNA, 377 bp, Arabidopsis thaliana nossen
ctcacctcaagtgatccaatcttgatagagcaagaatgttttttctgagtaggcacttctgctttactagagcaagtagctgcagaaggacaatcaccacaagaacagccaagagactcatcaccacatgaataaatagacacattcataggcctcattccagacgacacaggcggtgttggcaaaaaagcgatcccatacggtgagcctggcaaattgacacccgctttctgaccaataaatgtaaaccactctgatgacacaacaaacatctcagttattccaagataagtaaacacaattgaactagtcttgagacatatcaaataaacatctacccttaaagttctttgcaccggctccgagaaagtctaaag

SEQ ID NO: 169181 - DNA, 202 bp, Arabidopsis thaliana nossen
cggaagacacatattatgatctttagatataatatcaatcgcaataggggtagtagttatacaagatgcgttaaaactcgcacaactacaaatactaacattgggaagaaactgaaaggtggtgaaaatggtgttgtaaatcgaaaggcgttaaatcgagagaagataattactctctctcatcaccaccgagtacatgaca

SEQ ID NO: 169182 - DNA, 291 bp, Arabidopsis thaliana nossen
gtcaatttttagggtttgactctaaatcttacaattggaaactgtaacggctatatttcggagagagacgttgtaaaatttggttttacggtaatgcccctggcgctaatgtacactcttcgtttatttgcggaataaatctgcaattcttaggttaagtatagcaacagatcagaccaattttacacacagactagtaaatactaataaaattactggttatactcctctcaaatcttacaaaccaaagcaaaaaaccacttggtattacttatatgatttaacaagact

SEQ ID NO: 169183 - DNA, 349 bp, Arabidopsis thaliana nossen
  unsure (1)..(349): unsure at all n locations
tcggtcaatttttattctttgacatataatcccacaacnggagactgaagcggctattttggcggatagagaccttgacaaaatactcattacagataagcctctggtactcatgtacactctataggatatatgaggaataaatatgcaatacttaggataagtaaaaaaacagatcataccaagtttacacacagactaatacatactgataaaattgcaggctaaactcctagaacatctaacaaaccagagctaaaaaccaaccaggatttcttattggaaatcacaagacccaaaattttaatatcaagtttacaccaccgttacaaagcgatcctatatgggg

SEQ ID NO: 169184 - DNA, 371 bp, Arabidopsis thaliana nossen
gatccttctctcatcctcagtaacacatcacaaagaatggctcaaaccatgctgcttacttcaggcgtcaccgccggccattttttgaggaacaagagccctttggctcagcccaaagttcaccatctcttcctctctggaaactctccggttgctctaccatctaggagacaatcattcgttcctctcgctctcttcaaacccaaaaccaaagctgctcctaaaaaggttgagaagccgaagagcaaggttgaggatggcatctttggaacgtctggtgggataggtttcacaaaggcgaatgagctattcgttggtcgtgttgctatgatcggtttcgctgcatcgttgcttggtgaggcgttgacggg

SEQ ID NO: 169185 - DNA, 370 bp, Arabidopsis thaliana nossen
  unsure (1)..(370): unsure at all n locations
cggacgcgtgggccacgaggcacatcctaagaattataatcaactgcaagaccttcacatagccgccgcttgggctaacatgacacagggatccttgttccttcctcattttaactctaagaccacatttgtaacgtttgtggagaatggttgtgcccgcttcgagatggctactccttataaattccaaagagggcaacaacaatggccaggacaaggacaagaagaagaagaagatatgagtgaaaacgtacacaaagttgtgtcacgagtgtgtaaaggcgaagtttttatcgttccggcaggtcatccattcactatactctcgcaagatcaagactntatcgcggtagggtttggtatttatgcg

SEQ ID NO: 169186 - DNA, 374 bp, Arabidopsis thaliana nossen
gtggtgggcaaagaaaagaaccaaacacgccactaggagctaccatctgtgttttattgctgcttctgcttcctcttccattactcgtctcaaaacaaaggagaaagagtcaagagacatgcatgcgaagacagactcggaggcaacaagcatcgacgcagcggctttgtctccgccgcgttcagcgattagacctctttactatgtacagagtccatcaaaccatgacgtggagaagatgtcatttggttctggttgcagcctaatgggttcacctacacatccacattactaccattgctcaccaatccatcactcccgtgagtcatccacctctcgcttctctgaccgtgctctcctctcttacaagtcca

SEQ ID NO: 169187 - DNA, 375 bp, Arabidopsis thaliana nossen
gggcaaaacatagcttatgatgtgatcatatgatcccaaaatattcatgaaccgtgtccagattcatatgctatgtttattaaaaggactactttcgttctttcatctattatccatcaatgcattgattttttttccaaaaaaatttatctaccagactttcattaacaacataccaaggaaaacctcgttgaaattaataacctatttcactaatatgtcaaaatgcttgaaatgatatatatttattttattatattggcttcacttgttacaacttgctaccatatcagttgatgtgtattagttttattgttgtatatcacatcaattagttttattgttgtatttgctagccatgaagttaaatcagaa

SEQ ID NO: 169188 - DNA, 367 bp, Arabidopsis thaliana nossen
gggcaaaacatagcttatgattatatcatatgatcccaaaatattcatgaaccgtgtcgcgagattcatgtgctatgttgattaaaaggactactttcgttctttcatctattatccatcaatgcattgattttttttccaaaaaaatttatctaccagactttcattaacaacataccaaggaaaacctcgttgaaattaataacctatttcactaatatgtcaaaatgcttgaaatgatatatatttattttattatattggcttcacttgttacaacttgctaccatatcagttgatgtgtattagtttcattgttgtttatcacattatattttgttttattgacgtattttctagcctatga

SEQ ID NO: 169189 - DNA, 380 bp, Arabidopsis thaliana nossen
agattctacgctatatcagctgaattccctgagtttagcaacaaggataagaccttagtcttccaattctctgtcaagcatgagcagaagcttgactgtggtggtggctacatgaagttgctaagtgatgatgttgaccagacgaaattcggaggagacactccttacagcattatgtttgggccagatatttgtggctacagcactaagaaagtacatgctatccttacttacaatggaaccaaccatttgatcaagaaggaggtcccatgtgagactgatcagcttactcacgtgtacaccttcgtcctccgtccagatgctacttacagtattttgattgataatgttgagaagcaaactggtagcctttactctga

SEQ ID NO: 169190 - DNA, 351 bp, Arabidopsis thaliana nossen
actaatgaatcgatattcaaaatcattccattctggattcctttttctatcaaagcccctgctttctaaattctcatagggaccccctggaagtccttccagagcctgttgaataatttttatggattctgtcatttcgctaagtcgtactaaataacgagctaatgaatctccttgtttttgccattgaatttcccattcaaattcatcgtaagactcataacgatcaattttacgaagatcccatggtattccggatgcgcgtagcattggtccggataaaccccaatttattgcttcttccccaccaataatcccaactccttcaacccgttctaaaaaaataggatt

SEQ ID NO: 169191 - DNA, 369 bp, Arabidopsis thaliana nossen
gtcatagatagaatgaaagtagcccttgagagagcttgcccaggaagagtctcttgtgcagatattctcaccatcgcctctcaaatatcagtgcttttggtatataaatatacatacatgacgtatcttttattaaactaatcgaaaatgttatcaattaaaagtctatgttttatatagtcgggaggtccatggtggccggttccgttggggaggagagacagtgtagaagctttcttcgctctggctaatacagctctgccctctccgtttttcaatcttactcaacttaaaacagcctttgctgacgttggcctaaaccgcacttccgatctagttgctctttccggtaaaaaaattcatgttaca

SEQ ID NO: 169192 - DNA, 369 bp, Arabidopsis thaliana nossen
cttcttcttcttccttccttctctctccttattaagaaagaccaacacagacacggaagaagtagctgggttcttctctttgagaaggtgaatgcgggagatggggactggagaaactgctttgagactgaaagtttgggtctgcatatggcagccgtatttcttaggcaagtaaaaaagaagtaaagttcaacgttgtaaactttagggcacaataagtatgcttcctatccaagctactattctatatcttctaccaagttgaagatactttagtttgttttcttctggaatattctttatgagacttgtaatccattattgcttcattcttactaaaaatcctaattggtaagggcggccgcttta

SEQ ID NO: 169193 - DNA, 371 bp, Arabidopsis thaliana nossen
tgatacttcatcagatgattgtacaaggaaagtaaactactaggttttagaaaggaaagccgggaaaaagaatcataaagaacttttttttttattggatcgggaatctcattatgtattcggtgtggataaaagatcttcctatgttatactattaaattcttgacgatgaatcgattttatagctccgatattgttattcatgatatttctttcattcgatatcatcgcaatctaattcatctgagtaagtttacaagcgaaagatttctcatctctatgggattaaatcccgagatattccaaagaaaaaaaaaataataataataaacgattaaattatggaagtaaatattcttgcatttattgct

SEQ ID NO: 169194 - DNA, 376 bp, Arabidopsis thaliana nossen
atctggtacttcgatccattgaatcgacgaagcatctttcgcgtttttattcaaaatcccgaatcttgatttcttcttctcgtcgtaaaccaccggagaaccacctcttatcatctccggcaatcggaataccacttgttggtctggaatcactacgaaattctcagtgatcgcgaaatcgtggatcatcgttggttgatcaagcggaatctcgacgtctggtgatttctcaccgtcggatgtgaatctgaagtattttaagtaaggctttgaaacgacgtcgtagcttaaagcgaagagttctcgggtttcgggatcgattttcgggtgggctatcattgttgattttaactgaccgtcgaaatcgtaccgaccc

SEQ ID NO: 169195 - DNA, 380 bp, Arabidopsis thaliana nossen
cacattttcacattcatgtcgaattaattaagttggaaattctgcaaaatcatttcaagaaagaacttgatgagagctggtaggtcttttgattgactttcgtggtctatattctcaatatatagtatatgctttgaaagttgaatatgcactagttcttgttgtgttaagagttaattagcgtgaagtaatataattctcatatcgagtgtttaatttactagctttatgacaaaataatcataatcaaatagaatactaatgaagaaaaaggtaatatatatatgtaagaaagatgaattatgtaaagattgcttttactagccctgtgacaaaaaatgttaaatctttatcaaattgaacgatgattgataattgaa

SEQ ID NO: 169196 - DNA, 348 bp, Arabidopsis thaliana nossen
cacaaggaatggtgagacccatgtcatgatcaaaaccaaactcttcctcagctcttctaaggagacattggaagtcaagattggtcaagaaagagataggaactatgtatctgcttctgttgtgtcctacgtagacagggaagtgtcccttgggtacatcaagtgggagatcaacttcttcatatcctcctcctccattcttcttccccaagcttgaacatctcttcagaatctgcctaagcattgctgtttgagccagttttgtagatttcttgagaatggacatttttgttttttggtggtttgagagaatcttcttggtgttggagagagagagagagagagagt

SEQ ID NO: 169197 - DNA, 362 bp, Arabidopsis thaliana nossen
ttctttctctgctctcaaagctcaagagaactctatccttattaacttacaaggataactaaaaccggtgtaatcacgatcatagtagaagatgggcggtcccggatcatcaccatgtgcttcgtgtaagcttcttcgacgacgatgtgcaaaagattgcatcttcgcaccttattttcctcctgacgatcctcacaaattcgccattgttcataaggtctttggtgccagcaacgtcagcaaaatgttgcaggagctaccagttcatcaaagagctgacgcggtgaatagtctggtttttgaagcaaacgcaagagtaagagatccggtctacggttgcgtaggagcaattttctacttac

SEQ ID NO: 169198 - DNA, 385 bp, Arabidopsis thaliana nossen
gacccacgcgtgcgcacctgggttgggtcgtaaagaaagagaagtttaaaccgaagaagctcgaagaagaacgaaggagattcttcctttccccagatttttcgtttgaagaagaatcgaaaaacttagatttttggttttgctttcggagttattcgaatttgaaatatctgaatctgttgattcatttattctccgcatgaagctgtgttggtgaagtttttcggagatttagggtttctgagttgttcctcgtttggttggtgaataaagcgaagatgaacgtgatgcgtcgtctcaagagcattgcttcgggtcggacctccatttcttcggatcctggtggggactatgcgttgaagagagctaagctggatcaagagaa

SEQ ID NO: 169199 - DNA, 351 bp, Arabidopsis thaliana nossen
ctcgagaagcagagcagagagaaagagattccgagagagagagagaaggagggagagaaggagcttagtggtctcattaccattaccagctccatacgaaccgaaacgacgccgttcgctcaacccttttctctgcaatctctcttcctcccacgagtttctcagcttttctcggatcatctaattaagagaggagatcttgtctcacggtgggattgatttttctcttcacgaagatcgtgttccaggcaattaactgcagaaaatggtgatgtgggtctttggctatggctctcttgtgtggaacccaggatttcactacgatgagaaagtgttaggtttcatcaaggg

SEQ ID NO: 169200 - DNA, 245 bp, Arabidopsis thaliana nossen
  unsure (1)..(245): unsure at all n locations
cacctgggttgggtcgtaaagtatagagaatattaaaccgaataagctcggataanaaggaaggatattgtttctttgggcacatttttcgtttgaagaagaatcgaaaaacttagatttttggttttgctttcggagttattcgaatttgaaatatctgaatctgctgattcatttattctccgcatgaagctgtgttggtgaagtttttcggtgatttagggtttctgagttgttcctagttt

SEQ ID NO: 169201 - DNA, 383 bp, Arabidopsis thaliana nossen
cacaaacacaatctaatcccaaaaatcaaaagatgaatgccacaaagtttgttgtgcttctcgtgattggcgttttgtgtgccattgtcaccgcaaggcaggtcaaagatttgtccacggagaccaaattaggggcctctcttccaaaaactactaccaaaggcattggagctcagctttctgcaactggcacaacttacagcaccagcagtgtcgttagctatgctaatggttttaacaatcccaaaggtccaggggccaatgcattcgaaagtgccaacacatttaccagcggacaagtcactgccaagggtcgcaaggcaagagtttcttctacaagtgcttctgccgctgaaggcgatgctgcagctgcagtgactcgc

SEQ ID NO: 169202 - DNA, 366 bp, Arabidopsis thaliana nossen
ctccctaaatattccgagttcttgatttttgataacttcaggtcaaaatgggagtatactcgagagcggttgcgttttcggtctttgtgtcgtttctgctgtttttcactgcttattctaagagaaatgatggaacattcagagttggcctgaaaaaactgaagttggatcctaacaaccgactcgcaacacgctttggttccaagcaagaagaggccttgagatcttctttgcgttcgtacaacaacaatcttggtggtgattctggagatgctgatattgtcccgctcaagaattacttggatgctcagtactatggtgagattgctattggtactccaccgcagaagttcactgtcatttttg

SEQ ID NO: 169203 - DNA, 298 bp, Arabidopsis thaliana nossen
cggagctctctatcgtcccgggtcggatcatgggttcgttaccgcatacaatctcacagtcaaagaatctttgatttctcccaatcagccggaatttcatctccggtgagattccagcgagtctaagcgagcttcggggactcaaaacgcttgatctgagctataatcagctaaccgggtcgatccctccgtcaatcgggtccttaccggagctatccaatctgattctatgtcacaatcacttgaacggatcaattcctcaattcctctcacaatccttaacccgaatcgatctcaa

SEQ ID NO: 169204 - DNA, 372 bp, Arabidopsis thaliana nossen
tatttgtgttggagggatatattataataaaaagaaccaatggcggaccaaacaagaacccatcacgagatgataagccgagacagtacccaagaggcccatccgaaggccaggcagatggtgaaggcagcaaccgctgtcacagccggtggatccctccttgtcctctccggcttaacactcgctggaacagtcatcgcactcacggtggctactcctctcctcgtcatcttcagccccgtcttggttccagcagtggtaaccgttgctctcatcattaccggattccttgcatccggtggctttggaatagccgccattaccgccttctcttggctctacaggcacatgacgggatctggatcggataag

SEQ ID NO: 169205 - DNA, 366 bp, Arabidopsis thaliana nossen
  unsure (1)..(366): unsure at all n locations
caaaataagatttatggctacacaaactgttgaagatagttctagatctggtccaagaagcactactgtagggaagttattgaaaccattgaattccgaatatggtaaagtagctcccggatggggaacgacccctttgatgggtgttgcaatggctctatttgcggtattcctatctattattttggagatttataattcttctgttctactggatggaatttcagtgaattagactgagaagaatcttgaagntctagctttttagctcgatacaaaaaaaaaaagtatgcaggtcctacaaattttagcctattttctctttggtatgtttcgatccgctaatattttttatttggatttgta

SEQ ID NO: 169206 - DNA, 374 bp, Arabidopsis thaliana nossen
cggacgcgtgggcggatgcaccaaaagtgcagaaggccgtactgacttctgtatagcccatggaggtggtcgaaggtgcagccatgaagattgcacacgagctgctagaggaagatcaggactctgtatcaggcacggtggaggaaagagatgccaaagagagaactgcactaaaagcgctgaaggcctttcaggactctgtatctctcatggtggtggtcggcgatgtcaatctaatggatgcacaaaaggagcacaagggagtacaatgttctgcaaagcacacggtggtggaaaacggtgtacacactcaggttgcaccaaaggagcagaaggaagcacgccgttctgtaaaggacatggaggaggtaaaa

SEQ ID NO: 169207 - DNA, 375 bp, Arabidopsis thaliana nossen
cggacgcgtggggttagagaggaaagtgtacggtttggttatggtatctttggtacttatggctattgcaacgatgtgttgtgtccaagctacgatcgacgaagaagcggctaaggatgaatcatggactgattgggcaaaggagaagatcggtctcaagcacgaagacaacatccaacccactcacaccaccacgaccgttcaagacgacgcttggagagcgagtcaaaaagccgaggacgcaaaggaggcggctaaacgcaaagcagaggaagcggttggagccgcgaaggagaaagcgggttcggcatacgagacagctaaatcgaaagttggggagggtttgggttctgtgaaagacaaggcctcgcagag

SEQ ID NO: 169208 - DNA, 378 bp, Arabidopsis thaliana nossen
caatctctgcgatggaagacgaagaaggcatcgggttaattttagccagagccaccgagctcagactcaagatcagcgattgtatcgataactccagtaccaccgtcagcgacaacggcgatggaaacgaggatctttctcccggagaaggaagtaaaagcgagattattgggaatcaagacaaggattttgactcaatcagctctgaggatgtagatgaagcagaagctgaacggcttttgcgtattcgtgatgctcttgaagctcttgagtctcagcttgcttctttacagaatctaaggcaaagacaacaatatgagaagcaagtggctctctctgagattgattacagtaggaaaatgttgcttgagaagctta

SEQ ID NO: 169209 - DNA, 378 bp, Arabidopsis thaliana nossen
gtaaatgtggaggcatcaccactggtaatgagtttggactctcctccatatgccattcttggagaacccttcacttacgctgttagaatctgcaaccagacacagttgctgcaagaagcaaagtttggtctggctgatgcacagagttttgtcctgtctgggtctcacagcaatacggtttcagtccttcccaagtcagaacacgtcttaagttataagctagtgcctctgacttgcggtgaacagcaactcccaaagataactttgacatcagcgcgatatgctgctgagtttcagccatctgcggttgcttcaagtgtctttgtgtttccctcagccccacaagccgagaaagccatctctaccagcaagtagtgt

SEQ ID NO: 169210 - DNA, 371 bp, Arabidopsis thaliana nossen
ggttacacaatccctcttgacaaacgtctagctgctgatggaaggggcctacaagacgttcagatcaatgataactttgccaagttatcagaggccctctatgtagctgagcagaaagctagagaggctgtttcaatgcgttccaaggtgcaaaaagagatggtgatgaaggacaaggaaaggaaagagcaggaattgagggctcttgcccaaaaagctcgctccgaaagaaccggtgctgctatgagtatgcctgtctcatctgacaggggtaggagtgaaagtgttgacccaagaggtgattatgacaactatgaccaggatagaggaagggaaagagaaagggaagagcctcaagagacgagggaggg

SEQ ID NO: 169211 - DNA, 370 bp, Arabidopsis thaliana nossen
gctctctctctctctctgccattagaagaaaaaaccaaacaccgagacaaaacacatcacgaagaagagagagatttgccattttcggcaaggaagtgttttattctagggcttctctagttgctgcgtagacaagatggtggagtgaaattgcggcggtgacttttcagattgacaaattgaattaaagatcttgaatacatatggcttctgtgggaacattaccagcttcttctatggctacaaaacaaagcaatgcttctatatgcgctgaaaaattacctgaagggattaatgagatgaagataaaagatgataaggaaatggaagcagctgtggttgatgggaatggaactgaaacaggtcacat

SEQ ID NO: 169212 - DNA, 368 bp, Arabidopsis thaliana nossen
agagaatgaagttctctatttcactttgatgtggaaacgtaaaattggggtttcgttttttaatactattatccttttttcctactttattaatcatatttaaattaatgatatttaatacataagttgaataagctaaaataaaatataaaataaaagtaaagtaagagagaatgaataaaactaaaggaaattttttacgaacgggcttctgaatgatcaacaacaatagctatcttggttcatagaaaataggattaacccccattgcatattggtacttatcggatatagaatagatccgcttccctttttttctatgaattgaattgttccattattactaacagaatagaacaaatattaat

SEQ ID NO: 169213 - DNA, 371 bp, Arabidopsis thaliana nossen
gccatggaaaggcttcttcaaccatcttcttcttcttcctcaatttctccttccaaattcccttcacggacttctcctttccttccccgtctccgctcatcgggtctgagctttgtctcgactcaccggcccgagtcacgccgagtcagctcaatttcctgcaacaattcccagattccgtcactgtatacgcctataggatctaacacaactaacaattccttcaatgggtctcccaaatcggatgaatcgaaacctaatcccggatttctcacacggatcgcgacgtcggcttctgagcagcgaaagacgttatctactggaaccgttatactaatctctgcagtagctgtgcttttgcttaacccgct

SEQ ID NO: 169214 - DNA, 84 bp, Arabidopsis thaliana nossen
ccatttttcaacatccccattacattaatttaacagttgaataattttttcaacacctccattgcaaatagtctatattttgta

SEQ ID NO: 169215 - DNA, 203 bp, Arabidopsis thaliana nossen
ggaaattgtataaaatctaaagtaaacgataatttgttattaaattagactgaagtttccaaattatctaataacatattaccaaaataaataagtttacatatatacaattcgaattaaaataaactaatatgttatggaaacgcttttaaatgatttccgaaaatattgggtatttattaatttattgatttaattcgttt

SEQ ID NO: 169216 - DNA, 391 bp, Arabidopsis thaliana nossen
ctcagacttccactgataggtttgagatgtggggagacgggcttcagacccgttcttttacctttatcgatgagtgtgttgaaggtgtactcaggttgacaaaatcagatttccgtgagccggtgaacatcggaagcgatgagatggtgagcatgaatgagatggctgagatggttctcagctttgaggaaaagaagcttccaattcaccacattcctggcccggaaggtgttcgtggtcgtaactcagacaacaatctgatcaaagaaaagcttggttgggctcctaatatgagattgaaggaggggcttagaataacctacttctggataaaggaacagatcgagaaagagaaagcaaagggaagcgatgtgtcgctttacgggtcatc

SEQ ID NO: 169217 - DNA, 379 bp, Arabidopsis thaliana nossen
caaaaatatcaaagattctgctttagaaactgtccatggatgctaatggaggacctgtacagatccggacccaaaactacgtcaagcttggttatcactatctgatcactcacttttttaaactcatgttcctccctctaatggctgttttgttcatgaatgtctcattgttaagcctaaaccatcttcagctctattacaattccaccggattcatcttcgtcatcactctcgccattgtcggatccattgtcttcttcatgtctcgacctagatccatctaccttctagattactcttgctacctcccgccttcgagtcaaaaagttagctaccagaaattcatgaacaactctagtttgattcaagatttcagcga

SEQ ID NO: 169218 - DNA, 381 bp, Arabidopsis thaliana nossen
tgtgtatgaaactcgtgtggaaaataaggctaatcctccaccacctactactgttgatgatataactagagacactggaaattccagcccgcgttacatgcgatgcacaatcaatcagatcccatgcactgttgatcttctatctacatctggtatgcaactggcactaatagtccaaccaatggcgctttctcatccatctgaagagcctatccaagttgtggactttggtgagagtggccctgttagatgttcacgttgtaagggctacgtgaatcctttcatgaagttcattgaccaaggaaggaagttcatatgtaacttgtgtggatacactgatgagactcctcgtgactaccagtgtaatctgggtccagatgg

SEQ ID NO: 169219 - DNA, 378 bp, Arabidopsis thaliana nossen
ggcgccgcttagaacaccaatgtagttgtcaaggctacaaggaaaacaaaacaaaacaagagttcagcaaaccccagagatgcacatagggacctacattatacatcagtttcactctctctacacatgtttactcttgtctacgttgctaaaagtttatgagatgtatttatttcccgtctcaaaaccatcaaggcacaaagttttctagctaagtaaagttcccagacataattgcttcaaggcagtggtgttttttcaaatatgtgcaacttttaaaccgaaatgcacagactttatgacctcaacaaaactagaacatatattacttaatctctccaatataatgacaaacaacatttgatgtgacttaaatca

SEQ ID NO: 169220 - DNA, 377 bp, Arabidopsis thaliana nossen
atccaagttagtttccttcttaacattttaagcatttaggccaatgcgcatactaaatagcaaaaagaatcatatgagatatttgggtcaaggtgcttgtccacctgtatatttccattacaaacaaataaaatcaagtggtcggattatcgtgttggtcaaaacaaaactgtggacaaatttatactaacgcaccttaaacttttaatattcactatttaatcttatataattggtctagaagaatcgtttttaataaagcaagtagtcaagtacgaagtgtggaatggacctcgagagtgaatttgttagaatgatattgtctagtctttaaaatcgagggaatgattgagaaccaaagcatgcaaacatgtaat

SEQ ID NO: 169221 - DNA, 365 bp, Arabidopsis thaliana nossen
aatcaacctacaaaagttaaaagttacaccttactaaacacaaacaacttcataatggctttccacttccggcgactttgcttcttctcagctcttcttgccgtggttctccaactccttcatggcgtctctggccaactagttgtggttgaggaacctatttctgctcctccgcctccgctggtcgacctaaacaccggtgatggcattgtgccggcgctgtttgtcttcggtgactctctaatagacaatgggaataacaataacattccttcctttgccaaagccaattattttccttatggcattgatttcaatggcggtccgaccggtcgattctgcaatggcttaacgatggtcgatgg

SEQ ID NO: 169222 - DNA, 364 bp, Arabidopsis thaliana nossen
gtaaagtcactcgctttcgccggacattatttcccagtaaccatgcaaaggtttttcgtttgaaggctctgacttgtgataatcaagaaagcaatcatatgttcaaggaactgtcaacttctgaatggactcatcacttccactctattcaagtcgatgtctcggaaatggatgccatcatgatagagattgatgcactaaagccgaaagtgaagaacatacttatgtctttccaaggcattgactcgacaaagaagagaatccttatgatatatatgctgataagccttggccttgcatgtcaatttgaggaagagatctatgagactttaaaagagggtttcggaaaaatagaggagatgat

SEQ ID NO: 169223 - DNA, 349 bp, Arabidopsis thaliana nossen
ctttggtgattcccagaagaagaacccagaaatcgatcgaagatatggttcacaacgcttatgattcgtttcagcttctcaaagattgtcccgctaggatcgatgctgttgaatcctacggctccaagctcttcgctggatgttatgacggttctctccgcatttactctccaccggaatcttctgcctccgatccgtcggagctgcatcaagagacttacgtgctagagaagacggtagctggattctctaagaaaccgattgtggcgatggaggttttggcttccagagagttgcttgtgactctctctgagtaaattgcgttacatggacttactaatttggagac

SEQ ID NO: 169224 - DNA, 361 bp, Arabidopsis thaliana nossen
ctcacattttcgtagccgcaagactcctttcagattcttacttgcagctatgggtaaagagaagtttcacattaacattgtggtcattggtcatgttgattctggaaaatcgaccacaactggtcacttgatctataagcttggtggtattgacaagcgtgtcatcgagaggttcgagaaggaggctgctgagatgaacaagaggtccttcaagtacgcatgggtgttggacaaacttaaggccgagcgtgagcgtggtattaccatcgatattgctctatggaagttcgagaccaccaagtactactgcacagtcattgatgccccaggacatcgtgatttcatcaagaacatgattact

SEQ ID NO: 169225 - DNA, 376 bp, Arabidopsis thaliana nossen
acaagagcttctacatctagcagagtctctccagctttcactttcctcgtcatcttcttcctcttatctctcactgcttcagtagaagctgctggtcgtggagttaacaatgacaagaaaggcggcggattaggagcttctttcatattcggagattctctagtcgatgccggaaataataattatctatcgacgttgtctagggctaatatgaagcctaatggtattgatttcaaagcctccggaggaactcctaccggccggttcaccaatggacggaccatcggtgatatcgttggggaagaactcggatcagcgaactacgcgatcccgttcttggcaccagacgcgaagggaaaagctttattagccggag

SEQ ID NO: 169226 - DNA, 104 bp, Arabidopsis thaliana nossen
cgctactgtaaaaggaagttaaatagtacgtagtaattataataatgtacgaaaatgtgacaagttttgttgaggtttacctgtaaaatgccactccttttctg

SEQ ID NO: 169227 - DNA, 369 bp, Arabidopsis thaliana nossen
cgaaaccatggttgagccggcgaatactgttggtcttccggtgaacccgactccgttgctgaaagatgagctcgatatcgtgattccgactatcagaaacctcgatttcctcgagatgtggaggccttttcttcagccttaccatctgatcatcgtccaggacggagatccatcgaagaagatccatgtccctgaaggttacgactacgagctctacaacaggaacgacattaaccgaatcctcggacctaaggcttcttgtatctcgtttaaggattctgcttgtcgatgctttgggtacatggtgtctaagaagaagtatatcttcaccattgatgacgattgcttcgttgccaaggatccatcagg

SEQ ID NO: 169228 - DNA, 369 bp, Arabidopsis thaliana nossen
tcgcgaaaccatggttgagccggttaatactgttggtcttccggtgaacccgactccgttgctgaaagaggagctcgatatcgtgattccgactatcagaaacctcgatttcctcgagatgtggaggccttttcttcagccttaccatctgatcatcgtccaggacggagatccatcgaagaagatccatgtccctgaaggttacgactacgagctctacaacaggaacgacattaaccgaatcctcggacctaaggcttcttgtatctcgtttaaggattctgcttgtcgatgctatgggtacatggtgtctaagaagaagtatatcttcaccattgatgacgattgcttcgttgccaaggatccatc

SEQ ID NO: 169229 - DNA, 370 bp, Arabidopsis thaliana nossen
cccgctcggaataaccccccttttgctggattattaccaatataatcataaaaagctaatttttcaggaattttcgcccaagcttctgataaactttgattttcagccagtccagcactaactcttcgatatatttcttgttgaaagtatccctgatcccattgataacgagtaggaccaaataattcgatgggagtagttgcagaaccataccacatagttccagcaacaacaaaagctgcaaaaaagacagcagcaatactactggaaaggacggtttcaatattgcccatacgtaatcctttgtatagacgttgaggcggacgaacactaagatggaataggcccgctaatatacccaacgtccctg

SEQ ID NO: 169230 - DNA, 366 bp, Arabidopsis thaliana nossen
ataaaagagaaaagtgagaggatttggtttttctcctatacatagctagacatgtgtcgtgtatcatgtatttttatttcaacattttatccatggcgttatcatttcaacattttttatttgtttgtttgagacgattacaaatgtttgtgccctttatttttcagtgattgataggatgcaccgttgatggaaaagacccaaaggatctttagcatgaaattttaagattgtgatcgacattgacattcctgagaatttaggaacaatagtagtttatggttttggagtttgtgttttttttctatgaaatttaagttataatgatgattgatcaaagatagaatcatcaataagtagatatat

SEQ ID NO: 169231 - DNA, 368 bp, Arabidopsis thaliana nossen
gaaataatggctttcccgcgatttctttctctcctcgccgtcgtcactgtctctcttttcctcaccggcactgatgcttcctctcgctctctatccactccacctaaaacgaacgtactcgacgtcgtttcatctctccagcaaacacaaactatcctctcactcgacccgactcgttcctcactcaccaccaccaaacccgaatccctatccgacccggttttcttcaattcatcttcaccactatctctagagcttcactctcgagacactttcgtcgcgtcacagcacaaagactacaaaagcttaacactcagtcgactcgagcgcgactcatcccgagtcgccggaatcgtcgcgaagatccg

SEQ ID NO: 169232 - DNA, 369 bp, Arabidopsis thaliana nossen
gagatatggaattcttctcaggtagagaaggagttccatattccacagaaagttcatggctctgtatacgttgatggatggcttgaagggatctcttggaattcagatgagactcatgttgcgtatgtcgccgaggagccatctcgtcccaagcctacatttgatcaccttggttattacaagaaaggaaattctttggacaaggatattggaagctggaaaggtgaaggggattgggaagaggaatggggagaagcatacgccggaaaaaggcagcctgcgctgtttgttatcaatgttgacagtggagaggtcgagccaatcaaaggaattcctagatcaataagtgttggacaggttgtttggagt

SEQ ID NO: 169233 - DNA, 372 bp, Arabidopsis thaliana nossen
gaaataatggcttttccgcgatttctttctctcctcgccgtcgtcacgctctgtcttttcctcaccagcactgatgcttcctctcgctctctatccactccacctaaaacgaacgtactcgacgtcgtttcatctctccagcaaacacaaactatcctctcactcgacccgactcgttcctcactcaccaccaccaaacccgaatccctatccgacccggttttcttcaattcatcttcaccactatctctagagcttcactctcgagacactttcgtcgcgtcacagcacaaagactacaaaagcttaacactcagtcgactcgagcgcgactcatcccgagtcgccggaatcgtcgcgaagatccgtttc

SEQ ID NO: 169234 - DNA, 247 bp, Arabidopsis thaliana nossen
gcacccgtttggctcaagctatgttcctgcactcagctgcacaacaacagatgggccaactgatattgtatggtctaacatcatcaatccattgggaaatctgttttctcgagggtgatccatatataacaactcatcaataataccacttgcaaatttgatttcaattagtctggcaagcacatcaaacgttgcctctgcggattaacacgagaagtgacagttagctactattttgacttaatag

SEQ ID NO: 169235 - DNA, 373 bp, Arabidopsis thaliana nossen
aacaaaaagaaaatggttaagctcatcaatctcctcgaagcaaccatcgggggtctcctcgatctttatgggtgccttgccaggcaatcacttgcggttcctcctcagctacagaacgagtgtaacctcgacaacctagatgttctccaagccaccgaaactatcaagagtgaagccgctcagatcgagtactgggaccacaaccaccctcagctccgatgtgttggtgtttccgttgctcgatatgtaattgaacaaggcggtctttacttgcccaccttcttcacttccccaaaaatttcctacgtcgctcaaggaacggttatcagcggaagagtggtccctggatgtgtcgagaccttcatggactcgc

SEQ ID NO: 169236 - DNA, 365 bp, Arabidopsis thaliana nossen
gggaggtctgtttggcttgaatggtttagtaagaggagtaatgtcatctctgcttctggcattgtggaatattcttacaggtttgtctccttctctgacaaatcttagtttcctgattaggttattgttttattgtcttaactatactcaggactagacttctcttgttatagtagttactttggttattatttcaaagtttgaaagttcattaaaaaggggaatgctgttgtggatatgagaaggtcttgcattcttggggttatattccgtttttgacatatggtctttggtgattgcttcaaggatttgcagaaagcgacgtgtaatttcacgactttgataggccaaggagcatttggacc

SEQ ID NO: 169237 - DNA, 367 bp, Arabidopsis thaliana nossen
atctcattgcttcatcattaccaaatcatcaacttaatcgtttctctcaaatttagggttttctcttttctcgaaagtcttgcggttttctgaatcatctctatctggtttgagggtttcgtttgatatctggagaaaggggtttctggaaacaaggagttcataattcgcgatcttgatctatcgatcttcatttatatataaaagcgtgaatgagattatgatggagtcgaaaggtggtaaaaagaagtccagcagtagtagttccttattttacgaagctcccctcggttacagcattgaagacgttcgtccaaacggcggaatcaagaaattcaaatcttctgtctactcaaactgctccaag

SEQ ID NO: 169238 - DNA, 370 bp, Arabidopsis thaliana nossen
ctttaggcttatagatatgtttttttaaagttctaagttagtgttgtggttgttactcttaatcatggttaaaaagctactaaatgagtgctattcaataatgttctgtttgatttcgatggaataatttagtgtgactgatgttgcttttatgtcgcttatgtattattggtgatctatgtgtaaaacatgtgttgcaggatagtaatgaaccgaagtaaagaagagaacgttgctccgacaatgaaagatgatagtccatttggaaagcttacagaggatctcttgatagagatatttatcagaattccaataacaaattgggaacaagtatcgtgtgttagaaagcagtgggctaatttattccgcg

SEQ ID NO: 169239 - DNA, 365 bp, Arabidopsis thaliana nossen
  unsure (1)..(365): unsure at all n locations
ggggcgtcccacgcgggcnctttaatcttatacatatttttttcaaaccccctaagncanngggggggtggttacacatatttttagtttaaaaacaacnaaangagngcaatacaataatgtacagctagattaccatggaataatatagagtgactgatgtagcttttatgtcgcttataaaaaatagacgatctatgtataaaacatgtgctgcaggatagtaatgaacccaactaaacaaaagaacgttgctccgacaatgaaacatcataatccaactggaaagctaacacacgatctcttgatagacaaatctatcataattccaataacaaattgggaacaaatatcttgtgttaaaa

SEQ ID NO: 169240 - DNA, 365 bp, Arabidopsis thaliana nossen
ttcaatccaaaggttcaagactaataacctaaaaggtgcgtatgctaagagggcgtatattcgtttgccagtgatgcacgcgagattcctaaacaaacttttcattttgaaaatttcaggaaaaaagctgaagctgtgaagtggcgtggacatgaatctgtgagaagagggttaagagactccaaggtaacaccagagttcattgcttcaggaaattcaaatgtctcactcactaccccgtcgttcaagaaagaaaagcgctttacggataccaattcagtgatccatccaagctctaagagcaatgtaagtgaggtgaagccaagccgatccaacaacgtacctgctacaatgggagactactt

SEQ ID NO: 169241 - DNA, 372 bp, Arabidopsis thaliana nossen
ggagatgaacattaagtttccagttatagacttgtctaagctcaatggtgaagagagagaccaaaccatggctttgatcgacgatgcttgtcaaaactggggcttcttcgagctggtgaaccatggactaccatatgatctaatggacaacattgagaggatgacaaaggaacactacaagaaacatatggaacaaaagttcaaagaaatgcttcgttccaaaggtttagataccctcgagaccgaagttgaagatgtcgattgggaaagcactttctacctccgtcatctccctcaatctaacctatacgacatccctgatatgtcaaatgaataccgattggcaatgaaggattttgggaagaggcttga

SEQ ID NO: 169242 - DNA, 363 bp, Arabidopsis thaliana nossen
gaacttgtcccagcggctaattgtcgaacatctggatccctctggcgaagcatttcgtttgatgttcgaattcgttctgtagaacaccttcgtaagggtatttcactagggagaggtaatggaaccagatccagtagagtgggattcgatctctagagatgaagaatccggagaagaggaggaaataagcgaggattgctacaaccaccgtgaatccgatcatcacgtgtgagactacgccggataagaacgtcacgaaggaacttccggcccaaaacgcggtgaggattgtgaagaagaagaagaggaatccctcggagcctccggcgagtcctacggccgagaatgttgtggcggcgaatg

SEQ ID NO: 169243 - DNA, 216 bp, Arabidopsis thaliana nossen
  unsure (1)..(216): unsure at all n locations
ggtacccaacttattcaccactttctcctcccagattgaaaccaccccgggcgcaaataatataatttttgtatatcacaccaaacancccaacancctcataccacacacacccaactcactaacaccccggcaaaaccaatccaaccattttcaacaatttccgttaaaacgattcatggattaaatgaactattttgaacgcttttcaacatt

SEQ ID NO: 169244 - DNA, 369 bp, Arabidopsis thaliana nossen
gtgagttctcataaaatgagagggatggtgagttttgccgtttgggctgtctttgctgctttactctgacagcagctctttgcttctgttgcttccgtaaggtttgaggatgccaaaacatactacttatctcctccctctggctcacatggaactcctccatcacacacgcctccttcttctaactgtggaagtccaccttacgacccttctccttcaactccttctcacccttcacctccatcacatactccaactccttccactccatcacacactccaactccacacactccatcacacacgccaactccacacacccctccttgtaactgtggaagtccaccttcccacccttccacgccttca

SEQ ID NO: 169245 - DNA, 373 bp, Arabidopsis thaliana nossen
ttcaatacagctattggatcactgaagaaaacacaaccaaactctacctttgccaattcctctgtccgcgataagagctccaataccagaaatgagtaaaaaaccaactccaatagttcggattgtactccatagctgttctttaaagtgagtcctttctgtggatatcgtatggatcggtgcactagcagttccaaggacaccatcttttgttggttttcctacgtttctaaatgccccaagacctccaaaagtctcttcctcccttgcaacaccagcaatacctaaaagaaaaacagcaaaacatttcccaatattatatagagaaatggctcagaagctgctaatacaaatatgaaagcaaggacacaat

SEQ ID NO: 169246 - DNA, 373 bp, Arabidopsis thaliana nossen
ctctacatctttagcgatagttcttcatcaatcttccaatcatgacgagactgttcatgaagcaatactgttgaattctcagaaactctcaaggatttaaagaatctgcggaaacagttatactcagcagctgagtacttcgaaacatcttatggcaaagaagaacacaaagaaacagtgatagagacgttgaaagaatatgcagcaaaggcagtagtgaacacagtggatcatcttggttctgtctctgacaaattcaactcttttctctctgataactcaactcatttctccaccactcatcttcgtttatcttctcttgaacaaaggatgagactatgcagagattacatggggaagagtggcactcatc

SEQ ID NO: 169247 - DNA, 372 bp, Arabidopsis thaliana nossen
aagaaaatggttaagctcagcaatctcctcgttgcaaccttcggggttgtcgtcgtccttaacggttgccttgcgaggcagtcacttggggttcctcctcagctacagaacgagtgtaacctcgacaacctagatgttctccaagccaccgaaactatcaagagtgaagccggtcagatcgagtactgggaccacaaccaccctcagctccgatgtgttggtgtttccgttgctcgttatgtaattgaacaaggcggtctttacttgcccaccttcttcacttccccaaaaatttcctacgtcgttcaaggaacgggtatcagcggaagagtggtccctggatgtgccgagaccttcatggactcgcagccg

SEQ ID NO: 169248 - DNA, 375 bp, Arabidopsis thaliana nossen
ccaatccggtgtagccaagcttttttctgccataaaggagaatggatatcagttactgtttttgagcgctcgtgccatcgttcaggcatatctaacaagaaatttcttaaataatctgaagcaggacggaaaagctctgccaaccggtcctgtggtcatttcaccagatggcctatttccagcattgtaccgtgaagtgataagaagagcacctcatgagttcaagatcgcatgtttggaggatatcaggaaactcttcccaacggattacaacccgttctatgccggatttggaaatagagacacagatgagctgagttacagaaaactcggaatcccaaaggggaagatattcataatcaacccaaagggaga

SEQ ID NO: 169249 - DNA, 364 bp, Arabidopsis thaliana nossen
cttctatggaaacaacggcatggtagttagtttccagttttggtggacaacttggcgtggttgtgttcaacgacaaactatggtccttgactccttgcattacacaactcaaaactcggaatatacttgagtatatcatatgcatacaattttcaactttttctgttaaatcgattcatggattagatgaactattttgagggcttttcagcattcgattaggttaaacggctgttgcgattattatttgttttcataggagcttatgctatgaacagtaatcatataatcatttgtataaaagtgtctatttctgatctaagcacagtaattcatatttgttaaacccaaaagcaaaaatcat

SEQ ID NO: 169250 - DNA, 328 bp, Arabidopsis thaliana nossen
ttcaatacagctattggatcattgtttaaaacacaaccaaactccaccgttggcaattcctttttttggggtgtgagctcccaatcccaaaatgggttaaaaaccaactccaatagttcggattgtactccataagctgttctttaaagtgagcccttcctgggaaaatcgaatggaccgggccccaaccagtcccaaggcaccaacttttggtgggtttcccacctttctaaaagccccaagaactccaaaaggctctttctcccttgcgacaccagcaatacctaaaagaaaaacagcccaacacttcccaatattttatatagaa

SEQ ID NO: 169251 - DNA, 372 bp, Arabidopsis thaliana nossen
ctccatggctagaggaaatgcctctgtgcctgccatggaaatgaccaagtggttcgacaccaactacgattacatcgtccctgagttgggccctgaggtcaacttctcttacgcatcccacaaggccgtgaatgagtacaaggaggccaaggctcttggtgttgacaccgtccctgtacttgttggtccagtctcttacttgctgctttccaaggctgccaagggtgttgacaagtcattcgaacttctttctcttctccctaaaattctcccgatctacaaggaagtgattacggagcttaaggcagctggtgccacctggattcagcttgacgagcctgtccttgttatggatcttgagggtcagaaact

SEQ ID NO: 169252 - DNA, 370 bp, Arabidopsis thaliana nossen
ctagttgaagagtcttctttgtcacctgcagcaggcgacgatgagccggtactggtgggacttgttgatattgcagccgttgcatcggtttggtctggaattccagttcagcagatcactgcagatgaaagaatgcttcttatgagtctagaagatcagcttagaggcagagttgttggtcaagatgaggcggtagctgccatatctagagctgtgaagaggtcccgggttggcttaaaagatcccgaccgtccaattgctgctatgcttttctgtggaccaacaggggttggaaaaacggagcttacaaaagctctggcagcaaattattttggctcggaagaatccatgctgagattggacatgagtg

SEQ ID NO: 169253 - DNA, 372 bp, Arabidopsis thaliana nossen
caccacattattttcactgagcgcataacatttttgagacaagagactgtctctctctctcttctctgtttctctccccctctctccggcgatggttgttgctatggaccaacgcaccaatgtgaacggagatcccggcgccggagaccggaagaaagaagaaaggtttgatccgagtgcacaaccaccgttcaagatcggagatataagggcggcgattcctaagcactgttgggttaagagtcctttgagatcaatgagttacgtcgtcagagacattatcgccgtcgcggctttggccatcgctgccgtgtatgttgatagctggttcctttggcctctttattgggccgcccaaggaacacttttctg

SEQ ID NO: 169254 - DNA, 377 bp, Arabidopsis thaliana nossen
gtttcaaggatactgaggttcttggtaaaggaggatttgggaaagtctataggaggaactttaccagtgtccgagcgtagagatagcggtgaagatggtttctcatgactcaagacaaggaatgagagagtttattgctgagattgcaaccattgggcgtctcagacatcctaacttagttcggcttcaaggctactgcagacacaaaggtgaactctacttggtgtatgattgtatggccaaaggaagtcttgataagttcctttaccatcaacagactgggaatcttgattggtcacagagattcaagatcatcaaagacgtagcttctggactttattatttgcaccaacaatgggtgcaggtcattatccaca

SEQ ID NO: 169255 - DNA, 360 bp, Arabidopsis thaliana nossen
  unsure (1)..(360): unsure at all n locations
agactagngattgtgatgttctttttaaatccggagactggaaaaacggaggcgcaactactgaattcttgtatcaagacctagccaggaatagttgggcttactacactgtgcgagcaatgaaaggtttaaacaagattgtgactggagagctacgaactatacatgagcaagatttgatcaattgtaacaaagaaaacaacggatgcggaggaggcaaagtctagacagcctatgactacatcatgaacaatggtggtcttgactaccgacaacaattatactcacaaagctcttaatggagtctgcaacagccgacacaaagaagacaacaagaatgatatgaacgaacggtatgag

SEQ ID NO: 169256 - DNA, 373 bp, Arabidopsis thaliana nossen
agagtttcattgaaaatttcaagaaccctagttaataacgataatgggttcgagagttttggctttcttcgttgttttcttaatcttcacggtcatcacattgcctcccacgatccaagcttgcactccttgtactcgtcctcatcctccggttccgaaacctccacaacacggcggtggtggaggtggtggtagcaagccgcctccacatcacggtggaaaaggtggtggtaaacccccaccccacggtggaaaaggtggaggaccgccgcatcatggtggaggaggaggaggaggagggaaatcaccgccggttgttagacctcctcccgtagtggtgaggccaccgccaatcataagacctcctccggtc

SEQ ID NO: 169257 - DNA, 369 bp, Arabidopsis thaliana nossen
aagaaatattgttattaacatactctttttgaaactattgattgaatagagaaagtggatcaagcatagcggatcaaatgtattcaatggatcaagcgtaacaagtgtagatcaaaataattttttgacggtctaaatatatgtttgaatagtaaaagtcgatcaaataatgtgaatcaaatagaaaatatataatttaaataaaatatcttaaagaatagataaattcccataaatagcacactattaagttttttggacaaaaatagcattaaaaagttttttagacataaatagcactcaattcattatttgagaaattagtaacactaaaacaagttttatggacaataataataccataatttt

SEQ ID NO: 169258 - DNA, 361 bp, Arabidopsis thaliana nossen
aaaaaacttgtttattctgtgatttaattcttacattcaaatacttatgcgtgaacttgcttttattatatagcctcctactacctattaagtcttttaacggttcataatcccttagtcggtgagccttggatgactgcttctggtgggaccaatgagctcaattcatgttgcttcaatgatccttctcttgtttctcttcttgcatcattctgattctcgtcacctcgacaatgtccacattacagcgtctcggttttcactcgtcaaggttcttgatccacatttcaattcatcaacttttcatttactttcatgttcttcgtatttgcgggatctgtttatcaccttctcaaaacta

SEQ ID NO: 169259 - DNA, 369 bp, Arabidopsis thaliana nossen
  unsure (1)..(369): unsure at all n locations
ctttcctcaaagatcacaagattcagatgggacctagttacactccagaatcgctgtttggtgagagcaaagtgtctgagaaaccaaaagagagtgtcaatcctattacacagttatggcaccagaacggagtttgttctgaagggacaataccagtgaggaggacaaagaaagaggatgtcttgagggcgagttctgttaaacggtatggtaagaagaagcacctttctgttcctctgcctcgatctgctgatcctgatctcattaaccaaagtggtcatcagcacgctatagcttatgtggaaggaggcaagttttacggggcaaaggcgacaataaatgtatgggaacccanagtgcaaagctcta

SEQ ID NO: 169260 - DNA, 372 bp, Arabidopsis thaliana nossen
atgcgtggatttgccattggctctgctgccctagtctccttggctctctttggtgcctttgttagccgtgcagggatccacaccgtagatgttttgacccctaaagttatcattgggctccttgttggtgccatgcttccttactggttctctgccatgacaatgaagagtgtgggaagtgcagctcttaagatggttgaagaagttcgcaggcagttcaacaccatccctggacttatggaaggaaccgcaaaaccagactacgccacatgtgtcaagatctccaccgatgcttccatcaaggaaatgatacctcctggttgccttgtcatgctcacacctctcattgttggttttttctttggagttgag

SEQ ID NO: 169261 - DNA, 374 bp, Arabidopsis thaliana nossen
gacgagaggaaaaaaaaaactcagagagacaaatctaaatggcggtggtgtacgcgcaacacctgtctcgcgcctccctctcctcctccaatctcaacgcgccgtcgccgctgcctcggtctctcacctccacacatcccttcccgctctctctccctccacatcaccgacttcctacaccagacctggtcctccttcgacctcccctcctcctcctggtctctctaaagcggccgaatttgtgatctccaaggtcgatgatctcatgaactgggctcgtaccggatcgatctggcctatgacctttggtctcgcttgctgcgccgtcgaaatgatgcataccggtgctgctcgctacgatctcgatcgattcg

SEQ ID NO: 169262 - DNA, 373 bp, Arabidopsis thaliana nossen
gaaattttctagtcgattgcgatcgtcgatggatcgtaagagttggccgtggaagaagaaattctctgagaaatcagctactgtcacagaagttgttgatcaggaaaatgggaagaagccgagttatatccagatctcatttgatcaatacacgaatctaaatggtttaaaagatgaagtcaagagctacgaagaaaaagttacaaagcttgaggatcagatcaaagatttggatttgaagctatcaacagctaatgcagatattgtagcaaaggaggttttagtcaaacaacactccaaagttgctgaagaagctgtcacaggttgggaaaaagctgaagcagaagcatcagctttgaaaacacatctcgaa

SEQ ID NO: 169263 - DNA, 372 bp, Arabidopsis thaliana nossen
cggacgcgtgggctgaaaggaatgctccacgaacctggttgaatgcaggtcggtaatgatgatctgtcgttgctccttccaagactcagcatcagcattgaagataccatcctcgagcagatcattgaaccgttctttgaaaaacgcaccttttgggaagttcttgaagttagtcttgagcatgtattcaacgttcgcagggacacaagtcacagctccatacgacccaccaagccagattccgttatagagaaaggtacctcgacattttttcaaacatcttgtagcccaaccataaacatcattcctgtgaaagaagaactctggagtaattccgaacacaggccatatcgttggccccagctttttagt

SEQ ID NO: 169264 - DNA, 279 bp, Arabidopsis thaliana nossen
acccctaaagttatcattgggctccttgttggtgccatgcttccttactggttctctgccatgacaatgaaaagtgtgggaagtgcatctcttaagatggttgaagaagttcgcaggcagttcaacaccatccctggacttatggaaggaaccgcaaaaccagactacgccacatgtgtcaagatctccaccgatgcttccatcaaggaaatgatacctcctggtagccttgtcatgctcacacctctcattgatggtttcttctttggagttgagacc

SEQ ID NO: 169265 - DNA, 368 bp, Arabidopsis thaliana nossen
atcacaaacagatgattagattttgagttacacaattttatagaggagagaggaaaagggtgtttggcttgaagaagccccagttttcacaagcctctttgatcttctccatagtgattgctctctcttctccattaagcttctcgagattgatgatcgggaaactctccatctctctctctttttttttaaatgggtttcttggcctaactttatgtttgacgcttttgaagtttgatataaatctgatgatcaaagacttggttttatagagagaaaagaagcgcacagaggagctttgagttacttctacgagttatcattctacagtcaatatttggttttttggaccacacacatccataata

SEQ ID NO: 169266 - DNA, 375 bp, Arabidopsis thaliana nossen
gctactatcacaaacagatgacttatattttgagaaacacaaaataaacccgtgggagaaaaaatagtgatgtttataaaaaccccacacatcacaagcttcttcgatcttctccatagagatcgctctctcttctccattaagctgctcaagaccgatgatcacgaaactctccatctctctctctttttatctaaatgggtttcctggcctaactttatatatgacacttttgaagtttgatataaaacagatgatcaaagacttggttctatagagagaaaagaaacacacacagcagctttgagttactatctacgagcaatcatacaacacgcaatatatggttcttcggaccacacacatccataatat

SEQ ID NO: 169267 - DNA, 369 bp, Arabidopsis thaliana nossen
  unsure (1)..(369): unsure at all n locations
cctaggaggttacagcttaatctctccgattaccccaaactgcagaaggtctcatctttctttgtgtgtatcttgaaancaacagcagcctttacctttttcttttaacctctgatcttgttatcttccatggatccatttccttaaaggttttggtaatatgaattgagaagtccacgcacgtgtgtatctctattaccgtcagattttggtttaaaagcagttatttttactagtcttgtaagaatgagtttaacaaagaaagcaagtgaaccaaagctaagtggtactagtatcaagccaacaactttaaaccctcatgctgctgagtatgttccgtttactctacgttctccttcatctggaggt

SEQ ID NO: 169268 - DNA, 339 bp, Arabidopsis thaliana nossen
ggagagacatattgagaaagagagagaagcttaggttaaaaaaaagaaactgaaccctttgggtctctaacaggaatttttttctaatcgcttaaaaatggggtatgatcaatcaccatttctgcttatcttcggcatcttagaaacgtgatatccttcttgtattcctcgctcatgccaactttatgaatatacaagagaaaatcgacggagagtttccagtcgctaccgaccaagtgtgctatttagctgcatgctatggctctactacgcatgataagaaagacgctttttctaattaccatcaactccttggctgcgtcgggagactctctacat

SEQ ID NO: 169269 - DNA, 371 bp, Arabidopsis thaliana nossen
ctttgtctttgatttttgattttttttctctctggcgtgaaggaagaagctttatttcatggtgtctgtgctctctagttcttctcttgtttccgctgctggtgggttttgttggaagaagcagaatctaaagctccactctttatcagaaatccgagttctgcgttgtgattcgagtaaagttgtcgcaaaaccgaagtttaggaacaatcttgttaggcctgatggtcaaggatcttcattgttgttgtatccaaaacataagtcgagatttcgggttaatgccactgcgggtcagcctgaggctttcgactcgaatagcaaacagaagtcttttagagactcgttagatgcgttttacaggttttcta

SEQ ID NO: 169270 - DNA, 356 bp, Arabidopsis thaliana nossen
ggaatttcagaagaagctaggctagtaggtcaggtttacaaacattcatatggacctgatgtctatgtgcacgggggcaccttgcagccccaggcaatgaacagcacactccaaactgctcctgttgaaggtacttgaacgaatgagtcaatcacagaataatacaacaccaaagagatggagtttaagagatgcagtgaagtacctccaacctccgtagataccaatcaagttcactacttaagccatctctcatggaaccatttcgcggtgaaaatagttgttcttcaccagtgtcctccccaaccaaagattgctgtcagagatagctaccaattaagttttgaataataagg

SEQ ID NO: 169271 - DNA, 372 bp, Arabidopsis thaliana nossen
gctttacaacaactccttgaccggaaaacttcctaccggattcggaaagttgaagaatctgtcttacgtggacgcttcaacaaatcttctacaaggcgatttatcggagcttaggtctctgactaatctcgtttcactacaaatgttcgaaaacgaattctccggtgagattccgctggagtttggtgaattcaaggatctcgtgaatctctctctgtatacaaacaagttaaccggttctctgcctcaaggactcggttcacttgctgattttgatttcatcgacgcatcagagaatctcttaaccggaccgatccctccagatatgtgcaagaacgggaagatgaaagctctgcttctcctgcaaaacaa

SEQ ID NO: 169272 - DNA, 376 bp, Arabidopsis thaliana nossen
atccgatggatttttagataaaaaaagatttgaaattaaaaaaaaaagtgggattgaattcgcttttactagattttcttaagtcaactctagttttttctaaattttttcagatttttttattacacccccgattactttgttcgacaaaaggttaatttatatgcaataattgcattgtagcgggtatagtttagtggtaaaagtgtgattcgttcctttaatccctttaatagttaaagggtctctcggtttgattaatcttccgatcaaaaattttatttcttaaaaggatttagtcctttccctttcaatgaaagattcaaggaagattatagattctcgtaatttatatccaaagactctaatcaattgt

SEQ ID NO: 169273 - DNA, 378 bp, Arabidopsis thaliana nossen
ctatcgccaccggaagaagcttcgtatcaccaccgtcataccaaaagaggcagcacctcctcttctttgtcggccaacggaatcatcgaatcatcggtttccgatttcgtcaaacgtcccaaaatctctcatccgaattacatatcaagttccgagatcgaatcagagttttctcatcacgatccagatttcgcaagaatcaacaacggtagttttggttgttgtccgtcatcaatcctagctttacaacgagattggcagctccggttccttcgtcaaccggatcgattctatttcgacgaactcaaaccaaaaatctccgattctagatctgtaatcaaacggttaataaacgccgagcatgacgatgaagtctcg

SEQ ID NO: 169274 - DNA, 368 bp, Arabidopsis thaliana nossen
attcattcgaagattaaccgacactaacgagttagctcctgagatctgaaacggtagagaacctgaaaatctattattgctcaaatctaaagaacctagagacttggcattaccaatatcaccagtgaggtttccttcaaaatagtttgaagcaaggtcaagaaactgtagattaggaagaccccaaatccctgaaggaatcattccagagagagagttgttacttacacgaagacgaatcagagtcttacatttagcataactctctggaaattgtcctgtgaatctgttctgcaacatgagaagatgcgtcattacgcctttcttgcacatataaggaggaatctgaccttccaagaagttctcag

SEQ ID NO: 169275 - DNA, 393 bp, Arabidopsis thaliana nossen
  unsure (1)..(393): unsure at all n locations
aagaaggccgggggcgtcccacgcgtccnattcattcaatgattaactgatactaacgagccagctcctgagaggggggacagtagataatggggggatctacaacagctcaaatctaaagaacctagagactcggcattaccaatatcaccagtgaggtttccttcaaaatagttcgaagcaaggtcaaaaaactgtagattaggaagaccccaaatccctgaacgaatcattccagagagagagatgctacttacacaaagacgaatcacagtcttacatttagcataactctctggaaattgtactgtgaatctgtactgcaacatgagaagatgcgtcattacacctttcttgcacatataacgaggaatctgaccttccaagaagttc

SEQ ID NO: 169276 - DNA, 371 bp, Arabidopsis thaliana nossen
cttaaacatcttcattcctcttgcacttcaagctcttatcacttgtgggagcaatcctccttctggttttgtctgccctcctctcacttgatctaaaaacatccccttgatttaacaaatgtacgtatgatcaagggtggttttcgaggcttctgtaataattcaaatatatatgtggtacttttgattatcaggtttgtcgattatctagggttttaattaacaagtgttgttttctgttattgccgtcgtcgttataattaagctagggttcttgcatggccttctttaaatttcttttgcgtgtaatctctcgtacgttatgtattgctccagcttctcgctgtctatcaatgcgactctttagtctc

SEQ ID NO: 169277 - DNA, 374 bp, Arabidopsis thaliana nossen
cggacgcgtgggaaaaaaccaggtgtgtaggtcgtcaattaattttgcatgtgtgcaaatacaatgtttgtgggaattctcgagctttaatagtttggtttctattgttgtcggctgttttcgccatcaaggttgttgcctccatcgatgacacaaaacaagttggtgaaaaccaagtggaggagtcaaagtcgacatgcaagtatggaaattgtgcacagtatggagagaatcattttgtagaaacagatgaagtccttgatggggaagaagaagaagaatccaaaaataaccaaggtggaattgggagaggccaaggaggacaaaaaggcggtggtggtggtggccaaagaggacaaaaaggcggtggcggt

SEQ ID NO: 169278 - DNA, 370 bp, Arabidopsis thaliana nossen
gttctctcgccggagaagaaattatgcagggtttggcggcgaccaccagcaaccgtggctctctgaccttcctcgctcccaggaaccatagtccaatttcaaagaaatttgtgaatccaagagtgttctttcccaacgttgattcatccgcaaaattaagattatcagctagctcaatttcacggagatgtccacgagagattgctcctctttcagcaactgcatctgtggactttgcagcagcagcaacatcatccaaccagctctttgctaatggcttgccaccattagctcctggtttgagaagacaccggagaccgatagagcctgcaagagtggctaaagatgacttctttaaaatcaaactgcc

SEQ ID NO: 169279 - DNA, 281 bp, Arabidopsis thaliana nossen
  unsure (1)..(281): unsure at all n locations
aggatttccataatatgaagattaggctgaggcccagcatctggagtgtgccaagcgtcttgttgtagataaaagcatccagactgcatacatccagacaatcagatctgctcagcatttcatatatatcgagaatcagtatttcctgggttcttcttatgctaggcctacctatagagacgcaggagctgacaatccaattcctatcgagttggcactaaagacngnnagaaaaaacagagctaaggaaagatccaccgcatatgtggctataccattgc

SEQ ID NO: 169280 - DNA, 375 bp, Arabidopsis thaliana nossen
atcttatcaggtttgaatcccttcttttccattagttcaagaacacctggcatctctgcaaacttttggatcctcccgtacgcatctaccagacagttaaagaacacgaggtctaaccttatgtctgagttctcgatgaaacgcaatactcctccaattttatcagctttactagctcttccataagcacgaacaagagaacatagtgtaacacaactcgggaaaattctctctgattgcatcagtctaaataagtattccatttgttttaagtctcctgccctcccaaacgcgtcaatgaccacattataggtgactatggtccatgaataatgatacttctgcatgtattccatcacagcactcatcttcttg

SEQ ID NO: 169281 - DNA, 371 bp, Arabidopsis thaliana nossen
  unsure (1)..(371): unsure at all n locations
gctctctctctcgctttttatgtgactttcagatccgccgagtcgtctgtttgtggaatctttttatggagctcantattctatatacacctctctttgtttgatcgatttcacaaaccctagcttcggcgatcttaaatctgcaaaaagtctatggcgtcttctcctggtaatactaaccctcacaatcctcctccgtttgatctcggtattctcttcaaaccttcatccaatccttatccgccgccgccggcatcttatcctcctcctacaggtccttttcttcacaaccagtacgatcagcagcactacgctccgcctggtatctccgctcaaccatctccggtgactcagcagcaacaagatgtgtc

SEQ ID NO: 169282 - DNA, 74 bp, Arabidopsis thaliana nossen
aagacttctcaccatgaaaggtggcaaaggacaagacagctacgccaataactctcaagctcaggcaatgcatg

SEQ ID NO: 169283 - DNA, 377 bp, Arabidopsis thaliana nossen
cgtgtttgagccagcgagcatgatggcaaagtgtgacccaaggcacggaaagggcatggcatgttgtttggtgtaccgaggagatgttgttcccaaagatgttaatgctgccgttggcaccatcaagacaaagaggactgttcagtttgttgactggtgcccaactgggttcaaatgtggaatcaactaccaacctccaacagttgttccaggtggtgacctcgctaaggttcagagagctgtatgcatgatcagtaacaacacagcagttgcagaggtgttctcacggatcgaccacaagtttgatctcatgtatgcgaagagggcattcgtgcactggtacgttggtgaaggaatggaggaaggtgaattctctg

SEQ ID NO: 169284 - DNA, 336 bp, Arabidopsis thaliana nossen
gagaaagttaaagagagaaggtgagatccatagagaaagataaagagaatggggtctaagggagacatttttggtgtatgtaacatgaagctcgagagacttctcagcatgaaaggtggctaacgacaagacagagactcccataactcccaatctcaaccagaggaatgaaacgccatgcttcacctcctagaggaaacacttaaaaatggtgaacttaattccatcgtctatactgcaccgttcacggcggctgatcttggctgttcctgctgcgcatatactgcccacataatcgatttcatagtcaaacatatctctaagatgattgatgct

SEQ ID NO: 169285 - DNA, 320 bp, Arabidopsis thaliana nossen
  unsure (1)..(320): unsure at all n locations
ggaannacgggggcgatccacgcatgcgatcttatcaagttagaaacccttcttttccatcagatcaagaacacctgtcatctctgcaaattttggcatcctcccaaacgcatataccaaacagttaaagaacacgaggtctaaccttatgtctgagagcacgaggaaacgcaatactccnccaacgcgagcaaccaaaccagctccaccacaagcacgaacaagataacatattgttacacaactcttgaaaacnccccctttttgcannagnnnaaagaagnagtccatttgttttaagtctcctgcccttccaaaca

SEQ ID NO: 169286 - DNA, 370 bp, Arabidopsis thaliana nossen
cctgtttggctcaagtatgttcctggaatcagcttcagaacagataatgagccttttaagagagctgtgaaaggattcacagagagaatagttgagctgatgaagagtgagaacttgttcgagtcccagggtggtcccattatcctttctcagattgagaatgagtatggaagacaagggcagttattgggcgctgaaggtcacaactacatgacatgggcagctaaaatggctatagcaactgagactggtgtcccgtgggtcatgtgcaaagaagacgatgcccctgaccctgtgataaacacatgtaacggtttctactgtgattcatttgctccgaacaagccatacaagcctttgatatggacag

SEQ ID NO: 169287 - DNA, 366 bp, Arabidopsis thaliana nossen
agttagtcaccaaaaaaaaaaaaaaacacaaaaagtttcaatggccgcctccacaatggctctctcctgccctgccttcgccggaaaggctgtgaacctttcccccgcggcatctgaagtcctcggaagcggccgtgtgacaatgaggaagactgttgccaagccaaagggtccatcaggcagcccatggtacggatccgaccgagtcaagtacttgggtccattctctggcgagtcaccgagctaccttaccggagagttccccggagactacggatgggacaccgctggactttcagctgatcccgagacattcgcaaggaaccgtgagctagaagttatccacagcaggtgggctatgctcgg

SEQ ID NO: 169288 - DNA, 360 bp, Arabidopsis thaliana nossen
atgagttcttcatatcatcttcaacattctccttgcctgagactgaaacccacgcgccgtcgtacgcgcctcctagcaaaccacccatcattctcttccttcagccatttcctaacacaaacacacctcgccgacgaaatcaaccggagaagaaccataaccgtttgcgccgtcgataacgccgccatgtcagcattaacctcaaaaggctacacaatctcaactctcaaaaacattctctccctccacgtccttttagattacttcggaaccaaaaaactccaccagatccgtgacggctctgctctcgccgctactctgtttcaagccaccggagctgctcctggaacctcaggattc

SEQ ID NO: 169289 - DNA, 359 bp, Arabidopsis thaliana nossen
gaaagtttagagattttttgaaagaacaaacagatatcgaattcgagttttgcaaaaatggtatcggtggaggaacctttatctcattccaattccactcgctttccgttaacaaccgatttctacggttcatcatcgccgtcggcggcgaggttacaccgtcaagctggccggtcgatgagaacagtgagatctaacttctatcaaagcggagatcaatcttgctcattcgtcggctcaatcggcgataaatcagagtatgcgtcggagtttctctcggattccgtcatcgacatgagactcggcgagcttgctttgaaaaacagtaattctctcaattcaaacgcttcctcaatgaa

SEQ ID NO: 169290 - DNA, 337 bp, Arabidopsis thaliana nossen
ctctcttctctctctctgaagcgatgtcatcgacgtttcgagctccggcgggagccgctactgtgtttacggcggatcagaagatcagacttgggaggctcgacgctctgagatcctctcattctgttttcttaggaagatatggacgcggcggcgtcccggttcctccttccgcttcttcgtcgagttcttcgcctattcaagccgtctccactcctgcgaagcctgagactgcgaccaagcggagcaaagtcgaaattatcaaggagaagagtaatttcataaggtatcctttgaacgaggagcttttaacagaggctccaaatgtcaacgagtc

SEQ ID NO: 169291 - DNA, 386 bp, Arabidopsis thaliana nossen
gagaaagttaaagagagaaggagagatccatagagaaagagaaagagaatgggttctaagggagacaacgttgctgtatgtaacatgaagctcgagagacttctcagcatgaaaggtggcaaaggacaagacagctacgccaataactctcaagctcaagcaatgcatgcacggtccatgcttcacctcctagaggaaacacttgaaaatgttcacctcaactcctccgccagtccgccaccgttcacggcggttgatcttggctgttcctccggcgcatatactgtccacataatcgatttcatagtcaaacatatctctaagaggtttgatgctgccggaatcgaccctccggagttcacagctttcttctccgatctcccaaa

SEQ ID NO: 169292 - DNA, 377 bp, Arabidopsis thaliana nossen
agcacaatgactagatttgcggtattgccactctctgttctccttctcgttctcgtgttcctctgcactgagtcgttggctaagtcggaggagtctgaagaatacgacgtcgctgtgccttcatgttgcgggttttcgtctcctcttctgattaagaaagatcaatggaaaccaatcttcgagacgaagtttggacagatttcaaccgttcaaatcggcaatggatgcggtggaatgggaccttacaagatacattccataacgttggagccaaacacaattttgctccctcttcttcttcattccgacatggtcttcttcgttgactctggaagtgggattctgaattgggttgacgaggaagcgaagagtactga

SEQ ID NO: 169293 - DNA, 372 bp, Arabidopsis thaliana nossen
gcgcatcgagcgaaaccagagctgaaatcggagatctaatcacacagctcgagtctaagaaccctactccagctccgacggaagctcttttccttctcaacggcaaatggatcctcgcctacacatcgttcgtgaatttgttcccgttgctatcacgaggaatcgtaccgttaataaaagtcgatgagatctctcaaaccattgattcagataacttcaccgtccagaactctgttcgtttcgctggtcctttaggtacaaactcgattagcaccaacgctaaattcgaaatccgaagccctaaacgcgtccagattaagtttgagcaaggcgtaattgggacgcctcagctaacggattctattgagatac

SEQ ID NO: 169294 - DNA, 373 bp, Arabidopsis thaliana nossen
ggcaaaattcatcaagactggtcaatttgaagaatgtcgcaatcaaccgtagatgtgccgccaaagggtgggtttagcttcgatctgtgtaagagaaatgatatgcttacacaaaaaggtcttaaagctccgtcttttttgaagactggaactaccattgttggtttgattttcaaggatggtgtgatactaggggcggatacccgagcaactgaggggccaattgttgctgataagaactgtgagaagattcactatatggcaccaaacatatattgctgtggtgcatgaactgcggctgatactgaagcagtcactgatatggtcagctcacagctgcggttgcatcgttaccagactggtcgagactctc

SEQ ID NO: 169295 - DNA, 317 bp, Arabidopsis thaliana nossen
  unsure (1)..(317): unsure at all n locations
gtccgagggcacgtcgtcacgcgtgcgagactcaaacctgagtaaaaggaacattctttcagtnctctacttaaggtgccacaatgctgtttcagtagccagcgataaagtcttaatctttgattcattcaaacgcgtctttgtttagtaatgtcagcgcgtgtgtctttaacggtggagtgtttgatagctctgctaccgtatgctgatggtataccgttgattccggcgaggatcacgagtgtcgatggtggcggcagacgaagatgtaataatgggtttagtaaacgtggtccgtttatggaagctccggagtt

SEQ ID NO: 169296 - DNA, 376 bp, Arabidopsis thaliana nossen
atttcatggttgggtttggggagcttccactatagaagctcagcgagggacccatacaaggtgtgttgttagagccgtacgcgtagtagtgtatacaggttcgtattggtgtgttgcacttttggtcctaaactcaactaataatacctcttttctttttcttttttcttttccaatctcttttctttctttaggatctctttagtcttatctatcaaaataccacttcgtatttggggtattcctatcaataaccaaccatacaaagcatcaatgcatcattctcatattcatatatcatacttgataaagaaagttccatattcactgactgtccagatatttattatttgaaaaagaaaaaattgttcaaacg

SEQ ID NO: 169297 - DNA, 361 bp, Arabidopsis thaliana nossen
  unsure (1)..(361): unsure at all n locations
gtaaaaaacaagaagacgcttacactagacttccaaaaatcaaaacttgagggtttcagagcaaactctgtcttcttcaagccgagagcgaaaaccctaagctcaattccgattttgcaactatgagtcgttcaagtcagcctccggatcttaagaagtaagcccttgttcttatttctctctttctgtttctatatcttcgtgtttctgatttaatttttgtgcttaatctgttgtttgtttttgtttcgttcgatgcaggtacatggataagaagctccaaagtaagttcaatatcttcatcttcttttatcgatagttagggaacttcagttntgtataacacattagctgagatgtg

SEQ ID NO: 169298 - DNA, 277 bp, Arabidopsis thaliana nossen
acggccggaatcgctagttttcgccggtcagccatacggcggagaattagttccagggccttgtacatactgtttcgtcacactatgggagctggccatgcccgaagtcgttaccttaaccacacggaggggggtgcctgttaggaagattgtgcccggagtgatgccggacaaggtttccgttctgtaaggagctgctggatctattaatgccgagtcagatgctgtgatgcttgagactgcaagcttgacacaccttgtcacccttatagaaggg

SEQ ID NO: 169299 - DNA, 366 bp, Arabidopsis thaliana nossen
ctactcaccaccactctctctctctctccctccatctctcttggattctctctcagattccatggaagctccaaaaagctgattcgttcagccaatttttcttcactctctctcagattcggatccgtggtcagatcaaccaccgtgtgttttccgatccgattcgattctttttgtcagaaaaaatactaggattccgtttccaccacagatccttgatttgatttggatttatttcttcttctttctctcttcgagtttgattccagaagataccttctcctgcattggagaaactaatttaaggtaagatttggctacttagatggtatgcaacaatttcataaggagtttcattgttcaagc

SEQ ID NO: 169300 - DNA, 374 bp, Arabidopsis thaliana nossen
aggatttccaaaatatgaagatgaggctgaggcccagcatctggaatgtgccaagcgtcttgttgtagataaaagcatccagactgcatacatccagacaatcagatctgctcagcatttcatatatatcgagaatcagtatttcctgggttcttcttatgcttggccttcttatagagacgcaggagctgacaatcttattcctatggagttggcactaaagattgttagtaaaatcagagctaaagaaagatttgccgtatatgttgtcataccattgtggcctgaaggcgacccaaagtctggccctgtgcaagaaattctatattggcagagccaaactatgcagatgatgtatgatgttatagcaaaag

SEQ ID NO: 169301 - DNA, 369 bp, Arabidopsis thaliana nossen
aaaaaatatgcaatcactactcttgccgccggcgagttcctccggcgtatccgccgtggcgcttctgccaggttcccagcactcatttaaccaccaaagcctctctactcgctccctgccattgtttaatccacttctcttcgctccaaagaagaaaaccaccatctactcataccaatctctgtccgtctacggtttccaaatcggaggatctaaacctagtttcgcaccatccacggtggcattttcatatccgagttctccgtcttacgcttccagtgataatgaggtcgacaaagcaaaactcgctcaagttgcaaagagattagagaagacttcacagtactctaagatgctagggagtattgg

SEQ ID NO: 169302 - DNA, 370 bp, Arabidopsis thaliana nossen
  unsure (1)..(370): unsure at all n locations
acgcctctctctctgtctatctatatcactctctcttcaccatttctttatcttccgtggaagaacagtcttcaacaacaaactaaaaacatgtttctaaagttgtttcttctcttatctttggtctccttctcacactcagactcttcttccacagtttcttgtcctaacggcacagacttccatcaactaaccacagtttttcgttacgtctccggtttcaactcttcctggttctcctcaaactgctccgccgttatcactcacgtcgttcttccgtcaagaaaactaaacggcaccgtttcttggaaccctatacgtaatctcacgcgcttacgtgttcttgatctctncaacaactctctcgatg

SEQ ID NO: 169303 - DNA, 367 bp, Arabidopsis thaliana nossen
ctttcatttttttatcagtttctcatttctctctcagtcgcatataaatttgaaacgccgtttcgtttttgctctttaagctttcttcttgatttcgacggtgtctctcaatctccgtcaagcttgacgaatttcaggagctatatataccatggcgctcttgtctcaagcaggaggatcatacactgttgttccttctggagtttgttcaaagactggaactaaagctgttgtttcgggtggcgtgaggaatttggatgttttgaggatgaaagaagcttttggtagctcctactctaggagtctatctaccaaatcaatgcttctccattctgttaagaggagtaagagagggcatcaattgatt

SEQ ID NO: 169304 - DNA, 373 bp, Arabidopsis thaliana nossen
ctcttcttcttcttcttcttcgttcttctcgtagcttcaaataagattgatcaaaagagtaaataaacatcaaaatccaaaaatccaaactagaaaaaatgtcagtagttttactctcttctacttctgcaacaatcaccaaatcccaatccaaaaagattccctttttatctcccaccacaaaattcccattaaaggtctcaatttctccatcaagatcgaaacttttcaacaaccctttacgcgtggcggcgccgccgtctatacccacttcggattcggcggaggagaagcggatcgaagaagaatacggtggtgataaggaagaagaagggtctgagttcaagtggaaagatcattggtatccagtttc

SEQ ID NO: 169305 - DNA, 400 bp, Arabidopsis thaliana nossen
actggtttcaacaatcccaaaggtccagacgctaatggatacgaaagtggctacacaagtaccatcggacaagtcattgcaaagggtcgcaaggcaagagtttcttctgcaagtgcttctaccgccaaaggtgacgctgcagctgcagtgactcgcaaagctgctgctgcacgtgcaaacggtaaggtagcttcggcatcaagggtgaagggttcctctgagaagaagaagggcaaaggaaaaaaggattgagcgtgaggtgctctcatattctcatgcatgcgtattcctcaaacctatatattaataatatcctacaaaataaagtcacaatctctttcttgttcataaataaaaccagagattgtcacctctatatattattgtgaaatgctactca

SEQ ID NO: 169306 - DNA, 328 bp, Arabidopsis thaliana nossen
ctaacctttagagagagaaaaacaaatgtcgttccgtagcatagttcgtgatgtgagagatagtataggaagtctatcgaggcgtagtttcgactttaagttaagcagcttgaacaaagaaggtggtaaatcccgtggttcggttcaagattctcatgaggaacaacttgtagtaacgattcaagaaacaccgtgggcgaatctacctccagagttattacgtgatgtgatcaaaagacttgaagagagtgaaagtgtgtggcctgctcgtagacatgttgttgcttgtgcttctgtttgcaagtcatggagagatatgtgtaaagag

SEQ ID NO: 169307 - DNA, 405 bp, Arabidopsis thaliana nossen
accggaacccagggccgacccagtcgtacgcgtccgctcctatagtttcgattaatccactgcagagcaaagggggtcacgtaagccaaccatggcgattctttttctagcgatggtcgccgtttcatcagccgtggacatgtcaatcatctcctacgacgagaaacatggcgtctccaccaccggtggccgtagcgaagccgaggttatgagtatctacgaggcatggttggtgaaacacggcaaggctcagagccagaactctcttgttgagaaagatcgacggttcgagatctttaaagacaatcttcgtttcgtcgatgaacataacgagaagaatcttagttatagattgggtttgactcgttttgcggatcttactaacgatgagtatagatccaagta

SEQ ID NO: 169308 - DNA, 372 bp, Arabidopsis thaliana nossen
tttaatttttttcatggttttttcacagggcaagcgctggacaacggtgggcctatggttggtcttgtgtacaggagggtttcagggtttgtgccacaagaagatgctctgtttccgtttcttacggtgcaagaaacactgacgtacagcgcactcttgaggctgaagacaaagaggaaagactcggctgcaaaggtgaagaggctgattcaagagcttggtctagaacatgttgcggattcaaggatcggtcaaggatcaagatctggaatctctggaggagagagaagaagggtttctattggagttgaacttgttcatgatccaaatgttatattgatcgatgagccaacctctggtttggattctgcg

SEQ ID NO: 169309 - DNA, 124 bp, Arabidopsis thaliana nossen
tcctgaattccgccaagattgtggaaaaattaattaaatttatatatgtaaaaggaatttctccaagattagggtttagtgtgagataaatgaaattgaagtaataattatgctctattgaaaa

SEQ ID NO: 169310 - DNA, 373 bp, Arabidopsis thaliana nossen
cagctttttaaacccaacagagcaaaaaagcaaaagattcaacaaaaatctcctcaaattctattcatggtctctagaaattctgacggatatttcttggatccgaccggtatgactgttcctggtctcggaccttcctttacagccgccgtttcttcttcttcttcaccaacgacttcttctacggccgtggctgtggcggatgtgacggcgatggtttcttcttcggaggaggatttgagtaagaagattaggaagccttatactattactaagtctagagagagctggacggagcctgagcatgataaattccttgaagctcttcaattgtttgatagagactggaagaagattgaagcttttattggtt

SEQ ID NO: 169311 - DNA, 335 bp, Arabidopsis thaliana nossen
gatgaaactcggtaagctgtctagtctccaccgcaagtaaaaaaaatccacagaattgggttgtttttggagaaagagggtttcattcatggtctctttcttgtgtttttgaaccaacaactatcatagtggtcggtattttatttatcggtttggtcgatcgattgagttttagctctgtgagcgtcatgattctccggctgtgctgtgctgtgtaatatgtttgattcgttgttttcatgtttttatttcggtggtaataaggtacagccaatgtgagtcatatatttgatttgatgtaccctctcaattcaataagttaattttatgtccaa

SEQ ID NO: 169312 - DNA, 382 bp, Arabidopsis thaliana nossen
gaatcttcttttcctctttttgagattctctaattatccttttggaagagtcgggtgtgatagagattcttaatgggctgctttggttagttagtggtggtggtgaggatttccgtagagtttctgaaactggaccaaagccagtgcataacactggaggttacaatggaggtcaccatcaaagggcagatccacccaaaaaccttccagtcattcagatacatcctatctctgttgcggccattccagctgatgaattgagggatataacggataactatggttcaaagtccttgattggtgagggttcatatggaagagtcttttatggtattcttaaaagcgagaaagcagctgccattaagaaactggattctagtat

SEQ ID NO: 169313 - DNA, 378 bp, Arabidopsis thaliana nossen
aagaaggatcacattttaacccatacagtagtttatttgctccaagcgagagaaagcttattgcaacttcaactacttgttggtccataatgttcgtcagtcttatcgctctatctttcgtcttcggtccactcgcggttcttaaagtctacggtgtaccgtacattatctttgtgatgtggttggatgctgtcacgtatttgcatcatcatggtcacgatgagaagttgccttggtatagaggcaaggaatggagttatctacgtggaggattaacaacaattgatagagattacggaatctttaacaacattcatcacgacattggaactcacgtgatccatcatctcttcccacaaatccctcactatcacttgg

SEQ ID NO: 169314 - DNA, 380 bp, Arabidopsis thaliana nossen
tctaactccagagctggagttgatggctcggctggaaactcggaagctagcaaagaacctggatccaaaaagagggggagatgtgaatcatcctctgccactagctcgaaagcatgtagggagaagcagcgacgggacaggttgaatgacaagtttatggaattgggtgcaattttggagcctggaaatcctcccaaaacagacaaggctgctatcttggttgatgctgtccgcatggtgacacagctacggggcgaggcccaaaagctgaaagactccaattcaagtcttcaggacaaaatcaaagagttaaagactgagaaaaacgagctgcgagatgagaaacagaggctgaagacagagaaagaaaagctggagcc

SEQ ID NO: 169315 - DNA, 372 bp, Arabidopsis thaliana nossen
cggacgcgtgggcctttgcctatcgcttaattctgcttttattaccagagaaagcaagaatatataagaatcagaaattgggtgaagaagaatggtcttgattactaagatgtctctctctttctacatcattcatcttctcattttctccttgatttccacttgtgttgtctccaaccaggccgaggataatcttcttcaaggcctaaacagctaccgaactgctcaaagagttcctccatttgccaagaatgagaaggctgattgtgtggctgatgagatcgccgacaagctcgaagatcagccatgcacaaaccacaccacagcgagcacggttactcctggctcggtacctccacggctgacgaacta

SEQ ID NO: 169316 - DNA, 374 bp, Arabidopsis thaliana nossen
cagggttcgtccttcaagcgctcatgattcccctttcttcactacaaagtcgggtgctcctgtctggaacaacaactcttctttgactgtcggaactcgaggtccaatccttctggaggactatcatctgcttgagaaactcgctaactttgacagggagcggattcctgagagggttgttcatgccaggggagccagtgctaaaggtttctttgaagtcactcatgacattacccaacttacttctgctgattttcttcgaggacctggtgttcagactcctgttatcgttcgtttctcaactgtcatccatgagcgtggcagtcccgagactctcagagatccccgtggttttgctgttaagttttacacca

SEQ ID NO: 169317 - DNA, 376 bp, Arabidopsis thaliana nossen
ataaaaatatatatctaaattttcaatgtgtgattataatagtatctaaaagacgttatctctaattccgtaattttgaactttggaaaaaacgactcaacatcgagatttcgaaaagatcgatacaaacacaaaatggaaaatgaatgagatcgaggaaaaactcacggaagtagagcctaaaaaggcggcagtgtgaagtactgtgtttccatatttatccggcttgtagagaagtttttctaggtggactttctgtgccatgaacttgaatgctttgagatttttgtgtctcacagctagatggaagactgtttcgttatgtggttgtgtgagtatatcgaaagatgaaggagtcttgtggctaaagaccttg

SEQ ID NO: 169318 - DNA, 374 bp, Arabidopsis thaliana nossen
cggaagcaataaagagcaaactgacaatgccatcagacattgtggaggaaacacgcgcggctcgtgagcatggagggacgggtaggactgtggttgaagtcaaggtcgaggattcaaagccgggtaaggtggcgacttcactgaaggcgtcggatcaaatgaccggtcaaacattcaacgacgttggacggatggatgatgatgctcggaaagataagggaaagctgtgagaatactagaaaaatgacaatgttttttgggccttttgttctggatgaatatctctgttgttttttgggccttttgttttggatacgtctgttatagcagataacgttttctgatagtttctatgtttgtattcttgttttgga

SEQ ID NO: 169319 - DNA, 375 bp, Arabidopsis thaliana nossen
ctcatttcttgatcccgattcttcagaggcctcacatcttcgatatccgcacgaagcctcactcgtggtcttcaatctctggtactaaagatctccagatggttaatctcactcttcgtgttctctctcgtcctgaggtgtcgcgtctcccgtacatcttccaaactttgggtctagagtatgacgagaaggttcttccttcgattggaaatgaggttttgaaagctgtggttgcacagttcaacgctgaccagcttctcactgagcgtcctcacgtctcagcacttgttcgggagtcactaatcacccgtgcgaaggacttcaacattgtgcttgatgatgtagctatcacgcatttgtcctatggtgtggagt

SEQ ID NO: 169320 - DNA, 374 bp, Arabidopsis thaliana nossen
cgaaaaacaaaaaaaaaaagacagaggacaaaaaaaaatcacgaaatctgattttcctctcttttgctcgaagccaagtctctgcttttactttgatccaccaacttcatcttcaacctctcgattttaggtaagattcttagagtgattttgacttatctaagaatggagctaaagagcattaaggatgcgtttgatcgtgttgcgacgaagcagaagctctcttatagcaaaactaatgagattgttcatatgttgtctcaagaaatcgataaggctttgagcatattagaggagacaccatcatcagatactatgcttcttgatcatagatctatcctcgctgatgtgaagaaagtgtttatggagattgc

SEQ ID NO: 169321 - DNA, 374 bp, Arabidopsis thaliana nossen
ccgaaagcaaagactgagagaaccaaggctccgatctaacaatgaggaagaggacgctcgtgtccgttgtgttccttttctcgcttctgtttcttcttccagatcaaggaagaaagttacacgcgaatgcagaagagagttccgatgatgttacagatccaccaaaagttgaggagaaaattggtggtcacggtggtttatcgacggattccgatgtagttcatagagagtctgagtcgatgtcaaagaagacgcttcgcagtaacgcggagaagtttgagttccaagctgaggtttctcggcttatggacattattatcaactctctatacagtaacaaggacattttcttaagagagttgatctccaatgct

SEQ ID NO: 169322 - DNA, 374 bp, Arabidopsis thaliana nossen
cggacgcgtgggaaaaaaaaacagagcacaatgactagatttgcggtggtgccactctctgttctccgtctcgttctcttgttcctctgcactgagtcgttggctaagtcggaggagtctgaagaatacgacgtcgctgtgccttcatgttgcgggttttcgtctcctcttctgattaagaaagatcaatggaaaccaatcttcgagacgaagtttggacagatttcaaccgttcaaatcggcaatggatgcggtggaatgggaccttacaagatacattccataacgttggagccaaacacaattttgctccctcttcttcttcattccgacatggtcttcttcgttgactctggaagtgggattctgaattg

SEQ ID NO: 169323 - DNA, 265 bp, Arabidopsis thaliana nossen
aagatctccaaatgataaaacccactcctcgaatactctctcgaccagaagtaccacatctcccgtacaactcccaaactttgaatctacactatgacgagaaaaaacttccttcgatacgaaaccaagttctaaaagctagaataacacaattcaacactaaccagcttctcactgagcatccacacatctcagcacttgcccagaaaccactaatcacccgtacaaaagactccaacatcagactagatgatgtacctatcac

SEQ ID NO: 169324 - DNA, 376 bp, Arabidopsis thaliana nossen
atcagatcttagctaaattgagacaagctcaaaatgagtaagcttcagagtgaggccgttcgtgtaggcatcactactatcacagggaaatccgaggcaaagaaacgtaactttgtcgagactattgagctccagatcggtctgaagaactatgaccctcaaaaggacaagcgtttcagtggatctgtcaagttaccacatatcccccgtcctaaaatgaagatctgcatgctcggagatgcccagcatgttgaagaggctgagaagatggggttggaaaacatggatgttgagtctctaaaaaagcttaacaagaacaagaaactcgtcaagaagcttgcaaagaaataccatgctttcttggcctctgagtctg

SEQ ID NO: 169325 - DNA, 352 bp, Arabidopsis thaliana nossen
  unsure (1)..(352): unsure at all n locations
attcaaaaagaaaacattcattcgattaagggcaatgtctggaacatacgtgggggaagtaccgcttaatggatcggcgganaaacactacaagaagtggaggaacgaaaaccacgtcttccaagatgccgtcggccaccacatccaaagttgcactatgcatgacggtgactgggactcccacggctccatcagatcatggaatatcacatgcgatggaaagccggaagtcttcaaggagaagagagagatagacgacgaaaagatggcgttgacgttgaaagggctagagggtcaagcgatggagaagtacaagaagtatgaggttatctaccagttcattcccaagtcg

SEQ ID NO: 169326 - DNA, 412 bp, Arabidopsis thaliana nossen
  unsure (1)..(412): unsure at all n locations
gtacttnnccggagggacgagggactcgtacccgttcaaatagatgaagatgctcttgttgcaaaatctactaatgctgcgggaggactananaaagctgtgcagtaggtcgaaagagatcttagttcaagacacacccctgggccagcggtggtgaaggagttgcagggacaacatgtcatattgagagactgcatcgaacagctaggggcaatggagacatccagaacaagtcttatctcacatttgagagaagctttacaagaacaggaactcaagctggagcaagtccgtaaccaccttcagattgctcggtttcaatcagaccgaactggtgatctctgcagacagcttctagaccatggtggtagttcacagcctcctgctacagaagaagaagagtcaaaagaag

SEQ ID NO: 169327 - DNA, 372 bp, Arabidopsis thaliana nossen
gaaagtggtaatttctcagtttatgaggaccggacctcccgttttttggctcctgctccaagacctcgaaagatgcctggactggtagctggtgactccagtttcatggatgacggtgaagactctttggcagagctatccaatacctcattccggaagtttaacattctttgcactggtgatcgtgatgggaacatatgcttcagtatatttggaatatttcagataggaaagattaacatacacgagctgtctcttcctgtgcctcatctcgatgagcatgcctcttgcaaactatttaatgcttccatttacaagggtgctctgtcaaaagacctttgccgtctggtagtaatgtgcacaggagagctt

SEQ ID NO: 169328 - DNA, 368 bp, Arabidopsis thaliana nossen
cgcatccgcaattgtcatatgagtcgaggatatatagagttcttcagggtggaactgggattccaaatatgaaatggtatggtgttgagggggactacaatgtcttagtcatggatttgcttggtccaagtcttgaagatttgtttagttattgcaagaggcagtttagcttgaagactgttcttatgcttgctgatcaaatgataaatcgtctcgagttcattcattctaagtcgtatcttcatcgtgatataaagccggataattttctcatgggcttatggaggcgggcaaatcaagtctacatcatagactatggtttggctaagaaatatagagacagctcaactcatagacatattccatac

SEQ ID NO: 169329 - DNA, 377 bp, Arabidopsis thaliana nossen
tttgttttctttgcttcttctatcttcttcttctttcttcttctcgcgttaatactctttgattccgctgttcgtttgatgagaattagattttaaatggcaaaagtttcgtttaaggattctctgaaagctcttgaagctgatattcaacacgctaacactgtagctttagattatcctcgggagaaggatggagcgcgtgttcaaatgaggctatcgtacactccagctgctcagtttttactttttcttgtacaatggactgattgccatcttgctggtacactcggtctgctcagagttctgatttacatgacctatgcggatgggaaaaccacaatgtcggtttatgagagaaaaacaagtattaaagattt

SEQ ID NO: 169330 - DNA, 369 bp, Arabidopsis thaliana nossen
ctcgattgggtcactgtgagctgttccggactgagagagtgttggagcaacatgaagctggcaatcagtcaaacagaaaaccatcaaggacattgatgtactttgaagggtgtcctaagcgcctaggttgcacggttgtgcttcggggaagttgtcgtgaggagctaaagaaggttaaacatgttattcagtacgctgtatttgcagcttatcacttatcgttggagacttcattccttgcggatgaaggtgcttctctgcctaaaattagactgaagcaaccagggatggtgcggactgcatcacaaaggaggataattgatgaaggcatttccttaataactcaatctcctacagaaacagatagtc

SEQ ID NO: 169331 - DNA, 375 bp, Arabidopsis thaliana nossen
gcgatgagcgtccaggagcgtatccggcacgtgacggatcagagaacgtacctccgggagatccaaagacgatgaagacggtggtgatggataaaggagcggcgatgatgcaatcgttgaaaccgatcaaacagatgagtctccatttgtgttctttcgcttgttatggtcacgatcctagccgtcagattgaagtcaacttctatgttcatcgactcaaccaagactttcttcaatgtgctgtttacgattgcgactcctctaaaccccatctcatcgggatcgagtatattgtgtcggagaggttatttgagagtcttgatccggaggagcaaaagctttggcactctcatgactatgagatccaaacaggcc

SEQ ID NO: 169332 - DNA, 395 bp, Arabidopsis thaliana nossen
  unsure (1)..(395): unsure at all n locations
gtaccggaccggaagggcggggccaaccgtccccaactgaagactctatcaactggccgtgatagactactgtcgggcaaacagatgctagcattgaccttaacgtacaagttcaaattagaagattcagctgaagtgaaaccgtatataccattattgaacaatcgcatatatgacacaaaatttgagtcccagttttttatgatctctgatactaacaagcgtgtatatgcaatgggtgacgtttatcctgagtcttcaaaacttcccaagggagagtataaacttcagctgtatctgaggcatngaaaatgtggagctgctggaaaaagtgaaacaactcactgggtttattgaaagaaatatgggggagattcggctaaatttacattctg

SEQ ID NO: 169333 - DNA, 398 bp, Arabidopsis thaliana nossen
gggctagtcgtacgggaaaagcatgtttaaactctgtctcgttctcgtcttggttattgcaggagatgcaaatccggttaagtccggttcttgtagttgctccgggaatatatcagcgagcgatgtcgatcgagttcatttcgcgatgaacttggagttcaccgaggcggagttcttcttgaaaggggctaccggaaaaggacttgatgcctataacgcgacacttgctaaaggcggaccaccgccggtaggggccaagaaagccaaccttgatcctataactaaccgaatcatcgaggagtttggttatcaagaaatcggtcatcttagggcgattacggatatgacgggaggaattccacgtccgctaataaatctgacgagagagaatttcgcag

SEQ ID NO: 169334 - DNA, 383 bp, Arabidopsis thaliana nossen
cgaatctctggttttgagttttggagaatggagtttttccgcagcgtgtcggcgtttactaggctgaggtctggcgtcagccaacaatcttcactcagcaattctgtcagatggattcagatgcagagctctaccgacctggacctgaagtcgcagctgcaagagttaattccggaacagcaagaccgtctgaagaaactgaagtcagaacatgggaaggtccaactgggaaacatcactgttgatatggttattggtggaatgagagggatgactggattgctttgggaaacctcattgcttgacccggaagagggtattcgctttaagggattgtcgattcctgagtgccagaaagtattacctactgcccagtctggagc

SEQ ID NO: 169335 - DNA, 397 bp, Arabidopsis thaliana nossen
  unsure (1)..(397): unsure at all n locations
agagattgatccgtgtcagatagagagttatgtgtgcttgctcttagtaaaactagggaaatagatttagcacagtnntttcatctttagtatttttttttattagtaccttnnattcaacataagttaatgtagtcataacaatagaaaagatatatgcttatcatgaacatttttagtcatattattttagagtcctcttttaggatcctcctagctcatttcatagatatcatagagagtcatagaaacaatatnttagaagtttcatatatgtgagaatacttgaatactctatncttttattcatcnatcgttgaaatctaanatcttggctattcttgaactcattgacatgactacgaaccctcatcaatacattcagtgctttttatat

SEQ ID NO: 169336 - DNA, 374 bp, Arabidopsis thaliana nossen
cggaagaaaatgaaataaacaagtcgaagagagtagtcatcgacccctaataaaatccagtgaagaagaagattgagtgagtgagagagagagagagagagaagatgggggttgatttctataaagttcttgaagttgatcgaagtgctaatgacgacgagcttaagaaagcttatcgcaaactcgccatgaaatggcatcctgataagaaccctaacaacaaaaaagaagccgaagctaaattcaagcagatctctgaagcttacgatgttttgagtgatcctcagaaacgagcaatctacgagcaatacggagaagaaggtttaaaccaagccccacctcccggcgccggtggtggctatcctggaggatca

SEQ ID NO: 169337 - DNA, 367 bp, Arabidopsis thaliana nossen
aaccttcattactaatctcctttaaaggtttctttcgtgaatcagatcggaaaaatggaatcttttttgttcacatctgaatccgtcaacgagggacatcccgacaagctttgtgatcagatctccgacgctatcctcgatgcttgccttgaacaagaccctgagagcaaagttgcttgtgagacttgtaccaagactaacatggtcatggtttttggagaaatcaccaccaaagctaacgttgattacgagcagattgttcgtaaaacatgccgtgagattggattcgtatctgctgacgttggtctagatgctgacaattgcaaggttctggttaacattgagcaacagagtcctgacattgcac

SEQ ID NO: 169338 - DNA, 368 bp, Arabidopsis thaliana nossen
ggctcttcacagccattcaatctcataagacatattgccggagaaactctctcggggggtcgcttcttctgcattttctgcttcccaatggcttccagaattgctgattctctcttcgccttcacgggcccacagcaatgtcttcctagggttcctaagcttgctgcttcttctgctcgtgtttctcctggtgtatatgctgtgaagccgattgatcttctgttaaaaggacgaactcatcgaagtagaagatgtgtagctcctgtgaaaaggagaattggatgtatcaaagcggtggctgctccagttgcaccgccttcagctgacagtgcagaagacagggaacagttagcagaaagctatggatt

SEQ ID NO: 169339 - DNA, 347 bp, Arabidopsis thaliana nossen
tccgtccgaagggaatctatctggacaacatacattgttcttagctcagagtttgggcgccctgtcaaataaccgtgtgacgatattgttcttacatacttcaggatcagccatttgttcttggtcccaatagtaatggccttaatcaatacaggatggtttcattgacgtatatgttttcccttgatggtgaacgggacggagagctcgggcttcctggtcgcgttttcaagaaaaagttacctgagtggactcctaatgtgcagtattactccaacaaagagttttcaaggcttggtcacgccttgcactataatgttcaaggaactttggctttgcctgttttt

SEQ ID NO: 169340 - DNA, 371 bp, Arabidopsis thaliana nossen
gtaagtactgcgagaaacgtgatcctaccctagcagttgtggcatacagaagaggacaatgtgacgaggaactcatcaatgtcactaacaaaaactctttgtttaagttacaagccaggtatgtagtggagaggatggatggtgatctgtgggataaggttctcgatgaaaacaatgattatagaagacagcttattgaccaagttgtgtctactgctttacctgaaagcaagagcccagagcaagtttctgcagctgttaaagcattcatgactgctgatttgccgcacgagcttattgagcttcttgaaaagattgttctacaaaattctgccttcagtggaaacttcaatctgcaaaatctgcttata

SEQ ID NO: 169341 - DNA, 370 bp, Arabidopsis thaliana nossen
tttgctgcatcgctcggtagtggcactcaattgttcacgctcaccatatttattttcatgcttgctcttgttggagtgttctacccatacaaccgaggagcactctttaccgctttggtggtcatttacgctctcacttctggaattgccggatacacatctgcctctttctactgtcaacttgaaggaaaaagctgggtgaggaacttgttactcactggatgtctcttctgtggcccattattcctaaccttttgcttccttaacaccgtagccatcacctacactgcaaccgctgcattaccctttggaaccattgtggtgatcgtccttatatggactctagttacctcacctttactcgtcttgg

SEQ ID NO: 169342 - DNA, 371 bp, Arabidopsis thaliana nossen
cggacgcgtgggtttgcatttcgaaatctacctgggtccacattcatgttgtcatcagggtcctcaactttcataaagatttgtcttcctgtctgcattgttttgttaatctcatcttctacttcactttcagtcaaatccttctcatccatcaaatctattttcgttatatctttttcaaatgacttcttatctttctcttgtttagactcaacctcctcttgatgcagttgcaagtctttcttcaattggacgaccccaacatcatcacttttctcaaccattatattaccaacagaatggtcctgtagattcttttcagcttcactttctgagttcacctctccaattccttcagacctagacccatc

SEQ ID NO: 169343 - DNA, 382 bp, Arabidopsis thaliana nossen
aaaaaatatgcaatcactactcttgccgccggcgagttcctccggcgtatccgccgtggcgctacgggcaggtgtccagcactcatttaaccaccaaagcctctctactcgctccctgccattggttaatccacttctcttcgctccaaagaagaaaaccaccatcttcttataccaattctttgtcgtctacgggttccaaaatggaggatctaaacctaatttcgcaccattcaacgggggcttttcattttccaagttctcctctttccgtttccaggataatgaggtcgacaaagcaaaactcgctcaggttgcaaagagattagagaagacttcaaggtacttcaagaggctagggagtattggtttctgggggcag

SEQ ID NO: 169344 - DNA, 306 bp, Arabidopsis thaliana nossen
  unsure (1)..(306): unsure at all n locations
ccaacttatagccctccagtaaagccaccaccagtacaattgcctccaaccccaacttatagccctcccgtaggaccaccaccagtacaagtgcctccaaccccaacttatagccctcccgtaaaaccaccaccagtacaagtacctccaacaccaacttatagccctcccataaaaccaccaccggtacaagtgcctncaacaacaaacttactcatcacctccccaaggtggatacggtactcctcctccatatgcatatctatcgcatcctatagacataaggaactaggtaaacaagataca

SEQ ID NO: 169345 - DNA, 377 bp, Arabidopsis thaliana nossen
ggtggctcaacattaagctctcaggctttgccaaaacaagaagtgtcaacagcaacttctaaaagttacacatgcaaagcaggtgacagagttaaatttgtaggtccttcggcttctgcaatttcttctcttcaaggccagcttatgggaccggccattggttcccagggaaaagtagcccttgcatttgaagacaactgtgcttcaaaaattgggattagatttgataggcctgtacaagatggcaatgatcttggtggcctctgcgaagaagaccatgggtttttttgtgctgctagctcacttcggttagaaggttcttctagcgatgatgctgataaactcgccgttaatgaaatctttgaggtcgcacttag

SEQ ID NO: 169346 - DNA, 378 bp, Arabidopsis thaliana nossen
ggaccgaggatttgcatcggtcagaacttcgctctgttggaagcaaagatggctctggctttgattcttcagagattctccttcgagctttcaccttcctatgttcattcaccttacagagtcttcactatacatccacagtgtggggctcatcttatcctgcacaagctttgatactatactccacgtgatgttatcaaaacttatacatatgagaaacaaaatttcatagaggaatttattcaagataatagtcatattaaccatgttttgaattgagaatgcttccctaataacaactaatccatctatttttgagtattattttataccaaatagaaatgccttagtggaagagatgatatttaaataagaatc

SEQ ID NO: 169347 - DNA, 234 bp, Arabidopsis thaliana nossen
ctcttgtggagccattcggattagcaccttacattctcaagcgccgtagatctctcgcttcagtttttgaaataatagatcgagttcctacaatcgaacctgatgatacctcggctcttagtccgcctaacgtgtatggaagcattgaactgaaaaacatcgacttctgctacccaacccgcccggaagtgttagtactaagcaacttcagtctcaaagtcaatggcggacaaa

SEQ ID NO: 169348 - DNA, 372 bp, Arabidopsis thaliana nossen
aacacacccaaatatgcataagcttttgttttctcttctctccgtcggcgcactctcatttctcctctgcttccatggcgccgaggcacgccagcgagaggcgccgtttccaaacgcctgccatttcagccaaatcaacagcctcgcgcccgctcaggcgacgaagttcgaagccggtcagatggaagtatgggaccacatgagccctgagctccgatgcgccggtgtaacggtggctcgcatcacccttcagcccaattccattttcttgcccgctttctttagcccacctgcccttgcttacgttgtccaaggagaaggagttatggggacgattgcttctggttgtcctgagacttttgcagaagttga

SEQ ID NO: 169349 - DNA, 358 bp, Arabidopsis thaliana nossen
agttaaacccataactcccaaaatttatatcctctttaaacatttttgtgcaaataaaatgccttcttgttcggtaactgagatttcaaaatgtatcgtctatccggagaagaagtccaccgtctccgatctccgtctctccgtctccgacctccctatgctctcatgtcattacattcaaaaaggcgtcctcctcaccagccctcctccttccttctccttcgacgaccttgtctcctctctccgccgttctctctcctccactctttccctcttccctgctttagccggccgtttctccaccactcccgccggtcacatttccattgtctgcaacgacgccggagttgatttcgtc

SEQ ID NO: 169350 - DNA, 377 bp, Arabidopsis thaliana nossen
ctcttgttctctccgcccatctctgctctcttttattttcccagaaagttttgttttttttttccgaattccgttaatctcattggggtttccattgatagcaatggcgacggctttcgctcccactaagctcactgccacggttcctctgcatggatcccatgagaatcgtctcttgctcccgatccgattggctcctccttcttctttcctcggatccacccgttccctctcccttcgcagactcaatcactccaacgccacccgtcgatctcccgtcgtctctgtccaggaagttgtcaaggagaagcaatccaccaataataccagcctgttgataaccaaagaggaaggattggagttgtatgaagatatga

SEQ ID NO: 169351 - DNA, 228 bp, Arabidopsis thaliana nossen
gcgtgattggaagaacaagagaatcttatatttctagtacatggatgacttcgttgatttagttttactctcgtaatgattcttcgttgatcacagcattttagaaatgccaataaataaataaaaccggcgcggctgaatatatcctataattgtgagttcctcctcggttggggaacccaagagcacttattccaagtcaaattcgatacccattattagccattt

SEQ ID NO: 169352 - DNA, 254 bp, Arabidopsis thaliana nossen
  unsure (1)..(254): unsure at all n locations
cacctcttgggccatgcagatcaagacgacgataacggccaggaccaagacaagaacaaggctatagtcctctacagcagcaaggcatccacaatggctcatcatgaggaatatgacgttcacgaggaggaaagcgacaagtatcctgatctgaggcacacgttgttcgaaggagaggaggaacttcggggacttggaggaggaaggtcaaggtagttctgtgatagatatggtgaaattctntaattattatt

SEQ ID NO: 169353 - DNA, 384 bp, Arabidopsis thaliana nossen
attctctatcttattgacacataaacatggaccggtccactttcatcttatctctactcttcacactcaccgtgtcgactacgaccctcttctctccggttttcgcaggaacgttcgacacagaattcgatatcacttggggtgatggtcgtggcaaggttcttaacaacggagagcttctcactctctccctcgacagagcctccggctctggttttcaaaccaagaaagagtatttgttcgggaaaatcgacatgcagctcaaactcgtccctggaaactccgccggaaccgtcactgcctactacttgaagtcaaaaggtgatacgtgggacgaaatcgatttcgagtttcttggtaatctaactggtgatccgtatacca

SEQ ID NO: 169354 - DNA, 357 bp, Arabidopsis thaliana nossen
ctgcgttatagatacttacgcatattccatgccaggagcgttaacatggataggaacatttgtatccaaccactctatttgtagaccactttgctgcgtgtgcaactctcgatgcaagctccctttcgttcgtacgcttcccgaggacggagctgatctatacttttgttctttagaatgtgagaagaaaattgatcaggaacgtttcgaattttaaaattatgttctttactatgtttagaaaactatttatttatagatgataatgtttgctagcttgaatgactcgcaaatttggtaaaatttgtgaggaatctgggtctgttaaattattacaagtccctacaataacatttg

SEQ ID NO: 169355 - DNA, 365 bp, Arabidopsis thaliana nossen
cagctttttaaacccaacagagcaaaaaagcaaaagattcaacaaaaatctcctcaaattctatgcatggtctctagaaattctgacggatatttcttggatccgaccggtatgactgttcctggtctcggaccttcctttacagccgccgtttcttcttcttcttcaccaacgacttcttctacggccgtggctgtggcggatgtgacggcgatggtttcttcttcggaggaggatttgagtaagaagattaggaagccttatactattactaagtctagagagagctggacggagcctgagcatgataaattccttgaagctcttcaattgtttgatagagactggaagaagattgaaagctt

SEQ ID NO: 169356 - DNA, 378 bp, Arabidopsis thaliana nossen
ctacaattggttatggttctcccaacaaggcaaactcatacagtgtccatggagctgcgcttggtgagaaggaagttgaggctacccgaaacaatcttgggtggccatatgagccgttccatgtacctgaggatgtcaaaagccattggagccgtcacacgcccgaaggggctgctcttgaagctgattggaatgccaaatttgcagcttatgagaagaaatatccggaggaagctgcagagttgaaatctattatctcaagtgaattgcccgttggttgggagaaggcacttcctgtaagtagaactttctggtaatctataacgttctatcagtattcttcatatataaggctcttattttaggcaacttaaaatt

SEQ ID NO: 169357 - DNA, 378 bp, Arabidopsis thaliana nossen
ctcgcttttccagattcttctccactggttctaccgatacgagatcctcttatacgatagtggatcacactgatgatgcggttgtggtgggagctggtggtgctggtcttagggcggcgattgggttatcggagcatggctttaacaccgcttgcattactaagcttttccccacaaggtcacatactgttgctgctcagggtggtattaatgctgcactgggaaatatgtccgaagatgactggagatggcacatgtatgacactgtcaaaggaagtgactggctaggtgatcaagatgctatccagtacatgtgtagagaggcaccaaaagcagtcattgaacttgagaattatgggctgcctttctctcgtactg

SEQ ID NO: 169358 - DNA, 378 bp, Arabidopsis thaliana nossen
atcactaacaaggcttgactcaacctctggtctctactacgattgttctgcccatatgatttgggtcggtgagcgaaccagacagctagatggtgcccatgtcgagttcttaagaggtgttgctaatcctcttggaatcaaggtgagtgataaaatggatccaaaggagctagtgaagttgattgagatcttgaatgctgacaataagcctggaaggattacaataatcacaagaatgggagctgagaatatgagagtgaagcttcctcatttgatcagagaagtgcgacgtgctggacagattgtgacttgggtcagtgatccaatgcacgggaacaccattaaggctccttgtggtctcaagactcgtccctttga

SEQ ID NO: 169359 - DNA, 150 bp, Arabidopsis thaliana nossen
tgaaaacggtgtgtcataagaaaggaagaagcaataaaaagtcttgggtcaagtttctgggcctatagaaaaataaagcccaactaaaagctcataaggtgggaaaacaatataagcccatccaaaagataataaggtgggaacacaaaa

SEQ ID NO: 169360 - DNA, 378 bp, Arabidopsis thaliana nossen
gtggtaacattaagctgaatcctcttgttcttccctaccatggaccctatatgttctccgtagatcttttatctctgtaaatgtctaaatggagatagttatgagttaaacattaagctgtgtttactttgattttatacagtttgttgctggatgtgggaagttttttgaagggacagctgagcagatgtatcagtcgttgtgtgtgactctggctgcattacctaaaccgacacaggtttactgcggccatgaggtaaaaaaatcaacagcttcattatgtcttttgagttcttaactcataaaaatggatgcctataaactgaataatccgctattcatttcttatggttctcagtacaccgttaagaacttgga

SEQ ID NO: 169361 - DNA, 380 bp, Arabidopsis thaliana nossen
agaagataaaaatggctcgagtctcttctcttctttctttctccttaacacttttgatcctttttcatggctacgcggctcaacagggtcagcagggtcagcagtttccgaacgagtgccagctcgaccagctcaatgcgctcgagccttcacacgtactgaagagcgaggctggtcgcatcgaggtgtgggaccaccacgctcctcagctccgttgctcaagtgtctcctttgcacgttacatcatcgagtctaagggtctctacttgccctctttctttaacaccgcgaagctctccttcgtggctaaaggacgaggtcttatgggaaaagtgatccctggatgcgccgaaacattccaagactcatcagagttccaa

SEQ ID NO: 169362 - DNA, 379 bp, Arabidopsis thaliana nossen
aatttctcattgagaaactgttcaatataaaaataaaatataatcaaaaagtatgagagagagtagaattagtctctcaagtgagaaactttgagaaacccataagaacacttgtatatcaggtcaaatattattttattgttaaaatttaattatataactaatatttattaaaatactaatattttttttttttgagaaaccaagaaggtatctcagtgacggagatgtccttatatcataccaaacttcaacaaaaacaagtattggagtcgactgtgtgataggttcgtcctcatccaaagacatagcttgaaggactttttgatataattatgtgtttggtgtgtataggtgtggtgatgagtgcaaggatgca

SEQ ID NO: 169363 - DNA, 380 bp, Arabidopsis thaliana nossen
caaatgtcaatcctggagatcatgttctagggatctctcctacgtcatctctctctccaggaactcagagtcgcctgcctcttattgaggctttctttgttctctgtgagaagattcaaactccgtcaatgttacagcaggatgcaactgtgacagcgggagaagtaaaggagtcgtctactcatggttcttcatcgaaaaccattgtagattctcagaagaaaattgatggttctgttacattttcaaagtttgtggagaagcacaggcggcttttaaattcatttgttaggcaaaatccaagtttgctggagaagtctttttcaatgatgctcaaggcaccaaggctgattgattttgacaacaagaaagcgtacttc

SEQ ID NO: 169364 - DNA, 366 bp, Arabidopsis thaliana nossen
  unsure (1)..(366): unsure at all n locations
aacacaacacacgcagaagagagagagagaacaaaaaaaagaaggagcggttacatattctctggtctgtcacaagaaaaatggatatctgtatggacaaggagccagatggtgtggtggtctatgcgaacggtgattcgtgtaatccaaaccaagaaaatgtttctgagcctctcttagattcagtatcacgcgatgatgctaatgtacatacagagcttcgatatggggaagagaacatcgaagtaaacgaatatgatgttaaagagtgtactagtgagatccccgttggtaagccgataggagatgattttgagtctaaagatgtcactaagtcaaagttacatgcanagcatgcttcaaatc

SEQ ID NO: 169365 - DNA, 360 bp, Arabidopsis thaliana nossen
gtgaccctcggaaaccacagcttcacatttgatatagctatagcctccatgctccaaacttattaacttgcagcaaaggatgcaacagcaatcagcgcagaacttacgttcaccgcagcaaatgtcacaaggcatagcaggtaaagtctcggcttcgcactgtggcatcaggctccggcatttttcattaccagccttacagaccgcagtatcagatccatcatcacgcattggatcttcatctgagctatacactggtaactgaacctgcttctgaggcaaaacacctatcaaacagagaacaaatcaccatgccaagaaatcagtaacttgttcagaatgttgaaacgtaattcatat

SEQ ID NO: 169366 - DNA, 378 bp, Arabidopsis thaliana nossen
ttcatcttcaaagactgcgccttttagctcagtgaaaaaggttcgagcttcggaaactatggcagcatgtccctaaccttaactctgatgctggattgaagaagctcgacgagcatcttctcactcgcagttacattactggataccaggcttcaaaggatgatatcaccgtctttgcagctcttgcaaagcccccaacttcacagtatgtgaacgcttctcgttggtacaatcacattgatgccctcttgaggatctctggtgtctctgctgaaggaagcggtgtcattgttgagggatcagctcctatcactgaggaggctgttgctactccccctgcagctgattctaaggatgctgcggctgatgaagaagatg

SEQ ID NO: 169367 - DNA, 380 bp, Arabidopsis thaliana nossen
cggacgcgtgggctcaattgcatggtagtaaaaatgaatacgaaaacgtttattgtatggtttcttttggtagcggcggttgttgtagctgttgcggcagagacttccgtggatgacaagaaacaaggtgaaaagcaagtagagataccaaccgtagaaggaaaaaacgacgctaaggatagtctcaataaaggagacgttgagaaagaggaagaaaacaattatgaaattgatcaacatggtggtggaggcggtgctgagttagagaccgtagaaatagatagtgcgtcagatgaggatgtacaaaattatagaggtggccatggcggaggatggaagggaggcggtggccaaggtggaggatggaaaggaggcggtgg

SEQ ID NO: 169368 - DNA, 376 bp, Arabidopsis thaliana nossen
ggagatggcttcgaccccgaagcttaccagtacaatttcatcatcttcgccatctcttcaattgctcggcaaaaaactcccaatcgcaattcatctaccatcatcttcttcctctagctttctctcgcttcctaaaaccctaacctctctctattctctccgtccccgtatcgccctactctcaaaccaccgctattaccactctcgccggttttctgtttgtgccagtaccgataatggagctgaatccgaccgccactacgattttgatctcttcactatcggtgccggaagcggcggcgtccgcgcctctcgcttcgccactagcttcggtgcatccgccgccgtttgcgagcttcctttttccactatctct

SEQ ID NO: 169369 - DNA, 380 bp, Arabidopsis thaliana nossen
caaaaaaacagtgtaataataatcataatcacctgatcaatctcttacataaaagctacagatctggtgttatacaatcatcaccgcaccaagttcctaaaggtttcgactttactgtttctattttcggaaagagagtgcaagattgaaatcgaagatgaaggcggcaacaaggccgatccacgccgtgacgacatgggttcgtcggcaaccaccaaaggttaaaggttttctcggtgttgtctccgccatgactgccctcgttttgttgagagtgattgttcatgaccacgacaatctttttgtcgctgctgaagctgttcattcccttggaatctccgtccttatctataaactcaccaaggagaggacttgtgctg

SEQ ID NO: 169370 - DNA, 381 bp, Arabidopsis thaliana nossen
gggcgctgatgagtatggttttggtactctggcaatgattgccacaggatgtatcatggctcgcatttgccagactaataactgcccggttggtgttgccagtcagagagaggaactgcgtgcacgtttccccggtcttcctggtgatcttgtcaacttcttcttgtatattgcagaggaggtgaggggcatattagctcagctgggatatgaaaagttggatgatataattgggcggacagatttgctaaaggctagggatatctcgctcgtgaaaactcatctcgacctcagttatctcttatcttctgttgggctaccaaaacgaagcagtacttccattaggaagcaggaggttcattcaaatggtcctgttcttga

SEQ ID NO: 169371 - DNA, 370 bp, Arabidopsis thaliana nossen
tcctttttcatgttcagtgggcacattgctaggggcacttacaggagctttgataggtcaatgaaactgagagtggtttcattagaggagcagcaattggagccatttcgggagctgttttctctatcgaggtctttgaatcatctctggatctctggaaatcccatgaatcgggttttggatgttttctctacttggtgagcaacattacttgctctgttttttaagtagctatgaagtttggaatgtggtgattagtgtttcttttgtgaattttttgtgtagattgatgtcattgttagtcttctaagcgggagacttgtacgagagcgcattggtcctgcaatgctaagtgcagtgcaaagtcaag

SEQ ID NO: 169372 - DNA, 380 bp, Arabidopsis thaliana nossen
attaaaatgatactgatacttcagtagattatacttcggtaatggtacacatagcttaattgcgggggactgaaaatccttgtgtcaccattagtaaaagcaagatgatccttcggtaatggtcgacataccttagttgcagaggactgaaaatccttatgtcaccattagtaaaagcaagatgatacttcagtagatgatacctcagtaatggtcggcatagcttaattgcgggggactgaaaatccctgtgtcacatgataatgatccttcagtaaaggtagacatagcttttttgcagaggactcgaaatcctcgtgtcaccattaggaaaacgagcatgatacttcagtagatgatacttgatacttcagtagact

SEQ ID NO: 169373 - DNA, 380 bp, Arabidopsis thaliana nossen
ctcagcgtcaagcgactaaggacgctggagttatctctggtctcaacgtgatgcgtatcatcaatgagccaactgctgctgctattgcttacggtcttgacaagaaggcgtcgagtgttggcgagaagaatgttttgatctttgatttgggaggtggtacttttgatgtgtctttgcttacgattgaggaaggtatctttgaagtcaaggcaactgctggtgacacgcatcttggtggtgaggacttcgacaacaggatggttaatcattttgttcaggagtttaagaggaagaacaagaaggatattactgggaacccgagagctttgaggaggcttaggacagcttgtgagcgggcgaagagaactctttcttcgact

SEQ ID NO: 169374 - DNA, 229 bp, Arabidopsis thaliana nossen
catggtctaataaagaataattctgattagttgataattttgtgaaagattcctgtgaaaaaggttaattaaatctattcctaatttatgtcgagtagaccctggtggtttgttttattgcaagaattcttaattcatgacttgtagggagggacttatgtcaccacaaacagagacttaagcaagtgttgggttcaaagctggtgttaaagagtataaattgacttac

SEQ ID NO: 169375 - DNA, 367 bp, Arabidopsis thaliana nossen
ctttgttttctgcagggctgatgtttgcaagttatcctaccttcacacagtcctagagtgtcatctaaatctgttccctgcactcaaaaactagttggtccttcttccatatcctgttcttatgagagcttgttgaagaaggatgaatcagttttttttcaagttatgacttttcttagctgtgtcttttcctcgagtctctgaaccccttgagtgaaatgttgtgagcataagtttcgtccagctacccagaacattactttttgttagtgcgtcttccaattctcagtatgttttgtctttttctcttagcgtctttcttttgccttgttggtcaacccattgatgttcaaacttcaaagtaaat

SEQ ID NO: 169376 - DNA, 388 bp, Arabidopsis thaliana nossen
gttgcaaagacaatgaagatgaattcgcgagctttaatagtttggtttctattgttgtcggctgttttggccatcaaggttgttgcctccatcgatgacacaaaacaagttggtgaaaaccaagtggaggagtcaaagtcgacatgcaagtatggaaattgtgcacagtatggagagaatcattttgtagaaacagatgaagtccttgatggggaagaagaagaagaatccaaaaataaccaaggtggaattgggagaggccaaggaggacaaaaaggcggtggtggtggtggccaaggaggacaaaaaggcggtggcggtggtggccaatgaggacaaaagggtggcggtggtggccaaggaggacaaaagggcggtggcggtggtg

SEQ ID NO: 169377 - DNA, 387 bp, Arabidopsis thaliana nossen
gtgaagaagaagaagcagagacaaaaacgattatgaagtacgttttggtgacaggaggagtggtgagtggtcttggcaaaagtgtcactgctagtagcattggacttctccttcaagcatgtggtcttcgtgtcacttccattaaaattgatccttatcttaacactgatgctggaacaatgtctccgtttgagcatggagaagtatttgtattggatgatggtggagaggtggatttggaccttggaaactatgaacgatttttagacagtacattgacccgtgacaacaatataactactggaaagatataccagtcagttattgacaaggaaaggaagggggactacctcggaagaactgtacaggttgttcctcatgttactg

SEQ ID NO: 169378 - DNA, 386 bp, Arabidopsis thaliana nossen
  unsure (1)..(386): unsure at all n locations
cggacgcgtgggcggacgcgtgggttgccgctttaagactcaagaagcggcggcaacatcaacggaaaccaccgtctccaccgggctttccgatcatcggaaacttgcatcagcttggggagctaccacatcaatctctatggagtctctccaaaaaatatggtcctgtaatgcttttgaagtttggaagtatcccaacggttgttgtctcttcttctgaaacagcaaagcaagctctgaaaatccatgacctcaattgttgtagccgtccaagcttagcaggaccaagagcgctctcttacaactacttggacatagttttctctccttttaatgattactggaaagaattgaggaggatttgtgtgcaagagctnttcagtcct

SEQ ID NO: 169379 - DNA, 331 bp, Arabidopsis thaliana nossen
ggggaatggatactacaacggtgcaataaagacgaggaagacaactcaaccagcggaggtgacggcgggagaggctgcgttagagaggatccaacagctcacggagctttatgagacacttttagccggagagtcaacgtctgaagcaagagcatgcaccgcattgtcaccggaggatttgacggagacagaatggctctatctaatgtgtgtgtctttctcttttcctcctccatctgggatgccaggaaaagcgtatgcaatgaggaagcacgtatggctaagtggtgcaaatgaagttgacagtaaaactttatctagagctattctc

SEQ ID NO: 169380 - DNA, 339 bp, Arabidopsis thaliana nossen
ttttcacacaaaacagataaaattcatagtttggtaacaaaacacttatcaaacccattggttgatctacattacaattacaacttcataacataaaccaaaacgacccaaaaagaaaaacacataggcgggtggtgaaatccctcctctgcccctacccacttctgctttttaaaccacaagacagaagcttgaaaaaagaagataaaacaaaataaaaaaattataaaacaaaggaacccattggtgaaacatagaggtcccttaagacacaccactctactactcaacacccacttactaaaaccctaatccttaacatgactaaaagagccctta

SEQ ID NO: 169381 - DNA, 378 bp, Arabidopsis thaliana nossen
gtcaggatttatccaaaagtgcatcatttacagtaaatttacatttattgaatggtgaatatgacccacgtaataaataaaaaatggcatttttgagacgaaaattgttcataaaatataagagtaattggaggaataagatgaaaactagatttttctgcagcttattcatttcatttagcatattcgtttgtattcatttcatcactgttcaacattcatgttacttttgtttgttctttgtcttaacaactatttgcagtctctacaaaacaatatttagttgtgtatttcctatttggattcttgaaatgcgactagggtttataaattgatttgatgtgccttgattcttatattttgttatcatactttgat

SEQ ID NO: 169382 - DNA, 371 bp, Arabidopsis thaliana nossen
caatatgatcccttatccaaccgtagaagatgcgtccgtggcgttaggacgaaaccttacttggttcgagacggtttggttcgattactcagccaccaaatccaatttccatgtatattgccacaccattctggttctcttccttgtcttttcactagctccttttcctcttgtgattgtcgaatggaccggttggttcgatcagtttaagattcagaagaaggttaagtattcgttgtctgatatgttccaatgttataaagaagtcatgaagttgttccttctcgtcgtcggcacattgcaaatcgtttcttatccttccatccagatggttgggattcgaagtggtttgccattaccatcgttaatgg

SEQ ID NO: 169383 - DNA, 331 bp, Arabidopsis thaliana nossen
acttcttcttcttcttcctttaccaaatcttttcttctttactctttttcatcgtcgacaaaaaatggagttggatcttacacctaagttgcccaagaaggtttacggaggagatggtggatcttactctgcctggtgcccagaggagttgccgatgctcaaacagggtaacattgcagccgctaagcttgctcttgagaagaatggcttcgctggccctcgatactctgattcctctaaggtcgcttatgttcttcaaggatctggaactgcttgaattgttctcccagagaatgaggagaaggtgatcgctatcaaccaaggtgattcg

SEQ ID NO: 169384 - DNA, 365 bp, Arabidopsis thaliana nossen
ttcaagtgtttgatcataatggcaacatcagctcgtaaagcatacggtttcggtagagccgatgaggctacacaccctgactccattagagcaactttagctgagtttctctccacttttgtcttcgtctttgcagctgaaggctctatcctctctctcgataagttgtattgggaacatgcggctcatgcggggacaaacacaccaggagggctgattttagtagcgttggctcatgcgtttgctctgtttgctgctgtttcagcagccattaatgtctccggcggacacgttaacccggcagtcacttttggtgctcttgttggaggcagagttacagcgatccgcgccatctactactggat

SEQ ID NO: 169385 - DNA, 244 bp, Arabidopsis thaliana nossen
ttccggaaggtttgccaccccaggatggggaaaccaggtttttgttttttggccccaccaacctcgaaaagaagaaggaaagccaaatcctgaagttcttggggttcatttggaatcccctttcttgggttttggaagctgcacctcttatggccattgctttggctaatggggataatcgacctccggattggcaaaattttgtgggtattatctgtctgcttgttttcaactccccaatcag

SEQ ID NO: 169386 - DNA, 295 bp, Arabidopsis thaliana nossen
  unsure (1)..(295): unsure at all n locations
acgagttgactcattcaacaaccgtagcatcagaagtcatcgactcggtggagatttcaccggacgacgtggtggcactaccttactcctctggcacgacgggattaccaaaaggagtgatgctgactcacaagggactagtcacgagcgttgctcagcaagtcgacggcgagaacccgaatctttatttccacagcgatgacgtcatactctgtgttttgcccatgtttcatatctacgctntgaactcgatcatgttgtgtggtcttagagtttgtgcggcgattctgataat

SEQ ID NO: 169387 - DNA, 368 bp, Arabidopsis thaliana nossen
gaacgataattcgaaacacacaaatttgcttgaatcaaagactcttcttcttcgttcgttcgtttcagtgattccaaagattccaaatttgtcggtgtaatcttcgttgtattcagaggtgtatgtatatgtattgaaatcgagaatggatctgttccgagtttggtcagggatggatttcttagcttggagaggaatggcttacacacttcttcttctcaacttcgtctttgcttgccaacttcttcttctccaacctctcgtttccgctctagatggtcaatcggtagatgctgctgagttattcgagagagcttcacaaagtatcaaggttaagcgttatagtgatgccctcgatgatctgaatg

SEQ ID NO: 169388 - DNA, 389 bp, Arabidopsis thaliana nossen
gaatcacactaattgtctatcaaacaaatgtagctagtttagtaaaatatgatttggagaagtagaatcactagtggcgccattatgtcatcttaatttgcattgcacactcagatgagctcattgctattattttttggtttggcatatcaagacaaaagcagcatatatccttagaagggtgctacatctgcttcggcgatagaatattttgcttctgaacttgtggaagctagtgctggtcctgttgaagtcactgagctagctgggacatgtgggaaaggaaatgtgccagtaaatgaaacaccagagatagtgaggacaaaggcgtggcatggtaaagatggaaagctgattgaggaagatgaattatcacttgaacgaactca

SEQ ID NO: 169389 - DNA, 376 bp, Arabidopsis thaliana nossen
gtgaacttaaccaagttgaagtatatgacgtctttcactccgacggcttattgctatgcgttaccaaggaccactggaggctcgtggtatggaacccgtatttggggcaaatcagatggattcgagccagaaaacaattcggcttatctaacatgtttagtctgggatacgacaacagtaatcgtaaccacaaaatcatgaagtttcttatgtttatgacaaaacagcatgtccacaatactcagaaatctatgattttaactccagttcatggaggctggttgagatcaatcccgtctggtttttacatagcgaccgcgtgtctttgaagggaaatacttacttttttgctcaagatttactaaaggatgcaaag

SEQ ID NO: 169390 - DNA, 373 bp, Arabidopsis thaliana nossen
  unsure (1)..(373): unsure at all n locations
ctttgttcaccacaacaaaaatcaagaacatataccacttgtgaacttcagagatcctatagcaatggcgaacctaccgattcttttggattactggccaagtatgttcgggatgagggctagagttgccttgcgagagaaaggtgttgagtttgaatacagagaggaagatttctcgaacaagagccctttactcctccagagtaatcccattcacaagaaaatcccggttctggtccacaacggtaaaccggtctgtgaatctcttaacgttgtccagtacgtcgacgaggcttggccagaaaagaacccgttcttcccttccgatccttacgggagagctcangctcgattctgggccgatttcgtggac

SEQ ID NO: 169391 - DNA, 373 bp, Arabidopsis thaliana nossen
ctcaaaacaagacccatcgataacagcgatcatggtggctaaagccttagcacagctgataacatgcatcatcttattctgccacgttgtagcttccgtagaagacctcaccatacgccaagtcacggccgacaatcggcgaattcgcccgaatcttctcgggactcacacagagagtaaattccggcttttcatgtccgattacggcaagaactactccacgagggaggagtacatccaccgcctcggaatatttgccaaaaacgtccttaaggccgcagagcaccagatgatggacccctccgccgtccacggagtcacacagttctctgacctcacggaagatgagttcaagcggatgtacactggagta

SEQ ID NO: 169392 - DNA, 372 bp, Arabidopsis thaliana nossen
cagacatctttataattaattattgagaaaagagaaaaacagaggaaaaaaagatggagagaagcttgaagaagacgaagaacaattataacaactccataaagagcaatcttatgaaagatgatgaattgtttcatgtgattcacaaagttccctgtggagacactccttatgtcagagccaaacatgctcagttgatagagaagaacccggagatggcaatagtgtggttttggaaagccatcaacactggagacagagtagacagtgccctcaaggacatggctgttgtaatgaaacaacttgaccgttctgaagaagctattgaagctatcaaatctttccgtcctcgttgttccaagaattcccaag

SEQ ID NO: 169393 - DNA, 371 bp, Arabidopsis thaliana nossen
caatcaccgccgattctctctctctctctctcgagtctctcgacggtcgcatatcaaaagtccatttctttcttctctttggaggatcagcaactatggatgaagagtacgaagtcatagttctgggtactggtctcaaggagtgcatccttagtggtcttctctccgtcgatggtcttaaggtacttcacatggacaggaatgactactacggtggagagtcaacttctcttaatctcaatcagctgtggaagaagttcaggggagaagagaaggctcctgctcatttaggttctagcagagactacaatgttgacatgatgccaaagtttatgatggctaacggaaagcttgttcgtgtccttattcat

SEQ ID NO: 169394 - DNA, 373 bp, Arabidopsis thaliana nossen
cgctttctctctctctctctcgtgtgtgtgtgtgtgatcgagtggtgaaacgacagagaggggcgtcgttttgttgatttcttctgggtgaagatgtcaggtctcgaagatatcaagaacgagaccgttgatctggaaaaaattccgattgaggaagttttccagcagctaaaatgtacaagggaaggattgacaacgcaggaaggggaagacaggattgtgatatttggccccaacaagctcgaagagaagaaggaaagcaaaattctgaagtttctggggttcatgtggaatccgctttcatgggttatggaagctgcagctctcatggccattgctttggctaatggtgataatcgacctccggattggc

SEQ ID NO: 169395 - DNA, 374 bp, Arabidopsis thaliana nossen
gcgatgggggcggttcaagctggggtaaagagaatgatgctggtggtggatctagctggggaaagcaagacaatggtgttggttcaagctggggtaaacagaacgatggtagtggtggtggatctagctggggcaagcagaatgatgctggtgggggatctagctggggcaagcaagacagtggtggggatggttcgagctggggtaagcaggatggtggtggtgatagtggttctgcttggggtaagcagaacaatactagtggtggatcgagctggggaaagcagagtgatgctggtgggggatctagctggggcaagcaagacggtggtgggggtggttcaagctggggtaaacaagatggtggtggaggc

SEQ ID NO: 169396 - DNA, 377 bp, Arabidopsis thaliana nossen
tgaggttgttcccatggccgatggagaatcaaaacaacaaaggagattttcttagagaagcttcaaaggcgaatgcagtcgttatcatgaacagcataacactagttgacgcctttctaaacgctgataaatggtcagagatgttctgttcaatcgtggctagggcgaaaactgttcagataatttcatcaggagtttctggagctagtggttctctccttctgatgtttgcagagttacaggtactatctcctctggttccaactagagaagcttattttcttcggtatgtggaacaaaacgcagaaaccggaaattgggcaatcgtggatttcccgatcgatagcttccatgaccaaatgcagcgaatgaatact

SEQ ID NO: 169397 - DNA, 378 bp, Arabidopsis thaliana nossen
ctcacacaaaaagaaaaacaatagctaatttaatatcttcttgtgatcatcacaataccacattgatccaaggccagttaaaatctctttcaccatgaagataaagattatgagcaaaacacatgtgaaaccaacaaaaccagtactagggaagaaacaattccacctcaccacatttgatcttccttaccttgctttctactacaaccagaagtttctactctacaagttccagaaccttctagatctcgaggaacccacattccaaaacgaggtcgtggagaatctcaaagatggtttgggtttggttcttgaagacttctatcaactcgccggtaagctggccaaggacgatgaaggagtcttccgtgttgagta

SEQ ID NO: 169398 - DNA, 275 bp, Arabidopsis thaliana nossen
gtcttatcatcaaacgttacgttctcgttttctcaaattccaaacaataccaagaaacctctacttgaaaagagaagattatcgccgcgtgtgtggcctaaaagcgatggcgtctgaaaaacaaaaacaacatgcacaacctggcaaagaacatgtcatggaataagcccaccattcttttacttagattaccaacctttcaacaagcttcgtggtgagggggcgttgattacttgtggagactctgggattggtcgagccgtgggatactgttt

SEQ ID NO: 169399 - DNA, 373 bp, Arabidopsis thaliana nossen
gttcatcacaggcatttggtttctcttattggttattgtatggccggtgttcaaagattacttgtctatgagtttgctccaaacaacaatcttgagtttcacctccatggtaagggacggcctacgatggaatggagtactagattgaagattgctcttggatctgctaaaggactttcatatcttcatgaagattgcaatccgaaaatcattcaccgtgatattaaggcgtcaaacatattgattgatttcaaatttgaagctaaggttgctgactttggtcttgccaagattgcttctgatacaaacactcatgtatctacacgcgtgatgggaacctttgggtatttggctccggaatatgctgcaagtg

SEQ ID NO: 169400 - DNA, 273 bp, Arabidopsis thaliana nossen
aaatctttttcacatctctttgcaaattcttgagaattcattcaagttacataaaaagctgagagcaatgaagaaaattgtgttaaagctggatttgcatgacgatagggcaaaacaaaaggcccttaaaacggtttctactctcccaggaatcgattccattgcaatggacatgaaggagaagaaattaacggttattggaaccgtggatccggtaaatgtagtaagtaagctaagaaagtattggccgatgacggatatcgtactagtggg

SEQ ID NO: 169401 - DNA, 374 bp, Arabidopsis thaliana nossen
gttatctctccctctccttttctatgcaaatcatcctccaagagtgatttggggatttcttcgtttcctaaatcttctcagatttcgattcatcgatgtcagaagaaatcgatctcacggaagattgtttccgttatggctcctcaaaaggatcggtctcctggaactacaggatcggtgaaaactgggatgacaatgacggagaagattctagctagagcttcggagaagtcattagttgttcctggtgataacatttgggttaatgttgatgttcttatgactcatgatgtttgtggtcctggtgcttttggtatcttcaagagagagtttggtgaaaaagccaaggtttgggatccggagaagattgttgt

SEQ ID NO: 169402 - DNA, 356 bp, Arabidopsis thaliana nossen
ctcaggcgctagagtattgtaccagcagaggacgtgcactttaccatgacctaaatgcttatagagttctctttgatgatgatgcaaatccaagactttcatgctttggtttgatgaaaaacaggggagatggaaagagttatagcactaacctggcattcactcctaccgagtatctgaagacaggtcgcgtgacacctgaaagtgtaatatacagctttggaactctattacttgaccttctgagtggaaagcatataccttcaagccatgcattggacctcatacgggacaggaacattcagatgctgatggattcacgtttggaaggctaattttcgagtgacgatggaact

SEQ ID NO: 169403 - DNA, 377 bp, Arabidopsis thaliana nossen
ctggtggagactctgggattggtcgagccgtgggatactgttttgcatccgaaggagctactgtggctttcacttacgtgaagggtcaagaagaaaaagatgcacaagagaccctacaaatgttgaaggaggtcaaaacctcggactccaaggaacctatcgccattccaacggatttaggatttgacgaaaactgcaaaagggtcgttgatgaggtcgttaatgcttttggccgcatcgatgttttgatcaataacgcagcagagcagtacgagagcagcacaatcgaagagattgatgagcctaggcttgagcgagtcttccgtacaaacatcttttcttacttctttctcacaaggcatgcgttgaagcatatg

SEQ ID NO: 169404 - DNA, 348 bp, Arabidopsis thaliana nossen
cacaggcgcacatattagacttttttactcctgtgccaacacaccaaggtctggggactatttttacagtttaggataacacccactcttcatcatcactcttctcaacatctccaactaccaaaaccaactcaaccgcaaccctagagtgttccatttagccgaaaacaaccaccacggaggctttttcggttcacagcaacaacaagaacagaaaaacttgtggagccgcttcgacgcacaggtcatatttcaagcattcaaaattgacgttcacttggctcagcaccttcataaccaacaagacagcagaggaaacatcgttcgtgttaaaggacctttccatgt

SEQ ID NO: 169405 - DNA, 378 bp, Arabidopsis thaliana nossen
gcgaaatccccatcagcgactgcccgagcagcctccaccagcacctctttcaagtccaactgtggagtcaaagccaaaagttcatcccagttccacgacttcccagcagcggggctaaaacctgagaattcttcaacttttgtatcaccactcagcagcgagacctcaagttcccgaatcttactcttgactccagcttcatcataggcaagagatgacaccccactcaaaggtgatccatagacgttgtcaggggaatgatggagatccgagatgcaagactgagagccctgaggagaaaacgggctccggccagatgtaatgctcacagaaggagagtcatacgaaggaagactaccagaagcagtggaggattcg

SEQ ID NO: 169406 - DNA, 374 bp, Arabidopsis thaliana nossen
aaataacaaaaaaccaggtgtgtaggtcgtcaattaattttgcatgttgcaaagacaatgaagatgaattcgcgagctttaatagtttggtttctattgttgtcggctgttttcgccatcaaggttgttgcctccatcgatgacacaaaacaagttggtgaaaaccaagtggaggagtcaaagtcgacatgcaagtatggaaattgtgcacagtatggagagaatcattttgtagaaacagatgaagtccttgatggggaagaagaagaagaatccaaaaataaccaaggtggaattgggagaggccaaggaggacaaaaaggcggtggtggtggtggccaaggaggacaaaaaggcggtggcggtggtggcca

SEQ ID NO: 169407 - DNA, 287 bp, Arabidopsis thaliana nossen
tgtggtcattggtcatgttgattctggaaaaacgaccacaactggtcacatcgagctataaactctgggggatttacaagcgtgtcatcgacaagttctagaaagaggctgctgagatgaacaagaggtccttcaagtacgcatgggtgttggacaaacttaaggccgagcgtgagcgtggtattaccatcgatattgctctatggaagttcgagaccaccaagtactactgcacagtcattgatgccccaggacatcgtgatttcatcaagaacatgattactggt

SEQ ID NO: 169408 - DNA, 381 bp, Arabidopsis thaliana nossen
accaaactcttcactctctccaacaatggccaagaagatgagttctctcatcatcatcttcaacattctccttgtcctcacaactcaaacccacgcgcacaacgtcacgcgcctcctagcaaaccacccatcattctcttccttcagccatttcctaacacaaacacacctcgccgacgaaatcaaccggagaagaaccataaccgtttgcgccgtcgataacgccgccatgtcagcattaacctcaaaaggctacacaatctcaactctcaaaaacattctctccctccacgtccttttagattacttcggaaccaaaaaactccaccagatccgtgacggctctgctctcgccgctactctgtttcaagccaccggagc

SEQ ID NO: 169409 - DNA, 386 bp, Arabidopsis thaliana nossen
gaaaacgcactgatcagcactttggcgggtagaacctcgctcttgagggcattgccattggaggtcatatcaaatggtttccagatctctcccgaggaagctaggaagatcaagttcaacacacttgagaccactttgacccgcgctgccggtaggcaacaacaacagttgatcgaggagattgtcgaggcttaaatcaaaacgtttttctttttcttaataaagtatggtcagtttgtaatcacgtccctttacctttaacgtacgtgtaaaatatgtgtctgcggcacctcacttgtaataacactttcttctcataaataaaacggaagtttcgcgttacatcttagaaactttagtacatcgaggagagggcggccgctcta

SEQ ID NO: 169410 - DNA, 345 bp, Arabidopsis thaliana nossen
gaaaacgcaatgatcagcactttggcgggtagaacctcgctcttgagggcattgccattggaggtcatatcaaatggtttccagatctctcccgaggaagctaggaagatcaagttcaacacacttgagaccactttgacccgcgctgccggtaggcaacaacaacagttgatcgaggagattgtcgaggcttaaatcaaaacgtttttctttttcttaataaagtatggtcagtttgtaatcacgtccctttacctttaacgtacgtgtaaaatatgtgtctgcggcacctcacttgtaataacactttcttctcataaataaaagggaagtttcgagttacat

SEQ ID NO: 169411 - DNA, 366 bp, Arabidopsis thaliana nossen
taaaaagataaagagagcagaaactccatcagcaaacactattgcgatacggagaagaatagttttagaacttgggttggcggctatagaatatgtgaaacaaacctcaggaacttgtctcatgtgttcaggaaactggttgagctgttgtccgattcttgccacacggccaagttgattgcacgagattgcgtcaaaaaagtcatccttgttatatgcaggctgcaacaatcaaaaaacagatatgaaccgctgtttgaaatatcatataaatcattaaatatgtcatgttaagagcttgaactacatctcgctgagatttaatcaaacttagaaaatacatgtaccttaccttatgcgtttggc

SEQ ID NO: 169412 - DNA, 469 bp, Arabidopsis thaliana nossen
  unsure (1)..(469): unsure at all n locations
ccgtccgnncgtcagataccctttgagttatctgtatttannacagccgctnnngaaagtaggtgctgtggcggannggaaacttcttagtacttagtganannaatgtntnnctagcannngaaattgggaggcannngagaaactgnnaatgaanngctagtnntggccattannttccggnncaaacaactctnttctcaagacnattannagcgagaggggtcgttctcgacttgggctgatctgannagcttgagttgcagcttttaccaaggggtccggtttttgctttctgacnncagaaacttgannagctggcgaaagcgcgaagtcnaagcatttgcgatgaacanntagctcaaaaaaggggactcnnttctatggcttcnttcctcttgaaatcccagctttgagtnatgctcatngggaatcatnccaaaggcttatgaagcttttgttggtctct

SEQ ID NO: 169413 - DNA, 379 bp, Arabidopsis thaliana nossen
cttttgtttcgaagccatggaaactgaatctgatgacgccaccattaacgtcgtcaaagacatgagagttcgattagagaatcgaattcgaacccaacacgacgctcacttagatctcctttcctcactccaatccattgttcccgatatagtcccatctctcgatctctcactcaaactcatctcttctttcacgaatcgacctttcgtagctacaccaccattaccagaacccaaagttgagaagaagcatcatccgattgttaaattaggaacccaactgcaacaattacatgggcatgattcaaaatcgatgcttgttgattcgaatcagagagatgctgaagctgatgggtctagtgggagtcctatggcgctt

SEQ ID NO: 169414 - DNA, 374 bp, Arabidopsis thaliana nossen
caactagtttaagtgttgaattgcatagagaagaaaggttttgagtagcaaaagagtaaaactagatctttaggagaaggtaaaagaagaaattgatggcgacgacagtgggaagaaacatagcagcaccattgctgttcttgaatcttgttatgtacctgattgtgcttggtttcgcaagttggtgtctcaataaatacatcaacggccaaactaaccacccaagttttggaggcaatggagcaacaccgttcttcttgacgttttcgatattggcggctgtggtaggagtagcgtcgaagttggccggagcaaatcatattaggttttggaggaatgatagtttagccgctgccggagcttcttccatcgtt

SEQ ID NO: 169415 - DNA, 360 bp, Arabidopsis thaliana nossen
  unsure (1)..(360): unsure at all n locations
ccgtccgccgagaaatcacacaagtgagggttgctcttccctatcaaaatanaatgcataacgggatgggcattgtaaaggagagatacanttagagacaatacagtgagaaatttgtaatgtaacaccaatgaaaagaaccctcttagcataatctgatgccaaatctttgggtttttgaacatttttaacagatgtattcaaatgcgtcaactagttatgagtcataacaaacagttaccttcatgtactgtatatctagttccttggctcctacatgtgcatccatctcaaaaagctcatagaatttacccatctgcttgccacaaaagaagaacatttatcctggaatctcccatc

SEQ ID NO: 169416 - DNA, 369 bp, Arabidopsis thaliana nossen
tccagcggtagatcctttagattcaacgtcaactatgctacaacctcgaatcgttggcgaggaacattatgaaactgcgcaacaagtaaaacaaactttacaacgttacaaggagcttcaggacattatagctatcctggggttggatgaattatccgaagaggatcgcttaaccgtagcaagagcacgaaaaattgagcgtttcttatcacaaccctttttcgtagcagaagtatttacaggttctccgggaaaatatgttggtctagcggaaacaattagagggtttaatttgatcctttccggagaatttgattctcttcccgaacaggccttttacttagtgggtaacatcgatgaagctactgc

SEQ ID NO: 169417 - DNA, 373 bp, Arabidopsis thaliana nossen
gctgcttcttctgcccggtttttgctggaagaaacacctaccccgagcattgcagttccagaatcttgcatgactgccttcacatctgcaaaatctacattgactagtccaggtatctgaaaaagaacaaaatatatactgtttcctcagaatctttggggatcaatcaataagcattcatcaaccaacttgttatgtgctttattcaatacatagactcacagtaataatatctgagattccttgtactccttggcgtaaaacatcatctgcaagaagaaacgcgtcctgaagtggcgtctgttcatcagcaatatctagcagacgatcatttggaatcacgataagggtatcaacattcttttggagcttt

SEQ ID NO: 169418 - DNA, 378 bp, Arabidopsis thaliana nossen
gaagaatcatggctatttggatcgagattatcgaaacggaagacgatctggttcagattccgatgaagaattgaagggattgagtcacgaagagtataggaggcagaaacggcttaagatgaggaaatcagccaagttctgcttttgggagaacacaccgagtccacctagagatcagaacgaggattccgatgagaacgccgacgagattcaggacaagaacggcggcgaaagagatgataattcgaaagggaaagaaaggaaaggtaaatctgactcggaatctgaatctgatggtttgagatctaggaagaggaagagtaagagctcgaggtctaagcgcaggagaaagagatcttatgacagcgatagtgaatc

SEQ ID NO: 169419 - DNA, 376 bp, Arabidopsis thaliana nossen
agtttcttctccttcttcaagctctcgcatcactttcatcgggggtggggtctctgcgtcgattcttgggacatcggcgtcggagtttccgacaggaatctaaaaatgtcacgtggaagaggagttcctatgatggacctgaaacgaagttatgatgttgaagacagggtggtgtccgtgtctataccatcaataatcgaagctgatgaggctgatctgtggccactacctgagattgataccaagaagtcgaaatttccttgctgtatagtttggactcctcttcctgttgactcttggttggctcctttcattggtcatattggactttgcagagaagatggagtcattttggactttgctggatctaacttca

SEQ ID NO: 169420 - DNA, 376 bp, Arabidopsis thaliana nossen
cacagagagatttgatcagcttcgtgtgttttccatggcgtcggaagcgagggaatcaccagcaaacaatcctggcttgtcaacgaatcgagatgaggctacaaaaggatacatcatgcaacagactatgtttcggatcaaggaccctaaggctagtcttgacttttactcacgtgtgctggggatgtcattgctgaagaggctggatttctctgagatgaaatttagtttgtacttcctgggctacgaggatactacaacagctccaaccgatccaacagagagaacggtttggacatttggtcaaccggcaacaattgaattgactcacaactggggtacagagagtgatcctgagtttaaaggttatcacaat

SEQ ID NO: 169421 - DNA, 384 bp, Arabidopsis thaliana nossen
caaaagcatacttgagagagatctgcttggataatatgctttaatcaccgtgttcgatggctgccgctggagtggatgctacacctcctgtgacatacatggacgaaacctgctacgttaagggagccgccgccaaacacggagaagggcttaacaagtactacctccagcatctcgattagctccagctcctgcctcgcgaaaagtcgtataaccttaatcgtattgaagctcataggaatgaactttattttcgagtacaaatgctcatagaagagttacagctcctttaccaacctgtgtactatgtgtgtgaagagcttaaagtgatggaaacaaacaaggtcttggttaacgttcatccagatgggaagtctgttgtcc

SEQ ID NO: 169422 - DNA, 373 bp, Arabidopsis thaliana nossen
ctctcaactccgaaagtacaaaaccccaaattaacaaaacatgttgcgtttcgtggtactctctctaactctcatggttttcatcaactcatcaaactttccaaagacagcagccaccccaccaggcacgtaccaaaaccacacaacgtacgtaaaaacggcatgcaactcaacaacataccctacaatgtgctacaactgtctgtcctcctattcctccaccatcaagtccgacccaatcaaactatgcacaacatcgctaaatctcaacgtcaaatccgctaaaaacgccacattagtcgtctctaaccttctccaaaaggccaaagccgcgaaaagccatgaggtctcgatccttaaggactgcgtggac

SEQ ID NO: 169423 - DNA, 373 bp, Arabidopsis thaliana nossen
gatccaacttgtccccaaaatgagccacccactcttactgtgttgcgtggtgaggaagatactgattgacattgatcttggctaggtcacagaactccaagatccgacggttatgatctttcagattctctagcttctgtgtctgtataccggacgttaaagctgatctcaatacagccaccatatataaaacttccttatactgcgtcacggctgagctactctcgtcccatctgacaataacattaaattactacacgtgaacaacgacaatatctatattaatgtaatacatcaatgatgtgcggagggttactagagatcagattggtctacgagaatctgattgggacccacccaccatgagttctat

SEQ ID NO: 169424 - DNA, 377 bp, Arabidopsis thaliana nossen
atgaactagagaattgaagacctaaacgaagaaacagagactctaatctctgcacttacttcagacaaagattgcactgggaaaaatatttgcaagtgtcaacgatgtgtggcatactcacaatgatcttcaagctgacctcagtctccagagaagcttcaagcctcaagacaccgatatcatcgatgcttcgttccctaaatgctgcaccacttggctcaaggcgcttacattcgcactccttcatagatcaaaacagccttctcatgatgatgatcatcctcttctttctaataatccacacgttcttgtaccctactttgagatagatctctattattatagcgaagaccccgaccttaccaaggtctcatcat

SEQ ID NO: 169425 - DNA, 376 bp, Arabidopsis thaliana nossen
ggagagaagagagaaagagagaaagagagacagagataatggcgtacagtgcgtgtttcctacaccagagcgcattggcttcatcagccgcacgatcatcatcttcctcctcatcccagcgtcacgtgtcgctctccaaacctgttcagatcatctgtaaagctcaacagtctcatgaagacgataactccgccgtctcccgccgtcttgctctcactctcctcgtcggcgccgctgctgttggttccaaagtatctcctgctgatgccgcctacggtgaagctgcaaacgtgtttgggaagccaaagacgaacacagacttcttgccatacaatggagatgggttcaaagtgcaggtttcagcaaaatggaaccc

SEQ ID NO: 169426 - DNA, 377 bp, Arabidopsis thaliana nossen
cacaaaaaacacaagatctaaaaaaaaaagcttttatcatttagaaaaatttggtttcgaatttcttcgaagagtgaaaatggcgtctcatcaagaacagagttacaaagctggtgaaaccagaggcaaggctcaggagaaaactggggaagctatgggaacgatgggggacaaaacacaagcagctaaggacaaaactcaagagacagcccaaacagcccaacaaaaggctcatgaaacagctcagtcagctaaagacaagacgtctcaagctgcacaaacgactcaacagaaagctcaagagtccaaagacaagacaggaagctacatgtcggaaactggagaagcaatcaagaacaaggcacacgatgcagctg

SEQ ID NO: 169427 - DNA, 334 bp, Arabidopsis thaliana nossen
cgctctacttctctctctctctagattcgaaaaaatggcgaaactggtgatgttgttggttctctgtatcttaccggcgatagccatggcggcaaggaggggaaatattggaaagaatacaatggtggttcaaggtagcacctactgtgacatttgcaaattcggcttcgagactcctgaatcctcctacttcatccccggtgcaacggtgaagctatcatgcaaagacaggaagacaatggaagaggtttacacagacaaagctgtatcagacaaagaaggaaagtataagttcattgtccacgacgatcacagagaccagatgtgcgatgtt

SEQ ID NO: 169428 - DNA, 372 bp, Arabidopsis thaliana nossen
ctctcaactccgaaagtacaaaaccccaaattaacaaaacatgttgcgtttcgtggtactctctctaactctcatggttttcatcaactcatcaaactttccaaagacagcagccaccccaccaggcacgtaccaaaaccacacaacgtacgtaaaaacggcatgcaactcaacaacataccctacaatgtgctacaactgtctgtcctcctattcctccaccatcaagtccgacccaatcaaactatgcacaacatcgctaaatctcaacgtcaaatccgctaaaaacgccacattagtcgtctctaaccttctccaaaaggccaaagccgcgaaaagccatgaggtctcgatccttaaggactgcgtgga

SEQ ID NO: 169429 - DNA, 376 bp, Arabidopsis thaliana nossen
ctctctctctctatggcttcgttatcttcttctcacaattggtgatatgatgttttcttgagcttcagaggggaagacgtccgcgtaacattccgtagccactttctcaaagagcttgatcggaaactaatcactgctttcagagacaatgagatcgagaaaagccactctctctggcccgatcttgaacaagccatcaaggaatccaggatcgctgtggtcgttttctccaaaaactacgcttcatcgagctggtgtcttaacgagttgctggagattgtaaactgcaatgataaaattgtcataccagttttctaccatgtggatccttcccaagtgaggcatcaaatcggcgacttcggaaagatctttgaaa

SEQ ID NO: 169430 - DNA, 338 bp, Arabidopsis thaliana nossen
  unsure (1)..(338): unsure at all n locations
tataaccaatgctttccaatactctcccgaacaaactaaacgaggtgtggaaaacacaatggtgacgtcactaacccanancaaaccaatgatctacataaggcctacgacataaagctaaatcagcgcgtcgtggaatatcgtttgaatctaaagttcaattaactacaacttgtaatatgaaataataatgtacaaataattactacacttaaaggaactgatttgaaatcatctttgtattaagacttctatcgaacaacaacgaacgtcgtgtataaacaattcatgacacatcacatgaaactctttcctgaataaaaaatctataatacttt

SEQ ID NO: 169431 - DNA, 355 bp, Arabidopsis thaliana nossen
catagtcatgtctaatctctctcactcctacatcaattaataataacctatcctactatgggtcaattcctcagattaatccataacggagggtcttagaatccaacatcgaccatgacgcatgagatcttataagccttccctcttctcctcccacaacaactggcacgtctctctccttcgctctctcccttcttctccccaaccaggggcgctgctctactattattcacgcgccgttcatggcttctccgctcgtatctcccctatccaaaccgccgacctacgtcgtcatccttcagtcatcaacgttatacctgatcaagcgcgtgagatccacacaactaacacgcct

SEQ ID NO: 169432 - DNA, 376 bp, Arabidopsis thaliana nossen
ccccaaaaccgatccaaattccgagaaagacaaccaaattttccttttcctctgcaaaaatgtttattgagagcgtcaaagttgagagcccgaacgtgaagtacacagagaatgagattcactctgtgtacgattacgagacgacggaggttgttcatgagaagaccgtcaatggcacttaccaatggattgtgaagccaaagactgtcaaatacgatttcaaaaccgatattcgtgtccccaaattaggggttatgcttgtgggtttgggaggaaacaatggatcaactctcaccgctggcgtgattgcgaacaaagaaggaatctcgtgggcaacgaaggacaaagtgcaacaagcgaattacttcgggtcact

SEQ ID NO: 169433 - DNA, 376 bp, Arabidopsis thaliana nossen
  unsure (1)..(376): unsure at all n locations
gaaaatttcaagaaccctagttaataacgataatgggttcgagagttttggctggcttctttgttttcttaatcttcacggncatcacattgcctcccacgatccaagcttgcactccttgtactcgtcctcatcctccggttccgaaacctccacaacacggcggtggtggaggtggtggtagcaagccgcctccacatcacggtggaaaaggtggtggtaaacccccaccccacggtggaaaaggtggaggaccgccgcatcatggtggaggaggaggaggaggagggaaatcaccgccggttgttagacctcctcccgtagtggtgaggccaccgccaatcataagacctcctccggtcgtctatccaccacc

SEQ ID NO: 169434 - DNA, 373 bp, Arabidopsis thaliana nossen
cttttacattaagagaaaacacttgcaaaactaagtgctatctctcttcttcttccttctcctaacaacttatataccatgagtctcttcaacactgaaaacacatgggcctttgtctttggcttgctcggcaaccttatctcctttgccgtgttcctatctcctgtgccaacgttctataggatttggaagaagaagacaacagaagggtttcagtctattccttatgttgtggcgctcttcagtgcgacgctttggctttactatgcgacacagaagaaagatgtcttcctcctcgtaaccattaacgcctttggttgcttcatcgaaaccatctacatctctatgttccttgcctacgctcccaagccag

SEQ ID NO: 169435 - DNA, 373 bp, Arabidopsis thaliana nossen
agacgagctttcgcattttgactctttcatatctttaaataataaaaaataatattgaatgagagacaagtttaaaactttatattccatatctgtttcaatcagtatttgggtctttttttgtttgagctgtacgagatgaaattctcatatacagttcttggagggggagtaaccttggtttacctatctcaataaagtttatgattggttcgaagaacgtcttgagattcaggcgattgcagatgatataactagtaaatatgttcctccgcatgtcaacatattttattgtctaggcggaattacccttacttgttttttagtacaagtagctacgggatttgctatgactttttattaccgtccaacc

SEQ ID NO: 169436 - DNA, 376 bp, Arabidopsis thaliana nossen
tcccacttttggattacataagggtaaatatttctttaacttttcatggtaacattttaccagggaagccttaaaccaaccaaaaattcttttggcaaccatatgccttttcaactaatgaggatttggacctctttttttttttctttttttttttttttggggcacagccccaaactaatgaggatttgtacaaaagctaaatgaaaagagctacaaaactaagcccatacacatatatctcatgaagccactccagatcaccatatgctacatcaaactaagaatggttttaattaatatatgggcctcagatgaggaaacaaaagcccattaatttgcttcaatattggtttacccgtttattctacatgcc

SEQ ID NO: 169437 - DNA, 232 bp, Arabidopsis thaliana nossen
aaaggatacacaagtcagttctatgttttgagaaaggaagatttagaggttatcgtgttttaagtgaaaggcacaagtcagttctgtgttttgtgtaatcggatcccatttgtttcaatgtttttttggttcttctttttcgttcacaactgaaaaatcggacgtgttttgaatgtagagcaaactaatttaaaaagctgtggatttcgtagtccagcttggtctgttaaaa

SEQ ID NO: 169438 - DNA, 366 bp, Arabidopsis thaliana nossen
  unsure (1)..(366): unsure at all n locations
tttgttttctttgcttcttctatcttcttcttctttcttcttctcgctgtaatactctttgattcctgtgttcgtttgatgagaattagattttaaatggcaaaagtttcgtttaaggattctctgaaagctcttgaagctgatattcaacacgctaacactgtagctttagattatcctcgggagaaggatggagcgcgtgttcaaatgaggctatcgtacactccagctgctcagtttttactttttcttgtacaatggactgattgccatcttgctggtacactcggtctgctcagagttctgatttacatgacctatgcggatgggaaaaccacaatgtcngtttatgagagaaaaacaagt

SEQ ID NO: 169439 - DNA, 403 bp, Arabidopsis thaliana nossen
  unsure (1)..(403): unsure at all n locations
ccggccggaattccgtttttttttcgnccgaannnnnaagccnnncaacgggttttttatatatattntgaaaatcttttacgccttaaaaggatctacgataattaaaaaaaaaatggcaacggaatgcattgcaacggtccctcaaatattcagtgaaaacaaaaccaaagaggattcttcgatcttcgatgcaaagctccttaatcagcactcacaccacatacctcaacagttcgtatggcccgaccacgagaaaccttctacggatgttcaacctctccaagtcccactcatagacctagccggtttcctctccggcgactcgtgcttggcatcggaggctactagactcgtctcaaaggctgcaacgaaacatggcttcttcctaatcactaaccat

SEQ ID NO: 169440 - DNA, 374 bp, Arabidopsis thaliana nossen
caaaaatggagttactaacgacggtcgcgagctttttcactccgacgactcttttcctccttcttaatcttatgatcggtacaatcgtcgtaacctctcgactcgggtcaggttcaagaaaacattaccagcatcacgatggattcgggtcaggtcatgctccggctccgttagctagagctccatcgattatcgaccgagtcaagtccatcaattttcatctctacaaatttcctcatccagaaactgagcttttctcgatgacagctcaccacgacataatcgggtcggatcttcatgtttacccggatccaaatccggctccgttacaacgtgctccttctcttttggatcgggtcaaatctatcaacatg

SEQ ID NO: 169441 - DNA, 375 bp, Arabidopsis thaliana nossen
catttcgccgacactttcttctccaccaccaccatggatgatctctccaagcttgtcttcttcctcctgctcaggatctccattaccaccgcattacccgataaacccgggtcgggtcaaataaactcaaactccgtcctcgttgctcttcttgactcacactacacagaactagcagagctcgtcgaaaaagctcttcttctccaaaccttagaagaagctgttggtcaacacaacatcacaatctttgctcctcgtaacgatgccttagaaaaaaatcttgatcctgaattcaaatctttcttactccaaccgaaaaacctcaaatcattacaatctttattaatgtttcacattcttcccaaaagaatcact

SEQ ID NO: 169442 - DNA, 251 bp, Arabidopsis thaliana nossen
tagagagacttttttgaccgtccagacattaccatagtttttagtaaatattctccaagacatgtgagacaacttcttttattatttaatgcgatctccaataattaacaagctatattatttaatacaaaataaacaattaaaacattgcagtagttcttgtttctttttgaaaataagaatgatctattattgagtttctatttattattgcattcacacatacagcaataaatcttaggattatgttt

SEQ ID NO: 169443 - DNA, 358 bp, Arabidopsis thaliana nossen
ggttatggagcgtgcaaggagacttgctgacagagggatcgtgaaacgtttcgtgaacgagacaaaacgccaccgtaacggcgaatcctctcttcttccgacgacgactgttactccctcaaggtatgtctcctccgtctcctcctttctccatcgccgtcgtgatgtctctggatcggcttttaccacctccggtagaaatcaacaccagacacgatcgatctccgtcgatgcgttgaagccaagcgacactttcccgcgccggcacaactcagcaacaccggatgaacaagctcagatggcgaattactgcggattcgataatctcaacacgttgattgattcgactgttccgaaa

SEQ ID NO: 169444 - DNA, 382 bp, Arabidopsis thaliana nossen
gacctacgcgttcgaaaagtcaacgatttgattcgatcttcttcacttatgctttaaaaccggtcctgtaataaactgtgaagattgtaagaagattaacacgaatcaagaacatcgaactgttgactttagacagagagagacggagatggagtttagtgagttaaaggaagcaatagagaagatagagctcgttgatgctcacgcacacaacattgtctctcttgactcatcttttccgttcatcggaactttctccgaggctgccggcgacgctttaaccttcgctcctcattctctctccttcaagaggaacttgagggagattgctcaactttatggcactgaagtatctttagaagcggttgaggaacatcgtaaa

SEQ ID NO: 169445 - DNA, 384 bp, Arabidopsis thaliana nossen
ctcacgcgtcccgtacagagtaaaagactttggctcagcttctgcctctccaatggcggttctttcgacatggcttttagcaatgatgtgtttactcttcttcgtcggagctatggagaacactacacacgacaacatctcttctctccctagatccgacgaaaccgaatggaaccaacacgcagtgacgaatccagatgaagtagcggacgaagttctcgccttgacagaaatgagtgtgagaaaccataccgagaggaggaaactaggttactttacttgcggaacaggaaaccctatcgacgattgttggcgatgtgaccccaattggcacaagaaccgtaaacgcctagcggattgcggtatcggatttggaagaaacgc

SEQ ID NO: 169446 - DNA, 371 bp, Arabidopsis thaliana nossen
caaaactgatcactagcattcctagatttttccttcttgtgatcacttgcagctatggccacacatgcagctctcgccgtctcaagaatcccggtcacacagcgactgcagtctaagagtgccattcactctttccctgctcaatgctcctccaagaggctagaagtcgctgaattctccggtctgcgtatgagtagtatcggtggggaagcatctttcttcgatgctgtagctgcacaaatcatccctaaggctgtgacaacatcaactcctgttagaggagagacagtggcgaaactgaaagttgcaattaacggttttggaaggattggtaggaactttcttaggtgttggcatggtcgtaaagactc

SEQ ID NO: 169447 - DNA, 278 bp, Arabidopsis thaliana nossen
ccggtcccgaatcgcaggtccgacccaggcgtccgcgttgctttgggagagagtaagaacaatgtaaccgaaccaatccagctttacgtgactgttggatcggataagcttctcattggaacgctatctcatgagaagtttcctcagctgtctacggagattgtcttggaaaggaactttgcgctgtctcatacttggaagaatgggagcgttttcttctctggttacaaagttgatgcatctgatcccgagcctgaggatttgattgatgatcaact

SEQ ID NO: 169448 - DNA, 375 bp, Arabidopsis thaliana nossen
  unsure (1)..(375): unsure at all n locations
atcatcaccaacaacaacgcctgagagaaatcgatttgaaactcgncggggatgtttttgtgaggaagaaaacgaagaagaataacccagtgatcgtcggttactcaattncgnncactgaaggtttcgcctcagagctaatggcaaagctagagagaggagaaatcgatcaaaccggtgagttaaagcaaacccatttcgtcaagtttcatttttcgccaatggcgtccaagttcatgagaagagaagacgttgagctaaacataaaggagttaaggaagaaagtgctctctttaacaacgagtggcaaaaatgcaattatcttcactggtgacttaaagtggacagtcaaagagattacaaacaacaacagtg

SEQ ID NO: 169449 - DNA, 377 bp, Arabidopsis thaliana nossen
cggacgcgtgggtaaaaataaaaagtgttgtcttttgacaaaatcatcaaaagggactcagatttgtgaaatcttgtctctttttctttatctgttttgtttttaacgattcgtaattctcctcaatttccgtgaaaccccttggaaaaacccatttctcgagagagagagagagaaggagagtgtaagaagaagaagaagaagaagaagaagaagaaggagatgggtgtggatttgaggcaagtggtggctggaatactcaccattaccatgtttgtgatgcttggacaaatgcttcatagagattacttcgatgctgttcaggagaaagttcaaggagatgcacatgatattgaattccatggatcaaaagtagc

SEQ ID NO: 169450 - DNA, 369 bp, Arabidopsis thaliana nossen
taccccctcacgtcaatcccacgagcctcttatccattcttattcgatcacagcgagggagcaagtcaaaatagaaaaactcacattcattgggtttagggataatcaggctcgaactgatgacttccaccacgtcaaggtgacactctaccgctgagttatatcccttcccccatcaagaaatagaactgactaatcctaagtcaaagggtcgagaaactcaaggccactattcttgaacaacttggattggagccgggctttcctttcgcactttatacgggtatgaaatgaaaataatggaaaaagttggattcaattgtcaactactcctatcggaaataggattgactacggattcgagccata

SEQ ID NO: 169451 - DNA, 369 bp, Arabidopsis thaliana nossen
gtcggaatctgatggaggagaagaagaagaaaggcgatgatgaattgaactcgaaaccgccgttaatggcgttgaaccatgtgtcaaggctttgtaaagacgtcaaaaagtctctcgagttctacacaaaggtattagggttcgtggagatagagcgtccagcttctttcgacttcgacggtgcgtggcttttcaactacggcgttgggatccacttggtgcaggccaaggaccaagataagttaccttctgacacggaccatttggacccaatggataaccacatctctttccagtgtgaagatatggaagctttggagaagaggctgaaggaggtgaaggtaaagtacatcaagaggacggggggtg

SEQ ID NO: 169452 - DNA, 331 bp, Arabidopsis thaliana nossen
  unsure (1)..(331): unsure at all n locations
cacctgcaccgaaatttccggaacgaccgcacgcgatccacgcgtccgctttattaaaaaaaaacctctttccttggttgaattcgaactatttaaaattccttgacttcatagaaagaaaagtatatataggtactcttggcaaatgtattatacgcgatcctattccattttcctacacgaaattatgggagagcggttgacaaaaagcggaaaccccatacagtatctctttcttgaagtgttgaatgctctcaataattcatttacatatgtttctctaccctgtaaaatgccactccttttctgaataaaatctttctttccgntc

SEQ ID NO: 169453 - DNA, 322 bp, Arabidopsis thaliana nossen
gagccaccaaatagaccaactcgcgagcattcagggagcgactaaaccggtgcaactaaattttttgcgtttgttctcctgatacaacataccccgggcgaaacactgggggttgatgcgtatctggcaaacgaaaaatgcattcttgctggggttatcacaaccttgctcggtctcatggttgtcgcttttggcatcacaacatcaaaaaacaccaatccttcgaaaaaattcccctgtgcgataaaacagccccacgcgttgaacagttggccctactgatcaagagactggaaatgtctcatgaaactctctgacttct

SEQ ID NO: 169454 - DNA, 382 bp, Arabidopsis thaliana nossen
caaacagacaatttaattccaaaaaataaaacacaaaatcaaaagatatgaatgccacaaagtttgctgtgcttctcgtgattagcgttttgtgtgccattgtcaccgcaaggcatgtcgaagaagtgtctaaagagaccaaattaggcacctctcttccaaaaactactaccaaaggcattggagctcagctttctgctgctggtattacttccagcagtagtgatgtctatagctctgctactggtttcaacaatcccaaaggtccagacgctaatggatacgaaagtggctacacaagtaccatcggacaagtcattgcaaagggtcgcaaggcaagagtttcttctgcaagtgcttctaccgccaaaggtgacgctgc

SEQ ID NO: 169455 - DNA, 363 bp, Arabidopsis thaliana nossen
agaagaagaagcaaagatataacccccaaaagtatcaattagtttccattttcgccgctaagattctggtttcgaacatttacaccctcaagaatcgccgccatgtgtggaggagctataatatccgatttcattccaccgccgaggtctcgccgtgttactagcgagtttatttggccggatctgaagaagaatttgaaaggatcgaagaaaagctcgaagaatcgttcgaatttcttcgattttgacgctgagttcgaagctgatttccaaggtttcaaagatgattcgtctatcgattgcgattatgatttcgacgtcggtgatgttttcgccgatgtgaaaccattcgttttcacttcg

SEQ ID NO: 169456 - DNA, 373 bp, Arabidopsis thaliana nossen
gtttgaaggaaactaactttattatataagattaatatcacatctttctacaagccaatggcatcaagaagctgtgaatgcttggaaacaggaactagcgaattcgccacaatcgcgccgctagctgccactgcaggaactccgatcccgggaaaggtcgagtcaccgcaacacaaaagctgcggaatgggagtggaatggccaggaaaagtacctttacctgcctctattgcaggcccatatgttcctctattcctccttagaaacctctgatgcgtcaatggtgttccaaccaaactcacctcgcacttttctcttttgaaccctggccctaatgcccgctcaaccgctctccacatcaccttcaccaaac

SEQ ID NO: 169457 - DNA, 366 bp, Arabidopsis thaliana nossen
cggacgcgtgggctcacgcgagaactctggcttcgtctctatattattgacccttttgatctctctctgtctcgctttcttcctcgcgtggacctttttcgaaaaatatcaatcccagaatttcgcttcattttggattataaactcccagatctgctactctctatctccgattttgtgatttttcaaaccctagatttctccggaagagtttatttttttctctgtaactaaaccgagatttttttttcaaaattccgacattaccctaggttgtgtattaccgtagaaaaccctagttcctttttggtattcttggtgtacagatcccttccttagtcagagtttttggttattagtgtttag

SEQ ID NO: 169458 - DNA, 319 bp, Arabidopsis thaliana nossen
  unsure (1)..(319): unsure at all n locations
gagccaccaaatagaccaactcgagagcattcggttagagactaaacggagggagagagatttgatgcgaaggttcncgcttctacaacagagcgtgggggatccacttctgatggttccatttaggcgcatcggagtgttgaggcttggcgaaggagagcagccagaaatggaggatgcaatggaggttttgaaggtagagatgattaaagcgatgaagaacgctgatcaactccggtgtgtgacggttgggaaagtggtggaggttctgaatccacggcagtcgatcaagctgctaagagccgctggagagttttat

SEQ ID NO: 169459 - DNA, 371 bp, Arabidopsis thaliana nossen
gaagcttggtcgcaaaagtgagagtgtttctcaatctcagagctcatcaggattggtttctcttttagaaatgatgcggggccaaatggagatttctgaggccatggacatcagaacaagacaagggttgcttaatgccctagcgggaaaagttggcaaaagaatggacagcctcctggtgcctttagaattgctatgttgcgtgtctcgtactgagttctctgacaagaaagcatacttacgctggcagaaaaggcagttaaacatgttagcagaggggctcattaacaatccagttgttggatttggagaatcaggtcgtaaggcaactgacctgaagagtcttctgctaaggattgaagaatcagagt

SEQ ID NO: 169460 - DNA, 376 bp, Arabidopsis thaliana nossen
gaggaattggagttggatattcaaacttcgttgtctgatgatgaaggacgagatacagactcaaattctatgcgtggcagtctcaacttacgaattcatagagtaggtgatgataaaccgatggaaaatacagttgacaatgcctcctcaggaactgcatcgtcatctcaaaatgatagaacgtcttatcagccagagggagccattgatatgaaacgtagatatgttggccactgtaacgtaggaactgatattaagcaggccagttttcttggtcagagaggtgaatatattgcaagtggaagcgatgacggtcggtggtttatatgggagaaacagactggaaggcttatgaaagtgctcgttggcgatgaat

SEQ ID NO: 169461 - DNA, 399 bp, Arabidopsis thaliana nossen
gttccggggtggacccacccttccggaaaaatggaggagtcacgagaatcgccggcggaacacggttactacatgccggcggaatgggattctcatgctcaaacttggatcggttggcctgaacggcaagataactggcggcacaacgctttacccgcacaacgagtgtttgcagatgttgcaaaggccatctcaaagttcgagcctgtcactgtctgtgctagccctgctcagtgggaaaatgcaaggaaacagcttccagaggatataagagttgttgagatgagcatgaatgattcttggttccgcgactctggaccaactttcattgtacggaaaagaccagtaaagctcagttctcttaaccgaaacattgctgggatcgactggaatttcaat

SEQ ID NO: 169462 - DNA, 370 bp, Arabidopsis thaliana nossen
aaacaatcatgtggctttccttcttaagacccagagatcgattctccttagccgaactcaggtatttgactgaccagctgagaaagattcagatagtaaacgaggctaataaggatctcgttatcgaggcactgagatcgattgcggagatattaacttatggggatcagcatgaccccttattctttgaattttttatggagaaacaagtaatgggagagtttgtacgtattttgagggttagcaagacagtaacagtttctgtccagttgttgcaaaccatgagtataatgatccaaaacctaaaaagtgaacaagccatctattacttgttcagtaacgaatatgtaaactatttgataacatatac

SEQ ID NO: 169463 - DNA, 369 bp, Arabidopsis thaliana nossen
gttttgcacccatatctttactctgtaacccatgcatattcaccatgtccctcccacttaatgacatgtcaccattttgggaggacaattggtttgtcttctcctgccttgagaagctagctgccatgttgttgctgggcaatggatgcgggcgtaaaataactggctgaggcttagatggctggttccaaaactgatgttgcggagctgaaataccggatggtgagtcagacatcataccagaagaggaactctgctgaggcgagctggatgccaccagaggctgagaagcagacagcatacgttgatcaaagtcactactttcatctctttctttcacttgaggggtagacaactcagaagatgaat

SEQ ID NO: 169464 - DNA, 401 bp, Arabidopsis thaliana nossen
ggaatctaccgcacgcgtcccacataaggttgctatcaagatcctcaatcgtcgcaaaatcaagaacatggagatggaggagaaagtgaggagagagatcaaaatcttgagactatttatgcatcctcacatcatccgtctctatgaggttatagagactcccacagatatttatcttgtcatggagtatgtgaactctggtgagctatttgactatattgttgagaaaggtagattgcaggaggatgaggcgaggaacttttttcagcagataatatcaggagtggaatactgccatcgaaacatggtggttcacagagacctcaagcctgaaaacttgcttttggactctaaatgcaatgttaagattgctgattttggcctgagcaacataatgcgag

SEQ ID NO: 169465 - DNA, 378 bp, Arabidopsis thaliana nossen
ctagaaaccaaatgtcgttgataataatagaacactttctttctctctctaaaaagcaaaagtagtctagtcactgatttcttctaatcctccggtggagtgagagatgatatctccgacgttgtttcctctcctctgcgctttatttctatgtcttccagtggctgttatcttcacagtccagcgagaactcacctgcgttatctcgccggagtttggtttccgctctctttccgtcttctctctttactctcgaaatgtccccgactcttcttcttcttctccggcggttcggattcgacagccgattcccaaagaagacgaccctcttcttcgactatcttctcgggttaacccgaatctacctcccggttcgac

SEQ ID NO: 169466 - DNA, 375 bp, Arabidopsis thaliana nossen
ataatagtacgtggttgatcgtttttgtgtgttgaaaatcaaaatggcgtcgagcgatgagcgtccaggagcgtatccggcacgtgacggatcagagaacttacctccgggagatccaaagacgatgaagacggtggtgatggataaaggagcggcgatgatgcaatcgttgaaaccgatcaaacagatgagtctccatttgtgttctttcgcttgttatggtcacgatcctagccgtcagattgaagtcaacttctatgttcatcgactcaaccaagactttcttcaatgtgctgtttacgattgcgactcctctaaaccccatctcatcgggatcgagtatattgtgtcggagaggttatttgagagtcttga

SEQ ID NO: 169467 - DNA, 302 bp, Arabidopsis thaliana nossen
gcgccaattagttaatcatggacatattttagttaatggtcgtatagttgatataccaagttatcgctgcaaaccccgagatattattacagtgaaggatgaacaaaactctagaactttggttcaaaatcttcttgattcatctgcccctgaggaattgccaaaccatctgactcttcacacattccaatatgaagggttagtcaatcaaataatagataggaaatgcgtcggtttgaaaataaatgaattgcttgtcgtagaatattactctcgacagacttaataaacctaacttaagt

SEQ ID NO: 169468 - DNA, 377 bp, Arabidopsis thaliana nossen
cgccatcttagaaaagcgttcaacaaccacaaagatggaatccttaccagtcctagtcctaggcaatcctaccacaaaatccatagatatatcattccaaggatgcaaaggaataggtaaaggggtatacaaaccgtggggttgaaccttagccttagcttgcttacaagttgcacatcgttcacatagtcgctcgacatctcttttcatgtgcggccaatggaagtgttcttgcattaccttgcacgtcttagcaactccaaagtgtcccattaagccacctccatgagcttcccttaaaaataattctcgcaaagaagagtgaggcacacaaagtctattttcaaagaacaaatacccatcatgtcgataatatt

SEQ ID NO: 169469 - DNA, 379 bp, Arabidopsis thaliana nossen
ccaggagaagactggacaagctatgggaacgatgagggacaaggctgaggagggccgggacaggacttctcaaacggcccaaacagcccaacagaaggcccatgagacagcccagtcagctaaagataagacatctcaaactgcccaagcggctcagcagaaggcccatgaaacggcccagtcagcaaaagagaagacatctcaaactgcccaaacggcacagcaaaaggcccatgagacgacgcaagcagcaaaagaaaagacatctcaagctggcgacaaagctcgcgaggccaaggacaaggccgggagctacttatcggagacaggcgaagccataaagaacaaggctcaagacgctgctcagtatacaaaggag

SEQ ID NO: 169470 - DNA, 215 bp, Arabidopsis thaliana nossen
aaaaaaaaaagagaaaacagcctaatactaattattgtatctacatcaattcttatccattagattctaatttcactctatttagaaacattttaaaaacaaatttcctggttaaattaataaggtcatgaaaaggatttcgattttttcttattttaataatataatggatttgcctggaccaatacatgattttcttttagtttttctggatc

SEQ ID NO: 169471 - DNA, 374 bp, Arabidopsis thaliana nossen
caagatggggacaaggagtacgtaaatgggtcatgtcccattatccaacctcaattgcaggagctccgaaattgggactgtatgacatggattttggattaggaaagccctgcaaaatggagatagtgcacatagaaacaggtggttctatcgcattctcagagtccagagacggcagcaatggagttgagattggaatagcactagagaagaagaaaatggatgtgtttgactcacttctacaaaaggggatcaagaaattcgcaacgtagcagcccctttctcatccaataacttgtagcaacgaaatgattcaacacaaaaccgaagttgttcagtcccacgaatcataacaagtctatccgttccaccaa

SEQ ID NO: 169472 - DNA, 372 bp, Arabidopsis thaliana nossen
tatggccacacgatcaaaaacaatgcttttaccgagaactccagagaatggaaattatcttaatggaggaacaaagactacaccggacatgactcttgctgtacgggaaccagagtctgaggagaaaccacagaaacatctgaatgaaaagcaacaggaaaaccaggatttactagtcaagtgtatttcacaaaatcttggatacaatggagacaagcctgttgctgcatgtgtcatatacaaatgtcttcttcactggagatcatttgaagtggaaagaactagcgtctttgaccgtatcattcaaacaatagctacagccattgaagtgccagataacaatgaggttttggcgtattggttatctaattc

SEQ ID NO: 169473 - DNA, 372 bp, Arabidopsis thaliana nossen; identical to SEQ ID NO: 132074

SEQ ID NO: 169474 - DNA, 379 bp, Arabidopsis thaliana nossen
gggcgatgaactacgtgattgataagggttgggccttctattggggaaccagagagtggtcagctcaacaaattacggaggcatggggagctgctgaccggttggatttggttggtccaattgtcgaacagccagagtacaacatgttcgctaggcacaaagttgagacagagtatcttcctgtgtacaccaaccatggtataggtatcactacctggagcccacttgcatctggtgtgctcactggtaaatacaacaagggagctattccctcagacagccgatttgcattggagaactacaaaaaccttgccaatagatcacttgtggatgacatgctgaggaaagttagcgagctcaaacacattgcagatgagct

SEQ ID NO: 169475 - DNA, 374 bp, Arabidopsis thaliana nossen
cagaagaagagccacacactcacaaattaaaaagagagagagagagagagacagagagagagagagatgctgcggaggagcttcttcttcgtagggtgttcatcgttattaacgttatcgcccctacgtcagctccatctccagaaacatgggtgcaggtggaagaatgccggttcctacttcttccaagaaatcggaaaccgacaccacaaagcgtgtgccgtgcgagaaaccgcctttctcggtgggagatctgaagaaagcaatcccgccgcattgtttcaaacgctcaatccctcgctctttctcctaccttatcagtgacatcattatagcctcatgcttctactacgtcgccaccaattacttctctc

SEQ ID NO: 169476 - DNA, 380 bp, Arabidopsis thaliana nossen
aagatatctttgtaacatctttgaatttcgctaaaggaaaagagagagatttggtaaaaatgcagtcgatgaaagaaacagcttcgaatattgcagcttctgcaaaatctggcatggacaaaaccaaagctaccttggaggaaaaggcggagaagatgaagacacgagaccctgttcagaaacagatggctacacaggttaaagaagataagatcaatcaagctgagatgcagaagagagaaacgcgtcagcacaacgcggccatgaaagaagcggctggagccggaaccggtttaggtttggggacggccactcactcgaccactggacaagtcggacacggcactgggacacatcagatgtcggctctgcctggtcac

SEQ ID NO: 169477 - DNA, 410 bp, Arabidopsis thaliana nossen
ctgagcaattccggaacggaccccacccttccaagtgagttctcataaaatgagagggatggtgagttttgccgttagcgctgtctatgctgctttactctgacagcagactcatagctacagcggccatcactagggttgaggatgccaaaacatactacttatctcctccctctggctcacatggaactcctacatcacacacgcctccttcttctaactgtggaagtccaccttacgacccttctccttcaactccttctcacccttcacctccatcacatactccaactccttccactccatcacacactccaacttcacacactccatcacacacgccaactccacacacccctccttgtaactgtggaagtccaccttcccacccttccacgccttcacaccct

SEQ ID NO: 169478 - DNA, 382 bp, Arabidopsis thaliana nossen
caaaggagcaatcactggatgttatggaacctgtcgcacaaaaatcaacgcgagttcaatcctcttccagaggattgtcctccgctacctcaggaatcacctccccctctccctcctctaccaccttctcccccacctccatcccctcctctcccgccatcatctctgccaccaccgcctcccgcagcgctgttcccacctcttccaccacctccgtctcagcctcctccaccaccactttcacctccaccttcaccgccgcctccacctccaccgccttcacaatcattaacaactcaacactccatagctagccatcatcagataccatttcaaccaggatttcctcccccaacatatcctttatcgcatctaacatacc

SEQ ID NO: 169479 - DNA, 374 bp, Arabidopsis thaliana nossen
ccaaaatctagggttttcttctcgcccaatttcacttttcttctacgaaattctccattcctgccggctgtcgggttttctgaatcgattctccttcaccaacttcttctctggttctgttcgattctgatttttttcaaggtcaattttttcttctctttaaactctgcaaaatcgtgatcgattaaattcacctcagggttttttgatttctgaaagaagttaatcttcttcgaaggcgattgcaaaagagtgctctgctgtgaatttccactgagatgcaatcaaaaccgggaagagaaaacgaagaggaagtcaataatcaccatgctgttcagcagccgatgatgtatgcagagccctggtggaaaaac

SEQ ID NO: 169480 - DNA, 376 bp, Arabidopsis thaliana nossen
ttgcctagcaggcaaagatttcactccgcgaaaaagatgattcattcggatcaacatgaaagcccaactacattgccagaatttatatattggaaagaggtttacctccgtgcttctatggtacaatcctcttcccgcggagcctcctttcttctcggtccgcagagacaaaatgtaggactggtgccaacagttaatcacggaagaaaggactcactgcgccaagatcactaactaatctaatagaatagaaaatcctaatataatagaaaagaaaagaactgtcttttctgtatacttatgtatactttccccggttccgttgctactgcgggctttacgcaattgatcggatcatctagatatcccttcaaca

SEQ ID NO: 169481 - DNA, 376 bp, Arabidopsis thaliana nossen
ctctaataaacccaagttggtgtatactataatggtgatggctggtgcttcttctttggatgagatcagacaggctcagagagctgatggacctgcaggcatcttggctattggcactgctaaccctgagaaccatgtgcttcaggcggagtatcctgactactacttccgcatcaccaacagtgaacacatgaccgacctcaaggagaagttcaagcgcatgtgcgacaagtcgacaattcggaaacgtcacatgcatctgacggaggaattcctcaaggaaaacccacacatgtgtgcttacatggctccttctctggacaccagacaggacatcgtggtggtcgaagtccctaagctaggcaaagaagcggca

SEQ ID NO: 169482 - DNA, 377 bp, Arabidopsis thaliana nossen
gttacgttcttacacttctccctgatgtctttgtgttcttacatatttttctgtttcatctagaaattgctgttgaaaactaaatcgattgaccgttcgatggtgaagttgacaaagagaataggagggcttgtgctgcgattggcagcgtttggtgcggctcttgccgcattgatcgttatgatcactagccgcgagagagcttccttcttagccatctcccttgaagctaagtacaccgatatggcagcgtttaagtattttgtaatcgcaaacgctgttgtgagtgtttacagttttctagttctgtttcttccaaaggagagtttgctttggaaattcgtcgtcgtcttggatttggtgatgacaatgctgct

SEQ ID NO: 169483 - DNA, 380 bp, Arabidopsis thaliana nossen
atgaatcctattttcatttcatccgagaaaagccatctttttttcaacaatgtctgtgtcattcgatccaatagcgttccgttagatatgaacagatttgataaatactgataactctcggatcgagtattagaacggaaaaatccattagataatgaactattggttctaagccatctctggcgctgaatcaacaattcgaagtgcttttcttgcgtattcttgataaaccagcgtttatatatagatgtaggaggatccgtttgggaagtaagaagcccctttgacatctcttcatctgcaaagaattctcgatgtgaaaacacagagacaaagggttgatctttgaataggaaaaagagtggatctgcggggtccca

SEQ ID NO: 169484 - DNA, 383 bp, Arabidopsis thaliana nossen
tttaaactttatccatgtttttttgttaactcatgaattgaaagagaacaaccaaagtgaatgtagcctgataaaacaggatgaaactattgaaagattcaaactttgtttacagaatcatccttcttggccacttcactactttccaacggtggtaaactctgcacaaaagtaaaaagcaatcagattacaaatctctcatgggcaattcatcgaacaccttatgtgcattacaataaaagagagatcacagagccagagaacgaaatgaatggttttaaaccgatcacgcttatgggcattatcaagaacgaagaaagtgagcaaacctaatacatttgagaaccctaacatatgtacagaaagagaaggtgaagcttacg

SEQ ID NO: 169485 - DNA, 370 bp, Arabidopsis thaliana nossen
ctcgccaaaaaccttgaaacctttaaaaaatcgaaactatggctaagctcattctcgttttcgcaactcttgccctcttcatcctcctagccaacgcatccatctaccgcacagtggtggagttcgaggaagatgatgacgtgagcaacccacaacaaggtaagtgccagagggagtttatgaagcatcagcaactaagaggttgcaagcaatggatccgcaagagagctcaacaaggaagaatcggatacgaagctgatgactttgagctcactcttgatgtcgatcttgaggacgatgagaacccaatggggcctcaacaacagtcatctcttaaaatgtgttgtaatgaattaaggcaagtggacaa

SEQ ID NO: 169486 - DNA, 349 bp, Arabidopsis thaliana nossen
aaccattctcaatgctcgaaaccctccaaagatcgagaatctccaccaagaatttgaagagatcgaagataaatccaacatcaactctctttacaccaaagagccaactctctacagatccttctgctttgatccagagaaaatcaagaaacttaagctccaagcaacagagaacagtgagtctctcctcggtaactcatgcacaagttttgaggctttatctgcttttgtctggagagcaagaaccaagtcgttgaagatgttgagtgatcagaaaacgaagcttctcttcgccgttgatggtagagccaagttcgagcctcaactgccaaaaaggtacttcggaaat

SEQ ID NO: 169487 - DNA, 372 bp, Arabidopsis thaliana nossen
gatggatttagatgagacgggtttacatagtagaacatgtttggatgagacgagtttatatggtgctatgagtttagatgggatagatcttgataccacaggtgtattcttaaaattaaatcaaattacaactatacaatacaaaacaaaacaaacaataataacataacaaatacaatttcaattttaaatttttagttacaaaaatacattaaaattcaacattatattataagtattaatcttatttgacatgtctaaatgttattcttctttggtacatttaaatgtataattttatttgtgttgttactaatttacatatgttccaccggtaaaatctgaaaacaccaaaagtttcaattatataac

SEQ ID NO: 169488 - DNA, 371 bp, Arabidopsis thaliana nossen
tttaaacccagttttcaaatttggtttttggaagctaacttattgttggaggtggagagatatggctgactttgatgaatatatggctgatgagtatgacatggatgatctcgaggatgatatgaatgccgcgtttgatggaagagatatcgatgcttctgattccgaagtcgaagatttcgatcaattgaacaaggctgcagatacttctgctgctcaagcacggaatgggaaggatattcagggtataccgtgggatagtcttactcttactagaaaagattacagaaaaactaggctagaacaatataaaaactatgaaaatatacccaattctggtgatgaatctgccaagaaatgcatgaatactg

SEQ ID NO: 169489 - DNA, 376 bp, Arabidopsis thaliana nossen
ctccggcactgaacacaatcgccggcaaatcatgtgttatgtcacatgatcggggcagacccaatgggcctgaggttagtgttagctctttgatcctaggcatgatccagttgtcagccttttttgggtatggcctgatcttttcgacaagtggtgctgatgttgggtccattagagtcaaagttccggttttaaggtccagattacatgagccgttgattgagcagagatcgtaattagtgtgggatcggtcgcatgtgattgatgccgaagtagtctcttgtggtggttgtggggcttgcttgattcttctagattcccatggttgttgtaacgtacctacaacttctcttattttttagttaaaacttaaaaa

SEQ ID NO: 169490 - DNA, 374 bp, Arabidopsis thaliana nossen
  unsure (1)..(374): unsure at all n locations
gacccacgcaaataaggaaaaaaaatcgagtacctgtatcttcaaatgcattgctatattacgtcatatcctaaattcctaattatgttaatcttgaaatccaaaaaagaaattattaactcacctaaacatcagcacaacaaccacaattgtcattctttcggaatataaagctaatccgccatgatacaaaacccaacaagaagatgatgctccatgcgataatgtttgtggtttcggaactcattttgctcttcacaacgtatcacaacaattgttttcttttttgctttttaagtcaaatgtgttcgtgttttaattcttcttcttttctcgcacaattacattttatatgaagttacacnaaattaata

SEQ ID NO: 169491 - DNA, 371 bp, Arabidopsis thaliana nossen
aaacctccaaaccaataatcagaacacagtgagatatttctctctgaagccaaagatggaaacggcgtcttctaatttctctctctcgcagatcctcaatattgaggaaccctacagctccgtgatgctcggtgtcgccgctctcttggccgttgtttgctatttctggatacaggggaagtccaaatccaagaacggaccaccgttgcctccgggaccttggccacttccgatcgtcggcaacctcccgttcctaaactctgacgtcctccacacgcaattccaagccctaaccctaaaacatggccctctcatgaagatccacctcggttccaaacttgcgatcgtcgtctcttcccctgacatggctc

SEQ ID NO: 169492 - DNA, 340 bp, Arabidopsis thaliana nossen
caaattctcttaaagctcacatacgaatactttctatttttaatctttggggcgaacaatggtgttcgctaataaaggcgggtaaaggtgaaggtccagctatcggtatcgatctcggaacaacctactcttgcgtcggtgtttggcaacatgaccgcgtctaaatcatcgccaacgatcaaggcaaccgtaccactccttcctacgttgctttcactgacagcgagcgtctcatcggggatgctgccaagaatcaagtcgacatgaaccctaccaacaccgtcttcgatgctaagcgtctaatcggaagaagatacagtgatccctctgttcaagcgga

SEQ ID NO: 169493 - DNA, 377 bp, Arabidopsis thaliana nossen
  unsure (1)..(377): unsure at all n locations
cacaacaacactcacaaattcttttaaagctcacagacaagggctntgtgtggtaatcgggttttcggacaatacaganctctaataatggcgggtaaaggtgaaggtccagctatcggtatcgatctcggtacaacctactcttgcgtcggtgtttggcaacatgaccgcgtcgaaatcatcgccaacgatcaaggcaaccgtaccactccttcctacgttgctttcactgacagcgagcgtctcatcggggatgctgccaagaatcaagtcgccatgaaccctaccaacaccgtcttcgatgctaagcgtctaatcggaagaagatacagtgatccctctgttcaagcggataagagtcactggccttttaaggt

SEQ ID NO: 169494 - DNA, 381 bp, Arabidopsis thaliana nossen
ctgtttccacctacatatataggatattttaagaagtgaacatctttattagtagcagggtctggagcaagaataggaaaggttatttcactatatttttgaccaggaacaggacctatcacaagaatattttttttattgggacgataattctgaaaagaaagatttcctatcttttctttcatctcgggtgaaatacgatcggggggggctaattcaaaaccctccggtaaaataagaacagctcccacattcaaagccccttttttaccattagctagaacttgttttagttgcatatcataaggaattttaacaactgcttcaaatacagtatcaggaagtaccgtttgtggaacctcaatatccacgggcttatta

SEQ ID NO: 169495 - DNA, 372 bp, Arabidopsis thaliana nossen
caagagcccactaaataaaaacaaataattgaattaagtttgcaaaggattatacattattaagttgttaatgctaagatgcaacttatagcaagaacaaaagaacgatttgcaatagtaaacgccaatttaatggagataagtataaatagttagcaattgatagatagtggaatcatgcctaaacaatttgcctaatcttttcaagtggtgtatagtcttcttgatatgtaagtatatgtttaattataattcgttatcaagaatatttgtctggatatatcaagtgttgtggccttgcgggacaaggacaacaaatgctcgacaatattgtacatatataagtatttatctttttaaccaaaccaaaaa

SEQ ID NO: 169496 - DNA, 153 bp, Arabidopsis thaliana nossen
ccacttacctgttatagcatcatcaagaatttaaccggtctaacaatactcaaatcaagaatttcatataactggtgaattaagtccacgggtacctgtttttcatggtaccatggcctccaagctgtcttgatgggtaattcgagtgcgttt

SEQ ID NO: 169497 - DNA, 370 bp, Arabidopsis thaliana nossen
cttgtcgattcaagtattaaaacatctccttcaagggttcctctgcattaagaaaatattatgactaccaaaaacagtattatccttatctgttggtcccaaaagtgagaagacagataaacttacattgcaagaagcttcccatcagctgagacattaaaagctgatatagagttcttttttataggcttcgaccattttcttttccataattttgtatcacatgttataatactcccaccacgttctacgcaaaaaaatcaatcctcaatcgttagcagtgacaagaaggaaggatttatagttcaatattcttgtaatgtcagaatataagtttaccagtgtttgcagcaatgtaaagaacttcatt

SEQ ID NO: 169498 - DNA, 384 bp, Arabidopsis thaliana nossen
cacgcacacggcatctacggcagctggatcggtggttgctaacgcgagtttgtaccagtacgcgcgcggaacagctactgggatggcgtcaaaggcgagaatcgccgcttacaaaatctgttggaccggcggatgttacgattccgatatcctcgccgccatggatcaggcggttgccgacggtgttcacgttatctctctctccgtcggagccagcggttccgccccggagtatcacacggactctatagcgatcggagcatttggagccacgcggcacggcatcgtcgtttcttgctccgctgggaattctggtcctaatcctgaaaccgcgacgaacatcgctccatggatcttaaccgttggtgcgtccaccgtcgatag

SEQ ID NO: 169499 - DNA, 389 bp, Arabidopsis thaliana nossen
aatcaatcaaaaacataaaattcaaagtgtaagcaaaaccagaacgagagaaaatggacaacaagcaaaacgcgagctaccaagccggtcaagccactggccagactaaggagaaggccggtggaatgatggacaaggccaaggatgctgctgcttcagctcaagactccttgcaacagactggacaacaaatgaaggagaaggcgcaaggagctgctgatgtcgtcaaggacaagaccggcatgaacaaaagccactaagcaagcaccttggacttcttttctaattaattcccctcttcgacttgtgtttaataaatttggggttttaattctcattcctgctactttctgatgttgtttccttgcgtccatttggatctttatgta

SEQ ID NO: 169500 - DNA, 368 bp, Arabidopsis thaliana nossen
cggacgcgtggggaagttttgcaaaaacaagtccatctagtggtttcaagtctgcgagaggctatagatagtgcaaatggatttcagaatactcatcaaattaaacagtttaaatctgcagaatttagcattgatcaggttgtctttagtctaaagaatgtgcatatgatatgggagccagtcttaccgcccaaaacttacaagcaaagcatgtgcgcagttttggagtctgtatttcgcagaatagctagagatattcttcttctagacgacatggctgctgacgaaactttcgagctacaaaaactgatttatctcatgttgaagaatctatcttctgtactcgattccgtgagatctgcagatga

SEQ ID NO: 169501 - DNA, 377 bp, Arabidopsis thaliana nossen
aaactacgttttttggggtggtcgtgaaggttatcagacactcttgaacactgatatgggaagagagcttgatcatctagccaggttctttgaagctgctgttgcttacaagaagaagattggattcaaaggcacgcttttaatcgagcccaagcctcaagaacccaccaagcaccagtatgactgggatgctgcaacagctgccaatttcttgaggaaatatggtcttattgatgagtttaagctcaacattgagtgtaaccatgccacgctctctggtcacacttgtcatcacgagcttgaaactgcaagaattaatggtttacttggcaacattgatgcaaacactggcgatgctcaaactggatgggatacag

SEQ ID NO: 169502 - DNA, 355 bp, Arabidopsis thaliana nossen
  unsure (1)..(355): unsure at all n locations
tgcatcttgtattaaagaaaaaaagtaaaaaaagaatgctgtggtataacttctttactaggtgccgacgaaaaaaaaaaacttcttaactaggttttatgagttcaaaactagagtttcttgacaaggtttcacatgttccagaagctttagttttgtttttggatgaagtttgaaagattcaaaagcagtgttgtaaaaagcggtctagacggtcgtttatatgccgctaagcgttcagttgacgcctaaataatcatctcgactgcctaaaataacataaatttcgntttagtatattttttttatttttaactaatattgcttaaattttataagttttacttctacacat

SEQ ID NO: 169503 - DNA, 387 bp, Arabidopsis thaliana nossen
gccaccatcacttaccctttctcgcctctcctgaaatcaaaatcccattatgcaaatccattttcatcatcatcaatatcatcaccaacttcattctcatcatccatggcccatttctcatctatgtagattctcatctctctacctcctcctcattttctcctcttgattcactaattcttcttcttcttcttcttttcagacatgactcttccttatcgtttctcttccgttagaaaccactcacttctacttaagacttctcatctctgcacacccagatcagctcttggttgttgtttctctcccaaggaatcccctttcttcaggaagaacactgcccaattcctttctcctcagaaacacacttctcttcctctgaaactt

SEQ ID NO: 169504 - DNA, 385 bp, Arabidopsis thaliana nossen
cttcatcattaccaaatcatcaacttaatcgtttctctcaaatttagggttttctcttttctcgaaagtcttgcggttttctgaatcatctctatctggtttgagggtttcgtttgatatctggagaaaggggtttctggaaacaaggagttcataattcgcgatcttgatctatcgatcttcatttatatataaaagcgtgaatgagattatgatggagtcgaaaggtggtaaaaagaagtccagcagtagtagttccttattttacgaagctcccctcggttacagcattgaagacgttcgtccaaaccgtggaatcaagaaattcaaatcttctgtctactcaaactgctccaagaggccatcctgagtaccagcgtgcacc

SEQ ID NO: 169505 - DNA, 243 bp, Arabidopsis thaliana nossen
agcttggagatatcgagaatcttgaaatcgcgttaaacttgagtagcaatagactcactgggaagattccttcaaagattgcgtctctcaacaagctctcgattcttgatatctctcacaacatgcttgaaggagatcttgctccactcgctaatattgagaatctagtctctcttaacatatcttacaatagcttctctggttatcttccagacaacaagcttttcagacaattatcttctc

SEQ ID NO: 169506 - DNA, 247 bp, Arabidopsis thaliana nossen
  unsure (1)..(247): unsure at all n locations
ggagaacaagagacatagtcaagtcctgcttcagcaaagaatcccacaggagatggatctcgttcttggtctccacatatcccaaccttgaggctaggcctagctgctcgtcctttttctgtcgccatcttgatcaattgccctacaccttgctgatcaagaacctggtccaaacacaaaaaaatggctatcaagattttatcctatggatagagagcaaacgaaatggtngtcattatacctcaaa

SEQ ID NO: 169507 - DNA, 362 bp, Arabidopsis thaliana nossen
gtaagtaactgggatgacatggaaaagatctggcatcacactgtctacaatgagcttcgtgttgcccgtgaggagcacccagttcttctcacagaggcacctcttaaccctaaagccaacagggagaagatgactcagatcatgtttgagacattcaatgttcctgccatgtatgttgccattcaggccgttctttctctctatgccagtggtcgtacaaccggtattgtgctcgattctggtgatggtgtgtctcacactgtgccaatctacgaggggtatgctcttcctcatgctatccttcgtcttgatcttgcgggtcgggatctcacagactcactcatgaagattctcactgagag

SEQ ID NO: 169508 - DNA, 370 bp, Arabidopsis thaliana nossen
aaatcacaaaaatgtctttttctgcggatgctctggagggtggactttcgtctcttaaattggccgccgacaagtaccgatcaatcttgaacgatgaaaaaacgggaaacatacggtggagatacggtggtcctccgattttcgacaccgtgaacaagcttttcgaagaagaaagaacccatgtgtggccagaaggttcgttagaagagacagtgcaaaacgcgatcaagtcatgggagatggagttctcacataagatccgtttacaggacttcaagactataaaccctgagaagtttaagctctttgtcaatgggagagaaggtttatcagctgaagagacgcttaggcttgggagttacaatgcttt

SEQ ID NO: 169509 - DNA, 245 bp, Arabidopsis thaliana nossen
tccaattggtaagagctcccgatgggaacgcccctggatggtgttgcatgctctatttgcggattcctatctatattttgggaaattaataattcttctgtcctactggatggaatttcagggaattagactgagaagaatcttgaagttctagcttttacctcgatccaaaaaagtaaagtttgcaggtctaccaattttagcctatcctcctttggtagtccgaccgcgaaatttttttctgc

SEQ ID NO: 169510 - DNA, 383 bp, Arabidopsis thaliana nossen
  unsure (1)..(383): unsure at all n locations
gtgcaacacccacaatgcaaacatctgattcatcaacattcatatatcggaaaaaagagacattcttcgagtttagtgggctaataaaagtgttttgttacctctaggattcacagattctgatgtatgggccattgctaatctacaaaatggtgtcaaaagtcaacaagggaccaatctcattaagaaccagatcccctataaacatttgcgatctatgtgggatcatttaccttgattcttcaattccagaagagagcgccgaatggagagagctgaaagaagtgactcnttgtgaaaatgacagcgaattctacaataaaactggagagagaaacagggagagagggtcctataaaagaggacgctttcttgtgatgttg

SEQ ID NO: 169511 - DNA, 387 bp, Arabidopsis thaliana nossen
gcccgacccatccatttcttcacggatatgatggtcagggtcctgaacattccagtggaagattggaacgtttccttcagatgagtgatgacaatccttacgttatccctgagatggatccaactctatgtatgcagattcaagaatgtaattggcaagttgtcaatgttactacacctgccaactatttccacgttctccgtcggcagatacacagggacttccgcaagcctcttatagtgatgtctcccaaaaacttgcttcgtcacaaacagtgtgtatctaatctctcggaattcgatgatgttaaaggacatcctggttttgacaagcaaggaactcgatttaaacggttgatcaaagatcaaagtggccattctgatcttg

SEQ ID NO: 169512 - DNA, 389 bp, Arabidopsis thaliana nossen
gtaagaatcccttctggtgtcaccaactttatcaccaacactaaccagacggttcctctccgtctcgcgcagatcaccgtccctgtcaacaatcccggcaactacaaggattacttccctgctgcatcccaatttcagcaatcctacttcaatgggtttaccaaagaagtcctctctaccagtttcaacgtgccggaagaattgctagggagattggttacgagatcaaaagaaattggtcaagggattatccgaagaatttctccagaccaaatcaaggaacttgctgagcacgctacatctccttcaaacaaacacaaagccaaaaaagaaaaggaggaagacaaagacctaagaacgttgtggactcctttcaatctctttgcaat

SEQ ID NO: 169513 - DNA, 361 bp, Arabidopsis thaliana nossen
gagaagcaccatttttctttctcgtcgtgtcatcgttttctcagattcctgaataatcattcccttccgattccaaaatccccaaacctcatccactcctccatctcccggattcggattcccagaatcatgcccatggagaacgacaatggcccacacgttggcaacgtcgtcgtcaccgctgagcaagcgaccaagattaacgagactgagggacggttgccggagaatcggcagaccggtgttgtctctgacaccggaagtggtagcgagagaggagagcaaggggttggagagacggcagttgctgtggcggtgccggtggaggagagcggatcgatttcggtgggagagctacctg

SEQ ID NO: 169514 - DNA, 348 bp, Arabidopsis thaliana nossen
gtttcgggtacacgactttcttccaaccatggtcgacgttaccgttagaggtctcgaagccattgtactcgacagattcgatcggatccattattgggtattctaaagtttctagctttttctcgcttttttacttctctctctctatctccggcgtgaaaaacagagaccaaacaagacgacgagatttgaccggagggaagagtatatatatataagagaataatagggtaatagaaagattaaaaacaatatccttgttttttatctttactacgaaattgccattgatattttgtaaacacagattttggaccaatcctttgggatttggttttgttttgtttt

SEQ ID NO: 169515 - DNA, 348 bp, Arabidopsis thaliana nossen
cggacgcgtgggattttcacattctcttctctctcgatatcatctaaatctctctcgatctcaatttcgcaaaatggctgacaagaagatcagaatcggaatcaacggtttcggaagaatcggtcgtttggttgctagagttgttcttcagagggatgatgttgagctcgtcgctgttaacgatcctttcatcaccaccgagtacatgacatacatgtttaagtatgacagtgttcacggtcagtggaagcaccatgagcttaaggtgaaggatgacaaaactcttctcttcggtgagaagccagtcactgttttcggcatcaggaaccctgaggacatcccatgggg

SEQ ID NO: 169516 - DNA, 362 bp, Arabidopsis thaliana nossen
acccttccgatcggagttttagatactggcgtttggcctgaatctagaagcttcgatgatactgatatgcctgagattccttctaaatggaaaggagaatgtgaatctggctccgatttcgattccaagttgtgtaacaagaagcttatcggagctagaagcttctccaaaggatttcaaatggcgtctggtggtggtttttcgagtaagcgtgaatctgtttctcctcgtgatgttgacggacatggaacacatacttcaactaccgccgcgggatccgccgttagaaacgctagcttcctcggttacgccgccggtacggccagaggtatggccactcgtgctcgtgttgctacttataa

SEQ ID NO: 169517 - DNA, 355 bp, Arabidopsis thaliana nossen
aatttgacaaagcctgtgaatatcaacaagagctttccattgtatctatgtcccagtttttctcaatctctccagacacacaaacatatatgcatctgatcctaaaacaaactacaaattctcacaccatgtttctctcggatccaaaagattttccgagaacataaaagactgtttctagacaactaatactcaaaaagtttgtctccatctgcaagaatgatcctccaaaaaaaaatccctgcatcagaaagtcaactcactttaactcaaaaaacaacagcaaaacaacaacagatttcaaagatgtctcttcttaggtttccgttcagcagaatctcctgcagcaactgaa

SEQ ID NO: 169518 - DNA, 346 bp, Arabidopsis thaliana nossen
ggaatttgcgcgaagcgcgtggtggttgatgctcgtcaccacatgctaggtcgcttggcttcggttgtagcgaaggatctgctcaatggccagaatattgtggttgtccggtgcgaggagatttgtctctccggcggacttgttcgtcagaagatgaagtacatgaggtttctccgtaagcgtatgaacactaaaccttctcacggacctattcacttccgtgctccctccaagatcttctggcgtaccgttcgcggtatgattccacacaagactaagcgtggagctaatgcacttgcccgcttgaaagtctttgaaggagttcctactccatatgacaagatca

SEQ ID NO: 169519 - DNA, 332 bp, Arabidopsis thaliana nossen
atttccaactctgtctctctcaattttctttttctttctccaaacatgaagttctctatgcgtttgatctcagccgttcttttcttggtgatgatattcgtcgccacagggatgggtccagtcacggtcgaggcacgcacgtgtgcgtcgcagagccaaagattcaagggtaaatgcgtgagcgatacaaactgcgaaaacgtgtgccacaacgaaggcttccccggaggtgattgccgtggattccgtcgtcgttgcttcttgcccagaaattgctgatccatcaatcgattctcatgcatgactcaatcggcgatctattggggtttggt

SEQ ID NO: 169520 - DNA, 361 bp, Arabidopsis thaliana nossen
  unsure (1)..(361): unsure at all n locations
aaaaaactgaatttgctagtgactatatgctaaaagcattccatttcaagtcttatttgctagtgaatatatgctacaaaaatcaacagtttattgtaaatccatcatgatagagatgcaacttctcatttgtaacactttatggcacttaccgttttaaatggagattcttcgcggagctcaactatgtaagctgctctcttgtccccaataccctatcatcatcaatgtaggccataaacaagttaggtactaacctataaacaagtcatttcaattttaaaaacattctgatcaatctagtcatctcacctttaacttctttagatcttccctgtnaacacaacaagagaagagaaaa

SEQ ID NO: 169521 - DNA, 353 bp, Arabidopsis thaliana nossen
tgttctctccctgccatctgtcttctcactggaaaattcatcgttcccgagattagcaactatgcgagtatcctcttcatggcgctcttctcgtcgattgcaataacgggtattctcgagatgcaatggggcaaagttgggatcgatgattggtggagaaacgaacagttttgggtcattggaggtgtttctgcgcatctgtttgctctcttccaaggtctcctcaaggttcttgctggtgtcgacactaacttcacagtcacatcaaaagcagctgatgatggagagttctctgacctttacctcttcaaatggacttcacttctcatccctccaatgactctactcatcat

SEQ ID NO: 169522 - DNA, 352 bp, Arabidopsis thaliana nossen
ggagcttgacatgacctctttttggaacgatccaagtgagtttaaagacatattcgatgtggttcactgtcataagttcgttaaaaaatgaaattcggatacctaaaaaggtaccttcaaagcttaaaaaaagggttgagcttggagtgtaccacgaaatgcctcctattagttggtcaaacatgtgttactaccaaaatcagattcttccactggtgaaaaaacataaggttttacatctgaacagaacggatacccgacttgctaataatggactgcctgtggaggttcagaagctgaagtgccgagtaaatttcaatgggcttaagattactcctcagattgaggaatt

SEQ ID NO: 169523 - DNA, 339 bp, Arabidopsis thaliana nossen
cggacgcgtggggagatagataccgctgttttggttcttgtacccctgcgtgatcatgacgcacaccggtattaacttcttcggtctattctgtgtctgtacacgattcgcttgattcaggtatcaatcaatcgaatgcgagataagccatgagtgtattcaaatgggtttagtttggtttgatccttaacttgcttaatccgactctgatttcatgttcctctaatgggttatctcaaataccttcataggttactactttggctaaaaggaatgagattttcgattggatggttgggatcccaaggagaatccatgagaatccatagtttggttatg

SEQ ID NO: 169524 - DNA, 358 bp, Arabidopsis thaliana nossen
cggaagctctaacctttgggtgccatcaggaaaatgttttttctcgctgtcttgttactttcatgctaagtacaagtcctcgcgatcaagcacatataagaagagtggaaaacgtgccgcaatccattacggctcaggatcaatctctggtttctttagttatgatgctgtcacgggtggtgatttggttgtcaaagatcaggagtttattgagacaaccagtgagcctggtttaacattcctggtggctaagtttgatggtcttcttggtcttgggttccaagagatcgctgttggaaacgctactcctgtttggtacaatatgctcaagcaaggccttataaagaggccggtcttt

SEQ ID NO: 169525 - DNA, 358 bp, Arabidopsis thaliana nossen
attttccatttccctgttctcgatccaccaccaccaccaacctcaaaagctttgatctttaccggtcatggacggtggttcaggtcaaccggcggctgatacagagatgacagaagctcctggaggttttcccgcggcggctccatcgcctcagatgcctgggattgagaatattccggcgactcttagccatggtggtaggtttattcagtataacatatttggaaacatcttcaaggtcaccgctaagtataagcctccgatcatgcctattggcaagggtgcttatggcatcgtttgttccgctatgaattctgaaactaacgagagcgttgcgattaataaaattgctaacgct

SEQ ID NO: 169526 - DNA, 358 bp, Arabidopsis thaliana nossen
cacaagttccttatcaaatcacatcaacaaatctaaaattgagaagcataccactaaatctgaagattccagacataattcgaagaagatttgaagaagaaagacgaagatttgaagagatcgaagactaagattcatgaaaagaagaagaaccctagaagattagggcaaaaagagaagatttttacagaagaaatgtttgtgatattgagaagaacaaggaagaaaatgagaaacgtctttaatggtgagagaggtgtacggtggaagttgatgtagaggataaaaactcttaagttcaatgtatacacgcgaaaaagtcggatttcttctccaccttctttgttcccacaccgaa

SEQ ID NO: 169527 - DNA, 336 bp, Arabidopsis thaliana nossen
ctcctcaggttagtaagcgtgagggttatgtacaagattttgtttgtgtctgaaagttaaagaaaacattttggcaagatcagatgaataacatgccgtcttagcctacatgacggggcgggtgttacatttatgctactttcttgaacctcaatccataacatatattcacatacatttagtgatttaaatctacttaactattttaacattttatgcctttctttctttttacaaatatttgtagtaaaagaaacttctcttaaatttaagattcgtatattatcgcgttccttttcataagtatttcaaaatagaaaatatgagaatttaaaa

SEQ ID NO: 169528 - DNA, 355 bp, Arabidopsis thaliana nossen
aattatcgaagcccactggtttcggagctgatcggtctctatttctctcttcatacatatctcaagcagataaagttgatcggatactagaatgggaggaggatttagagttttgcatttggtgaggccattcttggcttttctgcctgaggttcagagtgctgataggaaggttccattcagagagaaggttatctacactgtcatctctctcttcatctttcttgtctgcagtcagcttcctctttatggaatccattccaccaccggtgcggatccattctattggatgcgtgtcattcttgcgtccaaccgtggaactgtcatggagctcggtattactcctattgttaca

SEQ ID NO: 169529 - DNA, 287 bp, Arabidopsis thaliana nossen
gcgggatattcgggtttgaaggaactaaccagggaaaataaattgtgaccaatgttttgttgaggctttcctatctctgatttgatgagcctcaccatctttgcaaacaactactctatggtccccaacactcgctatagctagcttctctccgttcaccaccataaccgaagcggctgagccaccggttctctcttcctcaacgtacgctcttctcatagtctctttacactttctcataatcccgagctgaaaatgtcccagatacattttgttgacacacattc

SEQ ID NO: 169530 - DNA, 279 bp, Arabidopsis thaliana nossen
cggacgcgtgggtgaaacgctcgtttattccaggacgtctgttatgattcttgagtttaataatagttgcagtaaaccctattgcaaagcctgatcatgagattggttcaagtaaaagttaagctatattatcacatttaagtcaacaaagcaacttgggatcacaattgtgagaacgttgcaatgttacagtaaggctagatcagagacagcccctcaagctcaatgtacaaaacagtgtgcttaatgggcatacctggttctcaccaagcaacatga

SEQ ID NO: 169531 - DNA, 351 bp, Arabidopsis thaliana nossen
gagagagcagaggtcatgttgaggaaaagaaataaaagaaagaagtaagagagatgtgcatttacattggtgacgaagaagagtcaatcatcaaaaggagaaatcttgacgattcatcaaagctttaatcatatcactttcttgatcgttcgttcatagtttgcttctggaacaaaaaacattgacattaagatcacaatatgaagatgtcaattagcaaggtcaagagcatgttctgcacaaccttaacaaagtcaatgccagccattgccttctttgggagaatggcattttcctttgtctttttcattactgcaatccaagattatgctgatcattatggcggtggag

SEQ ID NO: 169532 - DNA, 370 bp, Arabidopsis thaliana nossen
ccacttcgggagaaaccgccctcttttcttaaacttaaaaaaatagagaaataagaaccaagtcaagatgatacggattaatcctttattcttgcgccaaagatcttcctatttccaaaggaactggagttacatctcttttccatttccattcaagagttcttatgtgtttccacgcccctttaagaccccgaaaaatcgacaaattcccttttcttaggaccacatgcgagataacgaaaaaaaaaaagagagaatggtaaccccacgattaactattttatttatgaatttcatagtaatagaaatacatgtcctaccgaaacagaatttgtaacttgctatcctatcatcttgcctagcaggcaaa

SEQ ID NO: 169533 - DNA, 173 bp, Arabidopsis thaliana nossen
aatttgtttggatttttgtttttcgttttccttttcttgcattttgttatcagaagttgggttgtcaatttctgtttggtcttttacttttcaatttggagacttctcaaacaaattttaatatcaaatggattttttttaaccgacaaagaaaatccatttgatattaaaaa

SEQ ID NO: 169534 - DNA, 351 bp, Arabidopsis thaliana nossen
aatgctttggctacattactgaaacaaggaatggtgaagaagggagaggaaatagcaatcgtacagagcggtacacagccaatctggcgatctcaatcgacacataacatccaagtccgcaaggtttaaagcttcttttaagatgggatgtctttaatatgtagaacctcgtttttggttataattttcgttgcatgtctctcttctcttgtactattcacacttgttgtttgctgtatcttcttcttcagtttgctttgctacgattgtggtttttggagacattatagctcattaactctttgtgaaaaaaaaaaaaaaaaaaaaaaaaaaaaaaaaaaaaaagggcgg

SEQ ID NO: 169535 - DNA, 352 bp, Arabidopsis thaliana nossen
tgatgtttaatgagatgggaatgtgtggaaacatggatttcttctcttgtggatcacttggtgaagttgatttctgtcctgttccacaagctgagcctgattccattgttgaagatgactatactgatgatgagattgatgttgatgaattggagaggaggatgtggagagacaaaatgcggcttaaacgtctcaaggagcaggataagggtaaagaaggtgttgatgctgctaaacagaggcagtctcaagagcaagctaggaggaagaaaatgtctagagctcaagatgggatcttgaagtatatgttgaagatgatggaagtttgtaaagctcaaggctttgtttatgg

SEQ ID NO: 169536 - DNA, 356 bp, Arabidopsis thaliana nossen
catacgggaagtaactcctcaagcgaagaagatctgtttgttgattccgaacctggcttacagaactcaccggaaacacaatcaaccacagagagtcgccatgagtctccgcgtagacaacttgtgagaactaatgtccctaccaatgaacagatcgcatctctgaatctgaaagatggtcagaatatgataacatttagtttctcaacaagagttcttggaacacaacaggtcgatgctcacatttaccggtggagatgggacaccaagatagtgatttcagatgttgatggaactataactaaatctgatgtgttaggtcagttcatgcccttcattggaaaggactggaccca

SEQ ID NO: 169537 - DNA, 114 bp, Arabidopsis thaliana nossen
gagcggtatcattatcagcaaaccaccttcaaaagctacgcctgtcattccaggtaactactccacttgggaatgcgttttagcctcaccaggcatgttaacatagctgaaaca

SEQ ID NO: 169538 - DNA, 347 bp, Arabidopsis thaliana nossen
aaaacccatatgagatacagaagaataggctattctcttttttaaattacgttgaccgggagatgttgaagctgcataaattatttggattgtaccgactaccaacaaccaaggagaaaacatagaatgagcgtggggtaataattccatattgattcgaaccaacccataggctcccatttttaataagattccagcgagaagcatacaggtactgtaatgtgcctcaccgtgggtgtcaggtaaccaagtatgtaaaggtataatcggtgatttgacggcaaaagcaataagaaatccaatataaaatagtatttcaagtgtaacaggataggatttattagcta

SEQ ID NO: 169539 - DNA, 350 bp, Arabidopsis thaliana nossen
agttaagagatccagccatggataagagctccctcgtctctgatttcctctcctttctcaatgcttctcccaccgcttttcatgccgtcgacgagtcaaagagacggcttttgaaggctgggtatgaacagatttcagagagagatgattggaaactcgaagccggcaaaaaatacttcttcaccagaaattactccactattgttgcttttgccattggtcacaaatacgtagctggaaacgggttccatattattggagctcatactgatagtccgtgcctcaaattgaaacctgtatccaagataactaaaggtggatgcttggaggttggtgttcaaacatatgga

SEQ ID NO: 169540 - DNA, 341 bp, Arabidopsis thaliana nossen
gtttcattgaaaatttcaagaaccctagttaataacgataatgggttcgagagttttggcttccttctttgttttcttaatcttcacggtcatcacattgcctcccacgatccaagcttgcactccttgtactcgtcctcatcctccggttccgaaacctccacaacacggcggtggtggaggtggtggtagcaagccgcctccacatcacggtggaaaaggtggtggtaaacccccaccccacggtggaaaaggtggaggaccgccgcatcatggtggacgaggaggaggaggagggaaatcaccgccggttgttagacctcctcccgtagtggtgaggc

SEQ ID NO: 169541 - DNA, 361 bp, Arabidopsis thaliana nossen
cttccctggaatgttaccttttggagaggaacatggaagctatcttgcagatccggctgaagtagagattgtgaatttcaatacatgtcaaggagctgtggaaaaatatcaacatctggaggattttcattgggctgtgagacctttgcttattgctatgggtctattgacagcgatgaagttagggatctgtgtcaggaagaaaataggaaggtcaaaggatgggaaacaacgcgatggctcgactggacaaggtgactgtaagattccggatggtaagggctctgacaaatctaaatggcttgtgttcttttaggtctgctatgagacacagaccttgtctggtccatatattatactg

SEQ ID NO: 169542 - DNA, 362 bp, Arabidopsis thaliana nossen
aacagcaacatcaaactctaataaacccaagttggtgtatactataatggtgatggctggtgcttcttctttggatgagatcagacaggctcagagagctgatggacctgcaggcatcttggctattggcactgctaaccctgagaaccatgtgcttcaggcggagtatcctgactactacttccgcatcaccaacagtgaacacatgaccgacctcaaggagaagttcaagcgcatgtgcgacaagtcgacaattcggaaacgtcacatgcatctgacggaggaattcctcaaggaaaacccacacatgtgtgcttacatggctccttctctggacaccagacaggacatcgtggtggtcg

SEQ ID NO: 169543 - DNA, 337 bp, Arabidopsis thaliana nossen
gaaggaaggaacctagatgggattccgggtgctacatcaatggcttggatcttggctcgcaggtcactgagtactatacacgctcgacatctcgtgttgtgacggcaagccccacacggatctcatatgtgtagaccgcagtccagctgattatctcaaggcagcatcaaagatgatgaagaagcagagcaactacctaaggaaatctccaaagactggaatactgtatgcgcacggatcatcaacgccctgttcctcacacaaatggacccactttaggatgtgaccctcaagctcttgtatgatccataagctactatcaattattcatttgaga

SEQ ID NO: 169544 - DNA, 292 bp, Arabidopsis thaliana nossen
tgtgtgaaagataaaatgtgaaagttgcagtggtgcgattaaaccctatggtggagtttaaatgtgctgtgagacctttgaccattgatcctggtctattgacagcgatgacgttagggatctgtgtaaggtagaaaattggatggtcaatggatgggatacaacgcgatggctcgactggacaaagtgactgtaagattacggatggtaagggctctgacaaatataaatggcttgagatcctttaggcttgctattaaacacagaccttgtctggctcatatattatact

SEQ ID NO: 169545 - DNA, 124 bp, Arabidopsis thaliana nossen
ctgtaagtgtttaaagattttttattcaggaaagagttacatgtgcagagtcaacgatcgcttatacacgacgttcgttgttgtacactagacgtcctaatacaaaatctttaagtctttaaaa

SEQ ID NO: 169546 - DNA, 352 bp, Arabidopsis thaliana nossen
ctctatttgctcatctccctcgatttcgaacccctaatcttgagatggcatcggagaagaagctctcgaaccctatgagggatattaaggtccagaagctagttcttaacatctctgttggtgagagtggtgatcgtctcactcgtgcctccaaggttcgttctttctttccccttaagagtactcactatatggcttaggaaatttatttgagactttacgtcttagctactctgaaatgggttggttagttacatagttcataggtgttgaatcgagagttttggttattgtaggtgttggaacagctcagtggtcaaacccctgtcttctctaagggtatgtgaatatc

SEQ ID NO: 169547 - DNA, 350 bp, Arabidopsis thaliana nossen
gttcatcttaatcggatgaacagaaacaatcgctgaagcgagttcgtcgcgaaattgtgagatcggagcttccgtgtttctcctcaagtcgcctccgatgaattttctacggagggatgtttccgggaacttctcgaattcaaacaacaactcagatatctaatgtaaataatcagctgaaacagaacaatccagaatctttcattattggttgctgattttaataatttatcagcattatgcattaaactaattcatataataacattattgcaaataaagcccaaatcctttcattttgttacaatatttaccgtatagttttaattataaataataaacccaatttg

SEQ ID NO: 169548 - DNA, 361 bp, Arabidopsis thaliana nossen
gaaaaacaagagagctatcggatttttacttctggtcgtacttatcaatggagttatgatgacgagatcaaatgggtatgaaggagaagaagagtggggaggagcaggaggaggagagtggggaggagcagaaggaggaggagcatggggaggaggaggtggaggaggaggagcatggggaggagaaggagaaggaggaggagagtggggaggaggaggagaaggaggtggcggacgaagaagaggatggttcatgatgagagagtcgaggcaagtgatcaaatcagaaggtggagagatgagagttgtgttatcaccaagaggaaggatcattgagaagccaatgcacattgggtttcta

SEQ ID NO: 169549 - DNA, 358 bp, Arabidopsis thaliana nossen
agccgctacacacttttctgcgatatctctgagatttgttgacagtctctaaccatgggtaaagagaagtttcacatcaacattgtggtcattggccacgtcgattctggaaagtcgaccaccactgggcacttgatctacaagttgggtggtattgacaagcgtgtcattgagaggttcgagaaggaggctgctgagatgaacaagaggtccttcaagtacgcatgggttttggacaaacttaaggctgagcgtgagcgtggtatcaccattgacattgctctctggaagttcgagaccaccaagtactactgcactgtcattgatgctcctggtcatcgtgatttcatcaagaaca

SEQ ID NO: 169550 - DNA, 353 bp, Arabidopsis thaliana nossen
cccacgcgtccgatttatatatatgtaataatatatagatactagcattattcctgttcttaaaataaaagttgacatacaagcactcaatttgatctatttcttgatttccccgtgaattgtatgtttataacaatagggacagaattttctcaattccaatcgactaggggtgttatgccgattcttttgagtaatatatctggaaattcccgcggcttctttcttaatatcatttcgaacacaactggtacattccaaaataattgttactcgaacatctttacccttggccatgaaacctcctttggatttatgattcacctcaatcttctattttaattttaggatcc

SEQ ID NO: 169551 - DNA, 354 bp, Arabidopsis thaliana nossen
cggacgcgtgggttcctttaccagatcagacgtcaatttcaactcttcagtgaagagatttctttcaccgagttttctactccgatcgatcaattgaagattgaaatggaagctaattcaggcggaggaggaggagctgaaggcggaagagcggtaaccggaggaggaggaggaggagggagcgatgtggaattggtgagcaagacgttgcaagtggagcataagctattctattttgatcttaaggagaatcctcgtggaaggtatctaaagatatcggagaagacgtcggcgacgaggtcaaccatcattgttccttcctccggcatctcttggttcctgatctcttcaact

SEQ ID NO: 169552 - DNA, 353 bp, Arabidopsis thaliana nossen
caagggcatttcacgcattacaacagttatacctgcaacagatgaatcggtcagcaaattggtgcagcaactttacaaactcgtagatgtgcatgaggtccatgatcttactcatttgccattttctgaaagagaactgatgctgattaagattgccgtgaacgctgctgctagaagagatgtcctggacattgctagtattttcagggctaaagctgttgacgtatctgatcacacaattactttgcagcttactggggatctagacaagatggttgcactgcaaaggttattggagccctatggtatatgtgaggttgcaagaaccggtcgtgtggcattggctcgtgaat

SEQ ID NO: 169553 - DNA, 359 bp, Arabidopsis thaliana nossen
cccctcccttaaagtcttctcctcctccatactactatcactccccagggcctccggagaagtgcccagcaccaccatactactaccattcacctcctcctccggtgaagtctcctcctcctccatactactaccattcaccgccccctcccgtaaagtctcctcctgctgcatactactaccactccccacctgctccggtgaagtccccaccaccaccatactactaccattcacctcctcctccggagaagtctgctcctcctccatactattaccattcacctactgctacggtgaagtcttctcctactccatattactaccattcaccacctgctccggtgaaatccccacca

SEQ ID NO: 169554 - DNA, 356 bp, Arabidopsis thaliana nossen
atctcgcagaaaagattcatcccatctttaacccttgttgctttacagtgaccattaatgagtgtattaaacgttgagcagctcttggatacctttctcgcctgagctagtttgttctgcttgcagagtccatggatcattgagttataggttatagtatcggggactagacctctacggatcatctctgcatataatttttcagccctacctaacgagctgaatctgatcatcatattgtaagtttgaacatcaggttgcaatccactgatgaggagattagtgaatatattccctgcttcgtcaaacttaccagccttgcacagtccatggatgatgatgttataaccagctgt

SEQ ID NO: 169555 - DNA, 356 bp, Arabidopsis thaliana nossen
gagacaaagagagagagagatggggtcaaagacggagatgatggagagagacgcaatggctacggtggctccctatgcgccggtcacttaccatcgccgtgctcgtgttgacttggatgatagacttcctaaaccttatatgccaagagcattgcaagcaccagacagagaacacccgtacggaactccaggccataagaattacggacttagtgttcttcaacagcatgtctccttcttcgatatcgatgataatggcatcatttacccttgggagacctactctggactgcgaatgcttggtttcaatatcattgggtcgcttataatagccgctgttatcaacctgaccctta

SEQ ID NO: 169556 - DNA, 344 bp, Arabidopsis thaliana nossen
cggacgcgtggtatttgacggttatctgatttccaacgattttttctcttccatggctttttttcgctgatcggtaaatcaaacgtttgtttcggtttcgatggtggaagctacgtcgaatttgacgccgactcagagatatgcggccggcgcattgtttgcgatcgctttgaaccaatcgcaaatcaaccagactcagccgctgggaaccccggcggcggaagacgacgacggaggcgatgaagagcgaagaagcaattgcagtagcggagattctgtctccgatgaccccagcctctgggtacacgagacgtcttgccttcttcagcccgttttcagatgtc

SEQ ID NO: 169557 - DNA, 351 bp, Arabidopsis thaliana nossen
ggcctctgcttcaaggaggttactgaggagagagacgatctcctgtttgagccacaccgtgaggaaactcttctccaccgttggatctccttcttttgctcagagactcagagatctccccaaagacttcccctctaccaacgccaaacgtgacgcctctctgcttattgggaaaacgcctcttgtgttcctcaacaaagtcactgaaggttgtgaagcgtatgttgcagccaaacaagaacatttccagccaacttgtagcattaaagacagaccagctatagccatgattgcagatgcagagaagaaaaaactaatcatccctggaaaaacaacactgatagagcctac

SEQ ID NO: 169558 - DNA, 357 bp, Arabidopsis thaliana nossen
tgagaccaccattaatggttctacatccatacgtgctcactaatcactttgtgtgtgctctatttcctgaatttgttacgtgtgattagactaccggaaggaacagaagattgcattagtcgaaagaattttgctcttcttattttatcgcttagtagtatgtttcactttgtggatatcaaacttctgacttttattgaagctagctaccactacttttaataaactggttaatctcaattaaacaattattggtcacggttgcagttttttggaagctgccactctcaataaattaatagaaattgttgtcttgacttttaattttttgatacagtaccattaaaacttaagaaa

SEQ ID NO: 169559 - DNA, 359 bp, Arabidopsis thaliana nossen
aagaaggggactacattattcggttatggttacgatttccgtcaaagcaataggatcgatctacttatactaggtctgaagaagaagctggaaactgcatataaacgttcaggggggagaaaagtcactatcatctcccattcaatgggaggacttatggtttcatgtttcatgtatctccatccggaggcattttccaagtatgtaaataaatggattacaattgcaacacctttccaaggagcaccagggtgcatcaatgattcaatcttgactggagtgcaatttgtggaagggttagaaagtttcttttttgtttcacgttggacgatgcaccaactgttggtcgaatgcccatc

SEQ ID NO: 169560 - DNA, 128 bp, Arabidopsis thaliana nossen
atttgatgccacgtcacgatcaaagaaagaacatcaattttttttatcaattttaaaaataaataaaaaaagaacatcatttaagcagctcgactcatatgacaaactaaaagtacaatgtttgtagt

SEQ ID NO: 169561 - DNA, 356 bp, Arabidopsis thaliana nossen
gagagagacatattgagaaagagagagaaagctttagggtttcaaaaaaaaaaaactgagaccctttagaaatctcctaacaggaatttttttctcaatcgctatagaaaatgggagtcatgatcaatcaccatttcctcgcttttatcttcggcatcttaggaaacgtgatatccttccttgtattcctcgctccagtgccaactttttatagaatatacaagagaaaatcgacggagagtttccagtcgctaccgtaccaagtgtcgctatttagctgcatgctatggctctactacgcattgattaagaaagacgcttttctcctaattaccatcaactcctttggctgcgtc

SEQ ID NO: 169562 - DNA, 357 bp, Arabidopsis thaliana nossen
gaaaaacaagaagctaaaaatgtctatcctttcgtttcctcacactttctttaacatctctccttcactcttctacactatccttatatccagtttagttctactgatcctcacgcgccggagtgctaaatcaaagatcgtgaagcttcctccaggtcctccggggtggccggtggttggaaacctcttccaattcgcgcgctccgggaagcagttttacgagtacgttgacgatgtaaggaaaaaatacggtcctatctacacgttgaggatgggaagtcgaacaatgatcataatctctgattcagctctcgtccacgacgttctgattcaacgtggaccaatgttcgcaacccg

SEQ ID NO: 169563 - DNA, 357 bp, Arabidopsis thaliana nossen
gctgggtaaaaaaaattcggaggacgacgaaagagaaaacgagtgtttcagtcactgccccacggagctctcggaaatttgtcttccccttgtcgtcgtctccctatctcctgcttcttcttcgttttcgtcttctttatcaaggaatgctgtttaattggaatcaacaatggagaatttgacggaaatagaatcaacgatggagagtttaacggaaatggagagcgagagagttgaacagggtaccgataaggaaattggaagtggagagcaaaggcaggatgatgtaaaggaaacggaggatgagaattctggagagagagtaggagaggaagctcctgtcagggaacatgaaga

SEQ ID NO: 169564 - DNA, 356 bp, Arabidopsis thaliana nossen
ccttgggttcaccttggagcctagtcccagcaaagttcccctacctttgtgttctgaagatcctgctgtgccaaccgaccctacaagtttgtctgaacggtctgcggcgtctcctatgctagattctggaattccacatgcagatgacgtgattgattcaagaaatattgtggacagtaacctcgaattagttccatatcagggtgacatatctgttgatgaaccttcatcagattcaaaagagcttgtcccacttccagagttggaagtcaaggcgcttgccatagttccgttgaaccagaaacctaagcgtactgagctagcccagaggagaactaggagacccttctctgtga

SEQ ID NO: 169565 - DNA, 357 bp, Arabidopsis thaliana nossen
tctttctcctgaaccatggcggcggcaacaacaacaacaacaacatctggttcgatctccttctgcaccaaaccatctccttcctcctccaaatcaccattaccaatctccagattctccctcccattctccctaaaccccaacaaatcatcctcctcctcccgccgccgcggtatcaaatccagctctccctcctccatctccgccgtgctcaacacaaccaccaatgtcacaaccactccctctccaaccaaacctaccaaacccgaaacattcatctcccgattcgctccagatcaaccccgcaaaggcgctgatatcctcgtcgaagctttagaacgtcaaggcgtagaaacc

SEQ ID NO: 169566 - DNA, 357 bp, Arabidopsis thaliana nossen
caccattgtatttattaatgagaagttgaataagaaaataggagcgtctcatctctttttgaagggctgttttaaaaaacaaatactagtgtgttttctctttataaaacaaacctcactcttttgtttctttcattcatcatctccacacaaaaaaaataaaaaaaaatgaacaacttaattagctctctcgaactcacatctcttacacttgaagacccatggcctgctttctagcctaaatttcctcgagaaaacaagcaaaaaaacacaagaaagctagaatcttattttcttcttggtctttcttggtttcttcaactttttcttaaaaacgttttcaaaaaaaaagggcgg

SEQ ID NO: 169567 - DNA, 352 bp, Arabidopsis thaliana nossen
aaaaccctaatctcactccgcctcctgcgagatccatcaacacttccggaaaaatgaaggttgttgctgcgtttttgcttgccgtcttgagcgggaaagcttccccaaccactggcgatatcaaggatattcttggatcagttggtgctgagacagaggattctcagattgagcttttgttgaaggaagtgaaagggaaagacttggctgagctaattgctgctggaagggagaagttagcttcagtaccatcaggaggtggtggtggtgttgcggttgcttctgctacatctggaggtggaggaggtggtggtgctcctgctgctgagtccaagaaagaagagaagaaaga

SEQ ID NO: 169568 - DNA, 343 bp, Arabidopsis thaliana nossen
aacaccacaatttgactaccacttcctgcttatccatcaacactcccggacaaggaaatgatgttggggccttcaagcacgaccgcttactcttttatgattgccaaaacactctccagatctatggtaatcggggatgcatgtggggcgtccaccgatgatagtcataatgatctggtgcacacacaacagcaacataaacacttacctgagccaataccttcacaaccttagaagctatctacagctccatcattcggtccaatgctctctatgggaaggcttgctacatttttctttgacagaaggcgctgagactatcttgttcgactcaaacccttac

SEQ ID NO: 169569 - DNA, 357 bp, Arabidopsis thaliana nossen
caaaacaagacccatcgataacagcgatcatggtggctaaagccttagcacagctgataacatgcatcatgttattctgccacgttgtagcttccgtagaagacctcaccatacgccaagtcacggccgacaatcggcgaattcgcccgaatcttctcgggactcacacagagagtaaattccggcttttcatgtccgattacggcaagaactactccacgagggaggagtacatccaccgcctcggaatatttgccaaaaacgtccttaaggccgcagagcaccagatgatggacccctccgccgtccacggagtcacacagttctctgacctcacggaagaggagttcaagcgga

SEQ ID NO: 169570 - DNA, 210 bp, Arabidopsis thaliana nossen
agataatcaaaattctgatcaaaacgatgaaatggctttgatccgttattcgcaacaatctgattttcgtcgagagataattaaaggatccatgcgttcccaaaggcgtaaaactgttatttgggaattttttcaagcaaaagtacattccccccttttttttgatagaatagataaacttttttttttttcgtttgatatatgggggct

SEQ ID NO: 169571 - DNA, 330 bp, Arabidopsis thaliana nossen
gtaatttgaaaaatgaacaattctgtttgtaaggaaaacttttgtatagtagacgtttactatatagaaactagttgaactaacttcgtgcaattgcataataatggtgtgaaatagagggtgcaaaactcaataaacatttcgacgtaccaagagttcgaaacaataagcaaaatagatttttttgcttcagactaatttgtacaatgaatggttaataaaccattgaagcttttattaattcaaatcatgggatgggaggaaaaagcaatcgaagtgcagagataaaggataagaagaaagctagtccaatgaaagttggagcaaatg

SEQ ID NO: 169572 - DNA, 356 bp, Arabidopsis thaliana nossen
cggacgcgtggggtgaaatgctttacgtctactatcccgaggactcagttggtgttgttttcaacaatatatacgagtttagtggtcttatatcaggaaagcagtattatcctgctgattctctttctgacaatcaaaagggttacgtcgatggactggtgaggaaagcctatgaaaactgggatcaggttgttgagtatgacagcaagtcacttatgaacttcaatcaagttagcaaaacagatgccattaactactctatgccaatttcagttccaagccaaccatctacttcttattcagacgtaactgttgaagcatataatcagagtccggcttcaagtttcccgggtcaa

SEQ ID NO: 169573 - DNA, 340 bp, Arabidopsis thaliana nossen
cggacgcgtggggagaaatcaaatcactcacactccaaaaaaaaatctaaactttctcagagtttaatgaagaagcgcttaaccacttccacttgttcttcttctccatcttcctctgtttcttcttctactactacttcctctcctattcaatcggaggctccaaggcctaaacgagccaaaagggctaagaaatcttctccttctggtgataaatctcataacccgacaagccctgcttctacccgacgcagctctatctacagaggagtcactagacatagatggactgggagattcgaggctcatctttgggacaaaagctcttggaattcgattc

SEQ ID NO: 169574 - DNA, 355 bp, Arabidopsis thaliana nossen
gtggggtcagtttgggataacgtcaaacatatagattctaaagaaaagataaggtataaattcttagaaacaaaaaaataaaataaaagttctaataggatacattgtatagtagtgaatgtaattagataagtttatctaaaaacttgagaacatacgaaaatgtattgatttttttttttttgggacaaacgcgaaaatgtattgatttgattgtaattataggaacatttacgaaactaaaatatcatgaattttttttgtcatcattcaattgcaagtgacgaaaaataaataaaaatttcaagtatgaaattttcatggatgcgggatagtagattttaattttttattt

SEQ ID NO: 169575 - DNA, 359 bp, Arabidopsis thaliana nossen
atcaaaaagtgcttaaacgtgtcacaattccttcaattaaatcagggaatcccgatttacctcttaatagcctttgaaaaaagcccatataagttgccagtcgacttcccacaaaaaaagaaaaggaaacgccgactttccaaaaagagaaatcataagaaatttcttataagataatgacaaggtttgaagataaaggtaacttggagattcaaaccctatatttaaggaaattgagtttatattcttttgttttttttccttctaaaatcattccattatattgaagttaaagtgttaaagttatacaagactacataatgaaaactattacacaagcagaaatgtgagccatcttt

SEQ ID NO: 169576 - DNA, 372 bp, Arabidopsis thaliana nossen
tgtacatgaatttcacgctgatttcgatgatgatgaaccctttggagaggttgatgtcaccagtgattctgattccgattggatggactccgattttgatttcgagctgagtcagagtaagacgaacaatgaaacatcagcgttagaagctaggaatggaaaagatattcaagggattccatgggagagcctgaattacacgagggatagataccgtgagaacagattgctacactataaaaatttcgagtctctctttcgatccagagaagagcttgataaggaatgcttgcaagtggagaaaggaaagaacttttatgactgtcagttcaacacaaggcttgtcaagtccacaatagcgcattttcagct

SEQ ID NO: 169577 - DNA, 354 bp, Arabidopsis thaliana nossen
attaagagaaaacacttgcgaaactaagtgctatctctcttcttcttcgcttctcctaacaacttatataccatgagtctcttcaacactgaaaacacatgggcctttgtctttggcttgctcggcaaccttatctcctttgccgtgttcctatctcctgtgccaacgttctataggatttggaagaagaagacaacataccggtttcagtctattccttatgttgaggcgctcttcagtgcgacgctttggctttactatgcgacacagaagaaagatgtcttgctcctcgtaaccattaacacctctggttgcttcatcgaaaccatctacatctctatgttccttgcctac

SEQ ID NO: 169578 - DNA, 350 bp, Arabidopsis thaliana nossen
ggaagtgttcaacgaacacattccaagtcagaggtcaatgtttgaatgaccctatctgctctctatatatcaaccggaatggacccgacggttgggtcccggagtccattgagatctactcagaaggctcaaagtccgttaaattcgatttcagcaagagcgtccctcaacttaacacttggtacgggcacaacaactgcagcaccacaggcagaccattgtgtgccgatctgcctccaccacatttttcggcagagcttccaccggagacacctaccaccccaccgtctgctacaccaatgaccgctgttgcttcaaagcttggaaatggtgagagtgttttccttgcg

SEQ ID NO: 169579 - DNA, 355 bp, Arabidopsis thaliana nossen
agactctactccaatcctctttgatgttcctcaaaacgtaactttcacaccattctcatctcactccatatccactgatgctcctctcccaatcctcctccgagttcaagccaacgctcacaaaggagggtttctcggattcaccaaagaatcaccctctgatcgtctcacaaactccttgggaagattcgaagacagagagtttctcagtcttttccggttcaaaatgtggtggtcgacggcttggatcgggaaatccggttcggatcttcaagccgagactcagtgggtgatgctaaagattcctgagatcgattcctacgtggccatcataccaaccattgaaggagctttt

SEQ ID NO: 169580 - DNA, 361 bp, Arabidopsis thaliana nossen
ttcttcttcttcgttcttctcgtagcttcaaataagattcatcaaaagagtaaattaacatcaaaatccaaaaatccaaactagaaaaaatgtcagtagttttactctcttctacttgtgcaacaatcaccaaatcccaatccaaaaagattccctttttatctcccaccacaaaattcccattaaaggtctcaatttctccatcaagatcgaaacttttcaacaaccctttacgcgtggcggcgccgacgtctatacccacttctgattcggcggaggagaagcggatcgaagaagaatacggtggtgataaggaagaagaagggtctgagttcaagtggaaagatcattggtatccagt

SEQ ID NO: 169581 - DNA, 355 bp, Arabidopsis thaliana nossen
cttgagtgactccgtaacagatccttcttagtttggttgatttttgtgtctgtgaaaatggtttatcagtttatgcataagattcatattcggtttagatttgttaaagtttggtttagattagtttgcttaacatgctctgttttctccaatagactaatataagtttaatcaaacaagtgcatttggtagcttgatcaaacttgctacaaaaacctgaactgtaaaatcatttttgtatttgtcagttcatttttgggcgccgacgttcaagtggggtataagcattgccaatattgcagactttcaaaaacctccagagacactttcataccctcaacaaattggtattata

SEQ ID NO: 169582 - DNA, 352 bp, Arabidopsis thaliana nossen
gccaaggcagcttcatcggccggaatatgcctccctctacttctcagtacggcattttggatccacatgcaagtgtagtggcgacaaagttgttagcgagaaaaagattcatagacaatggggaccaattcaacgtgatagcttgttcttggatccagttcatgatccatgattgggttgatcacttagaagacacccaccagattgagcttgaagctccagaagaagtagcaagtggatgtccattgaagtcattcaagttcctcagaacgaagaaagttcccaccgatgatcaccacaaatctggcgctgtcaacactagaaccccttggtgggatgggagtgtaatata

SEQ ID NO: 169583 - DNA, 376 bp, Arabidopsis thaliana nossen
gcatcttttacacatttgtatgaagaaaaggattcgtccagatctgcggtagagtttgtaagaccacgactgatcctgaaaggaatgaatggaaaaaatagcatgtcgtatcaagggagaattcagataacattttttttttgctttcctgatcggtacaatcttattttgatgtcgaaaaaaaaaaaaaaaaaaagaattccaatttgggtcaagtgaataaatataaatggatggataaaaaaaccagttttccttattccaggaaaaaaaaagaaacgagcttccattcgtaatttgaaaaattaccccaactaattaaatgttaaaaatagattagtgcctaatacgggtatgggaaggcatttttttcttg

SEQ ID NO: 169584 - DNA, 256 bp, Arabidopsis thaliana nossen
ctaatgaagaggaacatattatgacattaggaactcggaagatgtcatggagaaaactgaattgtccggaaaaccattatcctataggtgaaggggtatgcatcgatgaggttttgtattacattgctggacaagcaaagactgtgaagatagcttgctttgatgttagaaatgaaaattttagtttttttaagacagattctagtattatgaagttattggttccatcgtcgcctactaaactgataaattacaa

SEQ ID NO: 169585 - DNA, 255 bp, Arabidopsis thaliana nossen
accaaactcccatcactctcccatgctaataactccaccactcgacctgatcgttttctcctccataacctctcttcactcgacctcatctctgatccaaactcaaccatactttcattttctactactctcattcactcggcctcaccatctctctttctcacaagcactcgacttgaacgccatcatcaccaatccatcgccactcgaccccatcatcttctctcttcatatacttgacctcgccgcattact

SEQ ID NO: 169586 - DNA, 358 bp, Arabidopsis thaliana nossen
ctctgatcaaccctcctcctccgccgctgctacaaacactttaatatatattgccaccgtcctaccatatatatatagtccacttaagatctttccactcatttataacccaaatttgttctgtttcataaatatgtgtcttccatttcgacccgtctcgaaaacatattattcgtcttcttcttcgactatcgtgacgcgtatggtaaactgcatactactttttgtattcattttgttggtctacctcctcatctcggcctcaagacttcaatctaaaaactctattcatgcatacttctcatcttctgatcaagatcaatctcagagcccgacaaaaatcgagcacatcgtcttt

SEQ ID NO: 169587 - DNA, 371 bp, Arabidopsis thaliana nossen
gtaaatgaatcatccattagtggtacccccgtgaaccttgttttagcccatggaccgcttctgcaataaggcttcgagcctctcatagttaaagcttgtgttggcacttgcgttgtaatctgaagcacaaagtcaccaaccgctggatcagtgtaacttttccaagaagtcaagacctgcttctcgccagtggcgaggttatacatcagagctgagaaaggaagcatagtatcaccaagatggtcaaagctttgccaaagagttcttcccgaaaaattgtctatgacaataagatttccggtgtctgaaagctctgcacgagacccgttagaagcaagagtttcaccactggaccatgcaacgccatgttt

SEQ ID NO: 169588 - DNA, 370 bp, Arabidopsis thaliana nossen
aaaagttatggagtcataaagttttaaccaaaaaaaaaaaggttaaacataaaagagggatacaacacgaggacttcccgggaggtcacccatcctagtactactctcgcccaagaacgcttaactgcggagttctgatgggatctggtgcattagtgctggtatgatcgcatccgttagtatatgcaatgcaatcgtatatattcttttttgaagacttgatgaaccattcgccgtgggtcccacccgctatgtagggataccccatctagtcttaacgagctttgatgcatgaaaaaattcgaaaacaatgcttgaacaagtaattttgggtccgtaatatagcccaaatcacgaaaatgcccgaaaa

SEQ ID NO: 169589 - DNA, 368 bp, Arabidopsis thaliana nossen
gtgtcattgcccaatcgatggccgtgaaagttgttgtcgttcctcctaggaagaattccataaaatatgcacaaaatttcatgtttattaacattgtgactaatttaaatagagtgagtttctaattcaaaggatagtgttgttaacttgttatgcaaaggatgattagtcttaattaccaaaatgatgagcctgatgtcgcttctttcaagctcaaattcgtttgtcttctctagttgaatcttaacaatatatcaacaaaatcaaatgtctctttgttctcaccttcatctacatgttcttgcaccactctctctagaaactccacaaaagttttgcttacttcctccattttacgatccaagccc

SEQ ID NO: 169590 - DNA, 371 bp, Arabidopsis thaliana nossen
gcatcttttacacatttgtatgaagaaaaggattcgtccagatctgcggtagagtttgtaagaccacgactgatcctgaaaggaatgaatggaaaaaatagcatgtcgtatcaagggagaattcagataacattttttttttgctttcctgatcggtacaatcttattttgatgtcgaaaaaaaaaaaaaaaaaaagaattccaatttgggtcaagtgaataaatataaatggatggataaaaaaaccagttttccttattccaggaaaaaaaaagaaacgagcttccattcgtaatttgaaaaattaccccaactaattaaatgttaaaaatagattagtgcctaatacgggtatgggaaggcatttttt

SEQ ID NO: 169591 - DNA, 376 bp, Arabidopsis thaliana nossen
aaataatccaaatatcaaaaaaccaaaaacagaacctagaaaccacaccaaaaaaaaaaaagctatttcatcaaacaaacaaaactcacatcacaaatcagaaacaaacaaaaaagaaacgcagttctaaagaaaaaaattataaacaagaatcatcgaaaagaagaatcgaaatcatcaacatattttgtttctcttcttcttttatttttataaaatataaattagttctttgataaaatctgtagaagataaagaattcttctttagaaacaaagaaaaatgacggacccccacaccgcccggacgatcgtcggaatcgttggaaacgtgatttctttcggctagttctgcgctccaataccaacgatggtga

SEQ ID NO: 169592 - DNA, 363 bp, Arabidopsis thaliana nossen
cacaattcctctttcacaatctttctttcgattttttagcttaatcctgagtagcgttaacaatggctggtaaaggagaaggtccagcgattggtatcgatctcggtaccacttactcttgcgttggagtttggcaacacgaccgtgttgagatcattgctaatgatcaaggtaacagaaccacaccgtcttacgtcgccttcactgatagcgaacggttgattggtgacgccgcaaagaatcaggtcgccatgaacccgattaacactgttttcgatgcgaagaggttgattggtcgaagatttactgatagctctgttcaaagtgacatcaaattgtggcccttcacgctcaaatctggac

SEQ ID NO: 169593 - DNA, 365 bp, Arabidopsis thaliana nossen
gtcatattcatatgcatatcgtctttttatcaattacatattcaataattattgttttaggtcgtatattctctttttctattagtattatgtataccagtaatcttatttagtctttattttaaggcttacatgtcaactgatcgccatgactgaatattatcttcggatacctccaagatatcaaataatataatatttgaataatattaatatcataattctgatttttttgtatataaagcaaaaggatacaaatgtatatgcttttcatattttcatctatgtgatgtatattattgatttttcttaccaagataccaccggattaatttttatatcttattatttattactggtatcgg

SEQ ID NO: 169594 - DNA, 367 bp, Arabidopsis thaliana nossen
catgattgagaggtcaaccaaccttgactggtacaagggaccaactcttcttgaggctcttgaccagatcaacgagcccaagaggccatcagacaagccccttcgtcttccacttcaggatgtctacaagattggtggtattggaacggtgccagtgggacgtgttgagactggtatgatcaagcctggtatggttgttacctttgctcccacagggttgaccactgaggttaagtctgttgagatgcaccacgagtctcttcttgaggcacttcccggtgacaatgttggattcaatgtcaagaatgttgctgtcaaggatcttaagagaggatacgttgcctctaactccaaggatgatccagct

SEQ ID NO: 169595 - DNA, 367 bp, Arabidopsis thaliana nossen
gaaccattttgtctgatcctacaacaggctctttgatggctgatgctatgattttaccttgcggacacacttttggagctggagggatagaacaagttaaacagatgaaagcttgttgcacatgttcacaaccagtctcagaagactcgataaccccaaatctcactttacgagttgcggtacaagcattctgccgagaagagaattcacagtcaaaccatccatctaagagaaaacgagaaggatttgatcaagagagacgtgcatttggtgtcacgaatcattcaggtcgttcaagaaacaaaagtaaccatttcccatttgctgtggcagatcgagttataataaagggaaataagaggacacc

SEQ ID NO: 169596 - DNA, 224 bp, Arabidopsis thaliana nossen
cttcttccttcttcctcttttattataagaagagaaagaaaaaaacatcatcttttttttcttgaataacagagcgattgctcttatctcagttgattggccatggcttcttcagtcgtcttcgcggcaactgggtttctctccgttcctccattgaagtctcggagattctatgttaattcttcactcgactccgatgtttccgacatgagtgttaacgctcc

SEQ ID NO: 169597 - DNA, 373 bp, Arabidopsis thaliana nossen
gatgctttagggatagcgcagcaccatgatgctgtcactggaactgccaagcagcatgtaacaaatgattacatgaaacgccttgctcttggtgcttctgaggtaagatactatatatgaaaacttttttcttttttgtcttttttcttatatcagtaatcatctaattattccgtaggcagaagctgtggtgaattctgcgctggcatgcctaatgaacaaagcaccaaaaggtggctgcacaaagcctgcaatagcattcagccaggttaaatctccaagaaactcattttggatttcattttttttacagaaatgtgattgaagaatccctttcatggtgatgactagtgtgggagttatttctttcctc

SEQ ID NO: 169598 - DNA, 358 bp, Arabidopsis thaliana nossen
tcttcatcttcaaagactgcgccttttagctcagtgaaaaaggttcgagcttcggaaactatggcagcattccctaaccttaactctgatgctggattgaagaagctcgacgagcatcttctcactcgcagttacattactggataccaggcttcaaaggatgatatcaccgtctttgcagctcttgcaaagcccccaacttcacagtatgtgaacgcttctcgttggtacaatcacattgatgccctcttgaggatctctggtgtctctgctgaaagaagcggtgtcattgttgagggatcagctcctatcactgaggaggcttgtgctactccccctgcaactgattctaatgatg

SEQ ID NO: 169599 - DNA, 365 bp, Arabidopsis thaliana nossen
  unsure (1)..(365): unsure at all n locations
caaaaacaatgcatctgttaatcaaacaaaacagaaaccaatgcaaagaccatcaaacaagaaaataactgctaggaaaatatctcctctgtacctagtcgcttgaggatgtcagtgaaagtggcctgtcagaaaatgataaagcatttgttagatatctatcttatgtgctcaattactgtaatttaattacacagatgttcatggttcaaatcctcaccgtgttgaagtccacccctttcaagatatcaataattgcagttttcaattcttcatcgctaggctccttgtttttgtctttcccttttccgcctctctttcctattactaaaacanngataacaaacacagggtaaacatagtgt

SEQ ID NO: 169600 - DNA, 287 bp, Arabidopsis thaliana nossen
ctccaccgaattcagaagatcgaagaagatgagtagaggaagcggcgctggttatgatcgtcacatcactatcttctcaccggaaggtcgtctctttcaagttgaatatgccttcaaggccgtgaaaacagctggtattacttcaatcggagttcgtgggaaagattcggtttgcgtcggtacccaaaaaaaagttcctgacaagcttttggatcaatctaatgttacacatctgttccctatcaccaaattcattggattggtagctactggcattacaactgatg

SEQ ID NO: 169601 - DNA, 366 bp, Arabidopsis thaliana nossen
gtctggttttactttttttctttcttcaaaatcattcattctttaacatcaagcaagaatcaaattctgggcatactcaaattcttcatctttttaatatatatttttgccaagaacaagtcttttactttatctctgcagtttttgtttgctcctttgtgcatttggtgatgattcaatcaatgattgtctcttacctttgatctaatcgtttccgcaaaattctcttctcgttttctctgatttcaagctcaacaatctcaaaataatcaatttttggtagtgtgttaaatctgagaagggtttttgggttttgggtataaagcttgttactttgatctttatttggtgaattcgaagtggaaa

SEQ ID NO: 169602 - DNA, 366 bp, Arabidopsis thaliana nossen
aaaagtttctctctgtactttttcacgtagttaagtttaaccttcctggtgcaatcttcggcaccggtgccgccgtcaacaggtcctcccaaagcgacagaaaaaagctcacggagccagagaagctctacaaaaaaggagaagaagaaactccaagctatgacgtagcacattaatgttcttgctggactacattccagagaaacaagaacaaaagatctcctaagaaatgttccggtagacaaacttgctgaaaagggaggaggaaagaataattattaagttttataagataaattattttaaaaatatttttattttacttttaagaaactcacttaaaaggaattagacaataaaaactgt

SEQ ID NO: 169603 - DNA, 282 bp, Arabidopsis thaliana nossen
gtttcattgaaaatttcaagaaccctagttaataacgataatgggttcgagagttttggcttccttctttgttttcttaatcttcacggtgatcacattgcctcccacgatccaagcttgcactccttgtactcgtgctcatacttcggttccgaaaccttcacaacacagcggtggtggaggtggtggtagcaagccgcctccacatcacggtggaaaaggtggtggtaaacccccaccccacggtggaaaaggtggaggaccggcgcatcattgttgaag

SEQ ID NO: 169604 - DNA, 273 bp, Arabidopsis thaliana nossen
cattatttatatgattccgtatgccaaccattaaacaacttattagaaatacaagacagccaatccgaaacgtcacgaaatccccagcgcttcggggatgccctcagcgacgaggaacatgtactcgggtgtatactatcacccccaaaaaaccaaactctgctttacgtaaaggtgccagagtacgattaacctcgggatttgaaatcactgcttatatacctggtattggccataatttacaagaacattctgtagtcttaataagaaggg

SEQ ID NO: 169605 - DNA, 374 bp, Arabidopsis thaliana nossen
aaaaaaaacaaaaaaagagggatgcaacacgaggacttcccgggaggtcacccatcctagtactactctcgcccaagcacgcttaactgcggagttcttatgggatccggtgcattagtgctggtatgatcgcatccgttagtatatgcaatgcaatcgtatatattctttttttaagtcttgatgaaccgttcgccgtgggtcccacccgccatgtagggataccccatctagtcttaacgagctttgatgcatgaaaaatattcgaaaacaatgcttgaaagagtaattttgggtccgtaatatagcacaaatcacgaaaatgcccgaaaaagtacttaaaggtcaaaatttggagtcgacaaaaagtcaat

SEQ ID NO: 169606 - DNA, 317 bp, Arabidopsis thaliana nossen
gcgaagacacacagagtctaagaggtatatccgcgcgcaggactacctctggaggtcgtgggatgcaagcactactgtgggcggaagcacgcttaactgcggagtccgtatgggatccggtgcatgagtgcgggtatgatcgcatccgagcgtatatgcaacgcaatcgtatatattcttcgtgtaagtgttgatgaaccgatcgccgtgtgtgccacccgacatgtagggataccccatctagtcttagcgagctctgatgcatgaaatatgttcgaagacaatgcttgaaagactaattgagagtccgttttata

SEQ ID NO: 169607 - DNA, 298 bp, Arabidopsis thaliana nossen
ctctcttctctctcacccaatttcacaaacccgaaaccctaattttctcgggacactgaaatttttacagcttctttcctcttcttcaccggggagatttgtcggtactaaatctagggtttttgggtatcaccggagggttgaagagagagaaaaaaactcacaatggaatcagatcagggaaagctatttatcggcgggatttcatgggataccgacgagaatcttctgagagagtacttcagcaatttcagcgaggttttgcatgtcactgttatgctagagaaagctacacagt

SEQ ID NO: 169608 - DNA, 367 bp, Arabidopsis thaliana nossen
ctcttctttagtaagaagttaatgattgtggattctcaacatagtgttggatcaatcgtgatgtgtgaaatttggaagttccaaagtaaaaacaggtagagctaattcgactagaattgtcaaattgcatccaaagaaaagtacgcattagaattacaaataaaaactattattcaatgttattaaatggataaagaaaattctcacaaacgttcaattttgttcttacaaaacggtttaatgcgttatcaaatcatacataacggtttcaataatttggtattaaatacatccaaccgcaatttgactgtcgatataacgtttgttgaccaaaggaaaaataggtagaaatttggtaagactagac

SEQ ID NO: 169609 - DNA, 367 bp, Arabidopsis thaliana nossen
gtgattgccaatggtaagtaacaatgtacacaaataatgacaacaatttttgtaaagaaacagctctcttatgaatcagagagaagaatttggaggaaaggaaagacgaagaaagcctaataattcaaccaaaattattgtgaatagttatttagtaatactctctaagcacctgctaatgcgctgaagctgccacctctcctctgttttagaatatgtaagaggaatgaaaaggagtgttggtggcagtacctcaatatcaggcatggggagatggatgcagctgcatttctgtaaagttattgtttcctagaggagtaaataattgatttagaggtctttcttctcagacaaagctggagtttta

SEQ ID NO: 169610 - DNA, 361 bp, Arabidopsis thaliana nossen
gtcagcttggtggggagggttcaaaggctcagaagtggaaacttattatccgaaatcttcctttccaggctaaacctagtgatattaaagtggtcttttcagcagtagggtttggctgggatgtttttattcctaaaaattttgaaactgggctacctaagggttttgcatttgtcaaattcacgtgtaagaaagatgcagcaaatgcaattaaaaagttcaatgggcacatgtttggtaaaaggcctatagctgtagactgggcggtacctaaaaatatttacaatggtgctgctgatgccactactgcttcagcagatggtgacaaagaaggaagtgatggggacagtgaaaacagtag

SEQ ID NO: 169611 - DNA, 355 bp, Arabidopsis thaliana nossen
gagagacacaacacaccatctcaatcatgacttcttcgtttctctcctccactgctttcttcctcctcctttgtctaggattctgccacgtgtcctcttcctcctccgaccaaggaacttacatcgttcacatggctaaatctcagatgccgtcgtctttcgacctccactctaactggtacgattcatctctcagatctatctccgactcagccgaattgctctacacttacgagaacgcgattcatggattctcaacacggctaactcaagaagaagccgactcgctcatgactcaacctggtgttatctccgttttaccggagcaccgttacgagctacacaccactcgtac

SEQ ID NO: 169612 - DNA, 327 bp, Arabidopsis thaliana nossen
tttcgatttcaaatctcagatctagctcaacaatggcgttgctcgtcgagaagacctcaagtggccgtgaatacaaggtcaaagacatgtctcaagccgatttcggtcgtctcgaactcgagctcgccgaagttgagatgcctggactcatggcttgtcgtaccgaattcggaccttctcagccattcaaaggcgctagaatcaccggatctcttcacatgacgatccaaaccgccgtactcatcgaaaccctaactgctctcggtgctgaagtcagatggtgttcctgcaacatcttctccactcaagaccacgccgccgcagcca

SEQ ID NO: 169613 - DNA, 201 bp, Arabidopsis thaliana nossen
caatttgaaagatcatttaacgtagttgaaataacggaattttttgttgttcgatcaagtatgggaaacttaatggaattcataattgtttcaatggttttttttaccttttttttttttattattggatcaagtattcggtgaacgaactaagaccattccaatgctccttttctccctgccttaacttaacccagaatt

SEQ ID NO: 169614 - DNA, 161 bp, Arabidopsis thaliana nossen
agctaatcttctttttatcattctatttctaaacaaataactccttttactctaaaagcacaaatagcttttaattagcaaccaaaactttttgctcatataaaaatatattatttatccacttttgcttaattttacaagttgtctcactatagtttcac

SEQ ID NO: 169615 - DNA, 195 bp, Arabidopsis thaliana nossen
gtttcagtttcaagaactatgattccaaaaatatgtttggttttattctttcacatatgcactaattaaaaaccaacacagagcctaagaagagaggaaaacagagcatgaatgattgagaagaaataatatttagaagcaacgtcatttgcattcaaaaataagcaaatataaaatccatttaatcatatgtaa

SEQ ID NO: 169616 - DNA, 362 bp, Arabidopsis thaliana nossen
agaaacccaaaccctcattccaaaaaatggggtctcgctctcaaaacctgtcctttatcgtcctcctcctccttggcttcgttgccgtctcctatgcttgcgactgtacccctcctaaaccatcaccagcacctcacaaaccaccaaaacatccagtcaaaccgcctaaacctcctgccgtcaaaccacctaaaccaccggcagtaaaaccacctactccaaaacctcccaccgtgaaaccccatcctaaaccaccaaccgtcaaaccccatcctaaaccaccaaccgtcaaaccccaccctaagccacccaccgtcaaaccaccccaccctaaaccacccaccaaaactgaccctcaccca

SEQ ID NO: 169617 - DNA, 306 bp, Arabidopsis thaliana nossen
ctcatatacaaatggtgaacgacaacggagaaagagtgttcgaccaagagatctccagcggacagttactagtcgtgccacaaggcttttcggtcatgaaacatgccataggcgaacaggtcgagtggatcgaattcaagacaaacgaaaacgcacaggtcaacacactcgcgggccgtacctcagtcatgagaagtttgccgcttgaggttataaccaatgggtaccagatctcttccgaagaagctaaacgagtaaagtttagcacgattgagaccacactgacccatagcagtccaatgagct

SEQ ID NO: 169618 - DNA, 369 bp, Arabidopsis thaliana nossen
cactaagaagaagcagagaaaatgagaaaccttagcttcatcgtcttatttctattgaccctcttcttcattcatcatttggttgatgcttctttgctagtgaagtctcttcctggttttgaaggtcctcttccttttgagctcgagactggatatgtgagtattggtgaatctggagatgttgagctcttttactactttgtgaaatcagagaggaatccagaaaatgatcctctcatgatttggctcactggtggacctggctgcagctccatctgtggattgctcttcgcaaacggtcctttagcttttaaaggggatgagtataatgggacagtacctcctctagagttgacatctttttcatgg

SEQ ID NO: 169619 - DNA, 360 bp, Arabidopsis thaliana nossen
agaaaattcagcatttttgatagctcaatcacttgattctttccaaaggggtttcctgagatcacaaaggccaagtaataatggcgaaaggagttgcagttttgaacagcagtgagggtgttacggggactatctttttcacccaagaaggcgatggtgtgaccactgtgagtggaacagtttctggccttaagcctggtcttcatggtttccatgtccatgctcttggtgacaccactaacggttgcatgtctactggtccacatttcaaccccgatggtaaaacacacggtgcccctgaggatgctaatcgacatgctggtgatctaggaaacatcactgttggagatgatggaactg

SEQ ID NO: 169620 - DNA, 263 bp, Arabidopsis thaliana nossen
acgcaatcttcgctcttctatttgctctctatctgtcaacgcggatcagagccgagtgtggtagattcaggctccctgaaaaaagccctggactttcggttaccaactttgctccaggatgtgcgggatctgtccataaggcccacaattgggatcacgttacctctgccaggaactcaatgtattaccttaaggacaagatgagtggtttacatgctaatacgatgttcatgagagctaacatgccaatggtctctaagaga

SEQ ID NO: 169621 - DNA, 358 bp, Arabidopsis thaliana nossen
  unsure (1)..(358): unsure at all n locations
aaggaaaactgaaaaaccatagtgaagtatagtccttgatgcatggattcaatcaacaagatcatcaacttcttgtttcctctcttaaccttgtatgcacttcttgtcttctacccaacttaccagaggctcaaatccgccgtctccatctgccggaatctgttctcggaaaatgtccccggaaaagttggtgtcatcaccggagcagcttctggcatcggcgaagctttagcgtatgagtacgggaagaggggagcgtatttagcacttgttgacataagaggaagacctctcttncatgtagcggctctcgctgagctctatggctcccctgaagtcttgcccttagtagccgatg

SEQ ID NO: 169622 - DNA, 360 bp, Arabidopsis thaliana nossen
aattgttcttctctcttcttcttcttcttcttcttcttcttcttcttcttcgccgcttcttctctctcgaattcaccccatctcaagtgtacgttagcctcctccctctaatggcgactcgtcttcagtttgagaacaactgcgaagttggtgtcttttccaaactcactaatgcctattgcttagtcgctataggaggctctgagaacttttacagtgcttttgagtcggagttagcagatgttatccctattgttaagacctctattggaggaacacgaattattgggcgtctttgtgctggaaacaagaatgggcttcttgtacctcatacaacaactgaccaagagcttcaacact

SEQ ID NO: 169623 - DNA, 369 bp, Arabidopsis thaliana nossen
gtgataatcctaaaccgctgctacattgtatcttttatagctaaatcgtttatataagaactgcatagtaaaaatagttgttaaacgtaccacttaccatcacaaaaaattaatttttaaggtttttaaagtgacaacaattattagaaatatgtgggcaaaataggtcaaacatgcggctaaatcgtttatgtagcaatatttgttttgaatagagtttacatatagcaatattgtatagtaaaaacagatgttaccatcacaacagttgaaaagtttagattataagaggttaactaacaataatgattagaaatatgcggctaaatgggtcaaacatgcgactatagaagccaaaaacaacccatg

SEQ ID NO: 169624 - DNA, 368 bp, Arabidopsis thaliana nossen
cttccagatcataattgctctagtgaataactaaagaaaatagatgaatagatggaagatagaagagaaagaaaaaaaaaattctaagtatctatcatcggttcactaattacttgagtgactgttggcgggtttctttgtatgtgttgtccggaaagaggaggactcaatgattattcgttcgccggaaccagaagtcaaaattttggtagatagggatcccataaaaacttctttcgaggaatgggctaaacccggtcatttctcaagaacaatagctaagggacctgatactaccacttggatctggaacctacatgctgatgctcacgattttgatagtcataccagtgatttggaggaaatct

SEQ ID NO: 169625 - DNA, 366 bp, Arabidopsis thaliana nossen
cggacgcgtgggttcagggctttctacttggttaccgtccaccacatcttcttttgggagtagccaatgcttggcctcattctcattaaaagcggtggcgacttccaaccgggctggggaggtgctaagccaccctgttaccaccaggaccatgcggtggtcccatttccttgattccagaattgaccgggccttctggtaactggtaaagttggatggtcctgctaattgccatcctcgcaccaggccttgaaaccccaccatcaattagcttcttcgggttcaatgacctgtgccagtattgacaggtggtgattggtgtaggaaggataactcctgcagtataagctgcttgccatatgttct

SEQ ID NO: 169626 - DNA, 352 bp, Arabidopsis thaliana nossen
cgagcttgtgttagagtgttctgcctagagacatgctttagaaaatactttgcagatgctaaacccgctgttgaaaacatcggtgtccaccatcccctgcgagaattgaaaagcttaggagacaaagcttgcatgccaatccttaatgcagaaaaattcaaagcttttaccttttcttactaagatttgattttgtatctctgttagcaatgagaatctgcagaaagtttcattaattaaacaaactcgaaaagacgaaaaactcaagtatctatgcttctacatgtatatattatgtaccataatcagatttaaaagtcctgattctttatcaacgaaagaaaaatctcca

SEQ ID NO: 169627 - DNA, 366 bp, Arabidopsis thaliana nossen
cttcttcttcttcctctctccttctccggccactttcctcactctctggtctccctatatcagcgctttttagctgatcctctctccggcatttctctctctctcttttttttagccatggagaaatttgcgcctgtcgctgctctgttactgcttcttctctgttttccggtagctttctccggtcatgattatggtcaagctctttccaagagtcttctcttcttcgaagctcagagatctggtgttcttcctcgtaaccagagagtcacttggcgctctcactccggtctcaccgatggcaaatcaagcggcgtgaatctggtcggaggttactacgacgccggagacaatgtgaaatttgga

SEQ ID NO: 169628 - DNA, 342 bp, Arabidopsis thaliana nossen
gtaatttgaaaaatgaacaagggtttttgtaaggaaaacttgtatatagtagacgtttactatatagaaactagttgaactaacttcgtgcaattgcataataatggtgtgaaatagagggtgcaagaactcaataaacatttcgacgtaccaagagttcgaaacaataagcaaaatatatttttttgcttcagactaatttgtacaatgaatggttaataaaccattgaagcttctattaattcaaatcatgggatgggaggaaaaagcaatcgaagtgcatagataaaggataagatgaaagctagtccaatgaaagttggagcaaatggacaaaagaat

SEQ ID NO: 169629 - DNA, 364 bp, Arabidopsis thaliana nossen
cggacgcgtgggcggacgcgtgggctccctccctctttctccgatctcagatccattcaacaatctccaaagaagatggaaccagtctcttcatggggtaacacctctctcgtctccgtagatccagagatccacgacctaatcgagaaggagaaacgtcggcaatgtcgaggaatcgaacttatcgcttccgagaatttcacttccttcgccgtcatcgaagctctcggaagtgccttaaccaacaaatactccgaaggtattcctggtaatcgttattacggaggtaacgaattcatcgatgagatcgagaatctttgccgttcaagagctctcgaagctttccattgtgatccagcagcgt

SEQ ID NO: 169630 - DNA, 369 bp, Arabidopsis thaliana nossen
cggacgcgtgggcgagatacttcatattcaaatcggatctgtatcgtcgacgagtaatcataacaatacccaaatcggaccgatttagggcaaacgagttatattcaagttaaacgaatcaaaccaaacccggattttagatcggcgtaatccaaaaagcaaagatttcacacgcggatcgtacatatatcaaacacaacccagcaaaaaaatcaaatcgattcaaagaaatcaaaacaacgagatcaacgataacccagattaattcaaatcgattcatagaattaagaacgacgatatcaacgataaacccattaaaagacgcgaagaacaaacctctgacttgttcaggtacgtttgctctcgtcg

SEQ ID NO: 169631 - DNA, 370 bp, Arabidopsis thaliana nossen
cggacgcgtgggggaaagaggaggagaaagcggcgcagagcgtggcggtgaccgtggtgacttcggacgtggattcggcggtggacgtggaggtggccgtggccgtgatcgtggtccaagaggccgtggaagacgtggaggccgtgcctcggaagaaacgaaatgggttccagtgaccaaactaggtcgtctagtggctgacaataaaataacgaagctagagcagatctatctccattctcttccagtaaaggagtaccaaatcatagatcatcttgttggtcctacgttgaaagacgaggttatgaagatcatgccagttcagaaacaaaccagagctggtcaaaggactagattcaaggcctttgtt

SEQ ID NO: 169632 - DNA, 365 bp, Arabidopsis thaliana nossen
cttggtactttattgacgatctcacaaagatgcaatctcagtgaattttaatttacttattcatcttttacagaatcgattccctacgagaatatctggagttcagtatgtctggaagcacaggagaacgttcttttgctgatattattaccagtattcgatactgggtcattcatagcattactataccttccctattcattgcgggctggttattcgtcagcaccggtttagcttacgatgtgttcgggagccctcgtccaaacgagtattttacagagagccgacaaggcattccattaataacaggccgttttgattctttggaacaactcgatgaatttagtagatctttttaggaggac

SEQ ID NO: 169633 - DNA, 370 bp, Arabidopsis thaliana nossen
  unsure (1)..(370): unsure at all n locations
cttgctactttattgacgttctcacaaagatgcaatctcacngaggggggatttacttatttatgttggacagaatcgattccctacgagaatatctggagttcagtatgtctggaagcacaggagaacgttcttttgctgatattattaccagtattcgatactgggtcattcatagcattactataccttccctattcattgcgggctggttattcgtcagcaccggtttagcttacgatgtgttcgggagccctcgtccaaacgagtattttacagagagccgacaaggcattccattaataacaggccgttttgattctttggaacaactcgatgaatttagtagatctttttaggaggacccaat

SEQ ID NO: 169634 - DNA, 341 bp, Arabidopsis thaliana nossen
ggcggcgcaactccgaactgagtcccgacgagctcaacacgagcttgcatctgagtgacatcaccagcagtctgaatagctgatttcaaatccgacgaaggataaccagcgaaaacggtaccgttttcgacgctcaccggtaagctcgagccgtctgagagtacagcgtttgaagcagagacgaggatctctcggtgtgcgaatttgacgaagacacgccatgatttgagctcgtcgcggccgtggttgagcactgttatcacagattcgaaccggtagggttgatttgcggtgtcgttgggtgggatcttagatcctttagtgtgagtgtatgaaacgaa

SEQ ID NO: 169635 - DNA, 362 bp, Arabidopsis thaliana nossen
cgcaatggaacgtaaacgcaaacgcggcactctacgtgacaaacggaaaggctcatatacaaatggtgaacgacaacggagaaagagtgttcgaccaagagatctccagcggacagttactagtcgtgccacaaggcttttcggtcatgaaacatgccataggcgaacagttcgagtggatcgaattcaagacaaacgaaaacgcacaggtcaacacactcgcgggccgtacctcagtcatgagaggtttgccgcttgaggttataaccaatgggtaccagatctctcccgaagaagctaaacgagtaaagtttagcacgattgagaccacactgacccatagcagtccaatgagctacgga

SEQ ID NO: 169636 - DNA, 335 bp, Arabidopsis thaliana nossen
ggtttatgctacattgaagcaaagatggttacgagcagcgatcaaatccaaaatggttctgaagagcaatcaaaaagatcagagatttacacatacgaagcaccatggcagatctacgcaatgaactggcgcattcgtcgagacaagaagtatcggctcgcaatcacaagcctcatcgagcaatatccgaatcgcgtcgaaattgttcagcttgatgaatcaaatggtgagattcgttcagatccaaatctctgcttcgaacattcttacccaccaacgaaaaccagtttcatacccgataaagaatgtcaaagacccgatcttttagctacttc

SEQ ID NO: 169637 - DNA, 360 bp, Arabidopsis thaliana nossen
gaagaaggagaaacaacaacaacgatcggcgttgttccggcggcgccggcgaaattaccgactccgatatattctctgagcttttgggaggtcacggcagcttccggcgtcgttttagggtttattttgggtcttgtttgcgtttatctcacaatgcctcaatctgattacagctttctcaagctacctcgtaatctcgaagatcttcagattcttagagataatcttgagatatacacaagtgattacacagttcaagttcttgttggatattgtctggtgtacgtttttatgcagacgttcatgattcctggaactgtgttcatgtctttgcttgctggtgctctctttggagttgtc

SEQ ID NO: 169638 - DNA, 367 bp, Arabidopsis thaliana nossen
cggacgcgtgggtgcaagtggcagattgtggtctcaattgttacgttttaaacaagaggggttcttacttggtgctggaagtccatcaggatctgatgttcatgtatcttccagtggcattgtgcaagggcatgcttactccgtcttacaggtgagagaggttgatgggcacagacttgttcagattcgaaatccatgggctaatgaagttgagtggaatggtccctggtcagactcatccccagagtggactgataggatgaagcacaagctgaagcatgttccacagtcaaaagaaggtatattctggatgtcttggcaagatttccagattcatttcagatcaatatatgtgtgtcgggtttac

SEQ ID NO: 169639 - DNA, 369 bp, Arabidopsis thaliana nossen
  unsure (1)..(369): unsure at all n locations
ttcctttactcactctctctctctctctctaaaaacagagctcaacaataatgatccactaaaaaagagtctcttttctcttcttctccggtgatttacttacttaacaatcatggcgtcgtcggagggattagcaagcgttgatccttggtcattccgtcaaaacttcaacatcgattcgtggctactctctgattccttctcacacgacagtgatatactcgctaaagctcttcacagatccatctccacttccaccgaatcatctcctctttctccttcatctttcttcgactcttcaaccgccgccgtcgatttttctcctcctcaaactctctccaacgtctctttncgctcagatccagaaat

SEQ ID NO: 169640 - DNA, 370 bp, Arabidopsis thaliana nossen
tatctgtctctagtatagtggtataataatagatcccaaatattgtcaacaagaaatatttcaatcaggaaaaaacaaatctacacaattaccttgataatctgatccatcatcaactatattctaaagtcattgtataacagttactgcattctagtaatttcatttacctgtccatccgcaccagcagaaaagactcgattatggctgggggctgctgcaagagtattgacatcacctttgtgattagagtgtgcttccaaaagggttccatgctcactatcccaaaactggacagttcctgtactatctccactcacaagaactgaacacctagagtaagcatgtagatactcagcaagagaaaaac

SEQ ID NO: 169641 - DNA, 355 bp, Arabidopsis thaliana nossen
  unsure (1)..(355): unsure at all n locations
gtcgctttcaatactccggtgtggtttgtcccgagtttcgtcgtggtggtgattgtagccgtggagatgattgtgagtttgctcatggagtcttcgagtgttggctccatcctattcgttaccgtactgaagcttgtaaagacggtaaacactgtaaaaggaaagtctgtttctttgctcattcgccacgtcagcttaaggttcttcctccggagaacgtttccggtgtctcagcgtcgccttctcctgcggcgaagaatccatgttgcttgttttgtagcagctctcccacgagcactnctttgggtaatttgtctcatctttctcgatctccgtctctgtctccacctatgtc

SEQ ID NO: 169642 - DNA, 366 bp, Arabidopsis thaliana nossen
aaaagagaacattcgccaaaccaaccaacaaccgtttgggtgagcttgacgagaacgacgtcgcacccgccattttctccatccttgaagcaacaccttcttcacttcagatctcttcttcttcttcttcttcttcttcttctttgctcgcaccttccgtgctattgtatttctagggtttcggatcctgtgccttaccttagatccgacggtggagtagaaatcactctccctgtctcttcccttcttttttgtttccagtttttgattgaagatcccttcgtggatccactataatggcggattctcagccaatcacgcctggtcaggtttcgtttctactcggagtcattcctgtcttcatag

SEQ ID NO: 169643 - DNA, 332 bp, Arabidopsis thaliana nossen
agacgatcaatataatctagaaaaaaaaagagaagagagaagagagaaatgtcgagagctttgtcagtcgtttgtgtcttgctcgccatatccttcgtctgtgcacgtgctcgtcaggtgccgggagagtctgatgagggaaagacgacgggacatgacgatacaacaacaatgcccatgcatgcaaaagcagctgatcagttaccaccaaagagcgtcggcgacaaaaaatgcatcggaggagttgctggagtcggtggattcgccggagttggtggtgttgcccgcgttggaagtctaaggatgccactcatcggtggtcttggcgggat

SEQ ID NO: 169644 - DNA, 378 bp, Arabidopsis thaliana nossen
caaaaaacctcaaaataaaaaaatgagaactctcttaccttcccatactccggcaacggtaacaacggcggcgagaagaagacacgtcatacattgcgccggtaagagatctgactctttctccattaattccagtagctccgattggcaaagctcctgcgccattctctcaagcaaagttaactcacaagaacaatctgaatccttatcttccaattccaatggatcatcatcctaccacgtttccgccgtcaacggtcacaacaacggcgccggagtctcagatttgaatctagttccattcaacaacaaccaatcgattcaatcgaagaagcctttaagtatttcagatctatctccagctccgatgcatggatc

SEQ ID NO: 169645 - DNA, 397 bp, Arabidopsis thaliana nossen
ccggggggacccacgcgtccgcaaaaaacctttaattaaaaatttgttaactctcttaccttcccatacggcgggaacggtaacaacttttgcgagaagaaaacacgtcatacattgcgccggtaagagatctgactctttctccattaattccagtagctccgattggcaaagctcctgcgccattctctcaagcaaagttaactcacaagaacaatctgaatccttatcttccaattccaatggatcatcatcctaccacgtttccgccgtcaacggtcacaacaacggcgccggagtctcagatttgaatctagttccattcaacaacaaccaatcgattcaatcgaagaagcctttaagtatttcagatctatctccagctccgatgcatgga

SEQ ID NO: 169646 - DNA, 364 bp, Arabidopsis thaliana nossen
cctcatttgattacttgtttctttgatttctccttccgcagaaccgaattgttttcagtctgagatttctcctgccgagagaacgattttaatctattttcctcgagagtagaaaatggctgatggtgaagatattcaaccccttgtctgtgacaatggaactggaatggttaaggctggttttgctggggatgatgcaccgagggctgtgtttccaagtattgttggccgtcctcgccacactggagtgatggttggaatgggacagaaggatgcatatgttggcgatgaagctcaatccaagcgtggtattcttacccttaaataccctattgagcacggtattgtcaacaattgggatgat

SEQ ID NO: 169647 - DNA, 365 bp, Arabidopsis thaliana nossen
cggacgcgtgggtgttgttcttggtgttgcaatggcttcactaactgagctatcattcaactggctcggtttcatcagtgctatgatatcaaacatttctttcacttaccgaagcatcttctccaagaaagccatgactgatatggacagtacaaatgtctacgcttacatctacatcatcgcactcttcgtctgcattcctcctgccatcatcgttgaaggtcctaaactacttaaccatggtttcgccgacgcgattgctaaagttggaatgactaaattcatctctgatctcttctgggttggaatgttttaccatctctacaatcagctggctaccaataccttggagagggttgcaccgc

SEQ ID NO: 169648 - DNA, 372 bp, Arabidopsis thaliana nossen
ctttgcttttatagttctctttattctctcaaaaagcctctctttctctctcttttgtttctcgctaccatggctaagtcttgctatttcagaccagctcttcttcttctgttagttcttttggttcatgccgagtcacgcggtcggttcgagccaaagattcttatgccgacagaggaagctaacccggctgaccaagacgaagatggtgtcggtacaagatgggcggttctcgtcgctggttcttctggatatggaaactacagacaccaggctgacgtgtgtcacgcatatcaaatactaagaaaaggaggtttaaaggaagagaacactagtcgtttgatgtatgatgatatcgcaaaccacccactt

SEQ ID NO: 169649 - DNA, 279 bp, Arabidopsis thaliana nossen
attaagagaaaacacttgcaaaactaagtgctatctctcttcttcttccttctcctaacaacttatataccatgagtctcttcaacactgaaaacacatgggcctttgtctttggcttgctcggcaaccttatctcctttgccgtgttcctatctcctgtgccaacgttctataggatttggaagaagaagacaacagaagggtttcagtctattccttatgttggggcgctcttcagtgcgacgctttggctttactatgcgacacagaagaaagatg

SEQ ID NO: 169650 - DNA, 229 bp, Arabidopsis thaliana nossen
ctcgtaacagatggtcctccatctactgctttgggattcaacccccctggcaaggatattatttataagcctgctcgcaggagcgatgtctctattatcactgcgtggattctgtctcgctatatggcgatatgttcgtatgcgggagtctctaccgtgggagtatttattatatggttcacacacagcagctttcttggcgttgaccggctcctagtcatgttcaggc

SEQ ID NO: 169651 - DNA, 369 bp, Arabidopsis thaliana nossen
ttctttttatcgagaaatcgaggaagctatacaaggtttttctcaagcctgttcatatgatacctaataatatgctattaaaaaaaaggaattctaggacacccgtgtgaattcggacctctccgattcaaatcggaccatagttcctgacctaaaattctacgcaaatcaagatcgagaaaaggaagttttgcaatcattgactcaaactcattgtcgaatcccattcagcagaatatggaggtacttatggcggaacgggccaatctggtatttcacaataaagtgatagatggaactgctattaaacgacttattagccgattaatagatcacttcgggatggcatatacatcacacatcctagat

SEQ ID NO: 169652 - DNA, 388 bp, Arabidopsis thaliana nossen
cgggggggaccaacccgtccgttctttttatctagaaatcgatgaagctatacaaggtttttctcaagccggtgcatatgatacctaatggtatgctattaaaaaaaaggaattctaggacacccgtgtgaattcggacctctccgattcaaatcggaccatagttcctgacctaaaattctacgcaaatcaagatcgagaaaaggaagttttgcaatcattgactcaaactcattgtcgaatcccattcagcagaatatggaggtacttatggcggaacgggccaatctggtatttcacaataaagtgatagatggaactgctattaaacgacttattagccgattaatagatcacttcgggatggcatatacatcacacatcctag

SEQ ID NO: 169653 - DNA, 375 bp, Arabidopsis thaliana nossen
cggacgcgtgggcggacgcgtgggtttttttaggtatcgtgtaatggctttgactacaaaacctcaccatcttcagagatctttcctctctccgtcgcgtgtttccggcgaacgatatttggaatctgcgccatcatgtctgagattccgtcgcagcggtgtccaatgctcggtggtggctaaggagtgcagagtgaaaggagtgaaagcgagacagattattgatagtagagggaatccgacggtggaggttgatctgattaccgatgatctgtatcgttcggctgttccaagtggtgcatctaccgggatctacgaagcgcttgagcttagagatggagacaagagcgtctatggtggtaaaggtgtattaca

SEQ ID NO: 169654 - DNA, 363 bp, Arabidopsis thaliana nossen
accaaatcaaaccaatttctcctgatagccaaagtttttgtccccaacaagaaactcatgcaacattcttcacccactagctaactaacgacttccattcttattaatctctctcaattcttcatttctgagattcatcgctctctcttctctttgtcacaatgaatttcaattcttcttacaatctcactttcaatgacgttttcttctcttcttcttcctccggtgaccctatggtttcacggaggctgtttctcttgagagatgttcagattcttgagctccttattgccattttcgtctttgtcgcaatacatgccttgcgtcagaagaaataccaaggtcttcccgtgtggccgtttc

SEQ ID NO: 169655 - DNA, 347 bp, Arabidopsis thaliana nossen
  unsure (1)..(347): unsure at all n locations
ataaaccaatttttttgatagccaaagtttttgtccccagcgggaaactcatgcttcatggttcacccactanctaactaacgacttccattcttattaatctctctcaattcttcatttctgagattcatcgctctctcttctctttgtcacaatgaatttcaattcttcttacaatctcactttcaatgacgttttcttctcttcttcttcctccggtgaccctatggtttcacggaggctgtttctcttgagagatgttcagattcttgagctccttattgccattttcgtctttgtcgcaatacatgccttgcgtcagaagaaataccaaggtcttcccgtgt

SEQ ID NO: 169656 - DNA, 361 bp, Arabidopsis thaliana nossen
tcgaaaaatgtggaaaatcaaccaacggatagtcaaagtgttggtggaactcatgcgcaatcatgacaggcctgagtcactggtgattctcgcaagtgcatcagatcttcttctgcgggcaactgatggaatgcttgttgatggagaagcttgtacattacctcaacttgagctacttgaagccacggcaagagcaatacagccggtgctagcttgggggccatctggactagcagtggtcgacggtttatccaatctattgaagtgtcgtctaccagcaacaatacggtgcctttcacacccaagtgcacacgtacgtgccttaagcacgtcagtactacgtgatatcgtgaaccaaagc

SEQ ID NO: 169657 - DNA, 361 bp, Arabidopsis thaliana nossen
gtagttcaccgtcatcaccgttgagagaagtattggaaaaatgaagaaaaattgcagaagggtgaaagcgtaacataaacagagagagaagttcctatttttataagcatatgagaaggtacctaactagacaaaggcacagacttaattgtgctgatctcgtaattgatcccaaataagattgtattgtattagcctttgagttttgataagattttagataatatgacccagtggactttattttatagttgagtattgaatactgaatggtttttagttactacacatccatcatacaaatatgatattttgtaatatttaggaacaatttaggtaatgataaggtatatgcgtacgc

SEQ ID NO: 169658 - DNA, 344 bp, Arabidopsis thaliana nossen
  unsure (1)..(344): unsure at all n locations
aaaaaaaggncgggccactcccacccgatcgctaaatacaaatatacttttttttaaccgttcaaatcaacaaaactcgtgcttaaaaagatttttttgctttnacccnaaaaactccatcaatctccctcaagtactgatcatccaacaaacgtaccaactgcatacagttcacaagacaagcctcacagcattcctcttgcatccacaaatatgaatcttgcagcacatgatatggcatggatactcacttactcacagtccaacattacatatcctactcaaanatcgcttcctttcttcataaagccaatgattttcctcctcataactatatgatcacg

SEQ ID NO: 169659 - DNA, 358 bp, Arabidopsis thaliana nossen
gtattgggatatacaaatatacttgttgttcacaattgtatttacttaagatcgtgtctagaaattttgtaaggatatacaccttgtaagccacatcacgattcccatttcatatattggattaacggaacccattagattataattacaaattagcatgttttcttgcaatgcatagttatgtgaatcttactttatttaaacactcacttcttatgaatgcacgttattggttgcgcctaccgtttttggagataacatcttgtttcgatagtgaattcatgtttatttgattgctgctgattctgcaaccaaatttcaaaaatttatgtgatcattaatcaccaaaactcattgc

SEQ ID NO: 169660 - DNA, 347 bp, Arabidopsis thaliana nossen
atcttaaccgcctgccgatctttttcaatctccgatcaaccatgaccaaaggtgcaggactcttcaccgatatcggcaagaaagccaaagatctgttgacgagagacttcaatttcgatcagaaattcaatatctccacttacagtgcctccggcgtggcccttacatgtactgctctgaaaaaaggaggagttcatgctgctgatgttgccacccaatacaagtacaagaatgctttgtttgatgttaaaatcgacactgattctaatggtttgacaacagtcacacttaccgagatccttccatcaacaaaagccatttgcttcttcaaaagccctgattataat

SEQ ID NO: 169661 - DNA, 365 bp, Arabidopsis thaliana nossen
ctcctctacgttcttgacagcccatctttgtctcagtagagtctttcagtggcatgtttcggtccttttccccattactgagaaaaagtgagccaccggttcaggtacaagatactatcattaccgcctggacaattagacccccaccccgtatcggaaccacccaattgcaagaaccgaactttaccaacttaactttattccccgagccaagtggaacatgccttaaagggttaaaaccctcttatattcctttccttggcgcaacttggccattctggatttgaaccaaaaaccttgcccgtgaagtaaatcattgcacctattggtccacccaattgggaaagattcattaatttcttttt

SEQ ID NO: 169662 - DNA, 363 bp, Arabidopsis thaliana nossen
cattattttcactgaccgcataacatttttgagacaagagactctctctctctctcttctctctttctgtcgccctctctccggcgatggttgttgctatggaccaacgcaccaatgtgaacggagatcccggcgccggagaccggaagaaagaagaaaggtttgatccgagtgcacaaccaccgttcaagatcggagatataagggcggcgattcctaagcactgttgggttaagagtcctttgagatcaatgagttacgtcgtcagagacattatcgccgtcgcggctttggccatcgctgccgtgtatgttgatagctggttcctttggcctctttattgggccgcccaaggaacacttt

SEQ ID NO: 169663 - DNA, 356 bp, Arabidopsis thaliana nossen
  unsure (1)..(356): unsure at all n locations
ggaaagcctcgtgagaaggtctttgatccgttcagatcaacatcactggcgcttcggtggaatttcggccttagacccgaaaaattccatcagtctccctcaagtactgagcatccaacagatgttggaactgtctacagttcgcaagacaagcctgacagcattcctcttgcatccccaactatgaatcttggagctcatgatttggcatggatacttaagttttggggtctgaattactatcctcctcataagttgcgttctttctccagatggcctangtttggcgtccccagagctgcaagatcaggaaacttatccctagataaagtgatgacagaatttatgctccgtgt

SEQ ID NO: 169664 - DNA, 353 bp, Arabidopsis thaliana nossen
  unsure (1)..(353): unsure at all n locations
ctaaaagcttccaacaaatggcggagactgcgaatacagatctagaaggaatcgatggagttcgtatgacatggaacgtctggcctcattccaaagctgaagctagcaaatgcgtgatcccactcgccgcttgcatttctccgatccggcgacatgccgatatccctactcttccttacgcaccgctccgatgccggacttgttccgctgcgttaaacgcttacgcacaagtcgatttcaccgcaaagctttggatctgtccgttttgttatcagcgtaatcatttcccgcctcattatcatgtgatctctgagactaatcttcctggtgagctntatcctcagtacactact

SEQ ID NO: 169665 - DNA, 231 bp, Arabidopsis thaliana nossen
acagttttagatcgccctgtttcaattttttttatagagtttttatcataattttgcatataatagaagtagtaattataaaaatattatatattaattatcaattgggtttttgctaaacggagcctggatacttcattttattagtcccatcacgtaaaccataaaaaaattttgataatctaatatcaatctaaatactccctgcatttaaattccactttatttttt

SEQ ID NO: 169666 - DNA, 363 bp, Arabidopsis thaliana nossen
ttttatcgagagaatatttgaggtggatatggcctcgacccttttctccagaactttcttggctgctagtcaccgactgattactccttctcttccgcaaaagatctttaatccagccacctttctcagtaggtcactccactctcagttaggctccgcttctacagcctataaatcaactacttgggctcgtcgagctatggcttctactggagttgagacaaaagccggttactccacatcatccgtatcaaccagtgaacctgttgtttctgttgattggcttcatgctaatcttagagagcctgatttgaagattttggatgcttcatggtatatgccggatgagcagagaaatccgat

SEQ ID NO: 169667 - DNA, 366 bp, Arabidopsis thaliana nossen
agaagaagagccacacactcacaaattaaaaagagagagagagagagagacagagagagagagagattctgcggaggagcttcttcttcgtagggtgttcatcgttattaacgttatcgcccctacgtcagctccatctccagaaacatgggtgcaggtggaagaatgccggttcctacttcttccaagaaatcggaaaccgacaccacaaagcgtgtgccgtgcgagaaaccgcctttctcggtgggagatctgaagaaagcaatcccgccgcattgtttcaaacgctcaatccctcgctctttctcctaccttatcagtgacatcattatagcctcatgcttctactacgtcgccaccaattac

SEQ ID NO: 169668 - DNA, 363 bp, Arabidopsis thaliana nossen
aaatttttagttgccggtggatttcaaggagaacttatatgcaagcatcttgatagacctggtgtgagcttttgttcacgtactacttatgatgataatgctataaccaatgctattgagatttataacaaacccagtggggcacttcattttactgcgtcgaataatgattgtggagtcagagattttgatatggagagataccagcttgttaaccagtttcgctttccatggccggtgaatcacacatctttaagtcctgatggtaaattgttgacgattgtgggagacaaccctgaaagccttctggtagaccccaacactggaaagacactggcaacgctatcaggacatctggacttt

SEQ ID NO: 169669 - DNA, 364 bp, Arabidopsis thaliana nossen
ctcgagaaagaaaagcatgcttgtggggttattcatgagcttttgagcttaacgactgagaaaagaacgctggtggatcacttgactcatttccgtgaggaattcagattctcacaacaactgaggggaatgcttattaggcaccctgatctcttctacgtgtctttgaaaggtgaaagagactcggtgttcttaagagaagcttacaggaactctgaattgatagataaagatcctttaactcttgtgaaagagaagatgcgtgcacttgtttctgtaccaaggttcccaaggagaggaggacccaggaaagacgaagaagggagagaggtagagatcgatggaagcgatgcagatggtgagg

SEQ ID NO: 169670 - DNA, 288 bp, Arabidopsis thaliana nossen
ctcgagaaagaaaagcatgcttgtggggttattcatgagcttttgagctgggggactgaaaaaatttcgctggtggatcacttgactcatttccgtgaggaattcagatttttacaacaaccaacgttattacttagtactacacttttactttgctccgtctttgaaaggtgaaagagactcagtgttcttaagagaagcttacaggaactctgaattgatagataaagatcctttaactcttgtgaaagataagatgcgaacactgtgttttttgcgattggcttc

SEQ ID NO: 169671 - DNA, 359 bp, Arabidopsis thaliana nossen
aaaagatggaatctgcatcggatctgggcaagctcttcattggcgggatttcatgggacacagatgaagaacgactgcaagagtattttggcaagtatggagatttggttgaagctgtgatcatgagagaccgtactaccggacgtgcccgtggctttgggtttatcgtttttgcagatccttctgttgccgagagagtcatcatggacaaacacatcattgatggccgcacggtcgaagcgaagaaagctgtcccgcgggatgatcagcaagtgctaaaacgacacgccagtccaatgcaccttatctcacctagccatggtggtaatggtggtggagcacggacaaagaagatcttt

SEQ ID NO: 169672 - DNA, 363 bp, Arabidopsis thaliana nossen
aaacaatttcttcactgcaattcacaagcaaccttcaaactaaaactcgggagacaagaaatcctgagaatctttaacttaatggcgctcgaggctcttacatcaccaagattagcttctccgattcctcctttgttcgaagattcttcagtcttccatggagtcgagcactggacaaagggtaagcgatctaagagatcaagatccgatttccaccaccaaaacctcactgaggaagagtatctagctttttgcctcatgcttctcgctcgcgacaaccgtcagcctcctcctcctccggcggtggagaagttgagctacaagtgtagcgtctgcgacaagacgttctcttcttaccaagct

SEQ ID NO: 169673 - DNA, 387 bp, Arabidopsis thaliana nossen
ccggaccggaatggtcggctcgaccatgcgtgcatggaaatctgaaagaaatacacgctcgcatagtcatcaattttcacgatctccgaatttcacgactttgatacttggtttctttgcacattcacgcgacgaagatgaggctgttgaaggttgctacgtgtaacttgaaccaatgggccatggatttcgagagcaacatgaagaacatcaaggcttcgatcgctgaggcaaaggctgctggtgctgttatcaggcttggacccgagctcgaggtcactggctatggttgcgaggatcacttcttggaactcgacactgtcactcatgcgtgggagtgtttgaaggaattgctgcttggtgattggacggatgatattttgtgca

SEQ ID NO: 169674 - DNA, 362 bp, Arabidopsis thaliana nossen
cattattttcactgagcgcataacatttttgagacaagagactctctctctctctcttctctctttctctccccctctctccggcgatggttgttgctatggaccaacgcaccaatgtgaacggagatcccggcgccggagaccggaagaaagaagaaaggtttgatccgagtgcacaaccaccgttcaagatcggagatataagggcggcgattcctaagcactgttgggttaagagtcctttgagatcaatgagttacgtcgtcagagacattatcgccgtcgcggctttggccatcgctgccgtgtatgttgatagctggttcctttggcctctttattgggccgcccaaagaacactt

SEQ ID NO: 169675 - DNA, 361 bp, Arabidopsis thaliana nossen
cggacgcgtgggctttatacctctctccttcttcttcttcttcttcgtgttctctctcttatgtccttgtccaatttccaaatcctttgttgttgaattttgtcttctttcttcctgagatttcccttcttgtcttcaagaaaccttgatcagggtttctattgtttaaggagggagaaacgaaatgtcaggtggtggtggatcacagagtagtttaaggaggtatcttggagctattaaagataccaccacagtttcattagctaaggtcaatagtgattacaaggaattggatattgctattgtgaaggctactaatcatgtggaacgtccttctaaagaaagatacatcagagctatt

SEQ ID NO: 169676 - DNA, 359 bp, Arabidopsis thaliana nossen
caaatgcataaaaaagaaagaaaggatctcccatttgttgagctccatgctgtccggaggattcctctcgattttattagcccaaacctcttgtcagcttgttgacagcactgccccattcgattccattatttttagtacttttgggtttcatttgcaagaattgtcattttgaggagttcaaaaatgatgattttagtgttaacgtgtgatgacattttttgctaatccactagcacaaatgaatcatatcagcccatcgatataggatggaatagttttttttttcttttgtaaaatctaccaaaccccgaaataatgttagcaaagacaagcacccttaacatatccaatattct

SEQ ID NO: 169677 - DNA, 352 bp, Arabidopsis thaliana nossen
  unsure (1)..(352): unsure at all n locations
cggtttgctgttctggagaaaagcaccagccaggtgttagtgaagaatgtaaagaatgaggtggttaaaaagagttctttacctattcccacagatgctatcttttatgctgggactggaaatttgctttgtagatctgaggataaagtggttatatttgaccttcaacaaangcttgttcttggtgagcttcaaacaccgtttgttaggtacgttgtttggtctaacgatatggagagtgttgctttgctcancaaacatactatcattattgcgagcaaaaaacttgtcctacagtgcacgcttcatgagacaatacgtgtgaaaagtggagcatgggacgacaatggtg

SEQ ID NO: 169678 - DNA, 359 bp, Arabidopsis thaliana nossen
  unsure (1)..(359): unsure at all n locations
agacgatcaatataatctagaaaaaaaaagagaagagagaagagagaaatgtcgagagctttgtcagtcgtttgtgtcttgctcgccatatccttcgtctgtgcacgtgctcgtcaggtgccgggagagtctgatgagggaaagacgacgggacatgacgatacaacaacaatgcccatgcatgcaaaagcagctgatcagttaccaccaaagagcgtcggcgacaaaaaatgcatcggaagagttgctggagtcggtggattcgccggagttggtggtgttgccggcgtgggaagtctaaggatgccactcatcggtggtcttggcgggatcggtaagtatggtggcatangcggtgc

SEQ ID NO: 169679 - DNA, 364 bp, Arabidopsis thaliana nossen
ggggaggagaaggagaaggaggaggagagtggggaggaggaggagaaggaggtggtggaggaagatgtggatggttcatgatgagagagtcgaggcaagtgatcaaatcagaaggtggagagatgagagttgtgttatcaccaagaggaaggatcattgagaagccaatgcacattgggtttctaacaatggaacctaagaccctctttgtccctcaatatcttgactcaagccttctcatctttattcgtcaaggtgaagcaacccttggagtgatatgcaaagacgaattcggagagaggaaactgaaagcaagagacatctactggattccggctggttctgtcttttatttacataacac

SEQ ID NO: 169680 - DNA, 289 bp, Arabidopsis thaliana nossen
taattaacccaaacctcttgtcagcttgttgacagcactgccccattcgattccattatttttagtacttttgggtttcatttgcaagaattgtcattttgaggagttcaaaaatgatgattttagttggatcacacagtagtttaagttgctaatccactagcacaaatgaatcatatcagcccatcgatataagatggaatagtttttcttttcttttgtaaaatctaccaaaccccgaaataatgttagcaaacacaagcacccttaacatatccaaagagctata

SEQ ID NO: 169681 - DNA, 314 bp, Arabidopsis thaliana nossen
ggagatttataattcttctgttctactggatggaatttcactgaattagactgagaagaatcttgaagttctagcttttagctcgatacaaaaaagtaaagtatgcaggtctaacaattttagcctattctcctttggtagttcgaccgcgaaatttttttctgcattgtatatttccggaatatgagtgtgtgacttgttagaattgaccctatggatagtacagagaatggggtctgtcatctttatcaagatggttttacttcgtcggatattcattcgagtatctggagcacgaaatagatcaaatagat

SEQ ID NO: 169682 - DNA, 360 bp, Arabidopsis thaliana nossen
gagagaggctctgataaaaaaaaaacaaaaaaaaatgacaaaggcttattcaacacgtgtcctcacgtttctgatattgatctcgctaatggcggtgacactgaacctttttcccacggtagaggcaaagaagcggagtagagatgctcctatagtgaaaggtctctcatggaacttttaccagaaagcatgtccgaaagtcgaaaacatcatcagaaaagagctcaagaaagtcttcaagagagatattggtttagccgcagccatccttcgtatacatttccatgattgctttgttcagggatgtgaagcatcagtgctgctagctggatcagccagtggaccaggagaacaatcatc

SEQ ID NO: 169683 - DNA, 360 bp, Arabidopsis thaliana nossen
accatatctctcatgaaggttttcatgacctttcagggctggacaacgcaaccacagacattgtcccgaacgttgagcttgatgtgtctgataatgacaatgacacttccagtggtggtgttaatcatgccgtttgtctgtcatcgactcgtgggaagggttctctgccttggatttcgaccaatacttatcaatcgtcttctgatgctggagagattttccatgatacagttgtagagtctgacgggacactactggaagacaataatccagagtcggaaataaaaatgcataaaagccctctggaagtgtcttcagaaggtctgagtactgaaccagacaacaaggacgtagaaagta

SEQ ID NO: 169684 - DNA, 359 bp, Arabidopsis thaliana nossen
gttaacagtcagcatcgttttgcttgcttgtgcgtgtctctcgaactctctccatggctgttgcgctccaattcaaccgattatgcgttcgaccggatactttcgtgcgggagaatcatctctctgaatccggatctctccgccgccggaaagctttatcagtccggtgctcgtctggcgatgagaacgctccttcgccatcggtggtgatggactccgatttcgacgccaaagtgttccgtatgaacttgacgagaagcgataattacaatcgtaaagggttcggtcataaggaggagacactcaagctcatgaatcgagagtacaccaatgatatattggagacactgaaaacaaat

SEQ ID NO: 169685 - DNA, 207 bp, Arabidopsis thaliana nossen
gcaaggtgatcaaaattggtgcaccacttgtttaaagtgaacgttgaacttaaaaggcataaacgtaggcctaaatctgtctttacagacctcaaaagtcaaaaagcacattaacaacaaactgtttgaaatgggccgcaaggcccaacattccttggttgtgcatagaaacaaataaatgcttttattttggcataaaatgttata

SEQ ID NO: 169686 - DNA, 122 bp, Arabidopsis thaliana nossen
cagacctcaaaagtcaaaaagcacattaacaacaaactgtttgaaatgggccggaaggcccaacattccttggatgcgcatagaaacaaataaatgctttcattttcgcataaaatgttata

SEQ ID NO: 169687 - DNA, 366 bp, Arabidopsis thaliana nossen
ttttcatattgttcttttttccatttttgcatcttacttgacatttactatcactagaatcatatcaagcttccggatttcctacagtgcttgtaaattagctttcagttgatacgtggtgataatttaactctagtttcttcctttgcttttgtagggatataaagcctgataatttattgattactcgaaacggccatatcaagctttcagattttggattgagcaagtctctggaaagcaaaaattttccagattttaaggcggagcttgttgacaggagtacaaagcctgcagcagaacatgatagactctccaagcctccttctgcacctaggagaactcagcaggaacagcttttacatt

SEQ ID NO: 169688 - DNA, 361 bp, Arabidopsis thaliana nossen
gaaaaagtttaatagtaaaataatcgatcctcttctcttctcttctctgaggctcgttggaaatctgaattctccgatcgaatcgaaccaatcgcagaggctaagaagaggacctttgagagaatctccgagtcaggatcagaaaaaacggtgatacggaagctagttctagggctaatgggcgccgcgggctccaaactcgagaaagctctcggcgaccagttccccgaaggtgaacgctactttggattcgagaatttcggcaacacttgctactgtaacagcgttttgcaggctctttatttctgtgttcctttccgtgaacaactgctcgaatactataccagtaataaaagcgtgg

SEQ ID NO: 169689 - DNA, 362 bp, Arabidopsis thaliana nossen
tgatgatgttggaggaagaaatttggatgtgtcttctgtcgaggaaaactgtagaagcaaggacacgaatgttacacctgatgatgatgtgtctgggattcgaagcccgtcagcttttttcaaacagcccactcatctcgtaactccttcagagatattgatgggcgtttcttccactgaagcctccattactactgaagacaagagggatagagatgcaaatattgaggaagtgaataatgatgcaagaggcttagaagttgagttgaaagaagtaggcgaagcacagacttcgcagaatggtgaaattaactatcacgaaacaactgagaatcacacttcagaaagtagagaaaatatct

SEQ ID NO: 169690 - DNA, 364 bp, Arabidopsis thaliana nossen
cacgaagagaaaagaagagaagaagaagaagaagaagcagcagaagaagagaagaagaatccaatcatggcggctgctgtatcatctgtttgggcaaagcctggtgcttgggctcttgaagccgaggaacacgaagctgagctcaaacaacaaccctctgccaccaaccagaaatcctctgccggagattcctccgatttcccatccttagccgctgcagcgaccaccaaaacgaagaagaagaagggccaaaccatctctcttgctgaattcgctacctacggtactgctaaggcaaagccggctccacagacggagcgtctcactcaagctgagctggtcgctcttccgaccggtccacgtg

SEQ ID NO: 169691 - DNA, 190 bp, Arabidopsis thaliana nossen
attgcattgcgcatcactatacattcacggttagggaagttccatatgcgaaactgtgtagtatgaaggcgattttaaccgttaatagtcagtttcctggaccgattataaaggttcacaaaggagacactatttatgttaacgttcaaaaccgagctagtgaaaacataacaatgcattggcatggtgt

SEQ ID NO: 169692 - DNA, 357 bp, Arabidopsis thaliana nossen
  unsure (1)..(357): unsure at all n locations
attgcattgcgcatcactatatattcacggttagggaagttccatgtggtaaactaaatagtattgttgtcgattttaaccgttaatagtcagtttcctggaccgattataaaggttcacaaaggagacactatttatgttaacgttcaaaaccgagctagtgaaaacatcacaatgcattggcatggtgtagagcagccgagaaatccgtggtcagatggtcctgaatacatcacacaatgcccgattcgacccgggtcagattntttgtacaaagtcatattttccatcgaaaacacgactgttggtggcacgcgcatagctcttggacacgtgcaactgtacacggacttattt

SEQ ID NO: 169693 - DNA, 407 bp, Arabidopsis thaliana nossen
acgtaccgggcccggaatccccgggattttgtacttctgcatcggtgcgttcttcttagccacctgtagtaaccaaagttacattggtgggtagccaaaatattattcgcaatatatatggcgtggacatacaaatcaactgcaactaaaccgaaccatgtgttttcatgaatggttagattggtttatatatgtaaatccaaagaaaccgaagcttaagccaaacttaaaccaattaatttgagtataaacgaaccacacgaacttaaattaagaaataatatctatgttaaactatctaagaaaaattagatcgaaccatgtacaatatatgttaaaaataattatagctaagtacatagtagctatgcggatatgttcgttacatcaacctgacccaaatctat

SEQ ID NO: 169694 - DNA, 270 bp, Arabidopsis thaliana nossen
cgattgcattgcgcatcactatacattcacggttagggaagttccatatgggaaactgtgtagctcgaaggcgattttaaccgttaatagtcagtttcctggaccgattataaaggttcacaaaggagacactatttatgttaacgttcaaaaccgagctagtgaaaacatcacaatgcattggcatggtgtagagcagccgagaaatccgtggtcagatggtcctgaatacatcacacaatgcccgattcgacccgggtcaaatttttt

SEQ ID NO: 169695 - DNA, 360 bp, Arabidopsis thaliana nossen
aaagctctcttttctctccagatttcgattcccgaggctcgagagaaaaccgtaaatctcttctccgttcactcaatcaaccaaagatgcgtgagattcttcacatccagggtggtcaatgcggtaaccagatcggagccaagttctgggaagtggtttgcgccgagcacggcatcgatccaaccggaaggtacaccggagactcagatctgcaacttgagcgcatcaacgtttactacaatgaagcgagttgcggtagattcgttcctcgtgcaatgctcatggatttggagcctgggactatggatagtctcagatctggaccgtacggtcagacctttcgacctgataacttcgtct

SEQ ID NO: 169696 - DNA, 359 bp, Arabidopsis thaliana nossen
gaggttctacgccgaggaagagaagaatgatcctgaatttgcaaagaagcttgctgctcttgccgatgtttacgttaatgatgccttcggaactgctcacagagctcatgcttccactgagggagttgccaaattcttgaagccttcagttgctggtttcctcatgcagaaggaacttgattaccttgtcggagctgtggcaaaccccaagaagccttttgctgccattgttggaggctcaaaggtttcaacaaagattggtgtcattgagtctctcttgaacacagttgacatcctcctgctcggtggaggtatgatttttactttctacaaggcacaaggactctcagtcggatctt

SEQ ID NO: 169697 - DNA, 293 bp, Arabidopsis thaliana nossen
cttcttttttcttctctgggtttgagaattggtgtaagagaaacgattgaggttttctcttattatctaaacccaccaagtctttcaggattttagccagagaagcttgagtctttgattagggacatgtcaacctccgccgcttccttgtgttgttcatcaacccaagtcaatgggtttggtcttaagcctgaaagggcgcttctttaccaacccactttcttttctttcttcaaaaggagaactcattggattggtcaaggcctattttggggtggttgggttttgaaaag

SEQ ID NO: 169698 - DNA, 382 bp, Arabidopsis thaliana nossen
  unsure (1)..(382): unsure at all n locations
ntccgtgagaagccaaantcgagagaatgcgttgcaaaaatantcatcttcagcggaaggagatttgttcattcggagtcgttgtgcgtgagaggtaatgactgcaacctgtttctccctctttttccattttttgagagacgagctttctctggtaagactagttatgattacagagaggtactcagaactgggctgagtgatattgaattagatgatgcggttgatctgttcggtgttatggtacagtctcgtcctttcccttcgattatcgagttcagtaaactgttgagtgccattgctaagatgaacaagttcgatcttgtcatctccttcggggagaagatggagattttaggaatttcacataatctctatactt

SEQ ID NO: 169699 - DNA, 366 bp, Arabidopsis thaliana nossen
ctgttatataacaaccaagaagtagcttttagctttacccttcaaagttgaaaggaattatattttttgtggtcaatcatattctttttttttcttctaattaaacaactcttcttctactagtttcaaacgcaaacgccaaccaaattggatgttttcattgcgtttgacatttgcgtttacaattaagcttatgagtctgtttgaaaaagaagaaaaaaaaaacgtgtaggcaaaggtacaaaaataatcaaggtcatagacgttatttatataaacgtggttagtttacacaccaaacaaaagttgataaattagacaagtttagcacacatacacatatagttaaatagaccaaaaaataaa

SEQ ID NO: 169700 - DNA, 358 bp, Arabidopsis thaliana nossen
ctctcagtcttcttcttctgctataacgctcttctccatcaccgtataatcgagtttcgattgtctccgacgaagagaagctgacacttctggtttcgtcaatttctactgggataaagctctctactacctttttgctcagagaaaatggtttgattttcgaggatgataaaggcttcaagttgttgtagaggtgtttttgccagccttggtgctggtcatggattttatctgactatcgtatgtgcctttgatgaaactaaataatgccccggggagagttagctatgggctctttagagactgtttgttggcttaagggctgcttggtttatcgcttcttgttatttattatctg

SEQ ID NO: 169701 - DNA, 362 bp, Arabidopsis thaliana nossen
cacacactcacaaattaaaaagagagagagagagagagacagaaagagagagggattctgcggaggagcttcttcttcgtacggtgttcatcgttattaacgttatcgcccctacgtcagctccatcttcagaaacatgggtgcaagtggaagaatgccaggtcctacttcttgcaagaaatcgtgaaccgacaccacaaagcgtgtgccgtgcgagaaaccgcctttctcggtgggagatctgaagaaagcaatcccggcgcattgtttcaaacgctcaatgcctcgctctttcttctaccttatcaatgacatcattatagcctcatgcttctactacgtcgccaccaattacttctctc

SEQ ID NO: 169702 - DNA, 370 bp, Arabidopsis thaliana nossen
cgaggttgtctcgcttattactgatgatgctactaagagaataattggtgcccgaattcgtaacaatctgagaggccaagaatttaacagctatgcaaaagtagttgttaatgcggcaggaccgttctgtgattccattaggaaaatgattgatgaagatacaaaaccaatgatttgtccaagcagcggtgtacacatcgtgctgcctgattactattcttctgaaagcatggggttgatagtccctaaaactaaagatggccgcgttgtgtttatgttaccgtggttgggaagaacagtaagaggcactacagactctaacacttcaatcacttcacttgcagaacctcatgaagatgagattcaattt

SEQ ID NO: 169703 - DNA, 360 bp, Arabidopsis thaliana nossen
tagattataagttatataatcatataatattttgtgttcgattagtgtaacaaaaatggggttagagaggaaagtgtacggtttggttatggtatctttggtacttatggctattgcaacgatgtgttgtgtccaagctacgatcgacgaagaagcggctaaggatgaatcatggactgattgggcaaaggagaagatcggtctcaagcacgaagacaacatccaacccactcacaccaccacgaccgttcaagacgacgcttggagagcgagtcaaaaagccgaggacgcaaaggaggcggctaaacgcaaagcagaggaagcggttggagccgcgaatgagaaagcgggttcggcata

SEQ ID NO: 169704 - DNA, 359 bp, Arabidopsis thaliana nossen
gccattttctttggacgaccatcggcgttaaggagagagcttagatctggtgccgtcgtgcgacgttgttttccggcttgatcaaaatggggttgtcattcggaaagttgttcagcaggctctttgcgaagaaagagatgcgtattctgatggttggtctcgatgctgctggtaagacgactatcctctacaagctcaaacttggagagatcgtcaccactattccaaccattgggttcaacgttgagactgttgaatacaagaacatcagcttcaccgtgtgggatgttgggggtcaagacaagatccgtccattgtggagacattacttccagaacacacagggacttatctttgtt

SEQ ID NO: 169705 - DNA, 362 bp, Arabidopsis thaliana nossen
agagtttccgcacgaatcacgaatctctctctctttcacacactgcacactttcaatatacactctcattatgactaccgaagagaaagagatcctcgccgccaaattggaagaacagaagatcgatctcgataagcccgaagttgaggacgatgatgataacgaagacgatgactctgatgacgatgataaggatgatgacgaggctgatggactagatggagaggcaggaggtaagtcaaaacaaagcagaagtgagaagaagagtcgcaaagccatgctcaagcttggcatgaaacccatcactggtgttagccgagtcaccgtcaaaaagagcaagaatatcttgtttgtcatatcaa

SEQ ID NO: 169706 - DNA, 349 bp, Arabidopsis thaliana nossen
caaagttcgaagagaccgacgcaaaagggacagaaacggagaaggagaaagaggcagagatgggagtagagatccaatcgccgcaggaacagagctcttacaccgttgagcagctcgtcgcccttaatcctttcaaccctgaaatcctgcctgatctcgaaaactacgttaacgttacatcgcaaacgtatagtctggaagtaaacctatgcttgcttcggctctatcagtttgagcctgagcgcatgaacactcatatcgtggctcgaatcttggtcaaggctcttatggctatgccaactccagacttcagcctttgcctcttcttgattcccgaaagagtgcaaat

SEQ ID NO: 169707 - DNA, 365 bp, Arabidopsis thaliana nossen
  unsure (1)..(365): unsure at all n locations
aaaaaaactcaaattctctgatctgatctaaaagcttccaacaaatggcggagactgcgaatacagatctaaaacgaatcgatggagttcgtatgacatggaacgtctggcctcattccaaagctgaagctagcaaatgcgtgatcccactcgccgcttgcatttctncgatccggcgacatgccgatatccctactcttccttacgcaccgctccgatgccggacttgttccgctgcgttaaacgcttacgcacaagtcgatttcaccgcaaagctttggatctgtccgttttgttatcagcgtaatcatttcccgcctcattatcatgtgatctctgagactaatattactggtgagctttat

SEQ ID NO: 169708 - DNA, 93 bp, Arabidopsis thaliana nossen
ctttacctttaacgtacgtgtaaaatatgtgtctgcggcacctcacttgtaataacactttcttctcataaattaaacgggaggttcgagttt

SEQ ID NO: 169709 - DNA, 272 bp, Arabidopsis thaliana nossen
ccgggcccgaaatcccggggtggaccaacccgtccgggattgaacaccggcaagcctacaatggggaaatcatgctttcaaaagggaaggtacctttacagggtttggcgaactcaaagcttaacctggaagagtcggctcttgatgcttatcaagttgagaacctaatttagttttgccccaccagagaagagattgaggtacttaaaggttatactggtgacaaagacaagcttggaaaatgccaactggtctttttaaaaattattaaa

SEQ ID NO: 169710 - DNA, 284 bp, Arabidopsis thaliana nossen
ggcaaagaatttgcttcagtatatgttcaactctcttgcaaaaacaaggtgtcgattatgggagaaggatgtggagataaaagaaatgaaagatcagttcaaagaaattgttggtcttctgaggcaaactgagttgagaaagaaagaagcagaaaaaggagttaaattgagggagcaagcaattgcaacttcattaagtacgccgccgagttcagtgaaacatgtaacttgagacatgagcacaccttctgcatgaccggccagcacaaaacgctaaatttacc

SEQ ID NO: 169711 - DNA, 202 bp, Arabidopsis thaliana nossen
ggagcacgcgattgcaaacttgttaaacactcctgccaattcactgaaacatgtatactcaagacttgtgcacaccttatgcaatgaccgtgccaggactgaaacagctaaaattgacgccagggattgctaacggaaaagtgagaggaccggctgcatttcttgatacaaacaagaagatggtaccgatcggacaagtatc

SEQ ID NO: 169712 - DNA, 371 bp, Arabidopsis thaliana nossen
caaagcgtgagtgagatcgggaatcagacatcgcctccgtctctcattgcaaacgctatctccatctccttcctccgccgccgccatggaatctccgaagaattctctgatcccgagcttcctctattcatcatcttcatctccgagatctttcctcctcgaccaggtgctcaattccaactccaacgctgcattcgagaaatctccttctccggccccgcgttcctctcctacgtcgatgatttctcggaagaatttccttattgcatctcccaccgagccagggaaggggatcgagatgtattcacctgccttctacgctgcttgtacctttggtggaattctcagctgtggtcttactcacatgaccg

SEQ ID NO: 169713 - DNA, 361 bp, Arabidopsis thaliana nossen
actgtgttaattatttttattctgcgtacgttacgtaagagagatattgaggaatggctgcgaagaaggtttttggatcggcggaagcgagtaatttggtgacggagcttcgtcggagttttgatgatggtgtgacacgtggttatgaatggagagtgactcagcttaagaaactgatgattatttgtgataatcatgagcctgagatcgtcgcggctcttcgcgatgatcttggtaagcctgagcttgaatcttctgtttatgaggtatctctactgagaaactctatcaagttggctcttaagcagctaaagaactggatggctccggagaaggcaaagacttctctaacaacgtttcc

SEQ ID NO: 169714 - DNA, 185 bp, Arabidopsis thaliana nossen
atcctggtttgtaaaagctcagggttctaagtctgaacagccctgtttgcaggatttaaaaaattgggaaattgaaccccaacccaaaaagatatggcttgatagaagtgaaatgatctatcaagctgaacaatacctcagggaacgtgtataaactgtggtgcaagactacattctaacatgtt

SEQ ID NO: 169715 - DNA, 365 bp, Arabidopsis thaliana nossen
cttgaacttgatctttcttcctagtccagtgtctaacacttggagtgtggttttctccaacgtaagaacaaacagtgtctctgttaacgatggcaaagtccataagctcaggcttcacattaggctcttcctcaaagataacaagaaggttcttcttgggctttaagaaagatctaaggatgtgatactctatttgtgtaggttgacctaatggagacaagaacgattgccaatatcttccaacgccttctccgttcacccaaatcaacccttttcccattccatgcatgcgaatcgttgctgcgcttacgctctctggtgcatcaaagtatgtctgcaatgtttcacattccttagaaaacttc

SEQ ID NO: 169716 - DNA, 363 bp, Arabidopsis thaliana nossen
ttcaatttctcaaaatcttaaaaactttctctcaattctctctaccgtgatcaagatgcagatctttggtaagactctcaccggaaagacaatcaccctcgaggtggaaagctccgacaccatcgacaacgttaaggccaagatccaggataaggagggcattcctccggatcagcagaggcttattttcgccggcaagcagctagaggatggccgtacgttggctgattacaatatccagaaagaatccacccttcacttggtcctcaagctccgtggtggtatgcagattttcgttaaaaccctaacgggaaagacgattactcttgaggtggagagttctgacaccatcgacaacgtcaa

SEQ ID NO: 169717 - DNA, 266 bp, Arabidopsis thaliana nossen
ttttaaaaaaaaaaaaaaaaagggtgtaaaatcattgtgtgggttactcaaccggaaagacataccctcgagtggaaagctccgacaccatcgacaacgtaaggcacaacatccaggataaggatgcattcctccggacaccagagcttattttcgctgcaagcagctagaggatggccgacgtggctgatgacaatatccagaaggaatcaccctccactggcctacgctccgcggggtatgcaaatcttcgttaaaaccctaac

SEQ ID NO: 169718 - DNA, 292 bp, Arabidopsis thaliana nossen
ggaagcggagtttcagtgatttggttccagccaaaggaaggttttgtgagagtgctgcctaagttcacaaaacatgcaccggctctctttcgaggaatcgagaactacagattctcgttggtggagatggagccaacaactttctttgtgcctcaccatttggatgccgatgctgtttttataggcctacaaagtgaaagagtgatcgagtttgtgaccgataaaacaaaagaatcggtccacattacttaaagtgatgtggtaagaattccttctggtgtcaccaacttta

SEQ ID NO: 169719 - DNA, 298 bp, Arabidopsis thaliana nossen
ttcttcttcttagtaaaactttgcattaatggctgacccaaatttggaagctctttgcttccttccttcttcttattcccgccttcattctccaaatttggttctacggatcttcagtttgagcaatgaacaaatctcaacttcgtaatttttccttacagattccattccggcttgtatagttcttattagttggtccgcgtttttacttgctacggatgaaccttcaaaatccattcactttcatgaccgcgtctgggtccaggtctgatgatggttaatctttttattttgctga

SEQ ID NO: 169720 - DNA, 369 bp, Arabidopsis thaliana nossen
cccttatcggaaatttgatttcatggtaagaagaaaaatcgagatcaagcgaatcgagaacaaaagcagtcgacaagtcactttctccaaacgacgcaatggtctcatcgacaaagctcgacaactttcgattctctgtgaatcctccgtcgctgttgtcgtcgtatctgccttccgaaaactctatgacttttccttccgggacgacatttccaagatcattgatcggtatgaaatacaacatgctgatgaacttaaagccttagatcttgaagaaaaaattcagaattatcttccacacaaagagttactagaaaacagccaaagctagcttgaagaaccaaatgtcgataatgtaagtgtaaattc

SEQ ID NO: 169721 - DNA, 263 bp, Arabidopsis thaliana nossen
  unsure (1)..(263): unsure at all n locations
attggacttgatctttcttaattagaacaaaaataactatctagcgtggtgaaaacgcaagcggtttggggagacaccnnctccgaacaacacagcggaatcataacaaagctcggccactatcgattctgtgagaatcttacaacactgttgttcttgtgcttttacaaaaaactacggttttgatactctttgcaagcagctagaggatggccgaacgttggctgattacaatatccagaacgaatccaccctccacttgg

SEQ ID NO: 169722 - DNA, 251 bp, Arabidopsis thaliana nossen
gtaaacatagtatctatttagatacgctcgaatgaccccttctcataatgagaatgtatataaccttattccggtctggtccggtatggaatgaacttataatcatggaatcgactcgatcatcagattatagattataagttcataaccttagtccattcccattttgggcggaaccgatctactaattctttgattccagttagtattagtaagagggatcttgaactaagaaatagattctagaagct

SEQ ID NO: 169723 - DNA, 302 bp, Arabidopsis thaliana nossen
  unsure (1)..(302): unsure at all n locations
aaaggcccggggcgtcccacgcgngcgaaaaaatatatttaaattagtttaccaacccaacacaaccaacggggggttaaaaaaatttttggtggctcatacaaaaccaagnaattatgcaacgggcatgaaaattccatcttacaacaatgaataactagcctcggcttataatatggcacggagaatgcttcctgcatttgatacaccgactggaatcccatatggatctgataattcaatgtacagacttaacaaacatgaaaccaacataacatcaactgccggaaatgccactttgt

SEQ ID NO: 169724 - DNA, 358 bp, Arabidopsis thaliana nossen
attcacgctccttgaacaatccgccatctctctcgatcagatcgataatggcgacaagtttctgctcctccatctccatgcaagctcctttctcggctacaacaacaaggttctgtctcaacaaacaggctacgattttcaacaatggaaagactaataatctctccttcagcctacgacgtttgatgcctgctcgtctcgcagtttcttgtgcagtcaagcaagagacagtagagaaagtgtctgagattgtcaagaagcaattgtcgctcaccgatgatcaaaaagtcactgccggaactaaatttaccgagcttggagctgattctctcgacacggttgagatagtgatgggttt

SEQ ID NO: 169725 - DNA, 166 bp, Arabidopsis thaliana nossen
gagaaatgtataaaccaatgcttccataaatttgatcgtggtttacaaggatagctttcatacctgttttgtttacgttttgtttacttgggaggataaagaaagaaaaagagtcaaagaaacggcagcgatttaaataaagattcctacagtaccctacctatta

SEQ ID NO: 169726 - DNA, 362 bp, Arabidopsis thaliana nossen
ctaacataattgacaaaaggatttaactggaatttgctaatattccctagctgacgaagaataaaaatagtcagagtgatgttacgctaatggttagggttctagctaatggtgttgttagaatagagtgaatcaagttttggtgatcatatcgacagttaagaatgatccatagatagttttgatttgttaagttggtgatgatgtatgtaaagtttagtatgaaaggaaagatagagatgaaaggagcataattcacaaatgggaagaaaatgtattcactaaagataaatatgtttttataatagaaatatagaggtttttttttaagtgctaatttcttaattaattaaattattttt

SEQ ID NO: 169727 - DNA, 371 bp, Arabidopsis thaliana nossen
tctctttgtataagtaaacttcttattctaataaaaatgtaagatttgtggatctacaactttaatttgtgtcgattttagtatgattgaaacattaacaccgataaagtcaggtcccctggtcgtcttttggttcataaaggtaatcccattttggcgaaatttgtttgaacttggaagtggaagaagtgaaaatacatgtagcacaagactgagattgacgagccttattgattcggcccatttttattcagaccttatgttagttaactggcccgatcagccgcctgatggctggtgaataaacccgatcattactcaataaatcacacaattattattgtaaatctttttcatctaactaaaatact

SEQ ID NO: 169728 - DNA, 348 bp, Arabidopsis thaliana nossen
cgtatttgctttgaccaacccactcgacggcgtctacaacgccttcttgctcattctacactctgtgggagccaacttctgatttcacatctcaacgatgcaaagctccgccgtattctcgctctctccgtcgctccctctcctaaaaccacggcggctctctctccgccaccatcccataaccaccgccgcttcttcaagcgatctaaacgcttctccaaatgttgtctctattccttctttatctcctcgatcttggcgtctcgcttcgtctgattcgcctctccgtgcttggtccggggttccttctacgatctctcactccttagacacgaatcgtttcagaac

SEQ ID NO: 169729 - DNA, 364 bp, Arabidopsis thaliana nossen
gctcttcactctatacaacaattgccaagaagatgagttctctcatcatgatcttcaacattctgggtggcctcacaactcaaacccacgcgcacaacgtcacgcgcctcctagcaaaccacccatcattctcttccttcagccatttcctaacacaaacacacctcgccgacgaaatcaaccggagaagaaccataaccgtttgcgccgtcgataacgccgccatgtcagcattaacctcaaaaggctacacaatctcaactctcaaaaacattctctccctccacgtccttttagattacttcggaaccaaaaaactccaccagatccgtgacggctctgctctcgccgctactctgtttca

SEQ ID NO: 169730 - DNA, 364 bp, Arabidopsis thaliana nossen
agagtcttggtgccaaggcttgtatggattggcctcacgctctgctgaggactacaagcaaggcgctcggtttgccaagtggaggacagtggtgagtgttccctgcggtccttcagcactggctgtgaaggaagctgcgtgggggctggctcgctatgcagccatctctcaggataatggtcttgtccccattgtggagccagagatccttctggacggggaccacccaatagagaggactctggaggtggcagagaaagtgtggtcagaggtgttcttctacttggcacagaacaacgtcatgtttgagggcattctgttgaagcctagcatggtcaccccaggcgctgagcacaagaacaag

SEQ ID NO: 169731 - DNA, 356 bp, Arabidopsis thaliana nossen
agagtcttggtgccaaggcttggatggattggcctcacgctctgctgagtactacaagcaaggggctggttttgccaagtggaggacagtggtgagtgttccctgcggtccttcagcactggctgtgaaggaagctgcgtgggggctggctcgctatgcagccatctctcaggataatggtcttgtccccattgtggagccagagatccttctggacggggaccacccaatagagaggactctggaggtggcagataaagtgtggtcagaggtgttcttctacttggcacagaacaacgtcatgtttgagggcattctgttgaagccgagcatggtcaccccaagcgcttggcaca

SEQ ID NO: 169732 - DNA, 370 bp, Arabidopsis thaliana nossen
cccacttcaaatgtcactgcataatcactggtgttagtggtggtggggacatagtaagagctcggtggtactagtagaagaagaagaagaagattgattataaagacttaagatggctgcggcgcattttagtaaggagagggtcttcagagggtttctggtttggttctgcttttggggactgatgtctctaacatgcgctgggagactcagtgtttcaaggcagaattttgaagtgcacaaacacttgaatcgattgaataaaccagccggtaagagcattcagagtccagatggtgacataatagactgtgttcacatatcgaagcaaccagcttttgatcacccttttctcaaagatcacaagatt

SEQ ID NO: 169733 - DNA, 362 bp, Arabidopsis thaliana nossen
  unsure (1)..(362): unsure at all n locations
ctcacctgtatattcagcttttccttcaagatcaatgtcgagaccgtggtaccaccatacagatcgggggggataaccgttgcaacatcntcaaggacaacggacctttcggcgtcattaggccacccttgagacgcggcgaaggcggccaacaaccacatgaaatagctaatggtttagaggagactttgtgcaccatccgatgcactgaaaacctcgccgacctctcggatgctgacgtgtacaagccatcactcggatacattagcacacttaacagctacaatctttctatacttagacttctccgccttagcgctcttcgtggctccatccgtaaaaacgctatggtgctaccgcaa

SEQ ID NO: 169734 - DNA, 343 bp, Arabidopsis thaliana nossen
cttccgtgttagagataaagagagagttattaatgccaataagggcctcaacttgttttccaaccctttggtgggtttttacccctcctccatcaaaagcgaagagaccgacaccaaggagttcgtgttgaccttggatcacactaactttaccgataccatcaacaaacacgatttcatcgtcgtcgagttctacgccccatggtgtggacactgcaagcagcttgctcctgagtatgagaaggctgcgtcagctttgagcagtaacgtcccaccagtggttcttgctaagattgatgccagtgaggaaacaaacataaaattttcaactcaatactacgtt

SEQ ID NO: 169735 - DNA, 355 bp, Arabidopsis thaliana nossen
aaaatcttgttggccactgtgaagataaaataatgaataaagattggggaaatgtcggaaaaacgtcaatttttaaatttgggacgaaaagactttgaattttcaaaatgtcatttaagtcataaagttatttttgattctttgataagttttgttaactggatcatttcagacatgcagtaaatttccataaacagagttaactttccgttagaaatttctgttaaatcaaacgatgtcgtttatgagcttataacaaaaggacgtcggtttagatagacggctgtgatttgttatattttatctgtttagatagattttccaacacaagaaaactctttgacagctgagtgtt

SEQ ID NO: 169736 - DNA, 364 bp, Arabidopsis thaliana nossen
attcatcatcaccttcatctctctcttcctctcatcagacttcaccgtgcttctttctctcttgtggagcttcagacgaaacctcctttacttcccccttcaaggttttatatttcccaaatcctacacctgctcacatctcaagctcaagttttgttttcccgggaaaagtgacacaaacaagaacttaacaagggagaagaaaaagcttatattcatatcaacggttgacgttggaaagctattaagatttggttttctacaaatttgttcttcctgaaacgtcacgagacagagcttacaagaagagaaaacagaggaaatttcgttgcattttttttacatattgattcgattaatggat

SEQ ID NO: 169737 - DNA, 372 bp, Arabidopsis thaliana nossen
gtgagagaagaaagatagagaaaaaaaatgggaggcaaaggtgtgatgagggtggcgatactttggcggtgggcactctctgcaacatctgaagcagtaacagaggctgagccaggtttgatgatgaacttctacaaggacacgtgtcctcaggccgaagacatcgtccgtgaacaagtcaaactcctctacaaacgccacaagaacaccgctttctcttggctccgtaacatcttccatgactgcgccgttgagtcatgtgatgcgtcgcttttgctggattcgacaagaagagagctaggagagaaagaacacgacaggagcttcggacttagaaactttaggtacatcgaggagatcaaggaagctctc

SEQ ID NO: 169738 - DNA, 366 bp, Arabidopsis thaliana nossen
ggaggaatagcggctgatttaccttatggttggatagataaatgcttggatttttgtgattattgtgtgtgacagaggttgttgaatatcaaaaactcattacacgaaatcctatttttttagaacgggttgaaggagttgggattattggtggggaagaagcaataaattggggtttatccggaccaatgctacgcgcatccggaataccatgggatcttcgtaaaattgatcgttatgagtcttacgatgaatttgaatgggaaattcaatggcaaaaacaaggagattcattagctcgttatttagtacgacttagcgaaatgacagaatccataaaaattattcaacaggctctggaaggac

SEQ ID NO: 169739 - DNA, 284 bp, Arabidopsis thaliana nossen
gatgtctgtgcaagagtatttagacaagcatatgctttctcggaaaatcgaagacgccgttaatgccgccgttagggctaaaacctcagatcccgttctcttcatcgctaatcatctgaagaaagctgtatcatctgtgataacgaaggtgaaagcacgacagatccttgacagcagaggaattccaacagttgaagttgatctacacactaacaaaggcgtttttcgtgcttctgttcccagtggtgattcttctggaacgtatgaagctattgagctacgtg

SEQ ID NO: 169740 - DNA, 365 bp, Arabidopsis thaliana nossen
  unsure (1)..(365): unsure at all n locations
ctttgtgataaaactaagtaataaatagcataaaagtaaaagggaatgtcgagtgaggagtttaggctggtttcgccgacnatagacaacgatgggaagttgccgagaaagtatacgatggcaggtcaaggtgttaagaaagacatctctcctcctcttgaatggtacaacgttccagaaggtacaaaaacgctagctttggtggtggaagacatcgatgcgcctgatcctagtggcccgctggtgccatggacggtgtgggttgtcgtcgacataccaccagatatcaaaggcctaccggcaggatattccggcaatgaggatcagactaccggtattctgcaagggaacaacgatcacaagat

SEQ ID NO: 169741 - DNA, 369 bp, Arabidopsis thaliana nossen
  unsure (1)..(369): unsure at all n locations
gattaaggccactaagccttttaagaaaggcaagagagagcctgaagatgatattgacaccattgtgggtcttaagaagcanaagaaagacgtgattgctgctgtccagaaggaaaaagctgtgaagaaggttcctaagaaggttgagagctctgatgattcagattctgaatctgaggaagaggagaaggctaagaaagtcccagccaagaaggctgcttcaagcagtgatgagtcatctgatgactcttcttcagatgatgaacctgcacccaagaaggccgttgctgctactaacggaactgttgcaaagaagtctaaggatgactcatcatcatctgatgatgattcttcagacgaggaagttgc

SEQ ID NO: 169742 - DNA, 372 bp, Arabidopsis thaliana nossen
  unsure (1)..(372): unsure at all n locations
gattaaggccactaagccttttaagaaaggcaagagagagcctgaagaggatattgacaccattgtgagtcttaagaagcanaagaaagacgtgattgctgctgtccagaaggaaaaagctgtgaagaaggttcctaagaaggttgagagctctgatgattcagattctgaatctgaggaagaggagaaggctaagaaagtcccagccaagaaggctgcttcaagcagtgatgagtcatctgatgactcttcttcagatgatgaacctgcacccaagaaggccgttgctgctactaacggaactgttgcaaagaagtctaaggatgactcatcatcatctgatgatgattcttcagacgaggaagttgctgt

SEQ ID NO: 169743 - DNA, 374 bp, Arabidopsis thaliana nossen
  unsure (1)..(374): unsure at all n locations
ngncgacgaaggaaccagaatctgtttacgagttaagcatcgaggatgcggaanggaacaactttgggcgcattcaatacaaagacaaagttcttttaattgtcaatgttgcttccaaatgtgggatgacaaactcaaactacactgaattgaatgagctttacaacaggtctggagattctagcatttccttgtaaccagtttggtgacgaggaaccgggaactaatgaccaaattactgactttgtttgtactcgcttcaaatctgaattccccattttcaacaagattgaagtaaacggagagaatgcttctcctctgtataagttcctgaagaaaggcaaatggggaatcttcggcgatgacattcaatg

SEQ ID NO: 169744 - DNA, 380 bp, Arabidopsis thaliana nossen
ttgaaatccgtatgagagtactcatttaaataatctatactgatagcttatattataaaaaaagtataatatttcttcacatggtatgtaaaaaaaacatatgattatagtaatctttcttaaaaaatataaataaaaaaagctcacttagtgtactgaaagacaatcactaaattccacgatgaaaatccattccttaacaatcctaaataatcaaactcaaataactttgttttaggtcaagctttttttatataattaatattaagtttttttttgtcgtggaaatctttgttctattcttaatatatgtatataaattattgtaatatggaattataattcactttttctgtatttgcataaaatcacaataaaat

SEQ ID NO: 169745 - DNA, 318 bp, Arabidopsis thaliana nossen
gctaatttctactatttgtgttggagggatatattataataaaaagagccaatggcggacctaacaggaacccatcacgagatgataagccgagacagtacccaagaggcccatccgaaggccaggcagatggtgaaggcagcaaccgctgtcacagccggtggatcccttcttgtcctcttcggcttaacactcgctggaacagtcatcgcactcacggtggctactcctcttctcgtcatcttcagccccgtcttggtttcagcagtggtaaccgttgctctcatcattaccggatttcttgcatccggtggcttt

SEQ ID NO: 169746 - DNA, 358 bp, Arabidopsis thaliana nossen
  unsure (1)..(358): unsure at all n locations
cccccctttacctatcttttttattaaaaaaccgttccataacaaattggggagtacgtattancaagaatgttagaccataaagaagctatcatatcccatttaagttgggccagcctctttctagggttccatactttgggactttatgttcataacgacgtcatgcttgcttttggtactcccgaaaaacaaatcttgatcgaacctatatttgcccaatggatacaatctgctcatgggaaaactttatatggatttgatgtacttttatcttcgacaagtggcccagcatttaatgcgggtcgcagcatatggttgcctggctggttaaatgctattaatgagaatagttatt

SEQ ID NO: 169747 - DNA, 227 bp, Arabidopsis thaliana nossen
  unsure (1)..(227): unsure at all n locations
tggaagnnnaccaccacttgttagtcttgaagtttagttggttttcanacacaatcccacaaatgttggtgatgaaagtagatctgcaccaaacattcacgagaacaatgacggcctttaattactcaaaaccgctacacaaaatgctcaatacactgcaaagctattcatccaaatcccacaattacacttcaaacaccactccaaaaaaaagtacccacaactca

SEQ ID NO: 169748 - DNA, 174 bp, Arabidopsis thaliana nossen
aaaaaaaaataaatgattgaaattcacaaattgtctgcctaattaaaagcgtatacattacacaatatcaacaagagccaactaagctatgaaaccaatctccacaatttcataggaatcacctctccatataaaggttccccaagcacacttggatatgtaattggtgaatgt

SEQ ID NO: 169749 - DNA, 295 bp, Arabidopsis thaliana nossen
  unsure (1)..(295): unsure at all n locations
gaaggactggagtttgatttcaaggagatgcctgtcggaggagcagccttggatttggatggagttcgattgccggangaaactttcacggctgcaaaactatctgatgccattcttcttggagctattggagggtacaaatgggacaagaatgagaaacatctgagacctgagatggctctgttttaccttagaagagatctcaaagtctttgctaatttgagacctgctacagttttgccacaactagttgatgcttccacactgaagaaagaagtagcagaaggtgttgata

SEQ ID NO: 169750 - DNA, 229 bp, Arabidopsis thaliana nossen
aaaccccaacaaatcatcctacacctaaccccaccacagtatcaaatccagctctccctcctccataaacgccgtgctcaacacaaccaccaatgtcacaaccactccctctccaaccaaacctaccaaacccgaaacattcatctcccgattcgctccagatcaaccccgcaaaggcgctgatatcctcgtcgaaactttagaacgtcaaggccgaaaaaccgtattc

SEQ ID NO: 169751 - DNA, 276 bp, Arabidopsis thaliana nossen
cctaatctccttggctctctttggtgcctttgttagccgtgcagggatccacaccgtagatgttttgacccctaaagttatcattgggctccttgttggtgccatgcttccttactggttctctgccatgacaatgaaaagtgtgggaagtgcaactcttaaaatggttgaagaagttcgcaggcagttcaacaccatccctggactttatgaaagaaccgcaaaaccagactaccccacatgtgtcaagatcttcacccatgctttcatcaaaga

SEQ ID NO: 169752 - DNA, 362 bp, Arabidopsis thaliana nossen
tagtagttgacccacgctacgcacgggcctttaatgttatttatattagtagaatcgttctttcacatggaagaggaagaacatgggggctctttacaatattttagttataaattttgcacaattcaaagttcagagccttatgagaagactctatttttttattcctccaatggtaaacccctattttggggccttaacaataaatcattaacaatggtaaagaccaaagagacattgtatgtttgtttcagacaaacttaaaaccaagccaagctagaactagttcctctccttatgtcatcatgtattcagctgcattccttctcataatccagtcgagaaaaaccgaatagtttcag

SEQ ID NO: 169753 - DNA, 362 bp, Arabidopsis thaliana nossen
aaaaactgtcaattggaaagcaatagtcatgttttggatcctccaagctattggcggaagaatatacaccatttaatcctcttacccactaaaaatttttaataaataaagggattttatcatgaatccgttgattcgagatgacttagttccaatttctttttaccacttttagtctattcggacatgaagttaaaggttcttttttacttcacaaatgggtatactggatcgcgtatctcatttatttatatagccagatttatagacctattaaagaaagtcacaccctatatctttctctacatagtgatcgtattaactcatagggctatgttctatttggcgaaaaaaaaataaaa

SEQ ID NO: 169754 - DNA, 373 bp, Arabidopsis thaliana nossen
attttcactgagcgcataacatttttgagacaagagactctctctctcgctcttctctctttctgtccccctctctccggcgatggttgttgctatggaccaacgcaccaatgtgaacggagatcccggcgccggagaccggaagaaagaagaaaggtttgatccgagtgcacaaccaccgttcaagatcggagatataagggcggcgattcctaagcactgttgggttaagagtcctttgagatcaatgagttacgtcgtcagagacattatcgccgtcgcggctttggccatcgctgccgtgtatgttgatagctggttcctttggcctctttattgggccgcccaaggaacacttttctgggccatcttt

SEQ ID NO: 169755 - DNA, 364 bp, Arabidopsis thaliana nossen
cggacgcgtgggcggacgcgtgggcggacgcgtgggcttacttgcagcgatgggtaaagagaaggttggcattaacattgtggtcattggtcatgttgattctggaaaatcgaccacaactggtcacttgatctataagcttggtggtattgacaagcgtgtcatcgagaggttcgagaaggaggctgctgagatgaacaagaggtccttcaagtacgcatgggtgttggacaaacttaaggccgagcgtgagcgtggtattaccatcgatattgctctatggaagttcgagaccaccaagtactactgcacagtcattgatgccccaggacatcgtgatttcatcaagaacatgattactggt

SEQ ID NO: 169756 - DNA, 363 bp, Arabidopsis thaliana nossen
gaatcatggatcatgtttttggatctatgtcgtttactgttgttttccggttttcataaagcttgatgtgaccttttctcatgtgtgtagattaatgaaacaactgatctaaatgagctagttgaaaaggaaccttggctctcgtctgagaagctggtggtgaaacctgacatgttgtttggaaagcgtggcaagagtggtttggttgccttgaaattagattttgctgatgttgccacttttgttaaagaacgtttgggaaaagaggtaatgcttttgttttgcgcttttaagccattctatagagaccattttgactccatctctctatttgtatcatatgtaggtagagatgagtggatg

SEQ ID NO: 169757 - DNA, 244 bp, Arabidopsis thaliana nossen
  unsure (1)..(244): unsure at all n locations
tttcagnagttattgttggtaccaaggtttgtggcgtatgcttancggttttagaaccatcaatgattggtgaacctgcggatccttttgcaactcctttggaaatattacctgaatggtatttctttcctgtatttcaaatacttcgtacagtgcctaacaaattattgggtgttcttttaatggtttcagtaccagcggtactgtttcgcgtaaaccatttataaataaagccaggctattg

SEQ ID NO: 169758 - DNA, 368 bp, Arabidopsis thaliana nossen
tctatatagaacatatgtaattgattcttgcaagaacaaagattttcagtttttaccaaactactgggcaacttctacataacatatcggataaacggataaaagtatatatccaaaccctactacaaaggaaggggtgagacttgagagtttgtggaaaagaattgaaaggggggtagttggaactgagacattaacgtgagcgccttgattgagagatattatcgacattttcgatcaaccaaagccccttaacgaccagtcttccctcctccaacgtgtcacgttctataacaaatactttttgactttggccatttgtggatctttattaatattgaggcaacgtctattcatgttcactaaat

SEQ ID NO: 169759 - DNA, 368 bp, Arabidopsis thaliana nossen
tttctcaaactctaaaatcaatctctcaaatctctcaaccgtgatcaagaggcatatcaacgttgggagtctcaccggaaagactatcaccctcgaggtggaaagctctgacaccatcgacaacgttaaggccaagatccaggataaggaaggtattcctccggatcagcagaggcttatcttcgccggaaagcagttggaggatggccgcacgttggcggattacaatatccagaaggaatccaccctccacttggttctcaggctccgtggtggtatgcagattttcgttaaaaccctaacgggaaagacgattactcttgaggtggagagctctgacaccattgacaacgtcaaggccaagatcc

SEQ ID NO: 169760 - DNA, 368 bp, Arabidopsis thaliana nossen
cacgttttccagctcttgttctttcgattctcagagaagacttttcagagcttcctccaactttctcagataagcaacaatggtgaaaggtcccggtctctacaccgaaatcggcaaaaaggccagagatcttctgtacaaagaccacaacagtgaccagaaattcagtatcaccactttctctcctgccggtgttgccatcacctcaaccggaactaagaaaggtgacttattgttgggagatgtcgcttttcagtcgaggcgaaagaacattactactgatttgaaagtttgcactgattctacttttctgatcaccgctaccgttgatgaggctgcacccggactgaggtcaatcttcagcttca

SEQ ID NO: 169761 - DNA, 374 bp, Arabidopsis thaliana nossen
atggacgttatgtgagtcttttagttccctgttctcatttacaggaaggttgtcggtattacttgatggaaagcggattagcacttatggtggcatttctcataaatgtctctgtgatatcagtgagtggtgcagtttgtaatgcctcagatttgagtccagaagatcgagctagttgccaagatttggacttaaacaaagcttcatttctgctacgtgtaaatccatgaatcctatatcttttgcttcaatttcttgcataacttctcacattattagaggatatatatatacttattctggttgtctcacagaacgttgtgggtaaatggagctcaaagctatttgcaattgcgttgcttgcttccggtcag

SEQ ID NO: 169762 - DNA, 379 bp, Arabidopsis thaliana nossen
ggccatgcctgtgtccgtacattccgttatcgccacgaacctagccacgacactatcatcgaattaccggaatgtttctcgccgtagaactatctccacctctgtgaattgttcggtggagattacggaggctgatcggtcggtgaaactgaagaacgggaacgattcactggagatatgcagagttctcaacgggatgtggcaaacgagcggaggatgggggaagattgatcgaaacgacgccgttgattcaatgcttcgttacgccgatgctggtctctctactttcgatatggctgatcactatggtcctgctgaagatctttacggtatttttatcaatagagttcgtcgagagcgtccaccggagtacttggag

SEQ ID NO: 169763 - DNA, 354 bp, Arabidopsis thaliana nossen
  unsure (1)..(354): unsure at all n locations
gccgcctgcattattttcaagttaaagttctccactttttggcaattgcgattccaacaacttttgttgagaacaaatattacctgaacagctcttgaaactggctcactcgtaagaggaagtgaagtcacaagaacccctgaatcccattcaccagatttagcatcaccatttctaaacgagtaagcaccaaacccttgcttacgaccttcatgccatgctccttcataacagtgtccattagcaaatcgatacacaccaaacccatgaatcttgtctccaaagtactctcctgcatacttatctccatttctgacacagaaacanaagaaaaagctagcacccagacagaag

SEQ ID NO: 169764 - DNA, 260 bp, Arabidopsis thaliana nossen
ttttcttattatggctgctgccttttcttgggccgcttggttcattatgcagactaagatgtgtgaagagatttgcaacaccgtacacgagcacactactaatgtgtttgatgggaagtatccaatgtggagccattgctttgatctccgatcatacaatctctgattggtctctcagctctcctctccgcttcatatccgccctttatgccggagtggtggcgtctgcgttagctttctgcctaatgtcatgggctatg

SEQ ID NO: 169765 - DNA, 374 bp, Arabidopsis thaliana nossen
gttccattgattcattgtactttatatggcaacttaaagtaataaatttgcagtcttagacttatgtggttagttaaaatataatatggtaactatttttatatcctatcagaatcaaaataaatttagattctttgactaatctgacgggaaaggttaaaaaaaaacagatagagagttttggcgtaaattacaccggagtcaaactttgttccaatttaaaacgaacttaactaatttaattctatccaaaagatatgtgtatcttgcttaagtatagaagataattcacctaaattttagcatttggtagtttttaactttctgttaatgttaaaaaaaaaaaaaaaaaaatagtgcttcttttttactgt

SEQ ID NO: 169766 - DNA, 374 bp, Arabidopsis thaliana nossen
gttccattgattcattgtactatatatggtaacttaaagtaataaatttgcagtctttgacttagtgtggttagttaaaatataatatggtaactatttttatatcctatcagaatcaaaataaatttagattctttgactaatctgacgggaaaggttaaaaaaaaacagatagagagttttggcgtaaattacaccggagtcaaactttgttccaatttaaaacgaacttaactaatttaattctatccaaaagatatgtgtatcttgcttaagtatagaagataattcacctaaattttagcatttggtagtttttaactttctgttaatgttaaaaaaaaaaataaaaaaatagtgcttctttttttact

SEQ ID NO: 169767 - DNA, 379 bp, Arabidopsis thaliana nossen
gccgcttaagagcttatcatctttgtgcttcctgcaaatagctctttggtgttgatctttctcctgcgtgaacaaacatgggtaagacacgtggtatgggagctgggcgtaagttgaagagactccgaattaaccagaggtgggctgacaagcagtacaagaagtctcacttgggaaatgagtggaagaagccttttgctggttcttctcacgctaaaggaattgtccttgagaaaatcggtattgaggctaagcagcctaactctgctatccgtaagtgtgctagagttcagcttatcaagaatggaaagaagattgctgcctttgtccccaatgatggttgtttgaactacatcgaggaaaacgatgaggtcttgat

SEQ ID NO: 169768 - DNA, 337 bp, Arabidopsis thaliana nossen
ggatgttatttttaagtagtcgtaaacacctagtttgggaccattttgggaccaatgtggaagttgcaaatggcaggttttcttgtagtaatatgcatatatactacaaaaaaaaaatgaatattcttacgaaaaaattgcgaccattttttcgtcagaaaattgtggccatatacataaaaaactgtgacatatttatttggtcataaaaacgttactatttcgttatagtgttataaaaacgctcctttctcaaagttaaagatgttttggtaattatatattttctttcgtgttaatttctcgtaaaatattttttactatttcacttttgttt

SEQ ID NO: 169769 - DNA, 189 bp, Arabidopsis thaliana nossen
  unsure (1)..(189): unsure at all n locations
attagaggagtccaaccatttttctcctctctcttgaaaaatcaataacgttatttctgcaatttcttgtttttattcaagctctnctccttcatcatccgacaccgaattcgccgatccaaaccctagctccgatccagatactaattcttagcgtgtccatagacaatctgattttattttattatc

SEQ ID NO: 169770 - DNA, 378 bp, Arabidopsis thaliana nossen
  unsure (1)..(378): unsure at all n locations
cttcgatcttctatgcaaagttccttaatcagcactcacaccacatacggcaacanttcggatgggcgggccacgagaaaccttctacggatgttcaacctctccaagtcccactcatagacctagccggtttcctctccggcgactcgtgcttggcatcggaggctactagactcgtctcaaaggctgcaacgaaacatggcttcttcctaatcactaaccatggtgtcgatgagagcctcttgtctcgtgcctatctgcatatggactctttctttaaggccccagcttgtgagaagcataaggctcagaggaagtggggtgagagctccggttacgctagtagtttcgtcgggagattctcctcaaagctcccgt

SEQ ID NO: 169771 - DNA, 371 bp, Arabidopsis thaliana nossen
catggggtcagtatggggattgaatcggtggtggacaaggaaaacacgggatcatctagtggtgggggggacgcgggttgtcctgcatgtgaaatggcggttgtgtggatacagagccaattgaggcagaacatgactcaagagaggatagtgaactacattaatgagatatgcgagcgcatgcctagtccaaatggagagtctgctgttgactgctcacaactttctaaaatgcctactgtttcattcaccattggaggcaaagtctttgatcttgctcccgaagagtacgtactgaagatttgggaaggaccagtggcacaatgtattagcggctttaccgcacttgatatccctccacctcgtggacc

SEQ ID NO: 169772 - DNA, 248 bp, Arabidopsis thaliana nossen
  unsure (1)..(248): unsure at all n locations
cggacgcgtgggtaaactttttagcattgtctcttttactcggattgtgtggagaaataatttgttgttatttacaacggnaatgatcaacaaatcgatgttggctcggtagttgaagcagtttcggctgatcattcctttggtgctcctctctatgtagttgagagtatgtgtatgcgctgcggtgaaaatggaacaactagatttctattgaccttaataccttacttcaaaaaggtcttaatatc

SEQ ID NO: 169773 - DNA, 362 bp, Arabidopsis thaliana nossen
ctcaaagaattattcattcaggcatcttctcaaatttttgtttgtgaaaggaaccgacatcaaaggatgtctcatttattcgtttcgtttctgctgttttgagtgtcgggttcgtttctctgttatcttttttttccggcgttcgatttgaaaaaatccggggaacaggtgattggaatcacggctatacacgggatatcacggggtgttagctcacatgtccatattgtccgacagaagggttgtttaatcgaaactaatcctttgccgcacggaggacgtggagctctgccgtctgaaggcggcagcccttccgatctcctctttctcgccggtggcggttccagctttaacttcttttc

SEQ ID NO: 169774 - DNA, 327 bp, Arabidopsis thaliana nossen
gttcgaccatagtaatgagtttttgtccccagttggaacgtgaaaaacgcggaacccagttgtggcgtgttcattacaaaatcaattagggcgttatggaatcccctctcaagacctatctccatcatcataggtaaggccatcaataaaccaatctgcacaaatgattgagaagcaagtgcagcttgaacaggcatgttggatcgaaaagctttctggttgctcaatccttcttcaagaccactaagaacgagatacagccgtccatatagaaatacatagaccgtaagcacggttaactgtaagaaagacacagaaaattttcac

SEQ ID NO: 169775 - DNA, 292 bp, Arabidopsis thaliana nossen
  unsure (1)..(292): unsure at all n locations
gcaaacatggcaagaggattgtataaacatctaaagaggctcaatgcttgtaaacattaaattcttgacaaacttaaaggnnccttcnctcccaaaccatcttctctacctcacaagactagcgaaattcttcctcttgccctcatcatcacaaacagttcgaagaatccttaaacttacccagattttatatccatcttgaatcaaaaacatatccaattttactaacccaaccacaaaatcacaagacttaccctacttacttcattatttaaggacatatacccaactc

SEQ ID NO: 169776 - DNA, 349 bp, Arabidopsis thaliana nossen
  unsure (1)..(349): unsure at all n locations
catctcatttaacaagcctgttaaccttcaagagtgtggaaacccatttgtgtatgttaaaacannnatccaaagtatgccaaatctccatcctcattttcctgattaccttgacaactttgcaagcggtagtccatataaatcctctacgacattctctgaaatggtaagcgatggccaaaaagcaaatgagggctttatgatgagcaatgttcgtggagtgggagtagatggatttaatggaagtgtcataagatcttccataaatcaaagatcccatcgtggtaacctcaacttattgagtaactctaacagtcagcaacataatcagtcaagtggcatgatgtgg

SEQ ID NO: 169777 - DNA, 322 bp, Arabidopsis thaliana nossen
ctatttctctttctctttctactatttctctcctgtggagaaactcaggagatatagagagtgagagggaagacaagagagcatgtatgtttggttttataatctctctactcataccaaagatttgtctcagacccaccacttggtcagagagaacccaagctcctttctctctttttctcgatctactccttcttaatctccttttttgaaacttgaagccactttcaacatcatccttaaacttttgttcccttattcacaatctcctgccgcctgtcatttctctatctacatatatgggttctattacaggaaacat

SEQ ID NO: 169778 - DNA, 280 bp, Arabidopsis thaliana nossen
  unsure (1)..(280): unsure at all n locations
ggaaggcattgatatgtgtcactggcagtgaatcaccagtggttgtttgtctctctcaaagtttttgatccttacttacacacagganatatattgttcttgcggatgactgatgagcctattcaagcaggcgagactgctgtcttcattgaaaaatcgccgggaaacacccaatgttaatcccgccttcaaacggcataacacggggtgttagctcacatgtccatattgtccgacagaagggttgttaatccaaactaaacctttgccggcgggggac

SEQ ID NO: 169779 - DNA, 355 bp, Arabidopsis thaliana nossen
gaaaactactcatttctcttcctcttcttcttccgatcgcaggatcggtgctctgctccgtcatctcaattccggctcagattcggacaacctgagctctctttatgcatctccgacatcgggaggcaccggtggttctgttttctctcatcttgttcaagctccagaggatcctattcttggggtgacagttgcatacaacaaagatcctagcccagttaagctgaatttaggagttggtgcttaccgaactgaggagggaaaacctttggttcttaatgttgtgaggaaagctgagcagcagcttatcaatgacagaacaagaatcaaggagtatcttcccattgttggattg

SEQ ID NO: 169780 - DNA, 377 bp, Arabidopsis thaliana nossen
atgagagttggtctgactgccttaactatggcagaatatttccgagatggtaatgagcaagacgtgcgtctatttatcgacaatatcttccgtttcgtacaagcaggatccgaggtatccgccttattgggtagaatgccttctgctgtgggttatcaacccacccttagtaccgaaatgggtactttacaagaaagaattacttctacgaaaaaggggtccataacctctattcaagcagtttatgtacctgcagatgatttgactgaccccgcacctgccaccacatttgcacatttagatgcgactaccgtactatcaagaggattagctgccaaaggtatctatccagcggtagatcctttagattcaacgtc

SEQ ID NO: 169781 - DNA, 380 bp, Arabidopsis thaliana nossen
ttttcaaataaagattagggttttctactttcacgcttgcccacactacgtttttttttgtttaaatatacagtaaaaaaaaattgtgaagaaaaataaatacttacgtataggtgtatagccttttaaccaaaataaaaggacgtgatttacattttttttttttttggaatatttcagtaaaattgttgctactaaattagtttttctgtaagcaaagttttctagaattgattcagcttgcttccaaattccgtatctactagattctttcaacattgagtttctttcattaggtcagctcaaagcataaaggtgttcttcatataaaagacattaaaccagatagtaaaccataaacttaggtaacattaaatcag

SEQ ID NO: 169782 - DNA, 346 bp, Arabidopsis thaliana nossen
tgcttctttacagagcattaaaccgtgttgaagatatggagaatcttgcgtcttccggtaataactgtgttgtggaggagttggagactcttctaactgaatctggacacttacggacacttgcattcctctatgcaactaaggggatgggtgcgaaggctcttgctatttggcgtctctttacgaagaattattcatctggtctatggcaagactcagatgacttggtaccctatttacacgataacgagctcattaggttatctggtaaagaggctgctgccgcagaagcagccagaattcttgaggaaccctgtgatccagaactggcattgcagcatcttag

SEQ ID NO: 169783 - DNA, 374 bp, Arabidopsis thaliana nossen
cggacgcgtgttcaaaatacattcttcgttattatgaaactgttttgagtgtatgagaaagatcggcgatgttttctcactagcattctcaccagctcatgttgcaagctttgtctatgttgggagcttatagatcgctcctccattagcttcgaaatggttgaatcagcctgcaccagatttaaactctttagcacagttacatatagcacggaagttatggattttaaaatttgataagcagacctgttttaacttggattcaagagcatccactttcagcttcatcttctcaatgtctttaaccaacttaagttcatccaatcctctgacattctggccatctgttttctgcagctggacaacatctctct

SEQ ID NO: 169784 - DNA, 375 bp, Arabidopsis thaliana nossen
cggacgcgtgggcaaaatacatgcttcgttattatgaaactgttttgagggtaggagaaagaaacgagcgatgttttctcactagcattctcaccagctcatgttgcaagctttgtctatgttgggagcttatagatcgctcctccattagcttcgaaatggttgaatcagcctgcaccagatttaaactctttagcacagttacatatagcacggaagttatggattttaaaatttgataagcagacctgttttaacttggattcaagagcatccactttcagcttcatctcctcaatgtctttaaccaacttaagttcatccaatcctctgacattctggccatctgttttctgcagctggacaacatctctc

SEQ ID NO: 169785 - DNA, 229 bp, Arabidopsis thaliana nossen
  unsure (1)..(229): unsure at all n locations
ncaaacacttttttaaaaaacttttctaccaccacacaaacccacacatgttcaatttaaaaatttgtagtctttaaaaaaaaactttnaacaaaaataaatactaacatatagatgtataaccttttaaccaaaataaaaaacccatactaacatttataataaaaaatattcatattactttaccaacactaccactacaaaacaatattccccataattacttcaa

SEQ ID NO: 169786 - DNA, 369 bp, Arabidopsis thaliana nossen
caaaacacacccaaatatgcataagcttttgttttctcttctctccggggtctcactctcatttgtgcggcttcttccatggcgccgaggcacgccagcgagaggcgccgtttccaaacgcctgccatttcagccaaatcaacagcctcgcgcccgctcaggcgacgaagttcgaagccggtcagatggaagtatgggaccacatgagccctgagctccgatgcgccggtgtaacggtggctcgcatcacccttcagcccaattccattttcttgcccgctttctttagcccacctgcccttgcttacgttgtccaaggagaaggagttatggggacgattgcttcttgttgtcctgagacttttgcag

SEQ ID NO: 169787 - DNA, 353 bp, Arabidopsis thaliana nossen
ctaaagtcaaaagcaatagacgctctgtgatagctctctggtccaataatcgagaaacctatcttgacgaccttctccgacgccggtatagcccacgcttgccagcgtcgggatttttccttccctgcttctctctatttcacattgctatctgtttcccctcttgtgcggccgtttcctcaatcatctagtgtaatcaagcgtcttaaagtggagaacggcatttcatcctccatcatactcagatctatcgacgctggttcttcctcgatctccctttaaaccttcttccaccgtatctcgctgccggtagttacttcttcacctccccttgcgattcaaccaaatccctc

SEQ ID NO: 169788 - DNA, 368 bp, Arabidopsis thaliana nossen
ctcgcggttcttaaagtctacggtgtaccgtacattatctttgtgatggggttggatgctgtcacgtggttgcatcatcatggtcacgatgagaagttgccttggtataaaggcaaggaatggagttatctacgtggaggattaacaacaattgatagagattacggaatctttaacaacattcatcacgacattggaactcacgtgatccatcatctcttcccacaaatccctcactatcacttggtcgacgccactaaagcagctaaacatgtgttgggaagatactacagagaaccaaagacgtcaggagcaataccgatccacttggtggagagtttggtcgcaagtattaagaaagatcatta

SEQ ID NO: 169789 - DNA, 370 bp, Arabidopsis thaliana nossen
ggagacaatacttctggggtttcaacactacttagtgatgcttggaacagctgttctcattccagcaggtgttagtttcaaagattgatgcaagaaacgaagataaggtaaagttgattcagacgttgctctttgtgtctggaatcaacacgttatttcaaagcttctttgggactcgtcttcctgctgtcattggagcttcttactcttatgtgccaactacaatgtcaatcgtcttagctgctcgttacaatgacattatggatcctcaaaagagatttgaacagatcatgcgtggaatccaaggtgctcttattattgcctcatttcttcatatccttgttggtttcagtggcctttggcgcaatgt

SEQ ID NO: 169790 - DNA, 381 bp, Arabidopsis thaliana nossen
atttacaaatattcctaagctatggccgagtaaattaaaagaaaaaaacagtatttgttgattattctattaagaaagaatggaaaaataaaaaacagacatggatctgtttcagtaacaaattcgttgcactccaaatgattgttaacgacttcgacatcatcatcttcattattgagtatttctttgtttgttggagtttgaattagatcaaaccaaaactatctctcttcgtctatgacaagaagatttaaatcaaaattagaattcattaatgaaaattgtgatcttttttttttttgattcttttgtttgtgttgtgtcgatatatattagcatcatgagttttcagtttggcttcaatacaattttacaattttg

SEQ ID NO: 169791 - DNA, 370 bp, Arabidopsis thaliana nossen
caattttcttctgctgctgcttcttcacaaggtttctatttcttcaagtctgtaggttgaagaatgtcagctccgaaatcgggtggtgatccactaccacatccgccgaaagaacagcttccagatatctcttactgcattacaagtcctcctccatggcctgaggctgttctgcttgggtttcaacactaccttgtgatgcttggaacaacagttctgattccatcggctcttgttccacaaatgggaggtagaaatgaagagaaggcaaagctgatccagacaatactgtttgtagctggattgaacacattgctccaaactgtgtttggaactagattacctgctgttattggagcatcttatacat

SEQ ID NO: 169792 - DNA, 367 bp, Arabidopsis thaliana nossen
agcgacttttgcacatttctagggttccaatcaaaatctatctgcaacaggaatggctaatcgtggcagatcagggatctccttcttcaagaccatcgccgtatcagattctgtctcctccgttagatccaagtcgcttttcccagcgttgagaacttatgcaactgcttctgctcaaacaaccgctaatgttaaggtgcctattgctttagttggtgaaaatgggaactttgcttcatggctatacattgcagctgtgaaaatgaattccttggaaaagattgagacggatctttctgagatgattgaggcaatgaagacagctcctatttttgctcagtttacaaaggatccctctgttcctaga

SEQ ID NO: 169793 - DNA, 371 bp, Arabidopsis thaliana nossen
  unsure (1)..(371): unsure at all n locations
gtgagagaagaaagatagagaaaaaaaatgggaggcaaaggtgtgatgatggtggcgatactttggctgggggcactctctgcaacatctgaagcagtaacagaggctgagccaggtttgatgatgaacttctacaaggacacgtgtcctcaggccgaagacatcgtccgtgaacaagtcaaactcctctacaaacgccacaagaacaccgctttctcttggctccgtaacatcttccatgactgcgccgttgagtcatgtgatgcgtcgcttttgctggattcgacaagaagagagctaggagagaaagaacacgacaggagcttcggacttagaaactntaggtacatcgaggagatcaaggaagctct

SEQ ID NO: 169794 - DNA, 280 bp, Arabidopsis thaliana nossen
  unsure (1)..(280): unsure at all n locations
tttacaaatattcctaagcatttaccccctaaatcaaaagaaaaaaacgttatttttaaattattctgtttacaaaaaatcnaaaaataaaaaacatacatgtatctgtttcattaacaaattctatgcactccaaatgatcgttaactacttctacatcatcatcttcattattgagtattcctttgttcgctcgaattcgaattatatcaaaccaaaactatctctcttcttctatgacaagaatatttaaatcaaatttacaattcattaatgaaaa

SEQ ID NO: 169795 - DNA, 376 bp, Arabidopsis thaliana nossen
atcctatcctgttacacttgatatactattttatattggatttcttattgcttttgccgacatatcagggattatacctttacatacttggttacctgacacccacggtgaggcacattacagtacctgtatgcttctcgctggaatcttattaaaaatgggagcctatgggttggttcgaatcaatatggaattattaccccacgctcattctatgttttctccttggttgttggtagtcggtacaatccaaataatttatgcagcttcaacatcttccggtcaacgtaatttaaaaaagagaatagcctattcttctgtatctcatatgggttttataattataggtattagttctataacggatcctggactt

SEQ ID NO: 169796 - DNA, 363 bp, Arabidopsis thaliana nossen
gaagatatatagatctgaccaaagtaagaagggcttttactaagagtggaacagaggaatatggggacgaccgtgaaaaacaagcaagtgatactgagaaattatgtgaagggtatccctaaagaatctgacctaatgattatcacagcttcagaccccgtggaactcaaggttaagcccggatcagcggcggttatggtgaggaatctttacttgtcttgtgacccttacatggggattctcatgagagaaccaactccttccactctagcacttttggatgccttcatccccggaaaggtaacaactctccacacacatacatacatacacaaggccttaataagaaaatggtgctgattc

SEQ ID NO: 169797 - DNA, 370 bp, Arabidopsis thaliana nossen
ttgcaagatgactatatataccacaaccgtgaattagaccaaggaaagggagtatgacaatatggaagtgagatctgattagatcttatctcatgtaatgttatgttccaacagcactgaatactatcgagcctttccagattcgtcctgaactgaaagaactagacacattccgggtagaaacaatggtaagatgccaaggaacattttgcattggcagacattattacagggaagcactaatcgaacacagctgattttctcattcaggctaagcctatgccagcttctcagattcctttttctctacgagtttgatgaaattgcgaacaattgtcttgccttcggttgttataatactctccggatg

SEQ ID NO: 169798 - DNA, 369 bp, Arabidopsis thaliana nossen
aaatctctctctctttcttctctatcgctttcatttttctcctccagagcgtcgattccaatctgtctgtccctctctacttccttcaacagaaatggaaacgttcctatttacctctgaatccgtcaatgaaggacacccagacaagctttgtgaccagatttctgatgcgatccttgatgcttgcttagagcaagatcctgaaagcaaagtggcgtgtgagacatgcaccaagaccaacatggtgatggtgtttggtgagatcactaccgctgcgaaagttgactatgagaagattgttagatccacttgcagggagattggttttatctctgctgatgttggtcttgacgctgacaaatgcaatgt

SEQ ID NO: 169799 - DNA, 369 bp, Arabidopsis thaliana nossen
caaattagctatttgaaatcaagagcatctgaaggtcatgtacatcattaacttccgagataaaattgatcctcctggtaccttttgcctttcattggcgattgctaattgctgctctaacatatttaaacgctccttctgcaacgaacatgtctcctgcagggtaaaactaaatatgagacaggaatgcgaaaaatgcacaactttgaactgacatccaatactaaaacaaaaaaagtactaacctccaacgatcctgattttgctgtcaagatgtctagctcttgcgatgactttccgacattctcctggtacttcctgatctcctcagacagcttctgtgactgtacaacttggcgatcacggtca

SEQ ID NO: 169800 - DNA, 374 bp, Arabidopsis thaliana nossen
gttgaaatatataccctaaattggaaatagagaacctaaatataacattttaaatttattttggttgaatagatttaatataaaattgtggttttattattgtcacttttaaaaaaatttcaaataattatttaagtgctatttatgtctaaaaaactttgtaatgctatttttgtccaaaaaacttaaaagtgtactatttgtgggaatttctctacatatactacttctacttgacacacacacacttgcaaacttgcacttagacctaatgatggctcttacacaagacaagtagccaccctacatgcattggaactctcaccccttgattcactcttctactctaactcttagacttacaacacaacact

SEQ ID NO: 169801 - DNA, 370 bp, Arabidopsis thaliana nossen
gcacgaggaggaaaaatgccagcgggtcatggagttcgggcgagaacgagggatctgttcgcgaggccattcaggaagaagggttacattccactctcgacttacctgagaaccttcaaggtcggcgattacgtcgatgtgaaggtgaatggtgcgatccacaagggtatgcctcacaagttctaccacggtcgtactggtcgtatctggaacgtcactaaacgtgccgtcggtgttgaagtcaacaaacagattggcaacaggatcataaggaagaggattcatgtgcgtgtggagcatgtgcagcaatcaagatgtgctgaggagttcaagctgaggaagaagaagaatgatgagctcaaggctgcag

SEQ ID NO: 169802 - DNA, 240 bp, Arabidopsis thaliana nossen
tctgcattgtttatttccggaatatgagtgtgtgacttgttagaattgaccctatggatagtacagagaatggggtctgccatctctatcaagatggttttactttgactgatattcattcaagtatctacctactcgaatttcatgaacttcatcacatttatactatctattatgcataacttaaattctcaatcctcgtagccagacttcttttcatggtattagatttactatgaa

SEQ ID NO: 169803 - DNA, 82 bp, Arabidopsis thaliana nossen
ctccaaactccacggttaagtctttaagctccgagatttgaatcttcccatctttgttcctatcgattttatcaaacaaact

SEQ ID NO: 169804 - DNA, 370 bp, Arabidopsis thaliana nossen
gaagaaaactctccgtctttttgtaacttttgcttcacctctcttctcttgttctatttttttttttccgcttcaggcaaaattcatcaagactggtcaatttgaagaatgtcgcaatcaaccgtagatgtgccgccaaagggtgggtttagcttcgatctgtgtaagagaaatgatatgcttacacaaaagggtcttaaagctccgtcttttttgaagactggaactaccattgttggtttgattttcaaggatggtgtgatactaggggcggatacccgagcaactgaggggccaattgttgctgataagaactgtgagaagattcactatatggcaccaaacatatattgctgtggtgcaggaactg

SEQ ID NO: 169805 - DNA, 368 bp, Arabidopsis thaliana nossen
atcattaccaaatcatcaacttaatcgtttctctcaaatttagggttgtctcttttctcgaaagtcttgcggttttctgaatcatctctatctggtttgagggtttcgtttgatatctggagaaaggggtttctggaaacaaggagttcataattcgcgatcttgatctatcgatcttcatttatatataaaagcgtgaatgagattatgatggagtcgaaaggtggtaaaaagaagtccagcagtagtagttccttattttacgaagctcccctcggttacagcattgaagacgttcgtccaaacggtggaatcaagaaattcaaatcttctgtctactcaaactgctccaagaggccatcctgagt

SEQ ID NO: 169806 - DNA, 368 bp, Arabidopsis thaliana nossen
aaacctcttcttcagtcttttagagatctcacgtttcaaacaacaagaatggcgttccctaaggtatacttcgacatgaccatcgacggccagcccgcgggaaggatcgtgatggagctgtacaccgataagactcccaggactgccgagaatttcagagctctctgcaccggagagaaaggtgttggcggtaccggaaaaccccttcacttcaagggatctaagtttcaccgtgtgatccctaacttcatgtgccagggaggagatttcaccgccgggaacggaacaggcggtgagtcgatctacgggagcaagttcgaggacgagaatttcgagaggaagcacaccggaccggggatcctgtcgat

SEQ ID NO: 169807 - DNA, 366 bp, Arabidopsis thaliana nossen
aagagtttcattgaaaatttcaagaaccctagttaataacgataatgggttcgagagttttggcttccttctttgttttcttaatcttcacggtcatcacattgcctcccacgatccaagcttgcactccttgtactcgtcctcatcctccggttccgaaacctccacaacacggcggtggtggaggtggtggtagcaagccgcctccacatcacggtggaaaaggtggtggtaaacccccaccccacggtggaaaaggtggaggaccgccgcatcatggtggaggaggaggaggaggagggaaatcaccgccggttgtttgacctcctcccgtagtggggaggccaccgccaatcataagacctc

SEQ ID NO: 169808 - DNA, 374 bp, Arabidopsis thaliana nossen
aaaaaggatttgtcgtatgtctatttcagaaacgtaagtttttattttggaaatgtgagtttccatcgtgtttccaaacatagatatttaggaaatgcgtttccataacgattttcgtgtttccaaaaaatttccgtttccaattggaaacgggaaacggacctcggagcgactttccatgcaacctagctactcaataacaaaaaccttcatttctctctcattacaaccaaaccccactcctctttttacaaccaaaccccactccgaattccagtgtccatccacaaccatcatatcttaattttaagtttgcatcgtacggtccacaatttaacatattattttgctttctaactatttaagagtttgta

SEQ ID NO: 169809 - DNA, 372 bp, Arabidopsis thaliana nossen
cggacgcgtgggtttacacatgcttgggatcatttaccgtgatctgaaacccgagaacgttcttgtgagagatgatgggcacgtgatgctttcggattttgatctctccctgagatgtactgtgagcctctctatagtcagatcagctaatgttggatccgaaggcttgtcgaagaattcggtttcttgctcgcaacaacctgcatgcatccagcaaccatcttgcatctcaatggctccaacatcttgcttcggtcctcggttcttctcatcgaaatccaagaaagacaagaaaccgaaaaccgaaaacgggaaccaccaagtaactccgttaccagaactcgttgcagagcccacaggcgcccgttctat

SEQ ID NO: 169810 - DNA, 373 bp, Arabidopsis thaliana nossen
cgacgatacactctttcactgacttacccctacctcaaaatcaccttgttcttcatcgtctcagctcaggaattgctaactacctgtttttgaatttgagatctgtttttgtttctagaagaaaacagcttgttttcaccgtctctgatcctctgatttgatcggaatctaatgggtaaaaccaccgggaacagagattggactcagatctacgctatttacggaatcgaacaatggcagacactcgtcttccttctcttccatgctttcttcttctctcttctctctcttctcttcctcatctacttcgatcagatttgcttcttcctcgattccttcttcctctccggcgccgccagattagccgcgggtt

SEQ ID NO: 169811 - DNA, 423 bp, Arabidopsis thaliana nossen
ggccccgggcacgcggtccggggttcgagcgctacgccccacgcacatcagcacgagtggggagaataatggcaagggctcctggctcagcgcggggtgacgataaccattgtcactacacctcaaaacgcaggccggttcaagaacgttcttagccgggctatccaatccggcttgcccatcaatctcgtgcaagtaaagtttccatctcaagaatcgggttcaccggaaggacaggagaatttggacttgctcgattcattgggggcttcattaaccttcttcaaagcatttagcctgctcgaggaaccagtcgagaagctcttgaaagagattcaacctaggccaaactgcataatcgctgacatgtgtttgccttatacaaacagaattgccaagaatcttggtataccaaaaatcatc

SEQ ID NO: 169812 - DNA, 378 bp, Arabidopsis thaliana nossen
ctctggaaaactaagctgtgccaacctccaaaatgaaggtggctccttgtgttgaccgtccttggccaccttaacacttgctgaagtgtcatctgagtgaccaagagggcggctaaaagtctgtgaatgagagcgctcattttggggatctgatatcaaaaggggtgatataggggactccggatctgaaccatttgatttctgacgttgtggacactgaatgtcaatttttggtaattctggtaaccgcatctcgaaactatcttgtcttttgatggtgggttccttctcaccaacatccaacgacgagccattttctcccagtttctctggtgcagggctatgatcattgggcgattcttcactattaaagcacaa

SEQ ID NO: 169813 - DNA, 367 bp, Arabidopsis thaliana nossen
ctagattcttgagttctccgatggttctaggaatctctccggcgagtttattgtcgaagagagtgagctcgatgaggttaacgagattccctaactccgatggaatcacaccttcgagattatttgtgttgagagacagaatctttagtttcttgagcttgaagatatccacagggatttcaccagagagagaattatcagctaaatcaagaacttctagctccgacaagtctccaagctccttagggattgaaccagtgagattcacggaggttaagctgagcaaagtcagagactttatctgtcggagattcgtcgccggtaacggaccttgaaaatccatgacttggagttgtatctccgagac

SEQ ID NO: 169814 - DNA, 374 bp, Arabidopsis thaliana nossen
cggacgcgtggggtttttgatgcaaggcaaagcaggacgtcacgcacgtgtgttcaggaagtatcaagagaaagctgattcctttatgtgttccttgttgggtaaaagctcgaggaacattcagaagacaccaggtggtttgattttcagacaacgttggaacaatatgcagtttgtcacaagcgcttccttcttgaccacggtttactcagattacctaacttcttctcgaagcaacttgagatgtgccgcgggaaatgtcgcaccttcgcagcttctttcctttgctaaatctcaggtggattatattcttggagataacccgagagctaccagctacatggttggttatggtaacaatttccctcagagag

SEQ ID NO: 169815 - DNA, 371 bp, Arabidopsis thaliana nossen
atctgaaggatattatgcgttttcattacagaattattatgaagctatgcgacttgaaatttatccggatgatcgaaattatatactctattatataagccttattcatacatttaatattgaacataccatagcttaataatattttatacgtatattacaacgataccgttttttaccacaagctaattatattatggctataatttattattatcatatctattttaattatcaaatctctatagcgcgtcatctagtttatttcaaacatgctaatattataaatgtgtgtcattatataccacaaagagattcaaaacaagttccaatttaaagagtgaagagatttaaggatttttcgggaagat

SEQ ID NO: 169816 - DNA, 375 bp, Arabidopsis thaliana nossen
gcatgtgaaaatacccgctggaaagcgctgtggattcgttcagttttgcgagaagagctgtgcagaggaagctcttagaatgctgaatggagtgcaattaggcggaacaaccgtcaggctctcatggggccgaagtccttcgaacaaacagtcgggggatccgagccagttttactacggtgggtatggacaaggacaggagcagtatgggtacacgatgcctcaagaccctaatgcatattacggaggctactctggtggaggatacagcggtggttaccagcagacaccacaggcaggacagcaaccaccacaacagccaccacagcagcaacaagtcgggtttagctactaaccccgagagtattgcttgag

SEQ ID NO: 169817 - DNA, 376 bp, Arabidopsis thaliana nossen
gtttttgagcaatgggaggttcaagaatgctgatcatcaggccgtggtgaactctaactcgagcagattatccatagccacgttccagaaccccgcgccggatgccacagtgtatccactgaaagtaagagaaggagagaaggcaatattggaggagccaatcacgtttgccgagatgtataagagaaagatgggaagagatttggagcttgctcgcctcaagaagctggctaaagaggagcgtgaccacaaagaagttgccaagcctgtcaaccaaatcttcgcttagaatctctgtgttcttgcttacttgttgttgcgttggttctgttttgtacgttggtactgaaaattatgctaggctcggtgtgttttg

SEQ ID NO: 169818 - DNA, 373 bp, Arabidopsis thaliana nossen
gtttaagtactacagattcaaatcaatccaactaatggaaaatccagaaagccaatcaacaaacttaaggacatccattcccaacataatccacagaggctggagctaatctcactgctcttccttttacctcatcaaaacggttagtgttcataggacttgactgcttgttcagacctagttctttcttaaagattgttatctactttgttttaattatgtttttaggaggatgatgtattcttatgttttataatgtttgtaattttattttgtaatatggtattcttttaaatataattaataaaaatatgtttggaaataattaataataaatattaatattaatactgaaataaatacataaatactg

SEQ ID NO: 169819 - DNA, 375 bp, Arabidopsis thaliana nossen
cctctcaacgtgttttttatatatattttgaaaatcttttacgccttgaaaggatctacgataattaaaaaaaaaatggcaacggaatgcattgcaacggtccctcaaatattcagtgaaaacaaaaccaaagaggattcttcgatcttcgatgcaaagctccttaatcagcactcacaccacatacctcaacagttcgtatggcccgaccacgagaaaccttctacggatgttcaacctctccaagtcccactcatagacctagccggtttcctctccggcgactcgtgcttggcatcggaggctactagactcgtctcaaaggctgcaacgaaacatggcttcttcctaatcactaaccatggtgtcgatgag

SEQ ID NO: 169820 - DNA, 76 bp, Arabidopsis thaliana nossen
atcgactacctttcgaatctttaccagtaatgattcgaaaggtagtcgatcattactggtaaagattgtgaccgag

SEQ ID NO: 169821 - DNA, 375 bp, Arabidopsis thaliana nossen
gcctcgttgcccctctgatccttccggcgacaaactccagtcttggatacaagaaatggcggtgtttgtgaagagcttagacgctaaacacttggtggagatcggacttgaaggcttctatggtccctctgcccctgcgagaaccagattcaaccccaacccctacgctgcacaagtcggaactgacttcatcagaaataatcaggttcttggcattgattttgcctcggttcacgtctatccagattcctggtatgttttttaatgcaaaataccaagaaacagagactgccctgaatctgaaaacagagaacagctgaaaaatgcagtaaataatttgtgaactgtaggatatctccggcagtatcaaattct

SEQ ID NO: 169822 - DNA, 373 bp, Arabidopsis thaliana nossen
  unsure (1)..(373): unsure at all n locations
ctctcgcatgcggctcttgcaacccacggaagggcggaaagcactccggtaaagcccctaagctaccagttcctccggngaccgtccctaagctaccagttcctccggtgaccgtccctaagctaccagtccctccggtgacagtccctaagctacccgttcctcctgtgaccatccctaagctacccgttccaccagtgactgtacctaagctacccgttcctcctgtgaccgtccccaagctacccgttcctccagtgaccgtccccaagctacccgttcctccagtgacagtccctaagctacccgttcccccggtaactgtacctaagctacccgttcctccagtgaccgtccctaagctacccctacc

SEQ ID NO: 169823 - DNA, 319 bp, Arabidopsis thaliana nossen
caaatttcaatggcgtccggtgatgttgagtatcggtgcttcgttggaggtctggcatgggccactgatgacggagctcttgagactgccttcgctcaatacggcgacgttattgattccaagatcattaacgatcgtgagactggaagatcaaggggattcggattcgtcaccttcaaggatgagaaagccatgaaggatgcgattgagggaatgaacggacaagatctcgatggccgtagcatcactgttaacgaggctcagtcacgaggaagcggtggcggcggaggccaccgtggaggtggtggcggtggatacc

SEQ ID NO: 169824 - DNA, 379 bp, Arabidopsis thaliana nossen
caacgtaaaacactaactaagagatcaatatggctggagtgatgaagttggcatgcatggtcttggcttgcatgattgtggccggtccaatcacagcgaacgcgcttatgagttgtggcaccgtcaacggcaacctggcagggtgcattgcctacttgacccgaggtgctccacttacccaagggtgctgcaacggcgttactaaccttaaaaacatggccagtacaaccccagaccgtcagcaagcttgccgttgccttcaatctgccgctaaagccgttggtcccggtctcaacactgcccgtgcagctggacttcctagcgcatgcaaagtcaatattccttacaaaatcagcgccagcaccaactgcaacaccgt

SEQ ID NO: 169825 - DNA, 374 bp, Arabidopsis thaliana nossen
gttacgagaaacggctcgaggtgactttctttgagccaagcatctttcaagactgcaagggactgggactccgtgctctgatcaagtcccagcttgatgaaattcttacacctgctgcatgcacgatcgtttcatctctctccaacgatcaattggactcttacgtactctctgagtccagcttctttgtctacccctacaaagtcatcatcaagacttgcggtaccactaagctcctcctctctatcccaccacttctaaagctggctggtgagctctctctgagtgtcaagtctgtgaagtacactcgcggctccttcctctgccccggaggccagccttttcctcaccgcagcttctctgaagaagtctct

SEQ ID NO: 169826 - DNA, 358 bp, Arabidopsis thaliana nossen
cggacgcgtgggcggacgcgtgggtttgcatgtaaaactaataccctgtttctgcggcgttcttgtgctttcgcttctctgagttccgtatactcttcgagcattgaaagtaggcgattctgaatgaagaaaatcagattaagagatcaaatgaagtatataaaagagaaaaaggagaaaagagaagaagaggggtttttttttgagagaagaagataagatcatacaccatcaaagagaaactcatattctttctctgattcccatattgtaatcttggaagctaatgcttcaaccatagctaagaagagtgaaaaagatttttagtaagataagcattcatcaatatgacaatgtg

SEQ ID NO: 169827 - DNA, 374 bp, Arabidopsis thaliana nossen
gaacttgacataaaacttggtctcaaattctagcttaattgtaatagagtctcattattatgtattgaaaattaaaaattttggaaaatacgtttgtaaatagaataggtttttgattctgtttacaaatatccaaataggtaaatgaaattattaaattcaaatttctttttattttcaataaaaagaataaaaaaaaaaggacagagttccttttttatagtttagctagaagaggagattatatgaaaaatttaaccgattctttcgtttacttgggtcactggccatccgccgggagtttcggatttaataccgatattttagcaacaaatccaataaatctaagtgtagttttcggtgtattgatcttt

SEQ ID NO: 169828 - DNA, 136 bp, Arabidopsis thaliana nossen
gcctgagctaatgactcgtcttctccagcactatggaaacagccacgtgcctttgcgtcttgtatcagattcctccacacagacttgctattcatcaaagttgcctcatttccaagtatccataagcagaacctat

SEQ ID NO: 169829 - DNA, 373 bp, Arabidopsis thaliana nossen
ggttttgctacttcaggtcttttaaacaaaatgcctcagtctgcaatattagtaccagctctccagggccagtggttaatgatgcacgtaagtatgatgatattaggctatggcgctctgttatgcggatcattattatcaatagctcttctagtgattacatttcgcaaagtcggacctactttttggaaaaagaatataaaaaaaaattttttattaaatgaattattttcttttgatgtactttactacataaatgaaagaaattctattttactacaacaaaacattaattttagtttttctagaaattattataggtatcaactgattcaacaattagatttttggagttttcgtattattagtcttg

SEQ ID NO: 169830 - DNA, 377 bp, Arabidopsis thaliana nossen
atcatcaccaccttcctcttccttttcctccacacaaccgccaaaaaagcctacatcatccgcgtcagtcactccgataaaccggaatcattcctcactcaccacgattggtacacatctcaactcaattcagaatcatctcttctctacacttacacaacctccttccatggcttctccgcttacctcgactccaccgaagccgattctctcctctcctcctcaaactcaatcctcgatatcttcgaagatcctctctacacacttcacactacgcgtactcctgagtttctcggtctcaattccgaattcggtgttcacgatctcggttcttcttctaacggcgttatcatcggagttttagatactggcgtttg

SEQ ID NO: 169831 - DNA, 375 bp, Arabidopsis thaliana nossen
caataacaaaaagcttaatttcgaatttttgtctaccgatttttcattgaattggtgatgcaattacgctaaactcgagctgagagagagacatagagatccttttgtatccgtaacatttaacaatctggttttgtttatcttctgttcctctattatcaaatcaaatggcgaatgcatctgggttcttcactcatccttcaattcctaacttgcgaagcagaatccatgttccggttagagtttctggatctgggttttgcgtttccaatcgattctctaagagggttttgtgctctagcgtcagctccgtcgataaggatgcttcgtcttctccttctcaatatcaacgacccaggctagtgccgagtggct

SEQ ID NO: 169832 - DNA, 378 bp, Arabidopsis thaliana nossen
cacgaacaccaactcttaaggaaaacatctaagttatggttaagtaattgcatgcaatttaaagctacgtgtccagcttaagacactcaagtctcacatctgtccctttttacttcgacttcgcttcttttggcttcttttaaactctctctatctctctctttcttcttcacactttgttgttaatttcaagtgtttgatcataatggcaacatcagctcgtagagcatacggtttcggtagagccgatgaggctacacaccctgactccattagagcaactttagctgagtttctctccacttttgtcttcgtctttgcagctgaaggctctatcctctctctcgataagttgtattgggaacatgcggctcatgc

SEQ ID NO: 169833 - DNA, 353 bp, Arabidopsis thaliana nossen
ctaaaaaatcaccgtgtctctcgtccctggttcggtccttcgagaagtgtgaacaaaaatgggttttctctttggtgttgccataggaatcgcggtttctttcggctcggtcgtcgcatttgctcgctactctagtgtcagatccactcgtccagctgatttggcaaagaccattgctgcatttgcaagaatgacagttcaagattcgagaaaacttctcccgggagatttttatccttcttgggttgtgttttctcagagacaaaagttaaattggcttaatcttgaacttgaaaagatctggccttatgtaaatgaggcagcttctgagctgattaaaagcagtgtggaac

SEQ ID NO: 169834 - DNA, 380 bp, Arabidopsis thaliana nossen
  unsure (1)..(380): unsure at all n locations
atttcaaaagaaaacaatcaatcgagaaatggcaatgtctggaacatacgtggcggaggtaccgcttaagggatcggcggaaaaacactacaagaagtggaggaacgaaaaccacgtcttccaggatgccgtcggccaccacatccaaggttgcactatgcatgacggtgactgggactcccacggctccatcagatcatggaatatcacatgcgatggaaagccggaagtcttcaaggagaagagagagatagacgacgaanagatggcgttgacgttgaaagggctagagggtcaagcgatggagaagtacaagaagtatgaggttatctaccagttcattcccaagtcgaaggaaggctgcgtctgcaaaatcactc

SEQ ID NO: 169835 - DNA, 373 bp, Arabidopsis thaliana nossen
aaaggatcccttgatgggttcggcccacttctcacaggatttgtcgttggagccaacatccttgcaggaggtgccttttctggcgcctccatgaaccccgcccggtcttttggtcccgctttggtctctggaaactggactgaccattgggtatattgggttggaccgttgatcggtggtggactcgccggtttcatctacgagaatgtcctcattgaccgtccacatgtcccagtcgctgacgacgagcaaccattgttgaattaaatgtgtttgaaactgtgctatgcacgtcacataccctattagctaatcattaatgtattattgatccccaaaaatcgtttcaataatgtattattgatcccaaaaa

SEQ ID NO: 169836 - DNA, 372 bp, Arabidopsis thaliana nossen
gttcttattacttcttgggttgtaattgctatcttattaggttccgcagttctagcgattcgcaatgcacaaacaattccaactgacggccaaaatttctttgaatttgtccttgaattcattcgagacgtgagtaaaacccagattggagaagaatatggtccatgggttccctttattggaaccctgtttttatttatttttgtttctaactggtcaggagcccttttaccgtggaaaattatccagttacctcaaggggagttagcagcaccaacgaatgatataaatacgacggttgctttagctttactcacatcagtagcctatttttatgcggggcttagcaaaaaaggattagggtatttcagt

SEQ ID NO: 169837 - DNA, 377 bp, Arabidopsis thaliana nossen
acaacatccaacatgaatgctcaccaaacgcttctttctcaatcttaattcaccaatcacctcttgctttccataaagagataaactgtgtccaaggcttaaatatgtggcgaaatagttcttccgatgtgaacaacgagctttttaagggttaccgaaaaggaaatccagacaagaagatcaatgagtttgttggagcttttgaatttcagaacacaaatgggaacaatctcaatgttagtgtttggtacaactccaccttcaagaacgatacagtggttcgacctatggcactgattcgagtccctcgcttagttaatctggcatctaatgcatatcttgagttcctaaaaggttctaagacaaagatactcttt

SEQ ID NO: 169838 - DNA, 334 bp, Arabidopsis thaliana nossen
gttaattacctatcaaactggttgggtttaaaacccacaaaaaacccggtacaggttttaacatgaaggcatgtaacagataaatggctacacaaagaaagagctgaaaatataaacaaaacgagtttaagacacgcatcggtatgtaacatgcgactcactgagctcgtctctgtatgtgaccttcatgacttgcactgtctctagtccatagtatcgcacaatcgggtctttgctcgatcaccgtggtagctaaccaaaaaaaacattctaattcagagaaaagctggctcagagtcagagctactagtactagtgatgatcaacaccaaaa

SEQ ID NO: 169839 - DNA, 376 bp, Arabidopsis thaliana nossen
cagagaaagagagatttgtaataatcaaatcatggggaagagaagaggtgtctccgccgtgaacgttgttttcgggtggctgcgacaacaatcgaacaaggttaaaatagctttaggaattatcatctctttgatcctcgtcgttcttctgaaattcaccgttaggaatcacaatcactttttcatcgcctccgagctcatccacgccgccggaatcttgatcctcatctacaaactcactcgccaaaagacttgctccggtctttctttaaaatctcaagaagtgacagcaatatttctagcggtgagattgatatgcagcataaacatggaaggtgatatccatacagttctcgatttcgccaccttggtttcg

SEQ ID NO: 169840 - DNA, 268 bp, Arabidopsis thaliana nossen
attttggaaagtaatttgcatctataaaagataatgtaccatgataacgttaatgtacttgcaaattgtctaagttatgtaacgaattaacgaaaataccccaaggcaaagtcttcttcatctttttttttattttcaacttgttatatacttacacagttttttttttgatatgtaaataaataaagttaactaaaattatgacgagaattgttacacatacattatttcatatctactattctttaattctaaattacatttttct

SEQ ID NO: 169841 - DNA, 378 bp, Arabidopsis thaliana nossen
cctcaatggcacgaaatcgggagggtttggttttggtgctcgatgtaagtcctgcgatgcatagagttgttcgggatgttaaaaaggcatgttcaatgctacttcagaagaagttgatttacaacaagtatgatgaagttggaattgttgtctttggaactgaagaaactggaaacgatcttgctagggagataggcggatatgagaacgatacagatagaaggaatatcaaagatgatgatgaattaacggcagaccatgtgaagcagcttcctcgaggaactgtaacctatggcactgattcgagtccctcgcttagttaatctggcatctaatgcatatcttgagttcctaaaaggttctaagacaaaaatactc

SEQ ID NO: 169842 - DNA, 378 bp, Arabidopsis thaliana nossen
cgcattgtcagaaccttggatatctgcacacacaaggccaaaatgtcactctaatcctttagcaaatagcacagtaaaagaatcagctttaggtctctacaagggatacaatgaagtaccaatacgtctcacatcaaagatttaaacaatacacatctaatggatctacaacaacactaaacaacaaacaaattgataacacacatagcttatggaaccattaaaaatcaatgctttaacaataccaaatattaaaaataacaaattcagtaccaaaatcaaaaccccaagagctgaaaactggtaatgttatcgaaaacgatctaaagacaccaaaaaccctaattagagacttataatataaattctgttaacgct

SEQ ID NO: 169843 - DNA, 372 bp, Arabidopsis thaliana nossen
cggacgcgtgggcggacgcgtgggcggacgcgtggggaaatttttgattatatatttttcctaactcgttggtttaatttttctttgttaactgtattaggcagtaatatcattagaagatcaattgagttatttcgaggagtacatagagaaagtgaagaatatagttggggaagcaagaaaagacttcatagtagccaacagcttattcttattggtcgcaggcagcgacgacatagccaatacatactatactctacgtgcaagacctgaatacgacgtcgattcatacactactcttatgtctgactctgcctcagaatttgtgactgtaagcttctctcatattttactaaaaagcctaatacgttt

SEQ ID NO: 169844 - DNA, 331 bp, Arabidopsis thaliana nossen
catcatcttcatcatcatcatcatcatcatcctttctttatccaacttgcttcaccaaatcgattctggttcaaccatgtcttccttcacctccaaattcgccgatgagctgattgctaacgctgcttacatcggaacacctggaaaaggtatccttgcggcagatgaatcaactggtactattgggaaacgtctcgctagcatcaacgttgagaacgttgaatccaacagacgtgctcttcgtgagcttctcttcactactcctggagctcttccttgcctcagaggtgttatcctctttgaagaaactctttaccagaagagctctgat

SEQ ID NO: 169845 - DNA, 376 bp, Arabidopsis thaliana nossen
cattttcgtagccgcaagactcctttcagattcttacttgcagctatgggtaaagagaagtttcacattaacattgtggtcattggtcatgttgattctggaaaatcgaccacaactggtcacttgatctataagcttggtggtattgacaagcgtgtcatcgagaggttcgagaaggaggctgctgagatgaacaagaggtccttcaagtacgcatgggtgttggacaaacttaaggccgagcgtgagcgtggtattaccatcgatattgctctatggaagttcgagaccaccaagtactactgcacagtcattgatgccccaggacatcgtgatttcatcaagaacatgattactggtacctcccaggctgatt

SEQ ID NO: 169846 - DNA, 378 bp, Arabidopsis thaliana nossen
cattgatagtgacttagctactactagctagtctactagaatcatcggttgcataaaattagtttaatatgtacatcatgatatcatctaataaaataaaaaaatgaaatcatctaatatgtactatccttacgcatttgctaaatttatttctaaaatgatatattatatggtttagagtccgtacgtggattgtatatgaaccatgaacatcaatttgtaggtaaggtactacgtagtctcgattggactgactagtgactacttcgtcccatgctataacaatatttctattatttttttatgaccttttttaattgacatttgtcgtattttgttaaacaatttttttttaatgttcacataaccccaataaaa

SEQ ID NO: 169847 - DNA, 377 bp, Arabidopsis thaliana nossen
cctgtgccaccatcacttaccctttctcgcctctcctgaaatcaaaatgccattgtgcaaatccattgtgatcgtcatcaatatcatcaccaacttcattctcatcatccatggcccatttctcatctatgtagattctcatctctctacctcctcctcattttctcctcttgattcactaattcttcttcttcttcttcttttcagacatgactcttccttatcgtttctcttccgttagaaaccactcacttctacttaagacttctcatctctgcacacccagatcagctcttggttgttgtttctctcccaaggaatcccctttcttcaggaagaacactgcccaattcctttctcctcagaaacacacttct

SEQ ID NO: 169848 - DNA, 381 bp, Arabidopsis thaliana nossen
gattttcaggtttgtaataggtaattttctaggtaacgctattttattttttcttcctgaataacacatccacatttttcttgaaaatatgattctagtttttgagacaagtttttgccaattcagaattataattggtaaaactgttccttagcggtaaaatgttttggtccataatgtcaatcatattttttctgttgaaactgtcagtttttttcaaaagattctcggaaattttcagtgcttttaaaaattcgcaagttttcaaacaatatttttataagaaaaatttaataaagtttttggctttggaaagctcttattatattaaaaaacttttaaataaccttttcatgcacaataatagttgtttccaataat

SEQ ID NO: 169849 - DNA, 383 bp, Arabidopsis thaliana nossen
attattggtttcaattatcgttattttgtatagagactattttttcttaaatcgttttataagagtcacaaatcacaactcgtcctaagttctctctctattcgactaacccaagcacgacattgaccactatgcctgggcctattgaccacactacaataaaatcgcacactacatgaaacttgggttgaacatctaattttctctaattaaattatttttactttgcttaaaagtttttgttcctgtcagttatacaatttaaaattgtttgttatctttagttcttcaatttgatttatgatgtggcataaaatccagaaagtgcatggttcccactcgacaacggctaaattcctcaacggctcctttttgactctagc

SEQ ID NO: 169850 - DNA, 387 bp, Arabidopsis thaliana nossen
atggtgaacgaagaaatggagtcatcacttaaagtcatcgacgtggcacgagtcacaccatcaaactgcgactcgtcggagtcactcactctcccactcaccttcttcgacctcctctggtacaaacttcacgccgtcgaacgagtcatcttctacaaactcaccgacgcaactcgtcctttctttgactcagtcatcgtcccaaacctcaaaacatctctctcctcatccctctctcactacctcccactcgccggaaaactcgtgtgggaaccacttgatcccaaaccgaaaatcgtctacaccccaaaagacgccgtttcattcaccgtcgccgagtcaaacgcagacttctcacgtttaaccggcaaagaaccgttccccacc

SEQ ID NO: 169851 - DNA, 380 bp, Arabidopsis thaliana nossen
  unsure (1)..(380): unsure at all n locations
ccacgatcgatcaagaaagtgaggaacaaggtctggtttacaaaagtctcatagatgtcgagtggaacagtgagaagggtttcacgtcaagatatacaactggttcaaaaccttatagaacgatgccttcaactttacatgaatcagaaagaagttgtggatactttactagagcaggctaaaatcgagcctgggttcacagaactagtttggcagaagcttgaagaagagaatcgggagtttttcaaagcttactatcttaggctaatggttaaacaccagataatggaattcaacaagttgcttgagcagcaggttcaccacatgcgtcagatgcatccaactggtgttgcttctgtccaaaacacanatggttctca

SEQ ID NO: 169852 - DNA, 376 bp, Arabidopsis thaliana nossen
atccaatccaggaggcatgtcgacatctgaggataaaccggaaatcatcagtagagtagttcatcaggagggtgacgtggaaatcgtcgatagaagtcagaaggataaggacgaggaaaaagaagaagggaaaggtggattcctcgataaggtgaaagatttcattcatgacattggtgagaaactcgagggaaccattggctttgggaagccaactgctgatgtctctgcgattcatatccctaagatcaatcttgagagggcagatattgttgtggatgtgcttgtcaagaacccgaatccagttcctatccctctcatcgatgtcaactacctggtcgagagcgatgggaggaaactggtttctggtttgatc

SEQ ID NO: 169853 - DNA, 377 bp, Arabidopsis thaliana nossen
acgcagatcggagccaagttctgggaagtggtttgcgccgagcacggcatcgatccaaccggaaggtacaccggagactcagatctgcaacttgagcgcatcaacgtttactacaatgaagcgagttgcggtagattcgttcctcgtgcagtgctcatggatttggagcctgggactatggatagtctcagatctggaccgtacggtcagacctttcgacctgataacttcgtctttggtcaatccggtgcgggtaacaactgggccaagggacactacactgaaggagctgaactaatcgattgcgttctcgatgttgttcgtaaggaagctgagaactgtgactgcctccaagggttccaggtttgtcactcatt

SEQ ID NO: 169854 - DNA, 375 bp, Arabidopsis thaliana nossen
ctgagaaagaaatgttggagtagcggacaaggcacagcgttggatcaagtgcccaataatacgcgtctgtctggttaacacagtcctgtatcaaccagcctgccgcaccctttatacaattaaaacagtcacttggagttgatcttgggatgcacatccctaatgcgtagactcgatcttgctcttctccaatcgaaccgtagtagaaaccatcttgagaggcggtattgttaggaagagaagagaggataagacgacgatttgaatcgtatgtaccgttgggtgtgaaatatttacggttctctatgcatgtttgtgctgaaacagaagcaacaccaaaggctagaagaataaaacagaggattgataagaaac

SEQ ID NO: 169855 - DNA, 306 bp, Arabidopsis thaliana nossen
  unsure (1)..(306): unsure at all n locations
atccaatccattattcatgactttgcacaccgttnnatcaagggcaaggagaaaattaaatgtgtggggacacacacctcaatcaaccaaccagccacaccctttatacaataaaaacagacactcggagttgatcttgatatacacatccctaatgcatcgactctatcttgctcttaaacaatcaaaccctcatagaaaccatcatcacaagcgctattgttatgaaaagaatataccataaaaccactattttaatcctatataccgttgcgcgcgaaatattaactgaactctatgcatgtt

SEQ ID NO: 169856 - DNA, 379 bp, Arabidopsis thaliana nossen
atctatatctcgatacttgtattacagtttacagcagttattaaacggactccacatcatacgtcactgtgcaagtatcatttagaggctttctctgtttattgacaggaaagaactcaaaaacaactaaatcagcccagatatcggggtcatttccttcatcggtatctggacgcatgttgacatcaaagaagacaaacgtatgatccctttcaatagctttccctaaagcccaacaatgcaaatttatttctctcctatgagagtggccttccttgtttttccatttgcaaacacaactaatgccaaaatcagtatcatcacagtaaccctcggaaaatgcgacttgcaccagcatagcaaagcccacaagtgtgtt

SEQ ID NO: 169857 - DNA, 374 bp, Arabidopsis thaliana nossen
tgttagtgaaagatcttagtgcaattcaaatttcagtctcttttatgggaccataatactctgatttgaaaatcaaacttcatcacctcctttcctcaatttcaggggttaattctagtgtttttttcattcacatgaatttggtttagcttctttcgtttataccaaagaaatctagtcaaatgttacatacaatatatattacaaatgaacataaacgacaaaccatcatcactccaagcactagataaaaaagagtaagagaataggctagagactaattaaacatccaaatctaaccccaaacaattcaattctaaaagctaactcaaaatactagattaacttatcggaccaagtagtcaacgccaaga

SEQ ID NO: 169858 - DNA, 374 bp, Arabidopsis thaliana nossen
agaaaaagcactttcatatttccctcgacgaaaaaaatggcaaccatgtcgaatctcgctaatcttcgccgcgccacctgcgtcgactccaaatcttcttcctcttcctccgtcttacctagatccttcgtcaatttccgcgctttgaatgcaaagctttcctcttctcagctttctcttcgttataaccaacgatcaataccttccctctctgtgaggtgttcagtgtctggtggaaatggaactgctggaaagagaacgactcttcatgatctatatgagaaggaaggtcagagtccttggtatgataatctttgccgtccagtcacagatcttctcccgttgattgctcgtggtgttagaggtgttactag

SEQ ID NO: 169859 - DNA, 378 bp, Arabidopsis thaliana nossen
ttttacgaaaaaagcttttaaaacttatctagtttcgtttgatacacatttgaagaaagaaatggcatgcaaccaacagagctacaaagctggtgagaccagaggcaaggcccaggagaagactggacaagctatgggaacgatgagggacaaggctgaggagggccgggacaagacttctcaaacggcccaaacagcccaacagaaggcccatgagacagcccagtcagctaaagataagacatctcaaactgcccaagcggctcagcagaaggcccatgaaacggcccagtcagcaaaagagaagacatctcaaactgcccaaacggcacagcaaaaggcccatgagacgacgcaagcagcaaaagaaaagacatc

SEQ ID NO: 169860 - DNA, 368 bp, Arabidopsis thaliana nossen
aaaatattctgacaccttttttcagattgactacaaaaatcccatgcaagtaaaacccttactgtggcagataatattcgaatttgtggtctgacaaagtttcaatatgcacactctattgtttttttctatctggatttcttgcaatcatactataaccttagaagaaatcaacagggggagtttcatttcattttatttcttcattcgattacgttttctaccatttcctagctactagaacagtggtgagattgagatttgattagcactaatactaaccattgtggaatcactcaaaaacagagacttgttcattccagctacaagccgcgaccacgttaagtaaaacggggtggtatgacaca

SEQ ID NO: 169861 - DNA, 362 bp, Arabidopsis thaliana nossen
cggacgcgtgggttacgattgcaatccctaatttggaagtcccgggtcctctttcgatcaaatgggggaattacacggcatggctacggctgttggtggcggaagcgatgtggaggttggatttgcgaagcttcaaggtgaggatttcgagtactatatgcagacttactccattatactcggccggaattctaagaaagccaccgtcgacgttgatctctcatccctcggcggtgggatgaacatctcgcgcaaccacgctcggatcttctatgacttcactagacgacgcttgtctctcgaggtccttggcaaaaatggctgcctcgttgaaggtgttcttcatctacctgggaatccta

SEQ ID NO: 169862 - DNA, 369 bp, Arabidopsis thaliana nossen
gagataacgagaacaagaaagaaagagaagattatatacatagaaaaggagagatcaaatggagtgggagaaatggtacttagatgcggttcttgtgccaagtgctttacttatgatgtttggttaccacatctatttgtggtataaggttcgaaccgatcctttctgcaccattgttggtacaaattcccgcgcccgtcgatcttgggtagcagccatcatgaaggacaacgagaagaagaacatcttaacggtacaaacactacgaaacacgataatgggagggacgttaatggcaaccacttgcattcttctctgcgcaagtctcgcttgcgttttaagcagtacttatagcatcaagaaaccttt

SEQ ID NO: 169863 - DNA, 377 bp, Arabidopsis thaliana nossen
agagacacatggaaaatacgcattcaatatgcatatcaatgacttatgaccgacgtgttcgtggtgactaggatgacacacttcctaaaccttatttgccgagagcactacaagcacctgacatggaacacccacaaggaacaccagatcatagacataatggccttagtgttcttcagcaacatgtcgctttcttcgatttggacaataatggcatcatttatccctttgaaaccttctctgggttccggttactcggtttcaatttactcgcgtcgcttatcttggctgctggtatcaacatagctcttagctatgctactctcccgggatggttaccgtctccgttcttccctatatatattcacaacattcac

SEQ ID NO: 169864 - DNA, 301 bp, Arabidopsis thaliana nossen
cttcttctttatccattaaggtttgatcctctcacttaaattaggattatatatggctacatctgctagaagagcatatggattcgggagagctgacgaggcgactcacccggactccattagagccactttggctgagtttctttccacgttcgtcttcgtctttgctggagaaggctcaatcctcgctctagacaagttgtattgggacacggcggctcacacggggacaaacacgcctggagggttagttctggtggcgttagctcatgcattggccttgttcgcggctgtttctgca

SEQ ID NO: 169865 - DNA, 367 bp, Arabidopsis thaliana nossen
gaacttatcatgaatccactggtttctgctgcttcggttattgctgctgggttggctgttgggcttgcttctattggacctggagtcggtcaaggtacagctgcgggtcaagctgtcgaaggtatcgcgagacaacctgaggcagaaggaaaaatacgaggtactttattgcttagtttggcttttatggaagctttaacaatttatggcctggttgtagcattagcgcttttatttgcgaatccttttgtttaagcccagaaatcacaaaattctggatttttttttgtagtttttttaattctatcaagatttaactcctacaattattcattgagacaacaatccttgggaaggactaatttga

SEQ ID NO: 169866 - DNA, 288 bp, Arabidopsis thaliana nossen
ggaaaggagcaaaggaatacctgcagagtcctgatatatctttttggatagccaagatcattcagcgactgtagttccatgaactttgccagttgccgtcctgctcccaagaccctgatacacaaattggcacccaccattgataaaagcccctaaaaccaatgcccaaatattcaccattaaagaattatgggccttaacctacatggtactatttgacctggaatcctgctgagaaaccccctctgacccactctctgagaacgtgctctggcatttttgtgccac

SEQ ID NO: 169867 - DNA, 373 bp, Arabidopsis thaliana nossen
cggacgcgtgggcggacgcgtgggcggacgcgtgggcggacgcgtgggtaagaatcagacagaagttgcagagaaaagagaattaattgattggtgtaatggagaaggcagttcatttatccaccaaaaatggacccaaggttccaggagagccaacgaagaccggaacctccatggttgacacggcagcttcagccgtacaaagcttcgctccgattaaccaaatccaccaacatctctgcgcgtttcatttctatgcatatgacatgacccgacaagtggaggcacaccatttctgtggtcacatcaacgaagacatgcgccagtgtctgatctacgacggtcctgatgccaacgctcgtctgatcggtct

SEQ ID NO: 169868 - DNA, 318 bp, Arabidopsis thaliana nossen
aagaaagatagagaaaaaaaatgggaggcaaaggtgtgatgatggtggcgatactttgcctttgggcactctctgcaacatctgaagcagtaacagaggctgagccaggtttgatgatgaacttctacaaggacacgtgtcctcaggccgaagacatcgtccgtgaacaagtcaaactcctctacaaacgccacaagaacaccgctttctcttggctccgtaacatcttccatgactgcgccgttgagtcatgtgatgcgtcgcttttgctggattcgacaagaagagagctaggagagaaagaacacgacaagagct

SEQ ID NO: 169869 - DNA, 373 bp, Arabidopsis thaliana nossen
gtgctttgtagaaattagcaatatagtgctttgtagaattttatgaccacaagattggtaagatcatttagtcaaatatatgttttatctcttcttattgattgagatgattatttttctaatgagtcgatccacatgtctcattccaattgatctttatgatttagtttcatatttgttttctttaacatatgaaatttttttgttagtgtagaaaatctaattttcacacaattaaaaataatttttacaataaattatgattagcaaacacttcaaaaaaatctccattacttaaacacttcagtttcctactactaattaaagttgtttccttttgtttaaattgtgattttgctttaacaataaagat

SEQ ID NO: 169870 - DNA, 370 bp, Arabidopsis thaliana nossen
cccatttaacaggtgggggattgagactctagctggagaaaagggtgttgcgtctaatcggggagatcgaatttcacaaatgggcatttccaggttactccaacaagaaaggaggtggaagtaactgtaactctacctttcctatcgtaaaagcttctactttcatgtttaagatatagtgttcgttgattaatttatcaagaattctataataatgtaatgaaagagattaattgttggctattttcctaaataaacagactttaacaacgatgattacctttgatcaaaataaaataaaagtcaatttttgttagcacgagaccagcaaagagacaagtatccaaaaatgatgtataatgcaatataa

SEQ ID NO: 169871 - DNA, 273 bp, Arabidopsis thaliana nossen
cttagaagccgtcggcacaagaagaagaagaagaagaatgtctcacaggaagtttgagcacctatgacatggttctcttggtttccttccaaggaagagagctaaccgtcacagaggaaaggtgaaggctttccctaaggatgaccaaaccaagccttgcaagttcacagctttcatgggttacaaagctggtatgactcacatcgtcagagaagtggaaaaacctggatccaagcttcacaagaaggagacatgtgaagctgttactatcat

SEQ ID NO: 169872 - DNA, 347 bp, Arabidopsis thaliana nossen
gagaaagggagggaggagagtgtagcagatcggcgaaaatgacaagcggattcaagaagaactgggggaagagaggtcacgtcagcgccggacatggacgtatcggtaagcaccgtaagcatcccggaggtcgtggtaacgctggaggtatgcatcaccacaggatcctcttcgacaagtaccatccaggttacttcggtaaagttggtatgaggtatttccacaagctgaggaacaagttcttctgcccaatcgttaacctcgacaagctttggtcactcgtccctgaagatgtgaaagcgaaatcaaccaaagacaatgttccgttgatcgatgtgactcaacat

SEQ ID NO: 169873 - DNA, 345 bp, Arabidopsis thaliana nossen
ctcatttcgaaaccatggttgagccggcgaatactgttggtcttccggtgaagccgactccgttgttgtgagatgagctcgatatcgtgattccgactatcagaaacctcgatttcctcgagatgtggaggccttttcttcagccttaccatctgatcatcgtccaggacggagatccatcgaagaagatccatgtccctgaaggttacgactacgagctctacaacaggaacgacattaaccgaatcctcggacctaaggcttcttgtatctcgtttaaggattctgcttgtcgatgctttgggtacatggtgtctaagaagaagtatatcttcaccattgatg

SEQ ID NO: 169874 - DNA, 375 bp, Arabidopsis thaliana nossen
  unsure (1)..(375): unsure at all n locations
ggaatacttggcggattttacaggtgacaagtgacacttcactctccaccgggttgatctaacctgtcgacagcttccnatcatccccgggcatgaatacaccgcagagcttaccgccatttcaccaagattggatctttgatctttcccacatatctttatctctcaatctatctatactaaaagattgcgtcttggtttctctctatacgttgagacttttgtggaagattgagaaagagacagagtgaataaaaccgtcacggtagagatttggaatattggtttatttggtcttttacgtccacgtggcgtaattacaagacgttacatgttatcaaagtcttgaaatctgtatttgcttactcagtcttt

SEQ ID NO: 169875 - DNA, 372 bp, Arabidopsis thaliana nossen
gtcctacaaggtaaaggagtgatcgagtttgtgacggataaaacaaaagagtcgttccacatatctagaggtgatgtggtaaaaatcccttctggtgtcaccaactttatcaccaacactaaccagacggttcctctccgcctcgcccagatcaccgtccctgtcaacaatcccggcaactacaaggattacttccctgctgcatcccaatttcagcaatcctacttcaatgggtttaccaaagaagtcctctctaccagtttcaacgtgccggaagaattgctagggagattggttacgagatcaaaagaaattggtcaagggattatccgaagaatttctccagaccaaatcaaggaacttgctgagcac

SEQ ID NO: 169876 - DNA, 374 bp, Arabidopsis thaliana nossen
cggacgcgtggggtccttgttcacagtagctacccatccatgagatgcggctattgttacagttgtgtggttatacaccaccagctccataggcaccttcttttccaaataagtggagtcatcttcattagcgttaaaaatgatgagtgttccaaaatacggtccacaacgacgagcgccgattatgttacaatgagggctttgcaacaaagacgatgatgagaagccattagagagaagtagagaagacctaacggacgcaggtttcgaaaggcagagcttcgacagccgtctgagaagcagagacattgaattgttcacagaaaagtaaaaccctaatttgaagaaatggttattttcagctaaagttaaaa

SEQ ID NO: 169877 - DNA, 371 bp, Arabidopsis thaliana nossen
tatacatcaaccaactttttcttttgttgttgttttttagcttacgtggttcttcttcttctccttatgagttcaatatctgcaaatccacaaatctggattcacacctgagaagtttgttaatcggtacatctctagatttttgcaatcggagatggagatcgaatccgtcgcagctggttcttgttccaaggagaatcaaatgatctacaaggaatggttcgaattctccgattcagacggcgatggccgtattactggtaacgatgcgatcaagttcttcactatgtcgaatttgcctcgtccggaattgaagcagatctgggctattgcagattcaaagagacaagggtatcttggtttcaaagagt

SEQ ID NO: 169878 - DNA, 378 bp, Arabidopsis thaliana nossen
caaaaaaaaagtcttctctagggatactacaaatttaagtagaacttgatacattaatttaagagaatataaatcctaccaacccaacacattgtgaaaatcagaattcacaacatgagagtaatcatatcactaaaacgtcgtcgtttgatcatatcaaaataatcagcaaagatataaatgataagaaagtcgagaattcgacatgttccaatacgacacaagcaaagtcattggcatgctggagccattggagtagtcgccggtataatgacaacaagagaaaatgatgaaagctcccataatttctgatgctttgccaaagagaacaaggtaaataaagattccaaaaaccatgtacgtagctagctttgagag

SEQ ID NO: 169879 - DNA, 370 bp, Arabidopsis thaliana nossen
atttttcataagcataatcactcaaccaaatactgatattctaatttctaagttaatctgttttcaaagaattttatattcgtctcccaccaagtatagcatttgcttttattttctgtgagagaaaaatacccttaaacacccctaaaccggcacctttattatcagattactttgcacaactttagtttcccgttcgaactataactccaacccagaatggcaaccgtccaaaagttacccaaaaaaggttataaaagatttcatttcctaatatatggtctagggagaaagaaacaattagataccaaagagggctcgtaaggagaaaaacaaaacgtgtgtaagcacagcatgggaattgtctgac

SEQ ID NO: 169880 - DNA, 372 bp, Arabidopsis thaliana nossen
gaaagagtctgcttctggggttaaacctctcaagttgatggaaaggagtggggtcagtgaccgagtggtgtgtgtgcctgcggttcatgaagcgaaatggatgaatgagatggagatcagcatttacgactcttggtttgatccggttgtctcttctttacctggacttgttcctgatgggtttatatacttaagggcgagtccagacacttgccacaagcgaatgatgctcaggaaacgagcagaagaaggcggagtctctctgaaatacctccaagatttgcacgagaagcacgagagctggctgcttccctttgagagcggaaaccatggtgtattgtctgttagtagaccatctttacacatggacaa

SEQ ID NO: 169881 - DNA, 246 bp, Arabidopsis thaliana nossen
gccgggctttcctttcgcactttatacgggtatgaaatgaaaataatggagaaagttggattcaattgtgcaactactcctatcggaaataggattgactacggattcgagccatagcacatggtttcataaaaccgtacgattctcccgatctaaatcaagccggttttacatgaagaagatttgactcggcatgttctattcgatacgggtaggagaaacggtattcttttcttaaacttaaaa

SEQ ID NO: 169882 - DNA, 336 bp, Arabidopsis thaliana nossen
acagaaacagacaaacaataatgtagcttaaagacgatgatgaaaaggaggtgagaacatagtgcatcggcggtggcagagtaaaactattacagatggtttatgaagtccaagaagacagtggtggagtttcagaattcttgtaagtaactatataggtggctgacctttcccctttcacagaatcgggatgtcccatggcgtcaagctcggccatctcttcgatactgagtttcacagataaagctcctatgttctgattaaggtttttgatcttagaggttcctgggattgggcagacatcatttccttggtgatgaacccatgccaaagcta

SEQ ID NO: 169883 - DNA, 369 bp, Arabidopsis thaliana nossen
gtttccatggagttgcattttagttgattcttggaaggatcatttgttctagcctatcttcatcatgttatacaacatcagtttttgttttgtattcagattttaagacgttcctctattgtctatttgtcttgatctgtcttgcaatggcatattctgctggaggaaacctatgtcaaggaaagatacacaaaatttgccggatgaaatagtgttaacaatatttttcttagagcatactcattgctgaactatttttttgaatgtttcaaaaccaaaatattaaatattttaatatcaaaaacaaactaactattaaaaagaagacatacggagaaaagagtctttaaacaaacgttacaaggtctt

SEQ ID NO: 169884 - DNA, 204 bp, Arabidopsis thaliana nossen
ggtcttcttggccatggatacttgtgctctagtaatccatcagtcgctgtctcgcatcaaactttgtcctcccaaatcttcttcttcttcttcttcttcttcttcttctgctttctcccctgaatccttaccgatcagacggatcgagctgtgtttccgaggagctatatgtgccgccgtacaaagaaactacgaagaaacgac

SEQ ID NO: 169885 - DNA, 371 bp, Arabidopsis thaliana nossen
gcagtgcttacgccacatccctagctagatccagtagccggcacgggtgctccaaggtgatgttggatcatccttattcattagttcaaacctctatgaaactggaccatgaattaacttcaatcatatatttttggatccattttgtagcaggaatcgattcttggtggatggagagtataaagacgaagatgggattggtggattaaggaatttggtgttgtggttttttcaactaatgattgtggttttcatctgaaagagtatattataacacagtagagagttatacaaattttctgctttagatttcagctcaaaattacaaatttctggtgcatatataattctttggaagcctttatcacttt

SEQ ID NO: 169886 - DNA, 376 bp, Arabidopsis thaliana nossen
ctcgtcactcaggatcagatcttagctaaattgagacaagctcaaaatgagtaagcttcagagtgagggcgttcgtgaagccatcactactatcacagggaaatccgaggcaaagaaacgtaactttgtcgagactattgagctccagatcggtctgaagaactatgaccctcaaaaggacaagcgtttcagtggatctgtcaagttaccacatatcccccgtcctaaaatgaagatctgcatgctcggagatgcccagcatgttgaagaggctgagaagatggggttggaaaacatggatgttgagtctctaaaaaagcttaacaagaacaagaaactcgtcaagaagcttgcaaagaaataccatgctttcttg

SEQ ID NO: 169887 - DNA, 451 bp, Arabidopsis thaliana nossen
  unsure (1)..(451): unsure at all n locations
cgnntccgcggaatanngttctgatccagcaacccnatcaagttcatggtnntgatgccctcttggagagagagttgacanncttctcttgctagtgtgtgcgatgaccacngnnagctttnnnactcgaggggttgacctnnctcctccnnntagctcnntggtcanntaagcnnntcttgagagagtgagcncctcttnngttgcagnnntagagtcacccaattgagagatgccctttcggagggttcttaatcganntatagttgacccattgataggnagctcttcaattcaacccggccacaangaacggtggtgcaccagctcaggagaannaacggcagatccttcttgaaggattagcaacttcacttcaacttgttgatccttttagcaaaactggtcagaaaaccggattgaccacaaaggatgatatcgtgtttctccg

SEQ ID NO: 169888 - DNA, 375 bp, Arabidopsis thaliana nossen
gaaaaaaagaacgaacgctagtcaataaaatactagaaacacaaaaaaagggctttctacataagcatggcctaaaacgatttttatcagctgtagcaaataactaaacttcatccatcgaaatatgaagtgaagactagatatgcctaaatactttcttttctatggataaaaaaagatttaattgatagaggaagcaccgtaaagatcaattggaaaggttttggaccgacacaacaagagctgtttatttatatcataatatgagataaatcttaggaatctacttatgtaatagagtaatccccgaaggtattgagcagcggtgtagcatcagatcctaaagacagtaagtctttttcttttttatgaagt

SEQ ID NO: 169889 - DNA, 370 bp, Arabidopsis thaliana nossen
tgtcctcccaaaatggtgacatgtcattaagtgggagggacatggggggtatgcatgggttttagtgtgaagatatgggtgcaaaacgaacatctaatgttgcttcaatgttctccaaaatggtgcagagcaatcatcaatcctttgatcgctctcttccttcaaacaacgttccaaaggatagcttacatcacgaggaacaaatggttggaagtggggagggcgatacatccaaggtgactgttgaaaatggtgattttgatcctcaagaggtagctcacaaaggggaacaacaatcaccttcaagatctgatcgtttagttagaggtgggttaaataacaaggagtcagcgaatcacttgccgcattt

SEQ ID NO: 169890 - DNA, 370 bp, Arabidopsis thaliana nossen
aacaaaacaacaagaaaaaatggcaataaccaacaaattaatcataacggttcttctccttatctgtcatggctgtcgtccactgcttatccttccgtgtggagatcgacgagttcgagccaccacagcaaggagaacaagaaggtccccgtcgccgtcctggtggtggctctggcgagggatgggaggaagagtcgacgaatcatccataccacttcaggaagcggagtttcagtgattggttccagtcaaaggaaggttttgtgagagtgctgcctaagttcacaaaacatgcaccggctctcttccgaggaatcgagaactacagattctcgttggtggagatggagccaacaactttctttgtgcc

SEQ ID NO: 169891 - DNA, 373 bp, Arabidopsis thaliana nossen
gagacggtgagggacataaacacagcatctcgtttgataggggacatgcgaggagacacactcgttgatccgttgtctgataggtacaaaaaacttggctgcaagatatctgtggtagacaaagagtctgaagattacaagatggttgtgaagtatctcgagactacttatgagcctgtgaaagtctctgatgttgagtacggtgtgtcagtgcagaatgtttttgcggttgagtcagatgcaattccttcattagatgatatcaagaagttaccaaataaggtccttttatggtgtgggtctcggagctcaaatctattgagacatatctacaaagggttcttacctgctgtatgctctcttccggttcctg

SEQ ID NO: 169892 - DNA, 331 bp, Arabidopsis thaliana nossen
gaaaaagcaaccccaaagatttgtgaccaaaagcggttagcggtgaccattgaataagtttcttcggcttgagttgggttaaaagcacggaatgtatttgcaccatcaccatcttcaaataaagtattttctacagtagcaccatgaatagcgcatagcagagccgcgcccagtacaccggcgactcccatcatatgaaatgggttcaatgtccaattatgaaacccttggaaaaagaggatgaatcgaaatatagccgctacaccaaaactaggcgcaaagaaccaaccagattgacctagtggataaattaggaagacagaaaccaaaa

SEQ ID NO: 169893 - DNA, 344 bp, Arabidopsis thaliana nossen
  unsure (1)..(344): unsure at all n locations
atcacaaacacacacaaatctctgaagtaaaatgacgttcccttcgctgtctgtctcatttctggtctgtgccttcatattcgntacgcatgcattccacctcaacatcatccaaaatccacaaggaacatttccctacaccgtgggtgtcattacaaactttctttcttccgagtcgacaagagatcagatcagcattgtttttggcgatgccgacggtaacaaagtgtatgcaccgaaactaaggggttttgtaaaaagaccacggggtttggggaagtgttcaacgaacacattccaagtcagaggtcaatgtttgaatgaccctatctgctctctctata

SEQ ID NO: 169894 - DNA, 372 bp, Arabidopsis thaliana nossen
ggaacttatcatgaatccactggtttctgctgcttcggttattgctggtgggttggctgttggggttgcttctattggacctggagtcggtcaaggtacagctgcgggtcaagctgtcgaaggtatcgcgagacaacctgaggcagaaggaaaaatacgaggtactttattgcttagtttggcttttatggaagctttaacaatttatggcctggttgtagcattagcgcttttatttgcgaatccttttgtttaagcccagaaatcacaaaattctggatttttttttgtagtttttttaattctatcaagatttaactcctacaattattcattgagacaacaatccttgggaaggactaatttgaggat

SEQ ID NO: 169895 - DNA, 367 bp, Arabidopsis thaliana nossen
  unsure (1)..(367): unsure at all n locations
gtcgtctctgtctcctccaccgattccaatggaactccacgccggcaagcggaaaaagttacttgttggatacncnnncagttatctagttccaatcgttctctcgatggatttgttcttctacagggtggcgaggagaaaaatcgatactgtactgatcacaccgagctcttcaggcaagagagttattttgcttacttgtttggagtcagagagccagatttctatggagctattgacattggaagtgggaaatctatcctttttattccaaggttgcctgatgattatgctgtttggttgggagagattaagccattgtcgcattttaaggaaacatatatggctgacatggttttctatgtgg

SEQ ID NO: 169896 - DNA, 367 bp, Arabidopsis thaliana nossen
ctctgatcaaccctcctcctccgccgctgctacaaacactttaatatatgttgccaccgttctttcatatatatatagtccacttaagatctttccactcatttataacccaaatttgttctgtttcataaatatgtgtcttccatttcgacccgtctcgaaaacatattattcgtcttcttcttcgactatcgtgacgcgtatggtaaactgcatactactttttgtattcattttgttggtctacctcctcatctcggcctcaagacttcaatctaaaaactctattcatgcatacttctcatcttctgatcaagatcaatctcagagcccgacaaaaatcgagcacatcgtctttgggataggc

SEQ ID NO: 169897 - DNA, 367 bp, Arabidopsis thaliana nossen
attttcgtagccgcaagactcctttcagattcttacttgcagctatgggtaaagagaagtttcggagttaacattgtggtcattggtcatgttgattctggaaaatcgaccacaactggtcacttgatctataagcttggtggtattgacaagcgtgtcatcgagaggttcgagaaggaggctgctgagatgaacaagaggtccttcaagtacgcatgggtgttggacaaacttaaggccgagcgtgagcgtggtattaccatcgatattgctctatggaagttcgagaccaccaagtactactgcacagtcattgatgccccaggacatcgtgatttcatcaagaacatgattactggtacctccc

SEQ ID NO: 169898 - DNA, 370 bp, Arabidopsis thaliana nossen
gtccgttaacgttaagctcctttaccgttacgtcttaaccaactttttcaacctctgtttgttcccgttaacggcgttcctcgccggaaaagcctctcggcttaccataaacgatctccacaacttcctttcctatctccaacacaaccttataacagtaactttactctttgctttcactgttttcggtttggttctctacatcgtaacccgacccaatccggtttatctcgttgactactcgtgttaccttccaccaccgcatctcaaagttagtgtctctaaagtcatggatattttctaccaaataagaaaagctgatacttcttcacggaacgtggcatgtgatgatccgtcctcgctcgatttc

SEQ ID NO: 169899 - DNA, 372 bp, Arabidopsis thaliana nossen
gtgaaacggcggacaaagctgtcgtgttgagtactaattcgccgtcgtgtttctcagtgaatgagtggtgagagatgtcgagtctcgaagatatcaagaacgagactgttgatctggaaaaaattccgattgaggaagttttccagcagctaaaatgttcaagggaaggattgacaacgcaggaaggggaggacaggattcagatctttggccccaacaagctcgaagagaaaaaggaaagcaaacttctgaagtttttggggtttatgtggaatccactttcatgggtcatggaaatggctgcaatcatggccattgctttggcccacggtgatggtaggcctccggattggcaagattttggtggtatta

SEQ ID NO: 169900 - DNA, 367 bp, Arabidopsis thaliana nossen
aaaatggctggaagattgagcggtgttgcgtcacgaatcatgggtggaaacggcgtcgttgcccgatccgtcggttcttctctccgtcaacgcgccggaatgggtctccccgtcggcaaacacatcgtccccgataagccgctatcggtaaacgacgagctgatgtgggacaacgggactgcgtttccagagccttgcatagatcggattgctgataccgtcggaaagtatgaagcattggcatggttgagtggcggattagggttctttgttggtctcggtctgctcgctgttttgaacgacaaagcttctaaggttccatttacaccgagagtgtatccatatgacaacctgagagttgagcttg

SEQ ID NO: 169901 - DNA, 374 bp, Arabidopsis thaliana nossen
aaaatttgttatctataataatcatacatcaaaaattactgtgtttcataatctaatgtttagtacaattcaataaatttggttagaattgagaaatggtgatgcatatctctagttatttagaaaatttatattcggagcgaaatcgagctagattgtgaacagtataactagacctcataactagaataaatagataatgttgaaatatactttgaaacgaattagatgtgaaatgaaatgttccattgaagactttttattataagctacaaacttcacgtgaataatcttcaacatgtcagtcagacacacatgagacaacacaaaagtaccaccaaattcgtaattactccatggaagatggaacaaat

SEQ ID NO: 169902 - DNA, 373 bp, Arabidopsis thaliana nossen
gcggatatctacttgatcgatgaaccgagcgcgtttcttgattcggagcagagaattatagcttccaaaggcataaagagattcattcttcagatgaagaaggcggcttttgcacgatttcataatggctacgtatttggcagataaagttattgtgtatgaaggagaaccttccgtggattgcacggcatcttctcctcagtctctacgtagtggaatgaatttgttcttgtctcgtttgaacatcactttcagacgagatcctacgaatttcagaccaagaatcaataaactcgattcgatgaaggatagtgaccagaagcttgcgggatgttattactacttggatgattaagagagagatgacattgag

SEQ ID NO: 169903 - DNA, 384 bp, Arabidopsis thaliana nossen
tcgcgtttaccggaaaccacccaacaggaaaaacagtgcccccggaaaaacactccgcatgaaccaaatgacctatacatggttcttggaagggaacaagatgttaaacctacattgttaccatggaccccttaaattgactttgaaaataacactttggctcaaaaaacaagcagaatcgatttgataactgccacaaaagcctctgcaagtgaacaaaccttaaatggtaaagaaaagaagagtcgtggtatctccaaggggaaggatgcaaagtcaagagcatcaaatagacctgacccggcgtcaaaagccaagagacctgcttggggaagtagagctgctgtctccaagtccaaatccgagatggaggaagagagaaag

SEQ ID NO: 169904 - DNA, 365 bp, Arabidopsis thaliana nossen
ctgctcctctcgccaaatctccggcgtcttctctgctcagccgggcccgtcctctggtcgccgcgttttcctccgttttccgtggcggccttgtgtctgtcaaaggtctctcgacgcaggctacatcgtcttctctgaacgacccgaatcccaactggtcgaacaggccacctaaggagacgatcctgctcgatggttgcgatttcgagcactggcttgtcgtcgtggagccacctcagggtgagcctactagagatgaaatcattgatagctacatcaaaaccctagctcagattgttggcagtgaagacgaagctaggatgaagatctactcggtttcaactaggtgctactatgcttttgga

SEQ ID NO: 169905 - DNA, 360 bp, Arabidopsis thaliana nossen
atctaatccaaaaaatcaaaagatgaatgccacaaagtttgttgtgctggtcgtgattggcgttttgtgtgccattgtcaccgcaaggcaggtcaaagatttgtccacggagaccaaattaggggcctctcttccaaaaactactaccaaaggcattggagctcagctttctgcaactggcacaacttacagcaccagcagtgtcgttagctatgctaatggttttaacaatcccaaaggtccaggggccaattcattcgaaagtgccaacacatttaccagcggacaagtcactgccaaaggtcgcaaggcaagagtttcttctgcaagtgcttctgccgcttaaggcgatgcttcaac

SEQ ID NO: 169906 - DNA, 375 bp, Arabidopsis thaliana nossen
ggtctctgtccgtacgacgtcgaatatctagattgttcgacggcgatgggagctgggagagaagtcagcgtatcgctagatggagtcagagacaaaaacttgatgcagcttaagatactcaacacggttttgttcccggttcgttacaacgacaagtactacgccgatgcaatcgctgccggcgaattcaccaagcttgcatattacagtgacatatgtgttggagctatcgcctgtcggctggagaagaaagaaagtggggccatgcgagtttatataatgacgcttggtgttcttgcaccctaccgtgggattggcattggctcaaatctattgaatcatgttcttgacatgtgctccaagcaaaacatgtgt

SEQ ID NO: 169907 - DNA, 367 bp, Arabidopsis thaliana nossen
ggaagcatcctttctgtcttcagtttatcctcaggtttttcttcatccgatttcaattatctgtggaagcatgcctagtcattaacttattttcttgttccttaaggtttaccttgatttcggcttggcggttccaaagcttagtgtccatggtatggtttcttcagttaaagagctccttgacttagcatcaataaagaaggtaaaatttattttacttgcattatctttgttattgttcatgagtaaccataagatattattgcaggttatgttcagcactgatgggtatgcatctcctgagacctactatttaggttagctcaagtttctacctcttttctatagtttgtaacatacttatata

SEQ ID NO: 169908 - DNA, 370 bp, Arabidopsis thaliana nossen
  unsure (1)..(370): unsure at all n locations
cggacgcgtgggctctatctctctctctccttcttcacaagcaaaaaagcacgaaaccatttttgtttgttgattgtaccnacacttctttcccctctctctctctctctccaccgccatggattcctcctatggcgccacaaagttccttctcctcctcttcctcaccacctccattgcgaccgcattacccgataacaaaccagtaccgggtcaaataaactcaaactcagtcctcgtagctctcctggactctcactacacagagctagcagaactagtcgaaaaagctctccttctccagaccctcgaagaagcagttggtaaacacaacatcacaatcttcgcaccacgcaacgatgccttggaa

SEQ ID NO: 169909 - DNA, 373 bp, Arabidopsis thaliana nossen
  unsure (1)..(373): unsure at all n locations
acccacccacccnattctcaaattcaaaaaacataattttctanctcaccccacccaaaaaccccgcttccacaaaaactcgtgcgcttacacacaaaaaatatnaccctattctttcacacaccaccttaccaattcacaattataattcctcaaacacttccttatctctaaaacaaacaaccccataatctcaatcatatctctactccaaaaactatcaccctctttcaaaaaattctcaaaaattttcacccctcctaaaaattcgcaactttacaaacaatactcttataataaaaactcaccaacgtctttcccttccaaaagctcttattatatcaaaaaactcttaaataaccttttcatccac

SEQ ID NO: 169910 - DNA, 186 bp, Arabidopsis thaliana nossen
  unsure (1)..(186): unsure at all n locations
atttttcataagcataatcactcaaccaaatactgatattctaatttctaagtgaatctgtttccaatgtgtgttatattcnnctcccaccaagtatagcatttgcttttattttctgtgagagaaaaatacccttaaacacccctaaaccggcacctttattatcaaattactttgcacaacttt

SEQ ID NO: 169911 - DNA, 358 bp, Arabidopsis thaliana nossen
cttcgatcttcgatgcaaagctccttaatcagcactcacaccacatacggcaacagttcgtttggtgcggccacaagaaaccttctacggatgttcaacctctccaagtcccactcatagacctagccggtttcctctccggcgactcgtgcttggcatcggaggctactagactcgtctcaaaggctgcaacgaaacatggcttcttcctaatcactaaccatggtgtcgatgagagcctcttgtctcgtgcctatctgcatatggactctttctttaaggccccggcttgtgagaagcagaaggctcagaggaagtggggtgagaacttcggttacgctagtagtttcctcgggag

SEQ ID NO: 169912 - DNA, 376 bp, Arabidopsis thaliana nossen
gtcacccattggaccatctctagccaaaccgaaatccgaaagctttgcgttgtagttctgcagatgcagagaaacattaagataaacttctctgactgcatccaaaaccaaagctacaaaaagtatcaatcatgtcataccgaatctagcaagatgttagatgctttgaagtctcggtatataacttgcggttgagcattgtgaagaaaagcaagtcctctagctgcaccaagagccatacgaacccgcgtgttccatgaaagtggctgatagaatgttcctcctattatgagaaaaaagaaagaaagattaaccattgtgtataacaagttcttccatgagcttctttatctttgaagatttgaacttacttctg

SEQ ID NO: 169913 - DNA, 372 bp, Arabidopsis thaliana nossen
cggacgcgtgggaaacaatggaggaaaagcaagtgaaggagacaaggatagtgttggttccagttccagctcaaggtcatgtaactccgatgatgcaactaggaaaagctcttcactcaaagggtttctccatcactgttgttctgacacagtctaatcgagttagctcttccaaagacttctctgatttccatttcctcaccatcccaggcagcttaactgagtctgatctccaaaacctaggaccacaaaagtttgtgctcaagctcaatcaaatttgtgaggcaagcttcaagcagtgtataggtcaactattgcatgaacaatgtaataatgatattgcttgtgtcgtctacgatgagtacatgtact

SEQ ID NO: 169914 - DNA, 371 bp, Arabidopsis thaliana nossen
ctaaaacctattaagagagaaagatatatacagagagagatcatggacggtaggggaggttgttgcatagccagatatggtggttactgtggtcgctacggtctctccaaagcagatcgaatcatgcttcgttttcgtcccattgctcctaaaccggccagcgacggtggaagtgtctctctcaccgggaagagcggctccaccacaactacaagtggtggaagctccgatctctcaggtaaatctgggagaggaaagaggaagtatcaaaaagatagttccggtgggaactcccgaaagtgcaataagaagaagagagatctcagtggagacgctgctactaccacggcggttacattgtctcttttacc

SEQ ID NO: 169915 - DNA, 372 bp, Arabidopsis thaliana nossen
atcacatcaaatgagaagaccccattaacagggttggcattagcagggactgtccggtctagaaactgtgcgagatgacggttaaaagttccgtcagggcgacgcaggagattgtaagctagcttaaagttggatattagaacccatgtattgagaggaaccactgtctgcaacaaaaaacacatgacagaccaataaatcagagaactttcagacacaaaaccataaggagatagccataaagatatcaaagatgagatttttgagagctttcacttgtaaaacaggggaactatacacaaacacaacaaaaccttataagagatatgattacaacacttgacagtagaaacagttcatgggataacaaaa

SEQ ID NO: 169916 - DNA, 337 bp, Arabidopsis thaliana nossen
gtggtttcaaatttctttttctcgtcagtggttagaaacttacaattttaagaatcttatcttaagctctcgtctcttctctctccaaaatctttcagagaggagagcttgataatcgttttgtctccggtttgatccggatttgtttatattctcgtctctatgcgagatcaataatttccgattacatatcggatcttctgttaccggctatgaccggtcttttctccgtttttaacggaacttgatctctatctccatcgttgctcacccatcgatctcaacgttttcttccaagatttttgttgtctccatttcttcgtggattaacatcttc

SEQ ID NO: 169917 - DNA, 168 bp, Arabidopsis thaliana nossen
ggggggacccaaaccttcggtcgcacgatctaattcaaaaatctcacccaattgagcccgtctagcatattgtttcacagttgcgggatcactataactcactccattgagttcaccaccataaaactcaacagttacacctacttgttcgacactatattaattttt

SEQ ID NO: 169918 - DNA, 303 bp, Arabidopsis thaliana nossen
acccaaacaacccgtcccacgatctaatttaacatttttttccaaaccagcccgccaaacagatgtgttcacaatttttgtttcagtataacacaaacaaaaactttcaccaccatataactcaacaaatacacctacttgttcaacactatattaccatacttacctacaaaacagaacctcaactctaacaattacaactccctctaccacaactaccaaaaaagcaacaaacatatgtcggccgctctacaggatccaacctcacgtacgcttacatgcgacgtcataactctcctctat

SEQ ID NO: 169919 - DNA, 330 bp, Arabidopsis thaliana nossen
caatgattctcagtcggtgcaagtcattctaccccaaaaacaattgggccgcaaatcagacatgtgtggcttctgttgttcatattcacacaacgttgctcccaagggaaagttcatagcatttgtgtcaacagacgctgaaactgataaccctcaaaccgagctccagcctggaatcgaccttcttggtcctgttgatgagctgttcttcgacatctatgatagatatgagcctgtcaacgaacccactttggacaactgcttcataacaacgagttatgatgctacaacacactttgacacaactgttgttgatgtgttgaacatgta

SEQ ID NO: 169920 - DNA, 302 bp, Arabidopsis thaliana nossen; identical to SEQ ID NO: 130227

SEQ ID NO: 169921 - DNA, 370 bp, Arabidopsis thaliana nossen
gactttggtggatcagccattggacgtgttagccctgttgactctggtttgtggtggatcatattgctgagagcttatggaaagctcacgggtgactacacgttgcaagagagaattgatgttcaaacagggatcaagttgatactcaagctttgtctagccgacggttttgacatgttcccgactctacttgtcactgacggatcatgtatggttgatcgaagaatggggattcatgggcatccacttgaaatccaagcattattctactccgctctccgttgtgctcgagagatgcttattgtgaatgatggaaccaagagcttagttactgcagtcaacaatcgcctaagtgctttatcattccata

SEQ ID NO: 169922 - DNA, 369 bp, Arabidopsis thaliana nossen
gagcctagacaccctcaaaaaatataaactatggctgagctcatactcgttttcgcaactattgtcgtcttcattctactagccgacgcatacatctaccgtacagtggcggagttcgaggaagatgatgacgtgagcaaccgacaacatggtaagtgccagagggagtttgtgaagcatcagatactaagaggttctagcaatggatccttatgagagctcagcaaggaagaatcgtataccaagctgctgactttgagctcactcttgatgtacaacttgaagacgatgagaacacaatggggcctcaacaacagtcatatgtcaaaatgggtagatatgaatgaaggcaaggggacaagacgagtg

SEQ ID NO: 169923 - DNA, 368 bp, Arabidopsis thaliana nossen
atttactataaccttcaaattaagcttcttttattttatgaaaaataagatgaagaaaactccattggcgtttatttaaggaggctgcattgcttgctcactgactcaactcaagagtggtgtattgcgagaagaaagatagagaaaaaaaatggcaggcaaaggtgtgatgatggtggcgatactttgcctttgggcactctctgcaacatctgaagcagtaacagaggctgagccaggtttgatgatgaacttctacaacgacacgtgtcctcaggccgaagacatcgtccgtgaacaagtcaaacttctctacaaacgccacatgaacaccgctttctcttggctacgtaacatcttccatgact

SEQ ID NO: 169924 - DNA, 370 bp, Arabidopsis thaliana nossen
cttgagcagattcttaagggtcagtccaagctagttgtcgagttcaatgggaagtttgatgctatctacacagatcttaataggaagatcgacaatttgagctctcacatgaagatactggatgttcaagtagctcaaactgttcagtctatcaagagacaagagggttttcttcttgatacccctgatactaatacaaggaagagctgtaacgcgatcatggtcagagctaaggaggaaagctggaaagaatgaaatgttaaggacgagttggagctcgctgctgcagagttgctgtcgaccgacacacattagtgtcgattgacacaaggcaattcgatctgggacgaatcagctgacgagacagtgt

SEQ ID NO: 169925 - DNA, 374 bp, Arabidopsis thaliana nossen
ggaactccctggttaacagcgaaggccatataatacccaggcggagaaacggcgccgttaggtggagccgtacactgaatcctataacgacctactccgtcaggcacagacggagcaacggtcaacttaacgagccgttgaccttgagaaaacgaatgagtcgcaaaaggcgcacttccccaattcatctgaattatccccaccaccagcaacggcacggtcacgaacacgtcgaaaacctctccgtaccgtatgatctgcgggatttcttggatctctggtcggagattagctcgatccggtgacagatactccggtgaaaacgcttcgatccgtagctccgttgggaattcggcgttgaatttgtagaaata

SEQ ID NO: 169926 - DNA, 372 bp, Arabidopsis thaliana nossen
atacaataaaatgataaatgtgttatagtcaatgaataaagaataagagagatggtgtgatctttacacgtttggggcctaaaccaaaaaaaaaggatgggtccaatatgccaactactactattgtattgagagtaggaagagagagaaaccttaatggagacagagggacagtggggttatgtcaattgtcatattattcaaccactcaccaatcactcactccaaatctatatctctctttttacaaataattatgatagatttgatgataagttggttctcaaatcccagccgttcaatttatccagatatgcaagaaaatattagattttaaggaatcggcctttccttatttggtaagactaaata

SEQ ID NO: 169927 - DNA, 369 bp, Arabidopsis thaliana nossen
cagccctgtcgccgttatgcgaaacccccaaatcgaaaaaccggatacccttgcatcgccactctaacggtgtcgatctatatcactcttcgaaactttcccaagttgctcgttttatgtatccacgctttattttgggtattgtaaattctctgcaattcaccctcaatttgaattttcacagcggcaacaatataagttcgagatgaaagaagcagaatgaagaagaaagagagcgtgtaaaccacgcacatgttatgtttggaattattatataaattacatcacatatagtttgaggtgttagtttttcaaatataaagtttttgttggttagttttgctaatttcccttttcttttttttaaca

SEQ ID NO: 169928 - DNA, 368 bp, Arabidopsis thaliana nossen
caacaaactccctccattaatattccaaccaatcaacaaaccaaatactcggacatcgacatgttgggggtatcaaacaatatcactcttctaaacttacccaacctgctccatatatgtatccacactttattttgcgtattctaaattctctccaattcaccctaaatttcaatctacacagcgtcaacaatataacttccacattaaacaaccacaatcaacaataaagagagcctgttaaccactcacatgttatgtttccaattattatataaattacatcacatatactttgaactcttagtattttcaaatataaactatattcgtatctattttttctaaaatcccttttctatttttta

SEQ ID NO: 169929 - DNA, 371 bp, Arabidopsis thaliana nossen
gcagtttctacgagatccatataaggccattattggatcaacagatctaaaagctaaccagtctatgaaccaagtaatcgagattgtaccgacgccagagaaatacaacaggctccttacactacttaaacagttaatggatgggagtaaaatcctaatttttgtggagacaaagagagggtgtgatcaagtgactagacaattgagaatggacggatggccagctcttgccatacatggtgacaagacccaatcggaaagagaccgagtcttggcagaatttaagagtggacgaagcccgataatgactgccactgatgtagcagcaaggggacttgatgtgaaggacattaaatgtgtggttaattatg

SEQ ID NO: 169930 - DNA, 367 bp, Arabidopsis thaliana nossen
caaacgaaaagaagcgacttttgcctcttttggtctctccccttctccggagagatctgctctctctatctatctctcaatctgtaagaagaagattcccacttcagtaaaagccctaactttacttgggaaagttcttcatctatcatccttcaatcgtcatcatccatggctgatcaacaaaccctagattcctctactcctcctcctactcaatccgatgatctatctcactcccactctacttcctctactacttcagcttcttcttcctcagatccatcactcttgaggtctctctccttaagtcgactcaacgccggagctcctgagttcgttcctggtcgaactactcctccgctgcctc

SEQ ID NO: 169931 - DNA, 352 bp, Arabidopsis thaliana nossen
caaagaagtagtgccggaggtggtagccaccggagattattgttgttttccgacgagaaatttccatcgtggttccctctttccgaccgtaaactactggaagattccaaaactacggcaaaagccgatcttgtggtggctaaggacggttcgggtcactacagaagcattcaacaagcggtaaacgcagctgccaaacttcctcggagaaaccagagacttgtgatatacgttaaagccggcgtttacagagaaaacgtggtaatcaagaaatcgatcaagaacgtgatggttatcggagatggcatcgattctaccatcgtcaccggtaataggaacgttcaagatggca

SEQ ID NO: 169932 - DNA, 371 bp, Arabidopsis thaliana nossen
gaaaaaatggcaataaccaacaaattaatcataacacttcttctccttatgtccatagctggcgtgcacgtggttatccttccgtgtggagatcgacgagttcgagccaccacagcaaggagaacaagaaggtccccgtcgccgtcctggtggtggctctggcgagggatgggaggaagagtcgacgaatcatccataccacttcaggaagcggagtttcagtgattggttccagtcaaaggaaggttttgtgagagtgctgcctaagttcacaaaacatgcaccggctctcttccgaggaatcgagaactacagattctcgttggtggagatggagccaacaactttctttgtgcctcaccatttggatg

SEQ ID NO: 169933 - DNA, 372 bp, Arabidopsis thaliana nossen
atcagctctcgactattttattgagagtgaaagagaagacaaagatggggagttcaagttacttgctacaaacgttaggccttctgctgctctgctgtaccgtcgcagctaataaagtaccactcgcaaacgccaagtataagcacccaaaagagccactgggagtcaggatcaagaacctgatgagccatatgacccttgaagagaaaatcggacagatggttcaggtggaacgtgtcaatgccacaaccgaagtcatgcaaaagtacttcgtcgggagtgtgtttagcggaggagggagtgtgccgaagccatatatcagtcctgaagcttgggtgaacatggtgaatgaggtccaaaagaaagctcttt

SEQ ID NO: 169934 - DNA, 374 bp, Arabidopsis thaliana nossen
cttggtgacagaagaaaagagttgaggaacagagaaaatggcagcacaagcacttgtgtcttcttcacttacctcctctgttcagacagctagacagatatttggctcaaaaccaattgcgtctgcctcacagaagaagagttcctttgttgttaaagctgctgcaactccacctgtcaagcaaggagcaaacagaccattgtggtttgcatcatcgcagagtctctcttacttggatggcagcttacctggtgactatggattcgaccctcttggcctttcagacccagaaggtactggaggattcattgagccaagatggctagcatacggagagatcatcaacggacggttcgccatgttgggtgcagctg

SEQ ID NO: 169935 - DNA, 372 bp, Arabidopsis thaliana nossen
gggaagatgactcgaagctggtcgatggaattactgagaagatatcaaaaaagttgttcacggaaaaaccaaggaatgatagtatcctaattgggatcgaccaacacatgggggaattgtatccactatttaacctgaattcgaatgaagatgttcaagtaattgggatttggggaagaggaagtaatggtagatccgcactagcaagccacgtttaccaaaacatcaaacatcacttcgaagctcattgttttctcgaagacgtgagacggatttcgctgcatttccgtgactctcatttacaagatgagcttctttcaaatatgcaaggagaaggtttgacaacaaagaactgtcgtaagtgtcttaaga

SEQ ID NO: 169936 - DNA, 321 bp, Arabidopsis thaliana nossen
acgatccaaccttacgtccccttccattctacctcatacaccttctataaaggggcctaaactcaattttttggccgtcacaatacaacatccatactctaaaaacccctaccttacccaacttaatcaaaatttagcacatccccctttctccatcattctttacaacgaataatcccacaccaatcaccctttccaacaacctcacacacttacatcttaaaccaactctccctataccaaaaaaagtttttcgaaagttctgcctaaattcacaaaacatgcacccgctctcttccgaagaatcgagaactacaaatt

SEQ ID NO: 169937 - DNA, 373 bp, Arabidopsis thaliana nossen
gagaatctccacctcactctcgccaaacgcatctctgttgtaacttgtggggggtccaacacagagtgttgtggcatggatatctgggagcaatggtacaatcagatatcaaaccaaagatgggacttcaactgtgaccgttgctgatgattcaaaggagaatctttcccaagtcataaactctattgagaaaactttatgagtccttcatcatttacaccttaccgtcacttctttcacacccgcgtctcaactccatcttctccagcgccttaactctcttgtgatggagctagataacatgactaagttgtctgagaaatgcaacattcaaatccccatggaggttcttaacttgattgatgatgggaag

SEQ ID NO: 169938 - DNA, 369 bp, Arabidopsis thaliana nossen
gagaatctccacctcactctcgccaaacgcatctctgttgtagcttgtgatggatccaacacagaacacaagtgcagggattggtgggagcaatggtacaatcagatatcaaaccaatgatgggacttcaactgtgaccgttgctgatgattcaaaggagaatctttcccaagtcataaactctattgagaaaactttaggagtccttcatcagttacaccttaccgtcacttctttcacacccgcgtctcaactccatctcctccagcgccttaactctcttgtgatggagctagataacatgactaagttgtctgagaaatgcaacattcaaatccccatggaggttcttaacttgattgatgatgg

SEQ ID NO: 169939 - DNA, 371 bp, Arabidopsis thaliana nossen
cgtggacagatgtttgatatgcagggtgttgggtcggaaggaacaacctttctgcggtacaaaatcccaacacgtggacttcttggattgaggaacgcaattttaacagcttctcgcgggacagctatccttaacactgtatttgacagttatggaccttgggccggtgatattagcacccgcgatctaggttcgctggttgcctttgaagatggaacatcaacatcatatgccctggcgagtgcgcaggagagagggcaaatgtttgtaggttctggagtggatgtatacaaaggtcagatagttgggatccaccagagacccggcgacttgggtcttaatatctgcaagaagaaggcagcgacaaacat

SEQ ID NO: 169940 - DNA, 370 bp, Arabidopsis thaliana nossen
aatctctttactctgtctttttctcatcgcctttgcttcgttaatcttcctcggaaaaaagatccaacgatctaaatggaattttcctcccagccctcctaagtttccggtcatcggaaacttacatcaacttggagaattgcctcacaggtcacttcaacgtctagccgaaaaaatcggagatgttatgcttattcacttagggtttgtccctgtaactgttatctcatcgaaagaagcagctgaagaagtgcttagaactcatgacctaaactgttgcagcaggcctaatcttgttgggacgaggctactttctcggggttttaaagatgttggttttactccatacggtgaagagtggaaggagcgg

SEQ ID NO: 169941 - DNA, 366 bp, Arabidopsis thaliana nossen
ctcatggcagtgatgcttgttgaagatttcattgatcttagccattcaatcatcattgctttcaccattgtcttgtttgccattcttcttgtacccatcttcataccaatcgcaacgagttgcttcacagcatcaaccgacccctgtgacacgcttgaagaacctctccttggcgatcagcaaggtcaggatccgggacagtccaccacccctgaccatggtcctgagcttatatttagtgaagtggaagacgagaaaccaaaagaagtagatttgcttcctgcagtggagagacataagagaattgctcagttgcaagcaaagctgatgcaagcagctgcagagggtgctgttcgggtcaagaga

SEQ ID NO: 169942 - DNA, 374 bp, Arabidopsis thaliana nossen
ctgaaacaaagaaaataataatccaatctacttttatttttgcgtacatcgctctccatcttccattaaagtcttaccctttcttcatcacttgctcttgaaattttctctcccaaaaaaggtcaaattccccacttgattccacttcccctttcatgggtttgcgtttgaattgtgtttaaagactttatatttgatcatcagattcaaattcttcatcaagatcgttgttttctctgaaagttgttgcctttttgctatggaggtattagggttctacagtggatggtgttgggtctcgctgagccattaaagttgttgtctttgttatggatgaattaggggttaggattttgagctgttgttgttgatga

SEQ ID NO: 169943 - DNA, 360 bp, Arabidopsis thaliana nossen
atttaagcatcctaacttcttcttcaaagcttaaaaaccagaaaacaaaaggaagctctctgttcagagtgaaaaagagagatcgtacgcaaaagtttccgatatggctcgctcgtttggagcaaacagcactgttgtgcttgcgatcatcttcttcggatgtttatttgcgttttccactgcaaaagaagaggctacgaagttaggatcagttattgggatagatcttggtaccacttactcttgtgttggtgtttacaagaatggtcatgttgaaattattgccaatgaccaaggaaaccgtattacaccttcatgggttggttttactgactctgaaaggctcattggtgaggctgc

SEQ ID NO: 169944 - DNA, 367 bp, Arabidopsis thaliana nossen
caaaaaaaaaaacagagcacaatgactagatttgcggtattgccactctctgttctccttctcgttgtcttgttcctctgcactgagtcgttggctaagtcggaggagtctgaagaatacgacgtcgctgtgccttcatgttgcgggttttcgtctcctcttctgattaagaaagatcaatggaaaccaatcttcgagacgaagtttggacagatttcaaccgttcaaatcggcaatggatgcggtggaatgggaccttacaagatacattccataacgttggagccaaacacaattttgctccctcttcttcttcattccgacatggtcttcttcgttgactctggaagtgggattctgaattggg

SEQ ID NO: 169945 - DNA, 352 bp, Arabidopsis thaliana nossen
gagaccaactgcacgttgaattcctatccatgatcttagttgatgacgatgcaggcactttgtttgtgtgtgtttgatttcattactttccttacatgcgcagcttcttccaatttccctgtgcttgaatatatattggctagtgttacaaatgcagtttcagaagtaggatccagctatagaatcctctcagtctaccatcttccacgttcagtgtcacctatcgccatacacacattgagaagtgtggttcagacttcataatactatttgcatggcttgttaattaacatctgttctgtacctctttttcttcctgcattactcatctaattaaccatactttatattg

SEQ ID NO: 169946 - DNA, 368 bp, Arabidopsis thaliana nossen
aaaacttttctctcagtgatcggataaaattctcggcgaagaagtgaagtttccggcgatcagaggtggtgtggataaggagaaggatcatgaagtggagtggcttgaagctcacaagatagaaataagcgttgacttattagctgcagcgaaacaacaccttttgttccttgaaactgttgataggaatcgatggctctacgatggtcctgcgcttgaaaaagccatctacaggtacaatgcttgttggcttcctttgcttgttaaatactctgagtcatcatcggttagtgaagggtctttggtccctcctcttgattgtgaatggatttggcattgtcacaggcttaatccggtgaggtataatt

SEQ ID NO: 169947 - DNA, 370 bp, Arabidopsis thaliana nossen
cggacgcgtgggcggacgcgtgggcggacgcgtgggcggacgcgtgggcggacgcgtgggccgccattgaaatctacgtcatcctttgatctctagctctttccaaaaatccatgcgttgcttactttcggaatctggggaaattccaattaaatcaatggaaaaaaaaggttaacctttattggttttggaagaattggttgtggtgggatctattatttattgaacggaaacctagaggttgacagagagacgtttctaggggtgagtgagctgttcaaataagaacacaatctctttgttaaaattggggtgctttgagctctcatgtcaactagtgttcaaagagagacaatggatcttgatttga

SEQ ID NO: 169948 - DNA, 112 bp, Arabidopsis thaliana nossen
gcaagacgagcgggacacgtcgggaatttaaactacccgtcgttctctgtcgtgtttcaacagtatggagagagtaaaatgtcgacacatttcattaggactggacaatgta

SEQ ID NO: 169949 - DNA, 364 bp, Arabidopsis thaliana nossen
gaagaagagagtatcgttgtgaggtttggggatcgcgaaaatggaggttccaggttcatcgaagaagatgatcgcaacgcaagaagagatgtctgcagctaaaatagcacttggatctagagatatgtgcgctcatctcttgattccgctcaacaaatgtcgtcaggctgagttttaccttccatggaaatgtgaagacgagcgtcacgtttatgagaagtgtgaatacgagcttgttatggagagaatgcttgcgatgaagaagatccgtgaagaagaagctttggctaaacagaataaactacaaggaaacgctgctgttcctcttatccctaaaactgctaatgcttaagattcgattcct

SEQ ID NO: 169950 - DNA, 365 bp, Arabidopsis thaliana nossen
ggagttctcaccacttccagactgtgctgacgcaattgaaactgattggccaataacagcaacccatggaatgtcagttgtttttggaggtccttgatttgaaagaagagcctgaacagctgcaagggctttcgagttctctgctgcctggtcaatttttccaataatgcctattgtcctagtacctataagtaggaaggagggatgttagctaatgagtattttaagcaaattgaagtgataataggtaggtaaatcaacagttattatcaggtatacaaataataaacaaaattaagataagacagatcggaaatacagatgtactcactctctggatcatactcctttgcaatcttcagggc

SEQ ID NO: 169951 - DNA, 367 bp, Arabidopsis thaliana nossen
ctcagcattatattttctgacttcatacataatgtaggacgcatgttgtagttcactaggagaacaggccatgtactgtggttcgtcgactgcatagaaaagggattcataccatctgtacataggccgagtcgcagatttcttggctcagcagcaaattgtggccattgatcattaatttgagcccaagttgctgaatccacagggtgtttcattgttccatccgtacttgcattgctgaaatgccaccgcagatcttcagacattctttttgatctaaacattcttctgaacctatcctttattgggaaatacctaaggactttagccggaatccctttcttttcttctcttgtgtgtttatcta

SEQ ID NO: 169952 - DNA, 317 bp, Arabidopsis thaliana nossen
  unsure (1)..(317): unsure at all n locations
atcaacattatattaactgactttatacataacgtatgacgcaaggggggggtcacaaaataaatcaggtgttttacacaccnntacacaactgcataaaaaanggaatcataccatatatacataatccaagtcgcagatttcatatctcaccaacaaattgtgaccacacatcattaaacagagcccaagaagcttaatccacaaacagcttcattgaaccatccccacttacattgctgaaatgccaccacaaaacaccaaacattctctttgatctaaacattctacacaacctatcccttatcgtaaaatac

SEQ ID NO: 169953 - DNA, 372 bp, Arabidopsis thaliana nossen
gaacgcaacttctgtaaatgttgaagtctactataacaaagctgtgaactatacactgatggtcacttttgtctctttcctccaggttcttctgttgatccggcaaatggagcacggtaacacacaatctggtgctgctaaggtatccattgtaatgattgggcaacaagcgatcatggatgcttatttgtgcctcttacatctaacagccggtatattagtcgaatctctatttaatgcatttgcaaccgctgcgttcttcaagttcgtagtcttttcgatttttgagatgagatatcttctggctatatggaaagcaacccgtccttccaatagcggagagggttgggaaacaatgaggagagaactgtc

SEQ ID NO: 169954 - DNA, 375 bp, Arabidopsis thaliana nossen
agagaagaaagatagagaaaaaaaatgggaggcaaaggtgtgatgatggtggcgatactttgcctttgggcactctctgcaacatctgaagcagtaacagaggctgagccaggtttgatgatgaacttctacaaggacacgtgtcctcaggccgaagacatcgtccgtgaacaagtcaaactcctctacaaacgccacaagaacaccgctttctcttggctccgtaacatcttccatgactgcgccgttgagtcatgtgatgcgtcgcttttgctggattcgacaagaagagagctaggagagaaagaacacgacaggagcttcggacttagaaactttaggtacatcgaggagatcaaggaagctctcgagagg

SEQ ID NO: 169955 - DNA, 366 bp, Arabidopsis thaliana nossen
agagaagaaagatagagaataattatgatacgcaaacatgtgaaaacgggggcgatacaatgttgtggggggcttctcacaacatctgaaaacaaaacaaacgctgaaccagctcagatgatgaacttcaacaacgacacgtgtccttaagccgaacacatcgtaccctaacaagtcaaactcctatacaaacgccacaagaacactcctctcctcttggtccctaacatcttccatgactacaaccttgaatcatgtgatcaaaacacatagctggattcaacaagaacacaacttgtagagaaagaacactacacgagcctcagacttagaaactagaagtacatcaaccatatcaaggaaact

SEQ ID NO: 169956 - DNA, 366 bp, Arabidopsis thaliana nossen
atgcccctcagccatgttcttgctaccaagcttggtgctcgcctaacagaagtcagaaagaatggtacttgcgcctggctaagacctgatggcaaaacccaagtcactgtcgagtactacaatgacaagggtgccatggtcccaatccgtgtccacacagtcctcatctccacccaacacgatgaaactgtgaccaacgacgaaattgcccgtgaccttaaggaacatgtcatcaagccagtcatcccagagaagtacctagacgagaaaaccatcttccacttgaacccttcaggccgattcgtcattggtggaccccatggagacgctggtctcaccgggcgtaagatcatcattgatacctac

SEQ ID NO: 169957 - DNA, 376 bp, Arabidopsis thaliana nossen
ggataaccggtaaatccttaaccggtcttccattggaaggtttcgattacaattcaattttggggcaatgctgtgagatgccagttgggtatgttcagatcccagtggggattgcaggacctttgttgcttgatggggttgagtattcagtgccaatggctacaacagaaggttgtttggttgctagtaccaatagaggttttaaagctatacacttgtctggtggtgcttttagtgttcttgtgaaagatgccatgactagagctccagttgttagattcccttctgcaagaagagctgctcttgtcatgttttatcttcaagatccttctaatttcgagagattgtctctcattttcaacaaatcgagtagatt

SEQ ID NO: 169958 - DNA, 363 bp, Arabidopsis thaliana nossen
gaataaccggtaaatccttaacttttcttccattggaaggtttcgaaaacggtggaatttaggtgtgtttgtgtgagacgccaaacgggtatgttcagatcccagtggggattgcatgacctttgttgcttgatggggtcgagtattcagtgccaatggctacaacagaaagttgtttggttgctagtaccaatagacgctttaaagctatacacttgtctggtggtcgcttttagtgttctagtgaaagatgccatgactagagctccatctgttagattaccttctccaagaagagctgctcttgtcatgtatcatcttcaagatccttctaatttcgagagattgtctctcattctcaac

SEQ ID NO: 169959 - DNA, 367 bp, Arabidopsis thaliana nossen
ctcgcattcttggactaactcagattctaccaataacttcgaaagagtggtttcggattttgtcatagtgatatgagccaaagcttttgctcttgcttttgtaaatggaccctctgttatctcagtaatgattgaattgcaaagaagtgctcaagcttaaagaacaaagagatttaaagcaagcttcctcttaacccaagtctctcttagaggctaattgttggaagttgtgttttcattagcataaaaatcctttatataagccatgaaatcttaaaaataaaaaggaaaaacatcaaaacccaataatcatatcacacagattgtactattgtggtattgcttgcacataactctatatataact

SEQ ID NO: 169960 - DNA, 365 bp, Arabidopsis thaliana nossen
cgaatctctggctgttgtgtcctcgccgccatcggcgactgcgcccagtactgctgtgtcggttacctcgcttgctcctggctttcgatttcatccgactgatgaggaactcgtgagctattacttgaagaggaaggttctgggtaaacctgtacgcttcgatgcgattggagaggtagatatctacaagcatgagccctgggatttagcagtgttttcgaagttgaaaactcgggaccaagaatggtacttcttcagtgcgttagataagaagtacggtaatggtgctaggatgaatcgagcaactaacaaagggtactggaaagcaactggaaaagacagagaaatccgccgggatattcagt

SEQ ID NO: 169961 - DNA, 359 bp, Arabidopsis thaliana nossen
aatgggactattgttgtatccccttcattagctatcacagaaatgttaaataatgatgatggtggcctatgttcacatgatcttaacaagatcacagtcacagagacgatcaatccagatttgaagttggtacgtgaggataggcttgacactgatctttccgtgatgaatgaaaagatgctaaaaaaccatgttggggattcatcaagtgaaagtgccgtggccgctttgagtatgaataatggtatggctgctgatctgagagctgaaaatttcagtcagagttcacccatagacgaaaaaactttagatatggaagccaattcccctattactgactcttctttgatatggaattt

SEQ ID NO: 169962 - DNA, 375 bp, Arabidopsis thaliana nossen
ctctgataaaaaaaaaacaaaaaaaaatgacaaaggcttattcaacacgtgtcctcacgtttctgatattgatctcgctaatggcggtgacactgaacctttttcccacggtagaggcaaagaagcggagtagagatgctcctatagtgaaaggtctctcatggaacttttaccagaaagcatgtccgaaagtcgaaaacatcatcagaaaagagctcaagaaagtcttcaagagagatattggtttagccgcagccatccttcgtatacatttccatgattgctttgttcagggatgtgaagcatcagtgctgctagctggatcagccagtggaccaggagaacaatcatcaatcccaaatctgacactacgtc

SEQ ID NO: 169963 - DNA, 459 bp, Arabidopsis thaliana nossen
  unsure (1)..(459): unsure at all n locations
gcgacgccaaacgcgtccgctttttcctttctggaggggttnnntggcatttgctcgcttattaaccnnngttttcttcttttggatgttacgannagtactgcaactgtggaggagcgtactccacagngtgatcagacnnaagttggnatcagtgcaaggggatgaagnnttgggaagctatagcttcnaaggatctgnnaaagacagagctttcagtacttanncggacagcannacatactgnngtggggaacaatgacncnngtgaccgtactttcgtgnngtggccagcacaactactnnntaagttactccactttgatgtcatcgtcattagtccaataacttccaatgtcggggaggttagtttaaatgaggaataaagtgtttagaaatttgatcaggngggagaataataaaagccgagntttgaatcttttttgttataagtaatgt

SEQ ID NO: 169964 - DNA, 245 bp, Arabidopsis thaliana nossen
cggacgcgtgggacgatttccagaatttaatccaattcccagaagtggaagttggtgaagttcttttggggattatcagggttagaaacttaccaaatggacctaagggaaaggtctcggttatgttcagttaaacttaacccgaatttttttttaatggttgaccttaaactgcccttttattccagaattggggaaaggcaggtggttcttttccagtgtgaacctccagaaaagctggtttt

SEQ ID NO: 169965 - DNA, 381 bp, Arabidopsis thaliana nossen; identical to SEQ ID NO: 132106

SEQ ID NO: 169966 - DNA, 374 bp, Arabidopsis thaliana nossen
aaaaacctctcttaacgaggaaaaacaacaacatggcccctggtttctcttctctttcgaatctatcttgttcttttatccaatcctttcctatttttattctcaccttctcctcgtttttcccgaaactgttcttttgccctcttctctcaattttaatccaccaaacaaatcgaacagtgttcgataacttttagattgcaagtcctgtttttgatttggtcgggagaaagaaaactagggttttgatgggaactgatacagttatgtctggacgagtaaggaaagatctatcaaaaacgaatccaaatgggaatattcctgctaattcacgtaagaagatccaacgacggagtaagaaaaccctaatctgt

SEQ ID NO: 169967 - DNA, 361 bp, Arabidopsis thaliana nossen
ggaccggatacggttaagtttcttcaaggtttgttaaccaacgatgtacggagattcggcgaatcctgcggcgagaagaactcggcggttcctacgccgaacatggcttccgttacgaatccgcctatgtacgcagcgttgttaactcctcaaggaaggtttctatacgattttttcttgtatagcccttcgagacccgatgaaaagcttgatcggactggttcaggacccgggtcggattcgggtcgtgatgggtctgttgagttgtttgcagatgttgatgttgatgtcctcgatgaattgcttgaaactctcaaaaaatatcgcttgaggtccaaagtggatattgaaaacgttgcag

SEQ ID NO: 169968 - DNA, 368 bp, Arabidopsis thaliana nossen
ttctcaacatggcgcttcttcacaagcaaaacatttcctttgtgatactcctcctcctcggtctgcgtgccgtctcttatgcttgtgattgtagtgaccctcctaaaccatcaccacaccctgttaaaccgccaaaacatcccgctaaaccacctaagccccctaccgttaaaccacctactcacaccccaaagcctcccactgtgaagcctccacctccatacattccatgccctcctccgccctatactccaaaacctacaaccgtgaagccaccaccacctccctacgtgaagccaccaccacctccctacgtgaagccaccaccacctcccactgtgaagccaccaccacctccttacgtgaag

SEQ ID NO: 169969 - DNA, 368 bp, Arabidopsis thaliana nossen
ggagtttattgagacaaccagtgagcctggtttaacattcctggtggctaagtttgatggtcttcttggtcttgggttccaagagatcgctgttggaaacgctactcctgtttggtacaatatgctcaagcaaggccttataaagaggccggtcttttcattttggcttaaccgtgatccaaagagtgaagaaggcggtgaaatcgtattcggaggtgttgatccaaagcattttagaggagaacatacatttgttcctgtgacacaaaggggttactggcagttcgacatgggtgaggttctcattgccggtgaatctactggatattgtggaagtggttgttctgcgatagcagattctggaacat

SEQ ID NO: 169970 - DNA, 377 bp, Arabidopsis thaliana nossen
caagaagccggctattgttttcgtcccaacccgtaaacatgtccgcttggctgctgtggatctgttggcttattctcacatggataacccgcagagtcctgatttcttgttagggaagctggaagaactggacccttttgttgaacaaatccgcgaggaaacactgaaggagacactgtgtcatggtattggatacttgcatgagggtttaagcagtctggatcaggagattgtgacacagctctttgaagctggacggattcaggtttgtgtgatgagcagttcattgtgttggggcactccattaactgcgcatttggtggtcgtaatgggaacgcagtattacgatgggagggaaaattcacattctgattatc

SEQ ID NO: 169971 - DNA, 376 bp, Arabidopsis thaliana nossen
cttatgacttttcaattcaagcaggttgttaacaagactgctgcaacctgtgcccctagagcttcggcgcgccagtaaaaaccctgctctccctggaactactctttacaaagtttttgaggttcaaggctatgcatcgatgttcctcggaggtgtcctttctttcaacctcctctttccctccagcgaacctgatttatggaggttgatgggcatgtggtccatttggatgttcagtatgtctccttctctactttcttctaactttatttattccaaggctgcatttttgcccctaatcctttactttctttccagctattccttctcttcgggcacgagactgtccaagtaaagagaaagaggctcttaacta

SEQ ID NO: 169972 - DNA, 370 bp, Arabidopsis thaliana nossen
attccaatagtggagtgtatttcacgtcatttatcattatcatttagttcagttttaattttatttagttttgtacaatttcaatcaaaaaaggagtctttatgtcacgttaccgagggcctcgttttaaaaaaatacgccgtctgggggctttaccgggactaactagtaaaaggcctaaggcaggaagcgatcttagaaaccaatcacgctccgtaaaaaaatctcaatatcgtattcgtttagaagaaaaacaaaaattgcgttttcattatggtcttacagaacaccaattacttaaatatgtgcgtatagccggaaaagccaaggggtcaacaggtcaagttttactacaattacttgaaatgcg

SEQ ID NO: 169973 - DNA, 370 bp, Arabidopsis thaliana nossen
ctctaatgtctctaaagtttggaaatgtgtctgctgttgtggcatcaactccagagacggtgaaggatgtcttaaaaacattcgacgcagagtgttgttcccgaccttatatgacttatcccgcaagagttacatacaattttaacgatctcgcattttcgccctatagcaaatattggagggaagtacgaaagatgacggtcattgagctatacaccgcgaaaagggtcaaatcgtttcaaaatgtaagacaagaagaagttgcctcattcgttgatttcatcaaacaacatgcttcattggagaaaacagttaatatgaaacagaagttagtgaaactctctgggagtgtgatttgtaaagttggatt

SEQ ID NO: 169974 - DNA, 381 bp, Arabidopsis thaliana nossen
caaaacaaaacaaaaacagagcacacaaaaagagaaaccaagttttcttaaaaatggagctagaatcttgtcctcctctacctcctcatgtgatgctcgtatcttttccagggcaaggccacgttaatccacttcttcgtcttggtaagctcttagcttcaaagggtttgctcataaccttcgtcaccactgagtcatggggcaaaaagatgcgaatctccaacaaaatccaagaccgtgtcctcaaaccggttggtaaaggctatctccggtatgatttcttcgacgacgggcttcctgaagacgacgaagctagcagaaccaacttaaccatcctccgaccacatctagagctggtcggcaaaagagagatcaagaacc

SEQ ID NO: 169975 - DNA, 241 bp, Arabidopsis thaliana nossen
cttaaatatttcgagttaaattttagtataatattttttatttttgttaataaaattaaattctaattatatgtagtttctgtttataatgttttgaattttaaaatgagaattataatttgttcacccaatatttctattaatagttaccaaattttgttgacatatatgttctttaaaacaacatttcagtaattttgttcaatctcatcttactctacatcaatttgcgttggcatcc

SEQ ID NO: 169976 - DNA, 379 bp, Arabidopsis thaliana nossen
gcctgcaatgcctgttaaatgatttggttcgacgaatttattttgagcagtcgatcgtgctccggtctggacgtaagtgaagctggaagatttatgtagagcttgttgattcaggatctaccatcagatttcttcctggtttccaaggccctcttcctttcgagctcgagaccgggtacattggtgtgggtgaggcagaggaagatcaaatgttctactacttcatcaaatctgagagtaatccagagaaagaccctcttcttctctggttaagtggaggtcctttctgttcttcgttcactgctcttatttatgagaatgggccaattgctttcaaggctgaggaatacaatggaagtatcccctctttggtctctac

SEQ ID NO: 169977 - DNA, 366 bp, Arabidopsis thaliana nossen
ctttttatcaaaagctaaaacgatatgtttgtaatttggaacttgataaaaaacagttccagtattttgtatatatgtttttggacaaaaggaagaatgtatcaatgtaaagtgtggtaatatattttgtatacaatatgcttatttatatttgaattgataatatattttgtaatgaatcgtggatttgttcccaaaagtaagaacagcatatttaatcattgtacggaaaaagttgaatgggttaataaactgtttgtgttctgataaacttttccgttaattactcaattatcgtaggcttctggcttcttcttttaccatgcctccttgctccagtccacactccacaataagcaattattt

SEQ ID NO: 169978 - DNA, 333 bp, Arabidopsis thaliana nossen
tttttcattggtcaattttatataagaagagacaggtggacacacaaaggccattacaaattatcatttagaattttttgaactccctagtaacaaaagaatgagacagtacaacagtaaaacaaatcgtggatatacatacatcctcttcctcaggttgttgtaataagttcattgcagaaattcggatttatcagcctcagaacaacttaacaaaaaccaatagagccgcggaaacggtcagccaaagacgggacgacgaggtagttgctgcgtttacctctgctgatgtctctggaggcaactgggatccggcagggcattcgagacctt

SEQ ID NO: 169979 - DNA, 366 bp, Arabidopsis thaliana nossen
cgaaccgatacgatggattaagaaaaaaatccggtatggactgatttaactgaaccattcggtttcgtcccgtttccttagttcacttctctcgtctatccccagtcgtcgccgattctctcttaccggtgtcaactcgctccaccgtcggtaagttccacgagaaccaaataaggtttccaatctcaatccaattccaaatcaatttcgattctcgtagaactagtccagtgaatcagttttgctattcatactctgttctcttatgaactaagattactatcttcaattcatagattagggacacactttgcataggttttggtgaattagcctgaaatgttgtttagttttcgaattgaagta

SEQ ID NO: 169980 - DNA, 375 bp, Arabidopsis thaliana nossen
  unsure (1)..(375): unsure at all n locations
cccacgcgtnctcggacgcttggtccacgccaactccacacacccctcgcgtgtaactgaggatgtgcaggttcccacccttncacgccttcacacccttccactccttcgcacccaacgccatcacaccctacttctggtggatattactcatctcctccaccaagaactccggttgttgtgactccaccatcacccattgttgatccagccccccccatcattgaaggaagccacccacctctattattgacccaagcacttctggaactcctttcattcctgctcctttcccaccaatcactggaacatgcgattactggagaaaccaccctacattgatatggggcttgcttggatggtggggaactgttg

SEQ ID NO: 169981 - DNA, 382 bp, Arabidopsis thaliana nossen
cgcggacgcgtggtgtggaagtctatcaaggataagcttattactccttgggtggagttggatattatgtgcttcgaccttggtcttcctcaccgtgatgctacggatgacaaagttactattgaaagtgctgaagctactaagaagtacaatgtggcgatcaagtgtgccaccatcactccagatgaaggccgtgtcacggaatttggcttgaagcaaatgtggagaaatccaaatgggaccattaagaaatatcctgaatggaactgtatttagagagccaattatctgcaaaaatgttcccaagcttgtcccaggctggacaaagcccatctgcattggaaggcatgcttttggtgatcagtaccgtgccactgatgct

SEQ ID NO: 169982 - DNA, 373 bp, Arabidopsis thaliana nossen
gaatgttaattattctcttagttttcctttaattatacaacttcaactttgaatggcaaaatataacaacaataaagacatactagacattttgtaactatgtgtaagatgttaaccatcaatattttagtaatcaatatgtgtttatcattttttttttatatgaagtcgtgtactcgtgtgcttttgtgttctttaaacatattttgtgccagaaagattcgaatttgccaaaggaataattaaatcggatggtcaaacaaaacatgatatttatcactcgtgctctaatcttgatttgctgaaatagtaaaatagtaaaacatgtcatgagatccgtatctctcaacttaacactttaggtctaggttct

SEQ ID NO: 169983 - DNA, 332 bp, Arabidopsis thaliana nossen
gtacttgagattcatttcccctatctcccgaaaaagacatcatatggacgggacacaaagggtatgttttgctaaaattacgattcatttcttgctacaaatatccactcgcaacataccatatctcaatacatagccgtaatttttcataccgcatgcacataaccataataagaggcatcggccatatagcgacttattggacctccatcaagcacaagccatcccgtataatgcatatccgaaaaatcattcttccttgagggcactatagcccctatgcttgcatggatagctacaaggatgcttcctacacaagagtggaacaagct

SEQ ID NO: 169984 - DNA, 374 bp, Arabidopsis thaliana nossen
gtttttggtaatcggatggcgcgaaatctgccatgggttctgcttattattgtggtatcgtgtcttgtttcaacacttgaagctagtgaaggagattctgatcctctttacaagtcatgtgttgatcaatgtcagaaaactggatgcgtgggggatacttgcttccaacactgtaaattttcagctgatggaaaagccattgacggtccatggtacatgcaagagccactttacctgagatggaaacaatgggattgccaaagtgattgtcagtacgaatgcatgatgacaagagaagaagaaagaaaaagaaacggagagagacctaccaagtatttcggtaaatggccactcaaacatgtctacggaattca

SEQ ID NO: 169985 - DNA, 367 bp, Arabidopsis thaliana nossen
agcaaataaatcagtaattatgaaagtggtaaatggtttcttaaatagtgttaagtccactacattttataagtccattagtttttggattcgtcttaaataaaaacttgggctgtttaaatcaataaggcccattcaacggcccattataaacaatacttacaaaagaaaacagagttaggttccactagtcctctgcaactctcattcaagaacttcccttacaaagctctgaaaataaaattctacaatttagagacaaatgaatcaaaaagataaaatggattcagaagagtttctctataggcgtcccaatcaatctccaaagaaggatacttgtgcaaacccatcaagaaacctttatttt

SEQ ID NO: 169986 - DNA, 376 bp, Arabidopsis thaliana nossen
acctactaaaacatatggcaaggctctaatctcccactagagcatactatgtaacagaattattatcactataagctaacaatcacttaccggcgatcacagagaacaaggtctccaccgtcgaagcaaataaagcaaacatcttcttccttgtcttccttccgcggcggcggtgggggtggacgaatatgcaacggcgtattagcctgtgcccttggaggcctcccccgttttcgttttattggggcagcttcatcaaaaactttaacctcttgctcattggacataggcacagcaaccgtcccagcaaccgtggaggcaggtacagagagagcaggaacttggttaacaccgatctcttcacattgatcaactc

SEQ ID NO: 169987 - DNA, 290 bp, Arabidopsis thaliana nossen
gcttaacgtcttgaacaaaccacctagaaccatgtacatggcacatattgttggaacactcatcttatgttttgtttacctcacaacggattggtggctaatgaataccatccccaacatatgtgattcagttactaactcggattggacatgtccatgcgcataaccataatatgatgcatcggtcatatggcgacttattggacctccatgaatctctagacatctcttataatgcatatccgaaagatgattcttccttgatggcgctatagcccctatgcttgctg

SEQ ID NO: 169988 - DNA, 407 bp, Arabidopsis thaliana nossen
ctcaaagctttcacttgccgttgaacaaacgaagaatggaggagaacgagcgcttgtcgatgaagaggaaagatattgacagagtaaacgatgacttctctgatttttccctctcttctcccgccaggaagattcgtcgtctggatgtggatttgccaccgattatggaggaagaagagattgatttaccgatgcaagatacggtcgcggaagaaatcgagcttgagccggttaacgatgagagagcaattgttctatttaagcctcttcattatcatcagccttcttctggaaacgtatttgttgatcgacacttgatttctgggtttaagaatagatttcttcgcgatgtatcgatagctgatgataatcagtatgaagatgagagattaaacaagtgtcaagct

SEQ ID NO: 169989 - DNA, 405 bp, Arabidopsis thaliana nossen
  unsure (1)..(405): unsure at all n locations
cggacgcgtgggcatggttgcaagaggagatctgggagctcagatgcctcttgagcaagttccaggggctcaacagagaatcgtgcaagtctgcagagcgctgaacaaacccgtcattgtcgcttctcagctacttgagtccatgattgagtacccaactccaaccagagcagaagtagccgacgtgtctgaagcagtaagacaaagatcagatgcattgatgctctctggagaatcagctatgggacaattcccagacaaggcgctcacggttctaaggacagtcagtttaagaatcgagagatggtggagagaagagaaacgtcatgagtctgtgccgcttcaagccatangctcttcattntcagacaaaatctcagaagagatctgtaactcagctgctaa

SEQ ID NO: 169990 - DNA, 401 bp, Arabidopsis thaliana nossen
ctcaggttcatagacatgttcataacttcagggaggtacaacaatgtaccctcctctccataaagactggtggctgtagtgaagactgttcatattgtcctcaatcttcgagatatagcactggagttaaggcacaaagactcatgtccaaggacgctgtcattgatgctgctaagaaggcaaaagaagctgggagcacacgtttttgcatgggtgctgcttggcgagatacaattggacggaaaaccaacttcagccagattcttgaatacatcaaagaaataagaggcatggggatggaagtttgctgcaccttaggcatgattgagaaacaacaagcactagagctaaagaaggctggcctcactgcttataaccacaatcttgatacttcaagagag

SEQ ID NO: 169991 - DNA, 318 bp, Arabidopsis thaliana nossen
gtgaacttctgcttataccagtttgattaactttgtctactatcagagatgaaatgaagaagatcaatgagaataagatcgacggaagaacaactcatgatcggagatttgatcggagatgctctgataccatatcaagaatcttcaaactctagagagagagagtgaaggaagaagaagaagacaacagaaacaaaataatcgtctattctcgttaagttgttaatgtgtacaatgtgctgtatatatactctattacattttatactatagagtaaaatatactcattatatctactgtatatagtgttataacgt

SEQ ID NO: 169992 - DNA, 417 bp, Arabidopsis thaliana nossen
  unsure (1)..(417): unsure at all n locations
agccttccgaaagtttcagccaggggagacatagatggcaaggaagtggttattttttatacctgaaaaaaccacttttgttggaggaaccaactactaaaacctaattggccgtttggtttacgttttcgaccaatgctttggcaacttcaaactcctaaagcaacacattttggcattgaatttggacattttttattgcacattaacgagataaaggatttatacaaaagaggaaaacataaacataatctaaaccaagaaactcacgtctttgcgtgtgcagaagcaacgganaggaagaaatatttctttggaaatgccttctggatctctgcataccaatgaagaatcttggctcagctctgaaacaaaatcacaaagcatcagaaacaaagaaatcgaatgaaaacagag

SEQ ID NO: 169993 - DNA, 403 bp, Arabidopsis thaliana nossen
gttaattaaaacagagaatagggttggacatatgagtaacccattcgagtttgggtagttacgttcgggtttgggattaaagggtatatgatttactacccaatagaataattcaaaatattcggttctggttcaagtcgggtccatttgggtttgggtcagtttgaataaaaagttttaggccctaaaaatacccaaaaaatagaaacgggtattttgtatgtagatagcgggtctccaaacaattttttttgggtattttggtaagctttaataaatttaattatatttgaatatattttactaaattttgacaaacataacaaataattttgaatagtttagttgttttggatatttaggtacaaaattaattgacatatttagatttataattataatc

SEQ ID NO: 169994 - DNA, 404 bp, Arabidopsis thaliana nossen
cggacgcgtgggaaagtagaggaaggagatattttcgcagttccacgggtacatccaatggctcatatgtctgtcaacaatgactcgctagtattcgttgggtttactacttcagctaagaataacaagccgcagttcttagccggggaggactcggctttgcggatgcttgaccggcaagtattggctgcgtcgcttaatgtgagtagtgtgacgattgatggattgttgggagctcagaaggaagctgttatcttggaatgtcattcttgtgcggaaggagagatagagaagcttaaggtggagatagagaggaagaaaacagatgatgagaggaagaggagacatgatgaaaggaagaaagaagaagaagaggcgaatagagaagaggaagagaggaggaa

SEQ ID NO: 169995 - DNA, 385 bp, Arabidopsis thaliana nossen
atcctctagttccacaagaattcttagtcggaatgggattccagcgcagcaccttttgtgattgggagaagagccgccctttggagagcacagtacgatgaaagttgtaagctgtgttcgggggggagttcttgtctatcgttggcctctatggtagaatcagtcaagggcctgataggcggtggtttaccctgaggcggatgtcagcggttcgagtccgcttatctccaactcgtgaacttagccgatacaaagctatatgatagcacccaatttttccgattcggcagttcgatctatgattcttcattcatggacgttgataagatctttacatttagcagcaccttaagatggcatagccttaaagttaaaggcgaagttc

SEQ ID NO: 169996 - DNA, 336 bp, Arabidopsis thaliana nossen
caaacgtttaaatttagaaaagaatattatatatccagagactacatgaagtcctccacttctggttgaggattcagtcttggttctgtacctgtacagaactttcttcttcttgccagagacattgtcaacggtaagaacaatcttaccagcctgactgttcttgaaactgttcctgattggtccttcatttgctcccatcttcttcaccttttggactattaccgtgtaagctccttcttctgttggcacaaactcttccttgtaattcacttcccatcccaaaaccgctatgtcccataccaatgtaccttcagtctatgaaaacaaccacaa

SEQ ID NO: 169997 - DNA, 404 bp, Arabidopsis thaliana nossen
cggcacgtggcgatctgggtctcaagccgcccacgccgttgtcactgcaatcgtcgagggtgggtataggcacatagatacagcttgggagtatggtgatcagagagaggtcggtcaaggaataaagagggcgatgcacgctggccttgaaaggagggacctctttgtgacctcgaagctttggtgcactgagttatctcctgagagagtgcgtcctgctctgcaaaacacccttaaagagcttcaattagagtaccttgatctctacttgattcactggcctttccggctaagagaaggagccagtaagccaccaaaggcaggggacgttcttgactttgacatggaaggagtttggagagaaatggagaatctttccaaggacagtctcgtcaggaatatcg

SEQ ID NO: 169998 - DNA, 404 bp, Arabidopsis thaliana nossen
aagagtttcattgaaaatttcaagaaccctagttaataacgataatggggtcgagagttttgtggtccttctttgttttcttaatcttcacggtcatcacattgcctcccacgatccaagcttgcactccttgtactcgtcctcatcctccggttccgaaacctccacaacacggcggtggtggaggtggtggtagcaagccgcctccacatcacggtggaaaaggtggtggtaaacccccaccccacggtggaaaaggtggaggaccgccgcatcatggtggaggaggaggaggaggagggaaatcaccgccggttgttagacctcctcccgtagtggtgaggccaccgccaatcataagacctcctccggtcgtctatccaccaccaattgtgaggccaccg

SEQ ID NO: 169999 - DNA, 400 bp, Arabidopsis thaliana nossen
cggacgcgtgggctcactgtcgatatacggtcgtactttttcttctatgctcttctctttgcccggtgtttttttctctttttcttgattcaatgattgggtccctctctaagctcaagctgctgtcatctaaattaattaatatgcgaaaataaaaattattgggtttatttttgttggaagttttgtaattttgtgtagagattattgatcagtttttggttgtgtacatttatgagttgtacttgtgccctatcctttgaaggttacatggataaacaagttaatgtcttgaatcggctgagtctttattatagaatcaatttgatgaataagttaaaaatttgaagctggttttaatattcgacaccaatatagcaatcaacctaactgaaattga

SEQ ID NO: 170000 - DNA, 335 bp, Arabidopsis thaliana nossen
gttttgtgaaatcgcgagagctgatttgagcagagatggatttcgattggaaagtttccggagatttcatagtcagtggcgcacagcagctagatgacactgatttgacgcgttctgatgagttttggcttatccaagcccctttaggccaatttccagaaatcgaagagaatactcttaagattgagccacagaaagatgggttatttggagaattcaaggattcaaatggtgcaaagtatgatcttgctagctttcattctctagaagcgggcgcggagatgattataccctctgtagaatcaatgattggtgggaagagtactccgcgaggt

SEQ ID NO: 170001 - DNA, 410 bp, Arabidopsis thaliana nossen
cttcctctgacccttctcctcaaaatttcgaacctctctatcagatctccaacaatccttctcctccggaagagcaacagcagcaccaacaacaacaacaacaacaacagcataagcctcctcctcctccgattcagcagcaagaaagagaaaattcttccaccgatgcaccaccgcaaccagagacagtgacggccactgttcccgccgtccaaacaaatacggcggaggctttaagagagaggaaggaagagattaagaggcagaagcaagacgaagaaggattacaccttctcacattgctgctacagtgtgctgaagctgtctctgctgataatctcgaagaagcaaacaagcttcttcttgagatctctcagttatcaactccttacgggacctcagcgcagaga

SEQ ID NO: 170002 - DNA, 409 bp, Arabidopsis thaliana nossen
atggttggaacatatgcatctaaagaagaggcaaagaagaaagggaacagaatcaacaatgtgggatggtggttcaagccgaggttctaccagcacgcgcagaccgccctgaaaaagggacagtttgttgagtacatcccaactcgtgaatactaccacaggcacacaaggtgcttgtactgggaagggaagcttattcttccatttggtgatcagttctggtttaagtacctcttaagttggttgatgcctccaaaggtctctcttcttaaggccactcaaggtgaagctatcaggaactattaccatgatatgcatgttattcaggatatgcttgttcctctttacaaggttggcgatgcactcgaatgggtccaccgcgaaatggaggtgtatccaatttggcttt

SEQ ID NO: 170003 - DNA, 99 bp, Arabidopsis thaliana nossen
gttttctttagaaagaaaattgtcataggatattccaaaaattaagtcgacacctaaatagttagaagatgtaaaaatttacaattttaatcaaccacc

SEQ ID NO: 170004 - DNA, 407 bp, Arabidopsis thaliana nossen
ttaaaacacagagagacgaagaaaatcgagatctcgaataatgcgaatgtgaaggatctttgcgagttgcataatcttcagatcgaaaggtttctatcgattcgttggtcaagaggagattgtgcgtgtgattcgtgagcatgggctgttcgttttcaggattgaacgcactttacgacgccgtcaacggtggaggcgacgtatggatcaatgagaatcgattcaggatcgtgaggcagctcggcgaaggaggtttcgcattcgtctttttggtcaaggaaattgtcgccgacgcttcctccgccgcatccggtggtggtctagctaagaaagtcaaggatccggctcatctctccgctgacggaacttatgctatgaagaaagttttgattcagaacaaggagcaa

SEQ ID NO: 170005 - DNA, 408 bp, Arabidopsis thaliana nossen
  unsure (1)..(408): unsure at all n locations
gtccgtagccgtatcatcgtctccgtcgaactgatgagagaattttgacttgtgagactcttctcttgttatttcgttttccacaattccgaaaatgcccctgatttgtgaacaatgagcgcgtctacttcccgctcctttgtattttggggtcatatgggccttttacaatagagaagcccataaaagagagccgttgatttgggctttccggcaaacactcgtaagaaccttgtgagtgatcaaaacactatgtttcttctcaatatactgaaatcgttcatgtgagaantatgaacattataaccatcaaaaatccaaattcagaaaacattactatncacaaattagaggccaggatatacaacacagttatttaactgggttgacatctatactgaacccaaa

SEQ ID NO: 170006 - DNA, 386 bp, Arabidopsis thaliana nossen
gtccagttgatgcattcttttaactaaaaaaacagattctttaccaatgaatttgagacattttgtttggcagctgataacgaacgataagttcttgagcgtggagcatagggtacgaccgaacaaagatagaccgcggatttcagttgcgtgcttctttagctcgagtctttctccaaattccacggtttatggaccgattaaagatcttttgtctgatgaaaaccctgctaagtacaaagatatcaccataccagagtacactgcaggatttcttgcgagcatctttgatgaaaagtcgtatttgactaattacatgatatgaagaaaatacttgtccgagtgcaagatatatatttgtgcgttttgcatatgttacgctacat

SEQ ID NO: 170007 - DNA, 396 bp, Arabidopsis thaliana nossen
aaaatcactcgtacaatttcttggccgaaagagttctgagggttttgggtttgtcctttgtagctgtcgcttcatacttctcgctcaacgctatagctttagccacggctttcatcttccttgcattctttgttctcttcatgtttgtcctatagaaatcaagaaatatcatcacgattagaggaaagcaaagggttaagaggtccaaagaaaacattaagataagcccgaatgcaacttggtctccgaacaaaatggtatacatatgttctaaaactatccaatatcatcatcatgtcttggtaccatccacttgagggaccgtaccaaaccgtatacctggttcacaggcaaaactatattaatattctctcatgcaccagctggcatatgttt

SEQ ID NO: 170008 - DNA, 405 bp, Arabidopsis thaliana nossen
gtcggagtcaaccaactgagcgaatttcaagtagtgctggtgatgtgtcggaggatgatcccgtgtgatgactgaaagtctctgattatgagcttccaagtaaatacaacaagaagatacttcacaacgatccgagatgtctaaaccacatgttagctgctgagatatatatgcaacggtttcttttatctaacccagttcgaacacttaatcccgaggaagctgattgattctacgtacctgtgtacaccacttgtgatctcacgcctaatgggcttcctcttgcttttaaatctccacgaatgatgagaagtgccattcagcttattgcttccaattggccatactggaatcgcacagtacgagcagaccacttctctgttgtgcctcatgactctggagcct

SEQ ID NO: 170009 - DNA, 171 bp, Arabidopsis thaliana nossen
ggaattcgcatagagaaagtgtgcctaaaacgatcaacggcgcgctggaagacaccaccaccggcgtgcggtaattcaccaccaccgccgctctgtgaaaaaaaacactctctaagctcaagctgttgtcatctaaactaataaatatgcgaaattcacaaacccaagatc

SEQ ID NO: 170010 - DNA, 412 bp, Arabidopsis thaliana nossen
acccttccgcggacgcgtgggcaaaagtcttacaagctgttcaagagtcttgtggttgtcggagaatacggtgttgggaagacagcattatgccagcagatcttcaatgattatgatgtgaggaatgcttatgccccgaggatttgggtatctatgcatagcaatgaatctaaggagggacttgatgggaagatatgtgtgttgaagacgatcttgaagggtcttggagttgaagagtcaatgttcgaatccatccatagagaagtagtagaagaagtttcaaacaggcaggaagctggagaaattgatggagagacggctaaagagaaggagatctctgctctgctctatgcacttcacttgaatctgaggtggaagaagtatctgattgtgtttgatgatgtccaggaga

SEQ ID NO: 170011 - DNA, 404 bp, Arabidopsis thaliana nossen
cagccgtctgtcttacctccagaagtcgacgacaacaatggcaccgaagaagggagttaaagtggctggaaagaagaagccggagaaagttaccaacccattgtttgagagacgccctaagcaattcggtattggtggcgctttgcctcctaagaaggatctttctcgttacatcaaatggcctaagtcaatccgtcttcaaaggcagaagcgtatccttaagcagaggttgaaggttcctccagctcttaaccagttcaccaagacccttgataagaatctcgccaccagcctcttcaagattcttctgaagtataggccagaggacaaagccgcaaagaaggaacgccttttgaacaaggctcaagctgaggcataaggaaagcctgctgaatccaagaagc

SEQ ID NO: 170012 - DNA, 406 bp, Arabidopsis thaliana nossen
cttttcagcagcctcttagtaatatggatggttggcttccacatcgtgggtttcctccgtctggggagtttgagcgtcctcgaagttctggtgctgcttttgctgatttccaggagaagtttccgttgcttaaccttccatttgatgataagctgcttcctcgatttccatttcagccgagaacaatgggaacttcgcatcaagacataatggccaatctttcgatgaggaaaagatttgaaggtactggtcattctatgcaagacctatttggcggaacaccaatgccgtttctacccaatatgaaaatccctcctatggatccacctgtcttcaaccaacaagagaaggacttaccgcctttgggtttggatcagtttccatcagctctttcatctatcccaga

SEQ ID NO: 170013 - DNA, 405 bp, Arabidopsis thaliana nossen
taagaaccaagtcaagatgatacggattaatcctttattcttgcgccagagatcttcctatttgcaaaggaactggagttacatctcttttccatttccattcaagagttcttatgtgtttccacgcccctttaagaccccgaaaaatcgacaaattcccttttcttaggaccacatgcgagataacgaaaaaaaaaaagagagaatggtaaccccacgattaactattttatttatgaatttcatagtaatagaaatacatgtcctaccgaaacagaatttgtaacttgctatcctatcatcttgcctagcaggcaaagatttcactccgcgaaaaagatgattcattcggatcaacatgaaagcccaactacattgccagaatttatatattggaaagaggtt

SEQ ID NO: 170014 - DNA, 405 bp, Arabidopsis thaliana nossen
gccgccgtcacttgcaaagccgacgccgccgctctttgcgtcactggtgattccgatatccactgtggtgatccactcgctagccgtcacgaacgtgtccccgtcgaaactttcttcgactccgccgaaaccgccgtcgccaaaatctcagcttcttcgacttttggtatccttggctcgtccgccaccaccgttgatttaaccgctgttccggttatggctgatgatctcggtttatgtccgtggttacttcctaatgatttcaacgaaccggctaaaatcgaaatcggaactgaaaacatgaaaggttcttctgactttatgttttctgatttcgatcggcttattgatttcgagtttccgaattcgttcaatcatcatcaaaacaacgccggaggagatagt

SEQ ID NO: 170015 - DNA, 408 bp, Arabidopsis thaliana nossen
acaatccttgttctcgccgaaatagagaattttgtgaatctgggtttggaggtcaggtgttaatatagggattttgatcaaaagaagacgagattcgatccgatccgatctgattgaaaaagaaatggcgaatctgtatgtgaaagcggttccaccaccggatatgaataggaatacggaatggttcatgtatccaggagtttggacgacttacatgcttattctcttcttcagttggctcgttgttctctctgtctctggttgttcccctggaatggcttggactgttgttaatctcgctcacttcgttgtaacgtatcacagcttccactggatgaaaggaactccttttgcagatgaccaaggaatctacaatggtttaacttggtgggaacaaatggacaatgg

SEQ ID NO: 170016 - DNA, 400 bp, Arabidopsis thaliana nossen
gaaaaaggaaagaaaaatctcaactttgattctctctccctctatatatgctttatttattctggactcataatagtttcatcatctctttcggtctatgaaaaacattggaaaaaccctaattcctagtgttgcgaatcacttttcattgcagctttgaacttcagtctgtgaatttccaacagcaatgacaactccagcaaaaaaagagactgatgtgggatttcaagagactgcagaaagatcctcctgtgggaataagtggagctccacaagataacaatatcatgcattggaatgctctcatctttggacctgaggacactccatgggatggaggtactttcaagttgactcttcacttcaccgaggattatccgaacaaacccccgattgttcg

SEQ ID NO: 170017 - DNA, 405 bp, Arabidopsis thaliana nossen
gttttgaagatctgatacagaaattttttctcgggaaaattcagagggaagatcgatactttccacagcggagaaggtgtttcgtttctgctgatcagcagattacttcttctttttctcggattgatccttttggattcttcgaaagatggaccctaataatcagatacaggcaccagttgaaaattatgcaaacccaaggacatgtcttttccatgttctcttcaagggtgctgcgttggcgttttacattctctctgctctcttcttcaacagctttgtcatcatctttgtagtcactgttcttcttgctgctcttgacttctgggtggttaagaatgtcagtgggcgtatactggttggtctcaggtggtggaacgagatcaatgacttgggagaaagtgt

SEQ ID NO: 170018 - DNA, 404 bp, Arabidopsis thaliana nossen
gaacaaaaagaaaatcagatttcagtttttttttttcatttctaacataacattccttggtccgattgatgctttttttcaagatcatgaagactaacagagaagaacaaatgataaaactgtttggaattcctctttctgataaacccagatggcaacaatttctcatctgttcttctggtttcttctttggttacctcgttaatggcatctgtgaggaatatgtgtacaaccggcttaaattcagttatggatggtatttcacgtttgcgcaaggattggtgtacattgccttgatttacatgtatggcttcaggacgaagcaaatggtgaatccatggaagacttacgtgaaactctcaggtgttcttatgggttctcatggcctcaccaaaggctccttg

SEQ ID NO: 170019 - DNA, 384 bp, Arabidopsis thaliana nossen
  unsure (1)..(384): unsure at all n locations
aatctctattgttgtcgtttcgaaacaatttccttatctcgatctcaaggggaggaagagacattggtgatagctgtgccntctgcgctgacaatctcgaatgggttgcctatggatcttgtggtcaccgagaggtttgctccacatgcgtcgttcgtctccgattcgtcctcgacgatcctcgctgctgtatctgcaagaccgagtctcctatcgtttttgtcaccaaggcattgggtgattatacaaggacgatcaatgatttctccaccttcccatcagcaccaagggaaggtcgagtaggagctctctggtatcatgaagacactcaggctttctttgatgacttggatcagtacaggatgatcaaagctatgtgtagac

SEQ ID NO: 170020 - DNA, 403 bp, Arabidopsis thaliana nossen
ggagattgataatgaatggtttgattgatatatctaggttgctccagcggaactagaaggtcttgtggtatcacatcctgatatactagatgctgtcgttatcccgtgagtcatatattcagataaataccgagttgattccacgtccgaacacattaacatttgtgtatgttgtaggttccctgatgaagaagcaggtgaagttccaattgcgtttgttgttcgatcaccaaatagctcaataacagagcaagatattcaaaagttcatagccaaacaggttaataacttatgacccaagtcgtttgaatcaatcggaccgatatcatcttgttttctaaggctcaaaaccatttcatcaggtcgctccttacaaaagattacgacgagtgagcttcatcag

SEQ ID NO: 170021 - DNA, 404 bp, Arabidopsis thaliana nossen
catttgcaaaaaacttctctctgaatctcagtgagttctcataaaatgagagggatggtgtgtttgggcgtttgggctctctttgctgctttactctcacagcagctctttgcttctgttgcttccgtaaggtttgaggatgccaaaacatactacttatctcctccctctggctcacatggaactcctccatcacacacgcctccttcttctaactgtggaagtccaccttacgacccttctccttcaactccttctcacccttcacctccatcacatactccaactccttccactccatcacacactccaactccacacactccatcacacacgccaactccacacacccctccttgtaactgtggaagtccaccttcccacccttccacgccttcacaccc

SEQ ID NO: 170022 - DNA, 422 bp, Arabidopsis thaliana nossen
  unsure (1)..(422): unsure at all n locations
aaaattctccattctccattttcctgcaatccaatatctttatcttcaaaggtgatggcccaacctgtgttggatttataagagatcccttttcttttgggccaattttccttggttacatttttccgagaaaacaaaaaagaaacttttttgcttttttttcttttcttctcttgcttttcccagcttttcaaagctttctggaaggtaaaagaaacgaaagcttttgtgttaaaaatctcagaattttggattatttcttcgggatagaaaaaaaactgttcccttttccttaaggtagatcctttcactcgttntgatttctgggtttcttcatcggcagattattttctgtttctttctttaaatactcatttaaaatctatactttctttcattactatgttcttctaggaatctag

SEQ ID NO: 170023 - DNA, 397 bp, Arabidopsis thaliana nossen
gatcgatcctaggcttacctcaaacctcagtctccgttgactactgagactcgtcgacctgtgatccgcttcttcgactatacggatctacttccgatcttgatgatggccggaggtaacgtacggtttctggttttgatactcgccgtagcaatttgcggtgctgcttctgttttccagccgatctcagactctcaccgatctgcggctctggatgtcttcgtaccagtcgatggatcatacaaaagcttggaggaggcatatgaagcattaaagactttggagattcttggaattgataaaaagtctgatcttagctcaaagacttgtgagaatgtggttaaagttcttcagtcgtcttcttctactcttaaggatgcattttatgcgttaaacg

SEQ ID NO: 170024 - DNA, 404 bp, Arabidopsis thaliana nossen
aacaaaaatgatgatcggcgaaaataaaaaccggccacatccaacgatccatatccctcaatgggatcaaatcaacgatccaacggccacgatctcttcaccattctcttccgtcaaccttaacggcgttaacgactacccacactctccgtcaccgtatctcgactccttcgcttctctcttccgttacctcccgtcaaacgagttaacaaacgattcagactcatcaagcggcgacgagtcatcaccactcaccgactcattctcctccgacgagtttcgcatctacgagttcaaaatccggcgatgcgctcgaggccgatctcatgattggacggagtgtccgttcgcacatcccggagaaaaagctcgacgacgtgatccgagaaagtttcattactccg

SEQ ID NO: 170025 - DNA, 404 bp, Arabidopsis thaliana nossen
tagaaagcatgaagcttgatataacagcgttggagcaagcactctttgacgctatgaaaatccaagaagaaagcatccaagaaaaagatcaattaaaaggaataatcgaagagtcccagtttcagtctcaaagggcaaaagagaatgtcaagtacatcgaaaagcaaaacgaagacctgagggagaaatttactgcctctgaaaagagtatcaaagatttctttcaaagtactaaagaacggttagaaagtgaagatgaacagcctctaaatgcaatgtgcttcttcgctgaactgagccatgtgcttccagtgtctaatgaagttcgcaattgttttgatgctatcatgaagaaactagaactttctcagaatgtgaatttgattgataaagtggagggtatg

SEQ ID NO: 170026 - DNA, 394 bp, Arabidopsis thaliana nossen
agagagagttttgttcttcttctttctggttcctttgctttgctttgggtgcgtgatctcctctctgatcaatcttcttcatcatcattctcatcatcattagcttcttgatttttttttccttctttttttcgtttcaagaaactaaacaaagtttctatttatggttttctgattcttcttctatagatctattatttgattctccttcgatcattgtcaacgttttcttcttttgtaatcatcacagtttttttgagaatttgttcatttttttttctcatatattgattcgagttctttcttcttgaatcttgttcttcatagatctagtttttgttttttactctctagatctatagatctgttgaattcacttctttaatccatctct

SEQ ID NO: 170027 - DNA, 407 bp, Arabidopsis thaliana nossen
  unsure (1)..(407): unsure at all n locations
tccgtgagagagttttgttcttcttctttttgattccttcgctttgctnagaggtgcttgatctcctttgtagtgtttcttcttcatcatcattctcatcatcattagcttcttgatttttttttccttctttttttcgtttcaagaaactaaacaaagtttctatttatagttttctgattcttcttctatagatctattatttgattctccttcgatcattgtcaacgttttcttcttttgtaatcatcacagcttttttgagaatttgttcatttttttttctcatatattgattcgagttctttcttctcgaatcttgttcttcatagatctagtttttgttttttactctctagatctataaatctgttgaattcacttactcaatccatctctgtgttctt

SEQ ID NO: 170028 - DNA, 402 bp, Arabidopsis thaliana nossen
gttgaatcggaaggaatttagatcggagtagtcggagatgtctgacgggtcggctgacggtggtttggtgtcggcggagcaagctacaacgcctgttgcgattccgacgccgtatccgtcattgacggtgtcggcgtcctataaggagaaaagttctgggaggaggagaccggttaggcctagttttgatgcagctgctgataatgagtttattactttgcttcatggttcggatccagtgaaagttgagcttaatcggcttgagaatgaagttagagataaggatcgagaattaagtgaagctaatgctgagatcaaagcgttgaggttatctgagagacaaagagagaaagcttgtgaagagcttactgatgagctagctaagttggatgggaagctcaa

SEQ ID NO: 170029 - DNA, 406 bp, Arabidopsis thaliana nossen
  unsure (1)..(406): unsure at all n locations
atgaaaaggactttgaaaagaaagagaagtactatataaaataattagatgtccagtttggtttttaagtatttnatatagnacttctctttcttttcatgccgtttgtgtctcataacttgaaaccaaactggacatcaaatcaaatacctaactactatgagtctagcttataaacactatataaaataattgtgcctacacacataaccaatgtatatatgacacacacataatttcagtttatcacacataactgatatgagtttagggttatgagcatgtacgtatcttgttacacaaattctatttgcgatggttactggttggtagtatttttatttcacatatacagacaggttttgggacaaaaaatttatgatagacacatcacatgctcttcatc

SEQ ID NO: 170030 - DNA, 405 bp, Arabidopsis thaliana nossen
gtcaaattgttcaaagcatcaaataagtaaataaaaactcttttatggtcacctttttcactatcctctctttgtgtttcaaatcgtgggaacaaattatcacaatggaggcttctaaagaagctcatcaccttccaaactacatgaaagacgacaacgttaatcaagaaaccaagaacttgatcacttctctaccttcagacaaagatttcatgggttatggtctctacaactacaaaggttgttggtactatccaaacacactccaagccgttcttgacgtccaaaaacacttcaagccacgagatactgatataatcctcgcttctttgcccaaaggtggaaccacttggctcaaatccctaattttcgctgttgtacatagagaaaagtaccgcggaaccc

SEQ ID NO: 170031 - DNA, 369 bp, Arabidopsis thaliana nossen
  unsure (1)..(369): unsure at all n locations
aaacctctcttatccagcatattcaacaaccacacccctacncncggtaagctcccaaatatgctagatgtttttatccancccnncccnatntttattctcaccttctcctcttttttccccaaactgagcttttgccctcttctctcaattttaatccaccaaacaaatcgcacattcttccacaacttctagattgcacgccctacacctgattaagtcgggagaaagaaaactagggtcttgatgggaactgatacaattatgtctggacgagtaaggcatgatctatatcaaactccgactaatccggaaattctgatcatggtatcagcaacactgctgactcgaccaatgaattccctaatc

SEQ ID NO: 170032 - DNA, 400 bp, Arabidopsis thaliana nossen
gtcaaattgttcaaagcatcaaataagtaaataaaaactcttttatgggcacctttttcactatgctgtctttgtgtttcaaatcgtgggaacaaattatcacaatggaggcttctaaagaagctcatcaccttccaaactacatgaaagacgacaacgttaatcaagaaaccaagaacttgatcacttctctaccttcagacaaagatttcatgggttatggtctctacaactacaaaggttgttggtactatccaaacacactccaagccgttcttgacgtccaaaaacacttcaagccacgagatactgatataatcctcgcttctttgcccaaaggtggaaccacttggctcatatccctaattttcgctgctgtacatagagaaaagtaccgcgg

SEQ ID NO: 170033 - DNA, 408 bp, Arabidopsis thaliana nossen
cagagtctttgtgccggattaaagaacttgaatcacaaatggagacatgggaagaagagatggtgaaggaagctcaggtattcgaggcagacattgatgctgtcacacgtggtaaagtggagcaagagcaaagagctatccaagccgaagaaactctaaggaaaacgaggtggaaaaacgctagtttagcaggaaaactccaggatgaattcaaaagactctctgagcagatggattcaatgtttacatcaaatgagaaaatggctatgaaagcgatgacagaagctaacgaattacgaatgcagaaacgtcaactagaagaaatgatcaaagacgctaatgatgagctccgagcaaaccaagccgagtacgaggcaaagctccacgagctttctgaaaagctgagtt

SEQ ID NO: 170034 - DNA, 350 bp, Arabidopsis thaliana nossen
gttacatagtaagagctctctgctactagtagaagaagaagaagaagagtgattataaagacttgggatggctgcggcgcattttagtaaggagagggtcttcagagggtttctggtttggttctgcttttggggactgatgtctctaacatgcgctgggagactcagtgtttcaaggcagaattttgaagtgcacaaacccttgaatcgattgaataaaccacccgttaaaagcattcaaagtccaaatggtgacataataaactgtgttcacatatcgaaccacccagcttttgaccaccctttcctaaaaaaccccagaatcaaattggaccctatttcacttcaaa

SEQ ID NO: 170035 - DNA, 395 bp, Arabidopsis thaliana nossen
tccctttctctctctatcgccacaatgatcattaccaaccaaactgattgaaactcatttgttcggtgtctctcaaatccactctctctctttcttttctcttctcctctctgtgtctctatcgccatggctgatgataaggagatgcctgctgctgtagttgatggacatgatcaagtcactggtcatattatttccaccacaatcggtggcaaaaatggtgaaccaaaacagacaattagttacatggcggagcgagttgttggtacaggctcgttcgggattgttttccaagcaaaatgtttggagactggagaaacccgggcgataaagaaggttttgcaagatagaagatacaagaaccgagaacttcagttgatgcgtgtgatggatca

SEQ ID NO: 170036 - DNA, 381 bp, Arabidopsis thaliana nossen
cccaatcgatgtcccaagggaattgatatgggaattacctcgaagaacggtgtattttggtacttctgttcgtacgatattcaaaggtttatcaactgagaagatacaggcttgcttttggaaagggtacgtatgtgtacgtggatttgatcgaaagacgaggggaccgaagcctttgattgcaagattgcacttcccggcgagcaaactgaagggacaacaagctaacctcgcctaatccgttggcaagcaaacaaatacaagcttatggttaagagtgagagagcacactgttccaatctagttaatgtaagaaagtgaaaacgtaaagttaacagtcctagagttgtacaaggtttctaaatcccattttagtttcgt

SEQ ID NO: 170037 - DNA, 293 bp, Arabidopsis thaliana nossen
gaagaacattggaagagattttgtatgcattggtggttcaaaagttcatggaagctaacgtatcacttgtaccttcagtaagcccatcttcagatccgtctggtcgggttgatacttggccgaccaaagtggagaaactcgagcggcttcactcgcccgagatgtacgagatgattcacaaccatcttgccttgattcttggaagcagaatgggtgatctgaactctgttgcacagataagcaagctcagagttggccaagtttacgctgcttctgtgatgtatagatatttc

SEQ ID NO: 170038 - DNA, 376 bp, Arabidopsis thaliana nossen
aaagtccgttaaattcgatttcagcaagagcgtccctcaactaaacacgtggtgcggccacatcttctgcagcaccacaggcagaccatcgtctcccgatctgcctccaccacattttccgccagagtttccaccggagacacctaccaccccaccgccgtctccaccaaggccgtctgctgcttcaaggcttgaaaatggtgagagtgttttccttgcgtttgccattgcgactgcaattgccgcaatggtgcgttgggttactagcatggtacttgaagagcatgtagttgggttgtatgaagctttttctttccgtcgaatgtttctatttgctttcgttttgcttcagcctttttctttgtgagaaaacata

SEQ ID NO: 170039 - DNA, 407 bp, Arabidopsis thaliana nossen
gagaaagggagggaggagagtgtagcagatcggcgaaaatgacagcgcagattcaagaagagcgtggaggaagagaggtcacgtcagcgccggacatggacgtatcggtaagcaccgtaagcatcccggaggtcgtggtaacgctggaggtatgcatcaccacaggatcctcttcgacaagtaccatccaggttacttcggtaaagttggtatgaggtatttccacaagctgaggaacaagttcttctgcccaatcgttaacctcgacaagctttggtcactcgtccctgaagatgtgaaggcgaaatcaaccaaggacaatgttccgttgatcgatgtgactcaacatggtttcttcaaggttttgggtaaaggtcatttgcctgagaacaagccgttcgttgtga

SEQ ID NO: 170040 - DNA, 388 bp, Arabidopsis thaliana nossen
gccaccggacacaccaccagaaccatggccatgttgaaaacgacgagtgatgggttccgtttcgagagagggtgtacaagaaattgccccacagtactcggatgctcagatacactgtccctctccccatgctcgcatatcctctctatttgtgctacagaagtcctggaaaagaaggatcacattttaacccatacagtagtttatttgctccaagcgagagaaagcttattgcaacttcaactacttgttggtccataatgttcgtcagtcttatcgctctatctttcgtcttcggtccactcgcggttcttaaagtctacggtgtaccgtacattatctttgtgatgtggttggatgctgtcacgtatttgcatcatcatggtca

SEQ ID NO: 170041 - DNA, 403 bp, Arabidopsis thaliana nossen
  unsure (1)..(403): unsure at all n locations
cggaaaaatcgagatccggtgatataacccaaggtcttccaaaagtagaacaagttttagaagtccgctcgattgattcaatatcgttgaacttagaaaagcggattaagggttggaacaagtgtataacaagaattcttggaattccttggggattcttgattggtgctgagttaactatagtgcaaagtcgtatttctttggttaataagattcaaaaggtttatcgatcccagggggtgcagattcataataggcatatcgaaattattgtacgtcaaataacatcaaaagttttggtttccgaagagggaatgtctaatgtttttttacctggagaactttggattattacgagcagaacgaacggngcgtgctttagaagaagcaatctgttatcgag

SEQ ID NO: 170042 - DNA, 403 bp, Arabidopsis thaliana nossen
attaaaagcaacttacttaattacatatcgttcgtgtttttttcttcaaaagatggcgtcaaagcaactgagcagagaagagcttgatgagaaggcgaagcaaggagagaccgtcgtcccaagtggcaccggtggccacagcctcgaagctcaagagcatcttgctgaaagaaggagcaagggagggcagacgaggaaggagcagctaggacatgaaggttatcaggagatcggtcacaaaggtggagaggcgaggaaggagcagttagggcacgagggttatcaggagatgggtcacaaaggtggagaggcgaggaaggagcagctagggcacgagggttatcaggagatgggacacaaaggaggagaggcgaggaaggagcagctagggcacgagggttat

SEQ ID NO: 170043 - DNA, 359 bp, Arabidopsis thaliana nossen
cccacccattctccgactctttttccaccccaactccacacacccgtggttgtaactgtagttgggcagcttcccacccttccacaccttcacacccttccactccttcccacccaacaccatcacaccctacttctgatggatattactcatctcctccaccaataactccagttattattactccaccatcacccattgttgatccaagcacacccatctatttaaaaatcccaccaactcctatcattgacccatacactcctgaaactcctttcattcctgctcctttcccaccaatcactgtaacatgccattactggagaaaccaccctacattgacatggggctcgcttaaa

SEQ ID NO: 170044 - DNA, 403 bp, Arabidopsis thaliana nossen
gtctcagtggtgaaaagcataacaaagctgctacgtcgcgcaaaaacacgacccaaaaccctacagaacctccggttattctctccggcggcgaacgcagctctatccctagatcatatccaagaaacccaattaacttacctccctggattccctcgacccgatccaaaacacgcagagacgatcttagccgttccaaggtctgtctccggcaagagcatatcagcgaaagagcgtaaagcgggtcgggttccttcgatcatattcgaacaagaggatggacaacacggaggaaacaagaggcttatttcagttcagacgaatcagatcaggaagcttgcgaatcatttgggttactcttttttcctctctaggctctttgatgttgaggttcgagctgaga

SEQ ID NO: 170045 - DNA, 406 bp, Arabidopsis thaliana nossen
  unsure (1)..(406): unsure at all n locations
cacattttcgtagccgcaagactcctttcagattcttacttgcagctatgggtaaagagaagtttgagatgacattgnggncattggtcatgttgattctggaaaatcgaccacaactggtcacttgatctataagcttggtggtattgacaagcgtgtcatcgagaggttcgagaaggaggctgcttgagatgaacaagaggtccttcaagtacgcatgggtgttggacaaacttaaagccgagcgtgagcgtggtattaccatcgatattgctctatggaagttcgagaccaccaagtactactgcacagtcattgatgccccatgacatcgtgatttcatcaagaacatgattactggtacctcccaggctgattgtgctgttcttatcattgactccaccac

SEQ ID NO: 170046 - DNA, 408 bp, Arabidopsis thaliana nossen
gaaccaacaagacagcagaggaaacatcgttcgtgttaagggacctttccaggtcgtgaggccacctgtaagacagccctacgagagcgaggagtggagacacccacgtagcccacagggcaacggccttgaggagactatctgcagcatgaggtcccacgagaacattgacgaccctgctcgtgctgacgtgtacaagcccagcctaggtcgcgtgaccagcgtcaacagctataccttgcccatcttggagtatgtcaggctcagtgccactcgtggcgttctccagggtaatgcgatggtgcttcctaaatacaacatgaacgctaacgagatcttgtactgcactggaggacaaggaaggatccaagtggtcaacgacaacggacagaacgtgttggaccaaca

SEQ ID NO: 170047 - DNA, 417 bp, Arabidopsis thaliana nossen
  unsure (1)..(417): unsure at all n locations
aattccggagagcgacccactcatccgatcccatcaatcattcattattaatttcgtaaatggtttcttacccagggaggactccactacatttagtaagcccaccccccnnnccatcccccttaaacaaaaacttaacctacttaaatcaatactgcccattcatctccccattataaacaatacttacaacataaaacacacttctgttccactagtcctctacaactctcattcaagaacttcccttacaaacctctaaaaataaaactctacaatttaatatacaactcaatcacaaacataaaatttattcatataaatctctctatagccccccaattcaatctccaaaaaaaacatacattgttcaaacccaatccaaaaaactcctcatcttctcttaacacatctccc

SEQ ID NO: 170048 - DNA, 448 bp, Arabidopsis thaliana nossen
agtaccggtccgtaactgggtgggccgacgcatccgcacagtcaatgtgttgtttctctacagcaacttttacatgacgctcaactggctcgagcgatttcagtccagtgtgaaacaaacgcatctataaagaatcataagaaagaaccgtcagaaacacaacagacgatcaccaaagttcatgagaaatgaaacaaacagacgaaatttgaacataagctttacctgagcagtgtggtgacggactgcttgtattaggagactacgagcttgtccttctttaagcgatttcaatcgaaaaatgcacattgtggcttcatcatgaaactcactgtaagcaggtcgagactcatgaggaatatgtctctctcctttactgcttttaggccttcctttctctttcactagcgacatctcatacacattcctgagagtttacaggtaaaga

SEQ ID NO: 170049 - DNA, 388 bp, Arabidopsis thaliana nossen
ctccctctctctctgctcgaatcgaaccgttcccaggagctgctttgatttggtttatcgttgatctgtgaaaatggggacgaatgatctcgacatcgaagaagggactctggagatcggcatggagtatagaactgtttctggtgttgctggaccattggtcattcttgacaaagtgaagggtccaaagtaccaggagattgttaatattcgcttaggagatggatcaacgagacgtggtcaggttttggaagttgatggcgagaaagcagttgtgcaggtttttgaaggaacatctggaattgacaacaagtttacaaccgtgcaattcacaggagaggttttgaaaacacctgtatcattggacatgcttgggcgcatatttaac

SEQ ID NO: 170050 - DNA, 403 bp, Arabidopsis thaliana nossen
catttgcactcagtctagagacaaagagagagagagatggggtcaaagacggagatgatggagagagacgcaatggctacggtggctccctatgcgccggtcacttaccatcgccgtgctcgtgttgacttggatgatagacttcctaaaccttatatgccaagagcattgcaagcaccagacagagaacacccgtacggaactccaggccataagaattacggacttagtgttcttcaacagcatgtctccttcttcgatatcgatgataatggcatcatttacccttgggagacctactctggactgcgaatgcttggtttcaatatcattgggtcgcttataatagccgctgttatcaacctgacccttagctatgccactcttccggtgtggttacctt

SEQ ID NO: 170051 - DNA, 373 bp, Arabidopsis thaliana nossen
gaaggacgccattggaactcttcccttttaggatacgtcttactcgatttcatgtctaccactccagtgtctttaatttgctgtaaacaaaagttttacgtatgaatagaaccccaaaaatgaactgataactgcaaagaagattctgtagacatacctctgttcccccagaagtaaactgaagacctccagcaaggaaatcgagaggctgttcggtagcccgtctgacctccttgtaagctttccctttctcaattgcctcggctgcagcctcaaagtccagcctctcttgtgcccgagctgattccgacatgctattaactctgttggagtctgttgtacgtaacccttctttggatttctccttgagaaa

SEQ ID NO: 170052 - DNA, 468 bp, Arabidopsis thaliana nossen
  unsure (1)..(468): unsure at all n locations
tccggaaggtccgcgggtcgatcccatcgccgtccgggacaactcctattctctcatcatatcctacctatgccactagatcctcttcactggatcgctccagtatcgttggtgtggacgcgtgcgcagccccgcagccccacaatcaacccgttctctccatccgggagcccataatcccattgagcccattcatcaggataacccnntccctcacataggagtccctataagcctcatcagaatcccttgtccgccataggttatctatcttacaggccgctatacctccaccatccgactaagggttcgtagaccgtcgtggtcgccgcttctaaatccgtggccgagcagttcttgaaaatccacgacgccaatttcgctagccgaccaccaaactcaagagccaaacacatggcatataactatcaggatcttgtctttgcaccttacgggcaccgatggaga

SEQ ID NO: 170053 - DNA, 376 bp, Arabidopsis thaliana nossen
atttctcacattttcgtagccgcacgactcctttcagattcttacttgcagctatgggtaaagagaaggttcacattaacattgcggacattggtcatgttgattctggaaaatcgaccacaactggtcacttgatctataagcttgagggtattgacaagcgtgtcatcgagaggctcgagaaggaagctgctgagatgaacaagaggtccttcaagtacgcatgggtgttggacaaactttaagccgagcgtgagcgtggtattaccatcgatattgctctatcgaaggtcgagaccaccacgtactactgcacagtcattgatgccccatgacatcgcgacttcattaagaacatgattaccgggacctccca

SEQ ID NO: 170054 - DNA, 375 bp, Arabidopsis thaliana nossen
ggaaaatttcacaaattttcttttgtttttaattttttgtagtgcaaatgtaaaagcatataatttggcacgaaaaatttataccgaacagcatcatgtcacatatgtaaacaatatcatttgggagtgtctcgtttgaactctaattaatttcggttgacaacaacaaaatggtaagacataagtttactgtattatcttaaaacattggcaatttcatctttttgctctagtgtatcattagtagtatcttgcatatcctttatatattgaaattttaaatatcactataagccaattctgtagatatacgtatttcttttaaattatataatatttgatatgaaattttgaatattataatttaattgattg

SEQ ID NO: 170055 - DNA, 375 bp, Arabidopsis thaliana nossen
ggtcaagtcaatatgttaggagtttatatgcagagatcttggattatctgggtcgtttcttgtttgttggtcgttcctatttacatctttgccacgccggttctgagactactcggtcaagcagaggagatcgctgttccagctggacagttcactcttctaaccataccacagctcttctcactggcctttaatttcccaacctctaagttccttcaagcacagagcaaagtggttgctattgcttggattggatttgaggctctttcccttcacgttattatgctctggttgtttataatcgagtttggttgggggacaaatggtgctgctttggcgtttaatattacaaactggggaactgcaattgctcaa

SEQ ID NO: 170056 - DNA, 372 bp, Arabidopsis thaliana nossen
aacaaaacaaaaacagagcacacaaaaagagaaaccaagttttcttaaaaatggagctagaatcttctcctcctctacctcctcatgtgatgctcgtatcttttccagggcaaggccacgttaatccacttcttcgtcttggtaagctcttagcttcaaagggtttgctcataaccttcgtcaccactgagtcatggggcaaaaagatgcgaatctccaacaaaatccaagaccgtgtcctcaaaccggttggtaaaggctatctccggtatgatttcttcgacgacgggcttcctgaagacgacgaagctagcagaaccaacttaaccatcctccgaccacatctagagctggtcggcaaaagagagatca

SEQ ID NO: 170057 - DNA, 371 bp, Arabidopsis thaliana nossen
cagttatcttctatcctctgtttctccgcttctgtagcactgtcgatgaggtaccctataccggggtggttcttcctccactcactaaccaaatccaaaatcaacaatcatagaaaaagccctaactttctccggaaatggctttaatcttctacttcttcttcctattgactcttccttctccttcttcttctgcttactactcaaactccttgacctacatggtccacggcgaccacaaagctaaaccctcaatcttccccactcagtttcactggatcacttactttcttgactcactcaacctattctacttccttcattatacacacataccacaccgttttccatggcttcttcactagactcac

SEQ ID NO: 170058 - DNA, 370 bp, Arabidopsis thaliana nossen
gagaagaagcaacaatgagagaagagaaatccaagactaataagctggcatggtccaagaagatggtgaggaaatggttcaatatcaaaagcaaaacagaggagtttcaagcagatgatccttcttctgctggaattgaagtagagcatagaagtagcttttcagctgagaaagcaccttccacaatcaagaataccaaaactgagaaactcagtaagaactgggagcagcaagctcggcaaaggagaatgaattatgagaatcctaggatcattgatgtccaaaactacagcatctttgtggctacatggaacgtagctggacgctctcctccttcaaacttaaaccttgatgagtggcttcattcatc

SEQ ID NO: 170059 - DNA, 344 bp, Arabidopsis thaliana nossen
ctctaattcaaaatctcattctttctagtcaacaagaacaaaaaaatgggggatacaggtagagtgtcggatcacaatatcatcagcagagaccaatacccaatgataggccgagaccaaaaccagtaccagatgtacaaacgaggatctaactactccaagtctaggcagattgctaaagctacaactactatcacagctggtggttacctacttattctctacatccttaccctcattggaactatcatagctttcactattacaacacctgtgctcgttatcttcagcccaatccttgtcccatctctcatcacatttgcactcctcatcaccagttttct

SEQ ID NO: 170060 - DNA, 368 bp, Arabidopsis thaliana nossen
gagagagattcacaaaattcacttcagaaatcaaagattctgctgtttaaccaaatccaaggtccggagagcgtcgcctttgattctctcggacagtggtccgtacacaggcgttgctgatggtagaggttttgttttgggatggagagaaatggattgatttcgcttatacttcgagtaatcgatcggagatttgtgatccgaagccttgtgctttgagttacttgaggaatgaacatatatgtggtcgcaccttatgtcttcgtttcgataagaaaaccggagatctatatataactgatgcttatatgggacttctgaaagtcggtcctgaaagaggtttaacaacgccagttgtaactgaagct

SEQ ID NO: 170061 - DNA, 375 bp, Arabidopsis thaliana nossen
ggcaatacgagcagcagatgttaaggaagttgctgaaacaatcaagagtcgcgggatgaaccatagtactgggagaacgtatacagggcttccttgatcgactggtaaatgaccatggaagtatcgatcttgaatggttgagagatgttccaccagataaagcaaaagaatatcttctgagctttaacggattgggactgaaaagtgtggagtgtgtgcggcttctaacactgcaccatcttgcctttccagttgatacaaatgttgggcgcatagccgtcagacttggatgggtgccccttcagccgctcccagagtcacttcagttgcatcttctggaaatgtatcctatgcttgaatctattcaaaagtatc

SEQ ID NO: 170062 - DNA, 279 bp, Arabidopsis thaliana nossen
  unsure (1)..(279): unsure at all n locations
acccactcatccgggcattaccagcagcttatgtttattttgctgcagaaccaatcaanagaggctgtttcaaccatagactagtgagttcnnanacacggctcccttgatctactggtaaatgaccatcgaagcactctatcttgaatggttgagagatcttccaccattttaagcaccaaaatatcttctaagcttcaacagattgacactgaaaagtgtgtactgtatgcaaattctaacactacaccatcttacctttccagatcatacaaatat

SEQ ID NO: 170063 - DNA, 379 bp, Arabidopsis thaliana nossen
acgtgaaccacctcaccaccagacacacaaaaagacgagaccgatcggcgatcagtagacttaaccaaggtcgcggtgaaacagtcggaatccaccgctataaggaacgatgatgatctcccaattcttcgtcttatctcagcgaggagataacatcgtcttccgtgactaccgggctgaggtacccaaaggaagtacagagacattcttccgtaaagtcaagttctggaaggaggatggcaatgcagaggcgccacctatctttaatgtcgatggcgtgaactacttccatgtcaaggttgttggtctatattttgttgcgacaacgagagttaacgtgtcaccctctcttgttttggagcttctacaaaggattgct

SEQ ID NO: 170064 - DNA, 277 bp, Arabidopsis thaliana nossen
cgctttctctctctctctctcgtgtgtgtgtgtgtgatcgagtggtgatacgacagagaggggcgtcgttttgttgatttcttctgggtgaagatgtcaggtctcgaagatatcaagaacgagaccggtgatctggaaaaaattccgattgatgaagtcctccagcagcttaaatgtacaagggaaggattgacaacgcaggaaggggaagacaagattgtgatatttggccccaacaagctcgaagagaagaaggaaagcaaaattctgaagtttc

SEQ ID NO: 170065 - DNA, 367 bp, Arabidopsis thaliana nossen
ggaagctctctgttcaaatcaaaaagagagatcgtacgcaaaagtttccgatatggctcgcgtcgtttggagcaaacaccactgttgtgcttgcgatcatcttcttcggatgtttatttgcgttttccactgcaaaagaagaggctaccaagttaggatcagttattgggatagatcttggtaccacttactcttgtgttggtgtttacaagaatggtcatgttgaaattattgccaatgaccaaagaaaccgtattacaccttcatgggttggttttactgactctgaaaggctcattggtgaggctgctaaaaatcaaacacctgttaatccatagaggactgtctttgacgttaagagattgat

SEQ ID NO: 170066 - DNA, 370 bp, Arabidopsis thaliana nossen
attctctccaataacagatctctctgaatcactctgtcatgtcggttgtacttcctctctgtctgattgtctccatgttcacctattcaaacgcagcgtattgtctttgcaaagaggggaacgagcaagtgcttcagaaagcaatagactacgcttgtggaaatggagctgactgtactcagatccagcccaccggagcttgttaccaacctaacaccgtcaaaaaccactgtgacgtcgccgtcaacagttactaccagaaaaaagcttcttccggtgccacctgtgactttaacggcgccgcctccccctctaccacccctgcgtcaactgcttcaagctgcttaactggttcaagctctagaggcac

SEQ ID NO: 170067 - DNA, 97 bp, Arabidopsis thaliana nossen
actgaatcgaagctactgaattggaaccgaagcaaaaagaatcgaacaaaatcaaaaatttaaaagtaattggatgtatactatattattatataac

SEQ ID NO: 170068 - DNA, 376 bp, Arabidopsis thaliana nossen
gacaaatagcttgctctttgcatcttcttagccatcccaagattctcctcttcgtcttccttataaactatctctctgtagagaagaaagcttggatccagattgagagagattcagagagtcacatcaccacactccatcttcagatctcatgatttgaactattccgacgtttcggtgttggaagcaactaagtgacaaatggaatccgaaggagaaaccgcgggaaagccgatgaagaacattgttccgcagacttgccagatctgtagtgacaatgttggcaagactgttgatggagatcgttttgtggcttgtgatatttgttcattcccagtttgtcggccttgctacgagtatgagaggaaagatggga

SEQ ID NO: 170069 - DNA, 375 bp, Arabidopsis thaliana nossen
agatctttatcaggtccttttgacgtgagcattggacaaacaatttggatgtagaattttcaaccggctccactttcaaccccgatatggacttgagaagatcatacatattagagcttgatacctgcattcatattcagaagcaaaagataggaaacaaatcagcactaaaaagacataaaaaccattgctgcacaatcttcacttacctctacaatggttgggatggattccatcttttgtataggttcaagggccaatacagaaagaaatgcgtctgtatcaacttcatacctgaaacaatgtttaacttaattgatttctcttttacaaactactgacaggtttcagaaaatatttatactttgttttcat

SEQ ID NO: 170070 - DNA, 373 bp, Arabidopsis thaliana nossen
tatcgctcaaatctcaatctttctctcctgcgcgcgaatttctctcggagagaaatcatccatgggtggggccgcaaccgagatgctccctcagctcaaatccgccgtcgatggacttactgagatgagcgagaatgagaagagtggattcatcaacctagtttcacgttacctcagtggtgaagcccagcacattgaatggagcaagatccagacacctactgatgaaatcgttgttccttatgataaaatggctaacgtctctgaagatgcttccgagaccaaatatctgttggacaagcttgttgtgctgaagcttaatggaggtttgggaaccacaatgggatgcactggtccaaaatcggttattgaa

SEQ ID NO: 170071 - DNA, 209 bp, Arabidopsis thaliana nossen
aaacaacaagaaaaaatggcaataaccaacaaattaatcataacacttgggcgtgcttatctccttggtggtcggccactgcttatccttccgtgtggagatcgacgagttcgagccaccacagcaaggagaacaagaaagtccccttgctctatctgcgtgtggctctatgcgagggatgggaggaagagtcgacgtatcatgcatac

SEQ ID NO: 170072 - DNA, 373 bp, Arabidopsis thaliana nossen
gttggtctctcttacttctttcttattcatctaaaacaatttcgatccatttacacataaatatgtgtggctggccgtagaagaaacacattgaaggaagagatggctcataggagattaatcatgacgatgacaaagatgatgatgatggtgaccatgatgatgatgatggataaaacatgcatatgtgcggacatttccagaggcagttttccaaagggctttgtctttggaactgcttcttcggcttttcagcatgaaggagcggtgaaggcagaaggcagaggtcctacgatatgggacacattttcccacacttttggtaaaatcaccgattttagcaatgctgatgtcgctgttgatcagtatcatc

SEQ ID NO: 170073 - DNA, 380 bp, Arabidopsis thaliana nossen
gcaaaatcacaagaaaagtataaaaaaagaagctagttggactatctcgaatatgactgctgggaatagggttgggatagaggctgtggttggcgctggaataatcctccctcttgtgcacttgctccaaaacgcggagttcgatataaagaaggaagctgcttgggctatttccaatgccacatcaggagggtcacatgagcagattcaatatttggtgacccaaggctgcatcaaaccactttgtgatcttctaatctgccctgatccaaggatcgtgacagtgtgcctcgagggtcttgaaaacattctcaaggttggtgaggctgacaaggaaatgggattaaacagtggggtgaatctctatgctcaaataatag

SEQ ID NO: 170074 - DNA, 370 bp, Arabidopsis thaliana nossen
ctttgctctctctctctcaacgcggttcagatccgagtttgggagattcaagctccctgaaaaaagcgctttactctcgcttaccaactttgctccagcatggcaggatctgcaccagaaggcacacagtttgatgcacgtcagtttgaccagaaactcaatgaagtacttgagggacaagatgagttcttcacatcctatgatgatgttcatgagagctttgatgccatgggtcttcaagagaaccttctcaggggtatttatgcttatggttttgagaagccttctgctattcagcaaagaggaatcgtccccttctgtaaaggtcttgatgtgattcaacaggctcagtctggtactgggaaaacag

SEQ ID NO: 170075 - DNA, 365 bp, Arabidopsis thaliana nossen
gttatttttgtttcgtcgtctctctctcgcgctctgaaaaatgagcagaatccgtcatgtgttggggcgtaaattcaactggctccgccgcagcaacaccggaggttgacaagatcttcttctactaccagtgcaatcaaacagtcacaatctcaatttcctcatccgctgatcctttttgtccaattcgtaaccaagggtttgttgcagaatacgaataccctaaccctaatcaatccctaaatttcaaccctaactcttctgattcctttttacacatagcctatcctttctacaccttgctcccgctcatattcaggtcttccgctgacgatccttccagcatggacttcatgagcttattc

SEQ ID NO: 170076 - DNA, 378 bp, Arabidopsis thaliana nossen
ctctctgataaaatcttaaacccacctcgagatcatagtcttcatcaatgagccataaaaaagcagagggctttcttcaatcaaaccatcttcgtcttccttctccaccgctatctccggcagcgtaaggcggtcaattcctacgacgctcaatttttctcctttacccatcatcaaaaactgccataaccaaagctttcactctaatgttgtctcccatcaaaagcctctacacatttcatctgcttcgaatttcaaacgtgaggtcaaagtcgaagcttacgaggcagatcgatcccgtccactggacatcaacatcgagcttcccgatgaacaatccgcgcagaaactgaaaatcggaatctacttcgcaacttg

SEQ ID NO: 170077 - DNA, 371 bp, Arabidopsis thaliana nossen
gcgaaaccgaagcaaccggcgttaccgatgattcggctccagcgattgagactgaaactgtttgtgatgcgatggagcatacagcgatcggagtggttgaatcggtggaaggagccatagaaggagcagagaaatgggtgggtgatttgcaacggacggtgaaggaatcgaaggataccgcaatgcgttctgctcgttccctccgtgaaaattctacctctcagttccgctctatacaggatttcattccacatgctttgactcagtataagacctatgagaatgctttcttcagtaaagttacagacgaattgatatacgcaaaagagcatccggctgctgctattgggattggtgtcgctgctagtctc

SEQ ID NO: 170078 - DNA, 378 bp, Arabidopsis thaliana nossen
ggaagaaaaatgggtcgagtctcatctattatctctttctctttgacactctagatcctcttcaatggcgacactgcccaacagtggcccaacgagtgccagctcaatcaactcaatgcgctcgaaccatcccaaatcatcaagagcgagggtggtcgcatcgaggtctgggaccaccatgcaccccatctccgttgctccggctttgcctttgagcgtttcgtcattgaacctcaaggtcttttcttgcccactttcttgaacgccggcaaactcacgtttgttgttcacggaaagggtctaatgggaagagctattccgggatgcgccgagacgttcatggagtcaccggtatttggagaaagtcaaggtcagggt

SEQ ID NO: 170079 - DNA, 363 bp, Arabidopsis thaliana nossen
ggaagaaaaatgggtcgagtctcatctatcatctctttctctttgacacggttgatcctaatttatggggacgctgcccaacagtggcccaacgagtgccaactcgatcaactcaatgcgctcgaaccatcccaaatcatcaagagcgagggaggtcgcatcgagagtctgggaccaccatgcaccccagctccgttgctccagctttgcctttgagcgtttcgtcattgagcctcagggacttttcttgaccactttcctgaacgccaacaaactcacatttgttgttcacggaaggggtctaatgggaaaagttattccgagatgcgccgagacgttcatagaatcaccggtattccgaga

SEQ ID NO: 170080 - DNA, 373 bp, Arabidopsis thaliana nossen
aaaagcctgtgctcaaggcagtagaagtgggaaaccaaacatctaattgtcacagctgatgatttggtagatgtaatctcagctcttctacaaccaccatttggtcaatgcactggcaaaactcgaaagctcaacgcatatttccctctctcaagacatcgatcatgttgtagattcgctgatctgctttcaatcgaatctgcatttcacaaaagtgttgaatcaacaattagcattatagagaagagcggtgagactcagagaaagctgagattcaatttcgcagaatcatgatgagcaataagagcaagctttagaacctttttggcgaggaagagcacggcatcaacagtaccctcagcataaatagatc

SEQ ID NO: 170081 - DNA, 336 bp, Arabidopsis thaliana nossen
ctactttcttgtacaaatagaattgtggctgaaacataaacaaatgtcaaattaccttcatttgtgtattcttgtttcactgtttgcaaaattatgaaaggaccatccctatttctctacagaaaaaataacttaatagtccattacgacatgaatctcgggtctttgagatcataccgggaaatgtttttcaacatcatcattcacaagatagagcttaaggtgcatccaaagaaatcgcaacaatcttccaatctaactctccttcatcaatcatagccaaaagcagctaaaggcttaacctttagaacgtcaccaatctcaacaacatcaact

SEQ ID NO: 170082 - DNA, 364 bp, Arabidopsis thaliana nossen
ttcaccgtcacaaggtgatgcgtttaggagcagtctttgcttcagggggtctccgcgcaatgtggtatggcgagaagaaatggagtcagctctgtgaagacatccgcaccggtggtctcaaccccatgatcaccgatccaggttgccaaatggcaatgtcttgtcttttaatgtcgccgaatccagagttagctagcgagatcgaagagatctgtgggcggtcggcgtggaaagggattctgtgtcagctctggcctaaggcaaagttcatcgaagcagtagtgacgggctcaatggctcaatacatacctgcacttgagtgctttagccaggggaagattccattggtttgtccaatgtatgc

SEQ ID NO: 170083 - DNA, 369 bp, Arabidopsis thaliana nossen
accgacgagaagaatatgactacggaggaggagtccctttctgcggcggaggagtccctttctgcggcggaagaaggttacaatgtacagagagactattggcgtcaagcggaggaatccgatggtttcgatatagagaacattaaactaccaccaggtatgcatggacgggtcatgggactgattacctataactgtcaactttgttaccgttatccgtttcctgtcttggtcaaactttatgctaagtttgggcttcatcgttacaatttgatcaagggaacaagcttcgagctcgctgccttaatgaagttcaacatgttacaaaactatatgtcctctttctacatgactctgcttgcacatgat

SEQ ID NO: 170084 - DNA, 380 bp, Arabidopsis thaliana nossen
taaaaagtaattagtgagagaattaagaaaaacaaagtctattccatacgaagaagagcctcaggttaattttttaaaagatgggttattggaagtcgaaggttgttccaaggatgaagaaattgttcgagaagagtccagcaaaaaaggaagttgttgaggaggagaagccacgagaggtggaagtcgtggaggaggtcgtcgtgaaaaccgaagaaccggccaaggaaggagaaactaaaccggaggaaataattgcaaccggcgagaaagagatagaaatagttgaagagaagaaagaagaggctaaaccggtggaggttccggtcctcgcagctgcggaggagaagaagccagccgtagaagaggagaagaagacg

SEQ ID NO: 170085 - DNA, 377 bp, Arabidopsis thaliana nossen
cggacgcgtggggcgcgagataccttcgggacagcctaggcggatccatgctttccaacgaagcacgcgcatccaacctaggcgagacaagggttcacatttcgttcatcacccttggccggctttcgaacagccggactcccatcaaaagatggttgccaagaacatcttcgttacggtttgctaattctcggaataacatcaacaaaactaggggaaggtttaaaaaacccacggtagtatgaagtgctactcgaaatctttgctacccgtctcgttccagttcctagccgcaaggtgtcgatgcccatgggcgacactcacacctcgctcacactcgggacagcctatgcggatccatgctttccaacgaagca

SEQ ID NO: 170086 - DNA, 373 bp, Arabidopsis thaliana nossen
ggaatccgtcaaggagaaagttgggcttggtgcatctgcttcatctgcagattcagggaaaggtaagagcatgatgtcgaagcagatcacacatggttttcatttggtgaaagggaaagcttttcacgagatggaagattatgtggttgccaaattcaaggaagttgatgataatgagcttggtctgtttgctatcttcgatggccatcttagccacgagattccggactacttgtgctcccatttgtttgagaacatcttgaaagagccgaatttctggcaagaacctgagaaagcgataaagaaagcttactatataacggatacaacgattctagacaaggcagatgatttgggaaaaggaggttctact

SEQ ID NO: 170087 - DNA, 380 bp, Arabidopsis thaliana nossen
cggacgcgtgggttacaattttaaaaatcttatcttaagctctcctctgttctctctccaaaatctttgagagaggagagcttgataatcgttttgtctccggtttgatccggatttgtttatattctcgtctctatgcgagatcaataatttccgattacatatcggatcttctgttaccggctatgaccggtcttttctccgtttttaacggaacttgatctctatctccatcgttgctcacccatcgatctcaacgttttcttccaagatttttgttgtctccatttcttcgtggattaacatcttcgtcacctccgattgctcaagacgcaagagcaaaaatggactttagactacatcaagatagatgtagtcgg

SEQ ID NO: 170088 - DNA, 358 bp, Arabidopsis thaliana nossen
  unsure (1)..(358): unsure at all n locations
cggactcgtgggttactacattcccaatcaaaaagaaagctcacgccggctctctcaacaatttgtcagagctccctncccttcccccacaaactaaacaaaaaaccatccacaaaaaaaatagagagaatcatctaagagagatctattaataacatgatcacatcttctcctacaatcccagaaacctccgatcacggtcttagatatctactacaaccgatacaaatgtaaacaccgattcttccagcgatccaacaccgccacaacctaacctttcttcaatctatcggtttcaccctacccaccaaaagcttgctgctcactacctaaaacccaaagcaaacttttgctcttt

SEQ ID NO: 170089 - DNA, 404 bp, Arabidopsis thaliana nossen
aaaaaggcccgacccttcccacccgttccgcgtctcgcgttagatttctttttaacacccaacgcaagcccaggctgtgtaacgaagtttgtgttgattgttctctaacaagacaagggttcacatttcgttcatcaccctcggccggctttctaacagccggactcccatcaaaagatggttgccaagaacatcttcgttactgtttgctaattctcggaataacatcaacaaaactaggggaaggtttaaaaaacccacggtagtatgaagtgctactcgaaatctttgctacccgtctagttccagttcctagccgcaaggtgtcgattcccatgggcgacactcacacctcgctcacactcgggacagcctaggcggatccatgctttccaacaaaacac

SEQ ID NO: 170090 - DNA, 380 bp, Arabidopsis thaliana nossen
  unsure (1)..(380): unsure at all n locations
ctctgataaaaaacaatcaaattaaaatcacaaaagctcatacaagacgggtcctcacataagtagtaggaatctctctaatggcggnaacacttaacctttttcccacccttgaggcaaagaagcggagtagagatacccctatagtaaaagatctctcatggaacttttaccaaaaagcatgtccgaaagtcgaaaacatcatcagaaaacagctcaagaaagccttcaagagagacattcctttaaccacatccatccttcgtatacattgccatgattgccttgttcaagaatatgaagcatcagagctgctagctagatcaaccagttgaccaagacaacaatcatcaatcccaaatctgacactacatcaacaa

SEQ ID NO: 170091 - DNA, 384 bp, Arabidopsis thaliana nossen
cggacgcgtgggtttttttttttttaacaaaacaagaccttttccatatgtagaccaccgtttctttgtgacatagaagccaaataaagtacaacatacataacacttgcaaattacaataagagaggaaaaaaaacatggtaccatttgacaacatatagaaacacacataaacattacttataacaaaaagattcaaactcggcttttattatctccccctgatcaaattctaaacactttattcctcataaactaactccccgacattggagttattggactatgacgatgacatcagtggggtaacttaagtagtgtgctggccaccacgagtacggtcacggtcatgttccccaccagtatgttgctgtccgtagtact

SEQ ID NO: 170092 - DNA, 265 bp, Arabidopsis thaliana nossen
  unsure (1)..(265): unsure at all n locations
ccaaatcaannccatcatacataacacttacaaattacaataacatcaaaaaaaaaacatttccccatttttcaacatatataaacacacataaacattacttataacaaaaacattcaaactccacttttattatctccccctaatcaaattctaaacactttattcctcataaactaactcccctacattgaaattattaaactataaccatcacatcattacattaacttaattaattttctttccaccactattactttca

SEQ ID NO: 170093 - DNA, 371 bp, Arabidopsis thaliana nossen
tatctgtcaactctatcgcttgggctcctcatgaacttggactgggcttagcttgcggtggatgtgatggaaacatatcagttttctcggctcgagctgatggcggttgggacacgacaaagatagaccaagcacaccctgttggtgtcacttcagtgtcgtgggcaccggccacagaaccaggcgcactcgttagctctggtatgatcgatccggtctacaaactagcatccggcgggtgtgatagcacggtgaaagtgtggaagttctcgaacgggtcatggaaaatggattgtttcccggctctcaacaagcacacggattgggtccgtgatgtggcttgggcaccgaacttgggtcttccaaagtca

SEQ ID NO: 170094 - DNA, 356 bp, Arabidopsis thaliana nossen
  unsure (1)..(356): unsure at all n locations
tatctgtcaactctatcttttttgctcctcatgaacacgcacagggcagagcttgcagagtataggagggaaacatatcanntttctcggctcgagctgatggcggttagggacacgacaaagatagaccaagcacaccctgcttgtttcacttcaatgtcgaggacacacaccacagaaccaggcgcactcgttagctatactatgatcgaaccggtctacaaactaacatccaccaagtgtgatagcacgatcaaaacacacaagttctcgaacgggtcatgcaaaacagattgtttcccggctctcaacaaacacacggattgtgtccgcgatatggcttacgcaccgaactt

SEQ ID NO: 170095 - DNA, 266 bp, Arabidopsis thaliana nossen
ccgaccaggaagtcagagccactagacgacgtacggaaacgacggaaccaacaacatttatgtaccagacgagaaatccgatgggaggaggaggactcagaactggaggtcgtggaggaactacaggtggccaaggatcacggaacaggtgaggcaaaggtacggatcacgtatccaagggtacggaacgggtgggcatggatactgaaccatgaccgatacttaaggctttggaactggcagatgagctaagcaccaccgccaag

SEQ ID NO: 170096 - DNA, 187 bp, Arabidopsis thaliana nossen
  unsure (1)..(187): unsure at all n locations
ctatcgttcacaatttatcacagaaacttaaagaagaccatagctacaaacacaagctattgcaggatgtgttcactcactactcagcaatgcctnacctattcaaaagctcagatctagtcacaaaataattatgcttagctgcgacaaggtgacacttttgtatcccatatttgaggacacaagg

SEQ ID NO: 170097 - DNA, 377 bp, Arabidopsis thaliana nossen
cttttctctcagtgatcggattaaattctcggcgaagaagtgaagtttgcggcgatcagaggtgatatggataaagagaaggatcatgaagtggagtggcttgaagctcagaagatagaaataagcgttgacttattagctgcagcgaaacaacaccttttgttccttgaaactgttgataggaatcgatggctctacgatggtcctgcgcttgaaaaagccatctacaggtacaatgcttgttggcttcctttgcttgttaaatactctgagtcatcatcggttagtgaagggtctttggtccctcctcttgattgtgaatggatttggcattgtcacaggcttaatccggtgaggtataattctgactgtgagca

SEQ ID NO: 170098 - DNA, 377 bp, Arabidopsis thaliana nossen
cttagatttatactagaatcagtatcagaataattaaagatggatctttgaatctatgcatgttgtgtgtgacaccgattaatttttattcgaataattaagtctatagttttggtacttgtaatattttataataatatttatctacttgtgaaggtttgatgagcgagtaagagacttactagacttcagtatctacttggacattagcaacgaagtcaaattcgcttggaaaattcaagtgaatttctttgaataattcatctacatttacaccattttatggaacgttttcgatttatcttataaaactgaatctgtaacgtttttgatggtcacagagggacatggctgaaagaggtcacagtttggagagc

SEQ ID NO: 170099 - DNA, 378 bp, Arabidopsis thaliana nossen
cgttttctgcttcttcttcctcttttgtcatctattcttcttcttgccgtgtgcgtcacagcttactcgacaacaacgccgtatcaaggctacaagccggagaaattcacccacctccacttctacttccatgacgtcatctccggtgacaaacctaccgccgtcaaagttgccgaagcccgcccaacaaccaccctcaacgtcaagtttggcgtgattatgatcgctgatgatccgttgaccgaaggaccagacccgagctcaaaggaagtgggaagagctcaggggatgtacgcatcaacagccatgaaggacatagtcttcacaatggtctttaactatgttttcacggcaggagagtttaatggaagcaccatc

SEQ ID NO: 170100 - DNA, 382 bp, Arabidopsis thaliana nossen
ggaatccgtcaaggagaaagttgggcttggtgcatctgcttcatctgcagattcagggaaaggtaagagcaagatgtcgaagcagatcacacatggttttcatttggtgaaagggaaagcttttcacgagatggaagattatgtggttgccaaattcaaggaagttgatgataatgagcttggtctgtttgctatcttcgatggccatcttagccacgagattccggactacttgtgctcccatttgtttgagaacatcttgaaagagccgaatttctggcaagaacctgagaaagcgataaagaaagcttactatataacggatacaacgattctagacaaggcagatgatttgggaaaaggaggttctactgctgtgact

SEQ ID NO: 170101 - DNA, 371 bp, Arabidopsis thaliana nossen
  unsure (1)..(371): unsure at all n locations
ggaatccgtctaggagaaagttttgctaggagcatctgcttcatgtgcggatccagggtttggtgggagccagangcccaancagatcacacatggttttcatttggtgaaagggaaagcttttcacgagatggaagattatgtggttgccaaattcaaggaagttgatgataatgagcttggtctgtttgctatcttcgatggccatcttagccacgagattccggactacttgtgctcccatttgtttgagaacatcttgaaaaagccgaatttctggcaaaaacctgagaaagcgataaagaaagcttactatataacggatacaacgattctagacaaggctgacgatttgagaaaaggaggttcta

SEQ ID NO: 170102 - DNA, 380 bp, Arabidopsis thaliana nossen
attcgcagcataaggattcgctcgatcctcaagtaaaccaggtatctgtatagccactttaggtgctggagctacaaatctcgttagcggattagccgatgcgttgttagatagtgttcctcttgtagcaatcacaggacaagtccctcgtcgtatgattggtacagatgcgtttcaagagactccgattgttgaggtaacgcgttcgattacgaagcataactatcttgtgatggatgttgaagatatccctaggattattgaggaagctttctttttagctacttctggtagacctggacctgttttggttgatgttcctaaagatattcaacaacagcttgcgattcctaattgggaacaagctatgagattacctg

SEQ ID NO: 170103 - DNA, 381 bp, Arabidopsis thaliana nossen
ccgatccagttcctccaccacctcgaactccagttagattcaggcatgatacacttttgagttattgggagaacccaagtactctctttcggatcccggaaacagctctcagagatcttttttccttttgtaagatacaggagcgaaacaatcaacctattgatattgcaagacccaaaagattcttccgatgtatcatttctgggtccaatggaattcataggtataggaagaagccctttcaaatagagatttttgctttcgaccatatttcgattgttaatacgatatagaagggccgctactacaaatagtactacacccttgatcgtgaaatatcgattgcttgttgaaccctgtgaattgcgcaaaagtaggata

SEQ ID NO: 170104 - DNA, 380 bp, Arabidopsis thaliana nossen
cgcatgtgttcaatatgtggagggccagagagacattgagagtacagttgatgttttgagattgttggggaagcgtgagccacaagatgctattatggatgaagaccgattgagtaagaaaatggtagaggcaatgagaggaggaggatacgttggtgatgtttgaacaagatgatgataattatagtgaagatcaggtatataaacaaataccaaaacgaatatcaattgattagagatatacattttttaattttgggcgattatgttttcgtttgctacaactacacacgtttgcgctaattgttagaccagcctaactcaacttcgccacataaatgaattttaaaatatataaggcgaaatgtttttagtagaaa

SEQ ID NO: 170105 - DNA, 372 bp, Arabidopsis thaliana nossen
cctcgtaagactcacagaggtctgcgttaggttgcttgtatcggtgcgtggcatcctgctagagtgtcctacactgttgctagggctggtcagaacggttaccatcaccgtactgagcttaacaagaagatttacaggttgggcaaggttggtactgaggcacacactgccatgactgaatatgacaggactgagaaggatgtgactccaatgggaggattcccccactacggtattgagaaggatgactacttgatgattaaggggtgctgtgttggtcccaagaagagagttgtaactctcagacagtcactactcactcagacttcccgtcttgctttggaggagatcaaacttaagtttattgacacc

SEQ ID NO: 170106 - DNA, 375 bp, Arabidopsis thaliana nossen
catctactgaagtatcatgctcgttttcctaatggtgacacgaggatttcgagtcctctgcaaaaatgctatgtctacctttactgaaggatcattatcatgtgacacagggattttcagtcccccgcaattaagctatgccgaccattactgaggtatcatctactgaagtatcatcttgcttttactaatggtgacataaggattttcagtcctctgcaactaaggtatgtcgaccattaccgaaggatcatcttgcttttactaatggtgacacaaggattttcagtcccccgcaattaagctatgtgtaccattaccgaagtataatctactgaagtatcagtatcattttaatatatgacttaggtctat

SEQ ID NO: 170107 - DNA, 383 bp, Arabidopsis thaliana nossen
caaaagcatacttgagagagatctgtttcgataatttgcttcaatcaccgtgttaatggcggccgtaggtgtggaggcgagacctcctgtgacagcgatggaggaaacctgcaacgttaagggagcggcggcgaaacaaggagaagggcttaacaagtactacctccagcatctcgatgagctccagcgcctgcaacgcgaaaagtcgtataaccttaatcgtcttgaagctcagaggaatgaactcaattctcgagtacgaatgctcagagaagagttacagctccttcaagaacctgggtcctatgtgggtgaagtggtaaaagtgatgggaaaaaacaaggtcttggttaaggttcatccagaggggaagtatgttgtcg

SEQ ID NO: 170108 - DNA, 373 bp, Arabidopsis thaliana nossen
gaaaaattaatattcactaacatcatatattaatcaaaaacaaagtgtgaaatgagaactcgtacgttggggtcatgacccttagcagctacaaacaatccaccaatccgaaccagaggaagacaatattcagctgaaaattcataacaaacaactcagatccactttgaacactaactaataagcaactttgtttctagcactaccctacttgaaacttgtaaataatacctaagactctcatctccgcgacagctcttgcaatagccacatcaaacttctctctgtacataacatcgtgcccacaactctgttctataacaaaagtaggacaatgtaatttagaatcaccttactggctattaatgtcatt

SEQ ID NO: 170109 - DNA, 354 bp, Arabidopsis thaliana nossen
gaaaaaaggagagagtactgatccaacgagaacgagtgacatattttaatttcagatttcattttccttacttttgttatcaatacaaaagaatcaatcaaatgtaacactcgtgataaaactcccatgtgacaacaacatgaagcataacacttcatgatgacaatatataatacattgtcttatactttcttaatcattattataaattacgaattagcatgttctctgcttttggaatttcgcttaaaaatttacaaaataattttcttgatagttattttaacatgcaacatttggaaaatcaacatgatcattggaaatgattaacattcatccaaaacgtatttaaat

SEQ ID NO: 170110 - DNA, 372 bp, Arabidopsis thaliana nossen
gttccagcagatgctatccctcaacctattgttgttgatcgtggagaatcgaaaaacggtgtttgcgctgatgagtctattgatggggttgaccttcagtatatccctcctatgcaaattgtgatgttaattgttggaacacgtggagatgttcaaccttttgttgcaatagccaaacggcttcaggactatggccatcgagttagacttgcaactcatgcaaattttaaagagtttgttttgactgctggattagagttttatcctctaggtggagatccaaaagtgctcgccggttatatggttaagaacaagggctttttgccatcaggcccttcagagattccaattcaacgaaaccaaatgaaagac

SEQ ID NO: 170111 - DNA, 373 bp, Arabidopsis thaliana nossen
agccgatgaggctacacaccctgactccattagagcaactttagctgagtttctctccacttttgtggtcgtctttgcagctgaaggctctatcctctctctcgataagttgtattgggaacatgcggctcatgcggggacaaacacaccaggagggctgattttagtagcgttggctcatgcgtttgctctgtttgctgctgtttcagcagccattaatgtctccggcggacacgttaacccggcagtcacttttggtgctcttgttggaggcagagttacagcgatccgcgccatctactactggatcgctcagcttcttggagccatcctcgcttgtctcttgttaaggctcacaacaaacggcatgaga

SEQ ID NO: 170112 - DNA, 373 bp, Arabidopsis thaliana nossen
ctaaagaaggttttatcactcgtaagaaaaaacaaaacaaaaacccttggggttctctctgtcggtgagacatcatcaatggaggaagtagcgagagaagaagtagagatcgacaaggatctgcggaggaaaataaagaagacggtgaagaagatcttggaaagttcgaacttgtacaagataacagagattaaggcgcgagaagaagcttcacttaaattggatcttgatctgtctcaagatccttacaaggtaatcgtgaaagaagaagttgaaaatttcctcgaagaagcagtaaagttgatcggcaataaacttgcgatgcttcccaagagaatagagtcgacgagtatttagatattattaatctaaa

SEQ ID NO: 170113 - DNA, 318 bp, Arabidopsis thaliana nossen
gttcaagggtcactgctttctactacagattattactctagcttcctcgggcttctccaccatttttgtgggaagccaaacacctcaaggctctatcctctctctcaataagactgataacataacaagccgctcatgcggggacaaacacaccaagagggctgattatactagcgttggctcaatgcgttgctctgtttgctgctgtttcaacagccattaatgtctccggccgacacgttaacccggcaatcaatttttgtgctcttggtggaagcaaagttacaacgatccgcgccatctactactggatcgctc

SEQ ID NO: 170114 - DNA, 357 bp, Arabidopsis thaliana nossen
cccaacaccagatacattataattaatcccaactcaagaagctttaagagtcttcaccttccatttgctattgatcatcttcttacatctctctccctctaaatatatccaaacaagaacgaaaggaaaaagagtacatacaatggtgaactttgtggatttacaaaaaccattgttgtaccgcctcatgaaattggccggtgtcattccttacaccgtagagcttgaaccagggacaaagatgaacttctggatcccaaaagaaaccctaaaaaaaaccaaaaaatctgacaaaaactttgccgtggaaccccaaaaacctacgaaaccagtcctattgttcatccatggctttgc

SEQ ID NO: 170115 - DNA, 368 bp, Arabidopsis thaliana nossen
atagtgcttgggttcaacctggtgctacgcttggtgagctttactacagggttgcagagaagagcttgagtcatggatttcccgcgggtttgtgcacaagtgtaggcataggtgggtatatgacaggcggaggatacagtaccttgatgaggaagtatggtcttgcgggagataatgttctagacgtaaagatggttgatgcaaatggtaaattactcgacagagccgcgatgggtgaggacctattttgggcgattagaggaggcggtggagcgagtttcgggatagttctagcatggaagatcaagcttgttcctgttcctaagactgttaccgacttcactgacaccaaaacgttagaacaagac

SEQ ID NO: 170116 - DNA, 373 bp, Arabidopsis thaliana nossen
ctctctagtaaacaagaacaaaaaaatggcggatacagctagaggaacgcatcacgatatcattgggggagaccagtacccgatgatgggccgagaccgagaccagtaccagatgtccggacgaggatctgactactccaagtctaggcagattgctaaagctgcaactgctgtcacagctggtggttccctccttgttctctccagccttacccttgttggaactgtcatagctttgactgttgcaacacctctgctcgttatcttcagcccaatccttgtcccggctctcatcacagttgcactcctcatcaccggttttctttcctctggagggtttggcattgccgctataaccgttttctcttggatt

SEQ ID NO: 170117 - DNA, 372 bp, Arabidopsis thaliana nossen
gtttgggatggttagggataacttgaagagagagttatcaactttactgtctctatgcattcaggcaccgagatcttctaaaggagggatgctaagatctggcaggtcctttggaaaagattctcctgcagttcactggcaaagcattatcgacggtcttaattcgcttcttgtcacattgaaagaaaatcatgttcctttagttctcatccagaagatatactctcaaactttctcatacattaacgtacaacttttcaacagtctccttctgcgtaaagagtgctgtacatttagcaatggtgaatttgtaaaatccgggcttgcggagctagagctatggtgttgtcaagccaaagaatattctgggcc

SEQ ID NO: 170118 - DNA, 368 bp, Arabidopsis thaliana nossen
ttgaaaaatatattttaagttatcaagttgaaaatatttaattaaagagatctgattataagttagtaaaggcaaaaacgaataaaaatttgaaattggggtagctgttcctaaggggcccgacgaatttttaattgtaattagagtatttttttttattgattggtttatcacattgtgatgttttacatgattaaatggacccattctaaaacaattagatgatgataaaattaacaaagattgggactccttatttcgatttaagaacatgcgaatagttccgtgattttgtctaagtgattgttgaagaatgccagacttgggcgaaatcgaataaaacggattcatgtgatctgcagagatca

SEQ ID NO: 170119 - DNA, 347 bp, Arabidopsis thaliana nossen
taaaactttaaacaccgataaattgatatttaattagctttctttcacattgtaacaaatttggtggggtcttttgcaaacaatacattatcagttttgtcttaataaaggatttcggtttgattggaccaaaattcatataaagcttggtcgtggtttatatacaacatggttaatttgatttggctaagaaaatttattctagtttcatacgttatataatgaatctttgggtggacatgaagacagtaacaaataatgacatgaataacaagggtcttatttaaagacatgaaacttaaaaacaaggtttcttcagcttaatatggtgaaagggaaaagacatt

SEQ ID NO: 170120 - DNA, 392 bp, Arabidopsis thaliana nossen
ggggcgaccacgcgtccgcgagtcatgattatggagtgtttgtgaaggaattaggtgttttgagaagggaagctgatggatgtttggtgtagagaagaagcttttgatggacatatggctattggtagggttttatatgagcatcagttgtttaaagaagctcttgttagcttcaagagagcttgtgaattgcaaccgactgatgtgagacctcatttcaaagctgggaactgtctttacgttttggggaaatgcaaagagtcgaaagatgagtttttgttggcgttggaagctgctgagtcgggcgggaaccaatgggcttatttgcttcctcagatttatgtcaatctcggtatcgcgcttgaaggcgaaggtatggttttgagtgcttg

SEQ ID NO: 170121 - DNA, 374 bp, Arabidopsis thaliana nossen
aaatttctcttcctaaatatttctagttcttgatttttgataacttcaggtgaaaatgggagttttcgcgggagcaactgcgttttcggtctttgtgtcgtttctgctgtttttcactgcttattctaagagaaatgatggaacattcagagttggcctgaaaaaactgaagttggatcctaacaaccgactcgcaacacgctttggttccaagcaagaagaggccttgagatcttctttgcgttcgtacaacaacaatcttggtggtgattctggagatgctgatattgtcccgctcaagaattacttggatgctcagtactatggtgagattgctattggtactccaccgcagaagttcactgtcatttttg

SEQ ID NO: 170122 - DNA, 289 bp, Arabidopsis thaliana nossen
aacaaaacatgttcttttccatatatagaccaccgttggcgacttacaaagattttgtgtgaagtacaacatacataacacttgcaaattacaataagagaggaaaaaaaacatggtaccatttgacaacatatataaacacacataaacactacttaaatcacaacgatgctgtcacggctataatcaaataactctgatgaaattctaaacacttaactacgcataaactatcataaccagatcatacaaatgataactatcaccatcacatgatttggatgactta

SEQ ID NO: 170123 - DNA, 372 bp, Arabidopsis thaliana nossen
caattttctcccatgaacgatttgtgtcaatggatttgttcgatccaaaacttgagataatgggtgtaatccgaaaaaggattcataagtagttgttaacggagttgaagttaccaaattctgaggagtaggtatcaatttatgcctaattgctccggagatagttcccttaactacattttctaaacgagccagagccaacccgagctggtcttgtaaaagatccgctacagagcgaatacgtttatttttcaaatgattcatatcatcaagtgtacccattccaaatttcatcccaatcaaatgatcggcagctgctaacacatctcgtggtaacaaaaatatattgttctgaggtatattaagattcag

SEQ ID NO: 170124 - DNA, 370 bp, Arabidopsis thaliana nossen
tctcactttccagctacttctctctctcgcgctctctctttctttgtgggcaatggctactgggtcggcaaccgattccgccaggtctccttcctcaggtgttctccaaaagctgttattactattctctgtctgtatagctgcttcaacttataaagcaatccagcctcctccatcaaagctatgtggctctcctgatggtccatccatcacaggaccaaggattaagctaagagaccgaaggcgtttaacttacaaagagcatggagttccaagagatgaagctaaccataagatcatcgttgtccatggatctgatagttgcagacacgataatgctttcgcagctctactatcaccggatattaag

SEQ ID NO: 170125 - DNA, 366 bp, Arabidopsis thaliana nossen
cggacgcgtgggctactctcactgtaatcccttagatcttcttttcaaatttcaatggcgtccggtgatgttgagtatcggtgcttcgttggaggtctagcatgggccactgatgacagagctcttgagactgccttcgctcaatacggcgacgttattgattccaagatcattaacgatcgtgagactggaagatcaaggggattcggattcgtcaccttcaaggatgagaaagccatgaaggatgcgattgagggaatgaacggacaagatctcgatggccgtagcatcactgttaacgaggctcagtcacgaggaagcggtggcggcggaggccaccgtggaagtggtggcggtggataccgc

SEQ ID NO: 170126 - DNA, 364 bp, Arabidopsis thaliana nossen
agatctctattagttcctttttacgagagcattggacaaacaacgggggtgtaaaataaatttcggggtccactaaaaaccccgatatggacttgagaagatcatacatattatagcttgatacctgcattcatattcagaatctaaagataggaaacaaatcaacactaaaaagacataaaaaccattgctgcacaatcttcacttacctctacaatggttgggatggattccatcttttgtataggttcaagggccaatacagaaagaaatgcgtctgtatcaacttcatacctgaaacaatgtttaacttaattgatttctcttttacaaactactgacaggtttcagaaaatatttatac

SEQ ID NO: 170127 - DNA, 364 bp, Arabidopsis thaliana nossen
atctcttagttgttgagagggttgcccaaaggcagtatatagagcatacccagtaaaacttacaagtaacccagatataaagatggcgactagggttgctgtttccattattatagaattgaaagaccacaccggatctatgctaagatcatttatttacaacggaatggtatacaaagtcaacagatcgtaatgaatacaaaataagatttatggctacacaaactgttgaagatagttctagatctggtccaagaagcactactgtagggaagttattgaaaccattgaattccgaatatggtaaagtagctcccggatggggaacgacccctttgatgggtgttgcaatggctctatttgc

SEQ ID NO: 170128 - DNA, 364 bp, Arabidopsis thaliana nossen
cggacgcgtgggggagtacattgaggagcgaaggcttaaggatttggtgaagaagcactctgagttgatcagctacccaatctctctctggattgagaagaccattgagaaggagatctctgatgatgaagaggaggaagagaagaaggatgaggaaggcaaggttgaggaagttgatgaggagaaagaaaaggaggagaagaaaaagaagaagattaaggaggtttctcatgagtgggatttggtgaacaagcagaaaccgatttggatgaggaagccagaggagatcaacaaggaggagtacgctgctttctacaagagtttgagcaatgactgggaagagcatttggctgtgaagcatttc

SEQ ID NO: 170129 - DNA, 377 bp, Arabidopsis thaliana nossen
cccaaatacatcattgacattttaaatgctctatctggaatgcctgagatggaccttttgttgtagtgtgcactaggggctctcttctctctgcctgtccgtcagtgttctttgtttggccagctggttcaccagttattgtgtaggcaactgtatactgatgaaccaaatgcaacatggtttgtctttggtggccaaccactccgtttctcacttatggagtttgaggaggttacaggtttgtgttgttctgaatacccgccaccgtctgaaatgaagtctgtcctctcttaccctgatggtgaatcaccatattggtacaaacttattggaggcaaacttggttctgttactgttaagtcactgctgctacggct

SEQ ID NO: 170130 - DNA, 370 bp, Arabidopsis thaliana nossen
aagaaagcagcacgaacaccaactcttaaggaaaacatctaagttatgggtaagtaattgcatgcggtgtaaagctacgtgtccagcttaagacactcaagtctcacatctgtccctttttacttcgacttcgcttcttttggcttcttttaaactctctctatctctctctttcttcttcacactttgttgttaatttcaagtgtttgatcataatggcaacatcagctcgtagagcatacggtttcggtagagccgatgaggctacacaccctgactccattagagcaactttagctgagtttctctccacttttgtcttcgtctttgcagctgaaggctctatcctctctctcgataagttgtattg

SEQ ID NO: 170131 - DNA, 371 bp, Arabidopsis thaliana nossen
gaatttgtattgaacaattgaacttccacttaatattgagttattgactaactggtacgttaatcaagttttaattcttagtattttttatagcttaaattaaaattaacttttgttgaaacagtgctcatttagttaccacaaaatcaatctcaatagtcacgtgttctcaattgtttcttgaaatttggaaattatcattaccacatgttctctcttttactaacaaaagatcaaaccaataaaattttaagacaagttccgatggacccggtcaaccaaaactttggtcaaatctgtagaattccctataaattaaattttacctcttccttaatctctcaaaaataactcttttcttctttttaatc

SEQ ID NO: 170132 - DNA, 370 bp, Arabidopsis thaliana nossen
aaaaggtatagatggacaatatttttattatttttctctttttccaattttgcctaaagattataaattataaaaaacattcctttgaaacaagaccaatcatgataatattgaaaccaaaattttaggaaatttttcctaacaattaattttggacttcgttatatgcctatttcgtatttatctccttcctaattgtattaacagaaacagtgcatttgaataataaaaattaacttatttctcctcatatatgagctacgagatttaccattcttttatttcatttaatataaccctgtaccaaaatgcaaacaattgtgttattgtattatgataaaaaaatccttttattttatatatctttggt

SEQ ID NO: 170133 - DNA, 375 bp, Arabidopsis thaliana nossen
gggttcgttatcatcgccatctcgattctcctaaatcataagcgatgtgatctccgattgagaatgagagatccgaaatttcttcccctgagaagctgaagttagaggaggagccatccgacgatgaatctaagttctctaattatgattcggacgattgggaaactttgtcagatgatcttcgactgttagatgaagagtggggcaagagcgggggttttgatgtggacttctcgaaagtgcgtcacagatttggtcgcggatctgttcatctcgacgacgacaatatggttagcgagcctcatgagaccaacagagatttgctcaacaggttgtccaacatggctatctccttctacaacgacaagacgggga

SEQ ID NO: 170134 - DNA, 368 bp, Arabidopsis thaliana nossen
cggacccgtatcatcaccatctcgattctcctaaatcataaccgatgggatctcctatagattttgggggatcccaaatttcttcccctgaaaagctgaatttagaggaggagccatccgacgatgaatctaagttctctaattattattcagacgattgggaaactttctcaaatgatcttcaactgttatatcaaaagtgaagcaagagcggaagttttgatgttaacttctcaaaagtgcgtcacagatttggtcgcggatctctacatctctacgactacaatatgattagctagcctcatgagaccaacagacatattctcacaggctcgccaacatgactatctacttctacaactacaaga

SEQ ID NO: 170135 - DNA, 377 bp, Arabidopsis thaliana nossen
cacagaaccacaatttctcctcttttgtgttcagctgaaagttcctcggagattgccctggcgcagagccagcctgcccctgatttcaatccctggtcggagttcgctcaaaatgtgtctggcgaatgggacggtttcggagcagattttacatgcgaagggcaaccgctagaactacctgaatcagtggttccagaagcctttagagaatgggaagtgaaggtgttcgattggcagacgcagtgtcccactcttgcccagcccaactcactatcctttctttacaagtccatcaaactcctccccaccgttggatgtgaagctgatgcagccacccgttacagcatcgaccagaggatcatcgggggaggcaaatc

SEQ ID NO: 170136 - DNA, 368 bp, Arabidopsis thaliana nossen
cggacgcgtgggtggaacgacatgcccaatcccgccggggaagaactacacttacattctttaggtgagggatcagatcggaagtttttactacttcccttctctcggctttcacaaagccgccggtggatttggtggcattcgtatcctcagtcgtcctagaatcccggtcccttttcctgatcccgccggagataccactgcccttatcggagactggttcaaagcaaaccacacggatttgagagcacagcttgataatggtaagaagcttcctttaccagacggcatcctcatcaacggtcggtcaagtggtgcaactcttaatgttgaacaaggtcagacatacaggtttagaatatccaatg

SEQ ID NO: 170137 - DNA, 368 bp, Arabidopsis thaliana nossen
ggctagagcttgaagaattcccaacgggccggcgtattcaggtccaatacgttgttgtatccctgcagatatttctctttctaaccacacaattactagtacacctgttatgattcccaatacaagagaaaatatagggacaaatatccatatgagtccatagacctcttttaaagattccaatttaacaaaagaatttatagtttggactgctgttgcataaattatcattttaacgatcaacttctcccataattatatctatgctaccgagtatcgtcataatatcagccaatttcattcttttaactagttcaggaagaatttgcaaattaataaaacccggtggtcgtattttccatctccaa

SEQ ID NO: 170138 - DNA, 279 bp, Arabidopsis thaliana nossen
  unsure (1)..(279): unsure at all n locations
tacagtatttgcattgagagataccttgcttgtttggttactcaaactaatgttttttattgtatcgttttggctctgtcttggaatttaaggaagccatcatattcgtataatctggactaatgtctttatgtgtttctgtgtagattgatttggaaaaaaatggtcaattgttatattcataccaagaagattctatgnngcatccgttacattgttttaatctcgataatgccggtgttttcaattaattggcaatgttaaatggtttcaaggctc

SEQ ID NO: 170139 - DNA, 378 bp, Arabidopsis thaliana nossen
gtgaatttcttcatgctcgttccaagctcgaagtaccatttgtacaaataagaatccccttcgttacatgatttcttcttcatatagatagatataggatctatggggcaattacttataagtacattttgtgcaacagcccttcctatctgatagaaaaggatcccatgatcctgaaccgatcttacctgggatcgcaaatcccaagtttgtctatgaagagcagatctaattgtattagtgtctataattgatttcttctgtgtaatactaattgatagggcctcattggtaagtgctacaagatctcgtgcactggaacccatggttatagactcgaatccattagtatggaacattttcttttccaagtgaaat

SEQ ID NO: 170140 - DNA, 369 bp, Arabidopsis thaliana nossen
  unsure (1)..(369): unsure at all n locations
gaaaacatgaatttccggggaggttgttgtattgcgaggtacggtggtagtggtggtggaaatgatgtgtgtaangatgatcggattatgctccggtaccgtccgattgcaccgagacctgattctggtggatctcctgcttcaccgacggagaagaatggatcggtgataactaacgtttcgtcgagatcacggagaggtaagagaaaatattcaaaggagaataatagtagcagtaccggatccgtaaatagtaacggtaacagcaaacgactgataaacgatgagacgaagaacgaatctggtggtggtagagagatcgtgacgttgcctcttcttccagagactcctgagaagaaagactcgccg

SEQ ID NO: 170141 - DNA, 370 bp, Arabidopsis thaliana nossen
gatttctaaaaaaaggtaagaaggaaaatggcggatcagctcaccgatgaccagatctcagagttcaaggaagcctttagcctcttcgataaggatggtgatggttgtatcaccaccaaggagctcggaaccgtgatgaggtctctggggcaaaacccaacagaagctgagcttcaagacatgatcaatgaagttgatgcagatgggaacgggaccattgatttcccggagttcctgaacctgatggcaaggaaaatgaaggacactgattcagaggaagagctcaaggaagcttttagggtttttgataaagaccagaatggattcatatctgcagcagagcttcgacatgtcatgacaaatctcggtg

SEQ ID NO: 170142 - DNA, 370 bp, Arabidopsis thaliana nossen
aaagattcactaaatggccaccgcaagcaccgctgctactttcagacgcgtcctccgtttcagcttgtggcgaattaccccatctgagatcaccctccaaactccccaaatttacgcctctgccatcggctcgctcacggtcctcttcttcgttctccgtctcctgcaccatcgctaaggacccagctgttgtcatggcggactcggagaagattaaggccgctggatctgatccgactatgtggcaacgacctgattcattcggtcgtttcgggaagtttggcggcaagtacgtccccgaaactctaatgcacgccctctctgaactcgaaacggctttctattcgctcgccaccgacgaagatttcca

SEQ ID NO: 170143 - DNA, 376 bp, Arabidopsis thaliana nossen
cacttgctcggtggttcatttacgaccacactctctcttctctttagggctctcctctctatttattgtccaacaaactctctcttctcttttcaagtcttcttcttcattactcgcaccatgaccaaaccctccgacccaaccagagactcccacgtggcagttctcgcttttcctttcggcactcatgcagctcctctcctcaccgtcacgcgccgcctcgcctccgcctctccttccaccgtcttctctttcttcaacaccgcacaatccaactcttcgttatttccctccggtgacgaagcagatcgtccggcgaacatcagagtatacgatattgccgacggtgttccggagggatacgtgtttagcggga

SEQ ID NO: 170144 - DNA, 381 bp, Arabidopsis thaliana nossen
gaaatttctgatatttacttttcctctgagttattatagatcaattatcttataaaatatatatgggggtttattttttttatatattaaaattcaccatatttcaaactctataaataaagacttgttttatttgatttggatacaaaaaaatacatctatttttactaattatccatttaaaacataaaaaaaagaaaaatgaaataaaaatagtgggtagagtgttgaattttattaagcaaaccattgtagagtataaaatttaagtgggtattgaattattatgtggaagagagaagaaatgatgtggaaaaaaagaagatgacgtggagggtgttgaatgaaaaaaccattgttgatagcctgatgactgattag

SEQ ID NO: 170145 - DNA, 371 bp, Arabidopsis thaliana nossen
ataaacttagtgagcggaactggatttggggagaatggcttcttcttgggctcaatctagaatcgtggagtctccagaatcatctttcacctcttgaagcaaacaacaagctcaggagtctggtcaagatttctccccaagtatctgaagccttgtctaatggacgtgctgttgtcgctcttgagtcaaccattatctcccatgggatgccttaccctcaaaatctgcaaacagcaaaagaggtggagtcaattgtgagagaaaatggagcaatccctgcaacaattgctatccttaatggagtaccttgcataggtctgagcgaggaagaactagaacgtcttgcatctctcggaaaaagtgtccaaaag

SEQ ID NO: 170146 - DNA, 362 bp, Arabidopsis thaliana nossen
atttactgatactgtgtcaaacacatataatccagtataagcaatcttggttttagtatttgtagaggttttagcagtgaaagtttgtagtcccatgagctgggagtgtgaatatgttttagtggaataattggtgcattactttagaagacagtttttgctgctttttccttgattcaattctgtttagcttctaccatgtgcgataaatgcagcatgtgcagcgcttgtcgatgcaggaatccctatgaagcatctggctggtacatttacactcttctctaattgactttgtgtgttacttcttactgtttcatcagctttttgttttttcagttgctatatgctgttgcctggctgag

SEQ ID NO: 170147 - DNA, 382 bp, Arabidopsis thaliana nossen
gcagcagctagctgcacaacgcagaattcgtcgacctttctcagttactgaagtagaagcactggttcgagccgttgagaaactcggaaccggaaggtggagagatgtgaaggttcgtgctttcgaggacgcagaccatcgtacctatgttgatctcaaggataagtggaagacgctggtccacacggcaaggatatctccacaacagcggagaggagagccggtgccacaggaacttctggaccgtgttttgaaggcacacgcttactggtcacaacacctaatgcatcaactgcagactgagccaccatccactcaggtagaggctctctaatctgaacaggttcttggtctaaagaacctttgtgtattattatgatga

SEQ ID NO: 170148 - DNA, 353 bp, Arabidopsis thaliana nossen
gatgaatccttctcacggtggcgacgacaagcaacgaccggcgatgtgtgcgcaagttgatcaattcggtgctgataatccttttgcttctacaaatccttacgtcgcttcttccccttatctctatccttctctatcctctcacaatctcggacctaatctcttcccagaccacggagatgcatccaacgaccaatcaccatctgctcctcctcaggcgacggaggaggttctcatccgtgttcccggcgctattctcaaccttatcgacaaatcctacagcgttgaactcgcgtgccgtgatttcaccatctttcgaatcattcaagggccaaatattgtagcggttctag

SEQ ID NO: 170149 - DNA, 368 bp, Arabidopsis thaliana nossen
gaagagatagcgaaggacaattattaatttattttcctattttagttttcattacaaccttaatcttcgtgttgtgtgttctgtaacttcccagattttttttttctctttgctgggcttcgttgccttttcccctttttttctctttcctctgctctcgattcagtttagggcgagaaaaagtagctgtttttacagggtttatcacaaagatccttccttttttacttgaagctcgccattttcttagggtttctcttgatttcattcatctccagtgcccagatctctctctctactcatctgccatttggctgtgttcaatgattagggttttgatttagaaccaaagcttttgggttttactg

SEQ ID NO: 170150 - DNA, 371 bp, Arabidopsis thaliana nossen
cgaaaaaagcttttaaaacttatctagtttcgtttgatacacatttgaagaaagaaatggcatccaaggggcagagctacaaagctggtgagaccagaggcaaggcccaggagaagactggacaagctatgggaacgatgagggacaaggctgaggagggccgggacaagacttctcaaacggcccaaacagcccaacagaaggcccatgagacagcccagtcagctaaagataagacatctcaaactgcccaagcggctcagcagaaggcccatgaaacggcccagtcagcaaaagagaagacatctcaaactgcccaaacggcacagcaaaaggcccatgagacgactcaagcagcaaaagaaaagaca

SEQ ID NO: 170151 - DNA, 287 bp, Arabidopsis thaliana nossen
ctgaggaggataaaaaccctagggtgagtgagatagagagaagcgaaaatggtgcagcgccttgtgtaccgatcacgacacagttacgccaccaaatccaaccagcacaggatcgtcaaaactccaggaggtaaattgacgtaccagaccactaagaagagagctagtggacctaaatgtcccgttaccggcaagcgtattcagggtattcctcacttgaggccaactgagtacaagaggtcacgtttatcaagaaacaggaggaccgtgaaccgtgcttatggtgg

SEQ ID NO: 170152 - DNA, 383 bp, Arabidopsis thaliana nossen
gagttgacgttctctcctctgatctacgttcagatgacccggtttaaatgcggaggattagggttgggcttaagctgggccaatataataggagacgcattctctctgttctatgccttcaacctatgggctaaggccattaccggagaaaagatttatgccccaacaacaccctttataggagagagaagggtccaaagccccaacccgaccggtaaagatcccgtttcaattaaaccggtcaaaccgcggttggtgatctttgggtcactccaaacgacaggaaattggcgaattactgtttcaatctcgtcgtcgccgatcagatatcaccacattttccggcgaagggagatgactcgattccggtgttcgagattctc

SEQ ID NO: 170153 - DNA, 153 bp, Arabidopsis thaliana nossen
gctttcagaaaaccggaaatatacctggcatagatgaccatcgtaactaaacgaattcgtaaacattaactttgattggagaaaattggtctaaattgtattgaacctctaaaacagtaattggaagacaaacataactaaataataataatt

SEQ ID NO: 170154 - DNA, 369 bp, Arabidopsis thaliana nossen
tcgcattaatttctttcttctttatacacatctatagatagcgtcttcagtgtccaaccatgaattgtggggatatcctccacaagatgaaggaatccgtcaaggagaaagttgggcttggtgcatctgcttcatctgcagattcagggaaaggtaagagcaagatgtcgaagcatatcacacatggttttcatttggcgaaagggaaagcttttcacgagatggaagattatgtggttgccaaattcaaggaagctgatgataatgagcttggtctgtttgctatcttcgatggccatcttagccacgagattccggactacttgtgctcccatttgtttgagaacatcttgaaagagccgaatatct

SEQ ID NO: 170155 - DNA, 337 bp, Arabidopsis thaliana nossen
ccacgcgtccgtgcattggctggaacctacaactttgatgacatggcgaaagtggctgcgagtgcctccatgtgcgtgcaccaagaggtctcacacagaccattcatgggtgaagttgtgcaggcactaaaacttatatacaacgatgcagatgagacctgtggtgattattgcagccaaaaggactcatcagtaccagactctgctgacttcaaaggcgatctggctccttcggatagcagctggtggaatttgacacctcggttaaggtatggtcaagcttcgtcgttcataacaatggattatagctcaggaccactagaggacatggagaacc

SEQ ID NO: 170156 - DNA, 384 bp, Arabidopsis thaliana nossen
gtcacctgatacttatttctcacttcacgctgaaaaagaagacggcacaccaatcagcagctcactgtctgctcccttcccaccttgcaacttgagaacagcgcttacacgatatgcatgtcttttgagttctccaaagaagtctgctttagttgcgttggctgctcatgcatctgatcctaccgaagcagaacgattaaaacaccttgcttcacctgctggaaaggatgaatattcaaagtgggtagtagagagtcaaagaagtctacttgaggtgatggccgagtttccttcagccaagccaccacttggtgtcttcttcgctggagttgctccaaggttgcagcctaggttctattcgatatcatcatcgcccaagattgc

SEQ ID NO: 170157 - DNA, 371 bp, Arabidopsis thaliana nossen
atcaaatagcgtaaaattgaaattcaaattttcgccggagctccatcggataaaacaataagcgacgtgcggcgatggaatctcacggttccggtctccggcgagttctgttattgtcgttctgtgtcgctgggatctgggcagcttacatataccaaggcattcttcaagagaccttgtcgacgaagaaatttggtgaagatgggaagagattcgagcatcttgcatttctgaatttggctcagaatgtaatctgcttggtttggtcttatataatgattaagctctggtccaacggaggttctggtggagccccatggtggacgtattggagtgctggcattactaataccattggtcctgctatgggc

SEQ ID NO: 170158 - DNA, 370 bp, Arabidopsis thaliana nossen
gaagaaagcaaattaaatctagagtagcttgtttctagggtttcgactgtggacggccggtacgattggtgaactgcttgttctaaggaatcatgaagcctgtcttttgcggaaactttgagtatgatgctcgtgagagtgatcttgagcggcttttcagaaagtacggcaaggttgagagggttgatatgaaagctgggtttgcttttgtctatatggaagatgaaagggatgctgaagatgcaattcgagcgcttgatcgctttgaatatggtcgcacaggacgcagactccgtgttgagtggacaaagaatgaccgtggaggtgctggaagatcaggtggttcgaggagatcatcttctggcttgag

SEQ ID NO: 170159 - DNA, 371 bp, Arabidopsis thaliana nossen
caggaccaaacctacattgtatcaaccacacattatatgtcaccagacgaccttataggtattggctggagatatacatgcaacaatatcatgcgttggatacatcataatatgtatatatctctgtataagcattggtacaaacacataaaaacctgtatcatgtaacgatgatagaccgtgtattttatccatttgcttaacacatgctactcaaagacgaccattactcatagaaatatgagagaagaggtctattgaattgtccatatgtgtctatctataaagacatactgaaagcaacattgaaacttgctcgactacagaatttaataatgcaacatgatgaccaatcaagcgcggagtttata

SEQ ID NO: 170160 - DNA, 383 bp, Arabidopsis thaliana nossen
  unsure (1)..(383): unsure at all n locations
ggtctttgtaagttgtgtttctttcgtatggtctctcattgttaagcttaggtagatactgacagtctgtcaggtaccctgtcacattctgtgaaacagaaaaaataatgttaagcttaggtagatactaatttgttgattttgcaagtttcctaataaactatggtgaatagagacatactttagggtttttgaaataaccactaggagcaagattatcctgcaaaagtcattcaaagattttaattaattttctaattgacgacttaaatcatatgatgtaaagagagagaaagagatcaatacttgaacaaagtcgctgtangggattttncttgcctattcccatttgctatgtcacanattaagccagacttgaacaa

SEQ ID NO: 170161 - DNA, 322 bp, Arabidopsis thaliana nossen
ccgacgtcttgtaaacgtcgtatcagctccgtcggaatcccgtggttaaccacttggaatagcccccagtcttcactcgctttcaccaccgcacgcctcacgctttcttcgtcgggatcgcttagatcgacgacgggaatcgccggcgttggacctcggaatgttgtgatcgctggttgttctttctctgatctgatgaactccaacgggattgcttctgttagtagagaagaagatgaaatgtcttggactctttcgacctccattattttttttgggaggtttcggtggccggaaccatggccggtattgtaattggggg

SEQ ID NO: 170162 - DNA, 363 bp, Arabidopsis thaliana nossen; identical to SEQ ID NO: 119855

SEQ ID NO: 170163 - DNA, 154 bp, Arabidopsis thaliana nossen
agaaaatgcaattgtttgaacttctttagattaatcttgtaactgagaaaacaaaaacatacttggaactttattaatctttcattatttatctatcaaataaatatatctataatcgctacataaatcacccctcccgttaccatacataaaa

SEQ ID NO: 170164 - DNA, 386 bp, Arabidopsis thaliana nossen
ggctggttggtggtctctcagagaattttgagagcgttgaagctggttggatggtatgtttccattgcggaaagtattatactttgctttagaagtaaaccgtgacccgattaacaaaatcctatatttcaggtgaatccagctgttttcggagactcacgtacccgtctcttcatctcctggactgttagtaacacttttatataactaccaactttgaaatatctcaatcacttacgtgagtttatataactacgctttctatttggattttcagacagatggatacactaaaacagggtgcatcaatctcttatgcgcgggttttgtgcaaacaagtaaaaaatttgcccttggtgcaaccgttgaacctgtttcgagttcct

SEQ ID NO: 170165 - DNA, 347 bp, Arabidopsis thaliana nossen
atttaaaatgttgattataaaagatcgacccccggtgtatccacaatcaaacataagtttataccaatgagattaaaatacaacaatatcataagtttataacaaaaaatatatatatatatatatataatccggtgtacctttggtcaaatcctgttattatgtaagtaagctaaacttttgatattattaatttgtcttaaacgtcatactcaaacacgacgattacacttagatcccccattaatctttgatattaatatatatatatatatatatatataattacatattgttatttacgttattatttgttttacgataatatatattttgggtgaatatgc

SEQ ID NO: 170166 - DNA, 354 bp, Arabidopsis thaliana nossen
cgtctaacagtaatcatgactgattctcatatgcatgcaatacatataggagggggcatctatactgtgggggaaggatcgatgacttacgaaattatgcacataacctagctaccttgcaccatcctaacccgggaaagctacttatcatagagctctatatagcatcaccatttatctcaaccattacaaaatatatggtcaatggttctttactaaatgcattgcaaaacaagtacacctattctaccggttagacacaccatctcaatcataccaacatcactttcaggatgtactatcccaccaacaaatttaaatattgcgatggattactgggcagctccaacttca

SEQ ID NO: 170167 - DNA, 370 bp, Arabidopsis thaliana nossen
atcatactcaagttaaactcaagaagcgtggctctgatactaagtatttggctacagtcttggccattggaactgaatgtgacattgctttgttgacagttacggatgatgagttttgggaaggagtatctcctgtggagtttggtgatttaccagctttgcaagatgctgttactgttgttggttatccaattggtggtgatacaatctctgtcacaagcggtgttgtttcccggatggagatattgtcgtatgtgcatggatcaaccgagcttttgggattgcagattgatgcagctattaattctgggaattctggtggtcctgcatttaatgataaaggaaaatgtgttggtattgcatttcagtc

SEQ ID NO: 170168 - DNA, 352 bp, Arabidopsis thaliana nossen
tagctctgataaagtatgagagtagcgttacaatggaggttgacgaagacattgagttacaaaggcatgaagaacaacaaagcagaaagctacaaagattctcagaggacaacactggactaatgaggaattggaacaatccatcgtctcgtatcattagggtttcacgagcttctggtggcaaagatagacatagcaaagtgttaacatcaaaaggtttaagagatcgaagaatacgtctctcagttgctacagcaatccagttctatgatcttcaagatcgtcttggatttgatcagccaaataaaagctgttggaatggttaatcaatgcagcttctgattcaatcact

SEQ ID NO: 170169 - DNA, 191 bp, Arabidopsis thaliana nossen
catccatgtggcagacattgcacttatcgagatctttccagtccacacggacaggtttgtaacgagttggctgactttgatgccttacgcaactattattgtccatggaaacatctgactaatgactggattttgctaaatactgcttcgtaatggtatattttggcgagcctcttgttgagtgtatacac

SEQ ID NO: 170170 - DNA, 367 bp, Arabidopsis thaliana nossen
cagaggagtggttgaattggaagaaactgtataaagcgcctctggggtaccctatggatagaggtatcttataaccaattgcctcaacggactatttacccgtaacatcaaagtttcaacaattttgtcttttgaaaattccaaacttagaacttcgaattttgaccaacctaattggttccaagaccatgggcctaatcacataagttcccgtatcaaaggcacattcggatatctagctccagagtactttatgcaccgtattgttttttaaaagacggatgtttttgctttagctgtattgcttatagagatcataactaggtcgtgagctgttgatacctatagccaggaaagcataattatg

SEQ ID NO: 170171 - DNA, 369 bp, Arabidopsis thaliana nossen
aggtgatccaaaacttaacaatatggtgattagtatgtttggagagtgtagtagtattactgatgctgagagagtgtttgatcatatggttgataaagatatggattcttggcatttgatgatgtgtgcgtatagtgataacggaatgggagatgatgcgttgcatttgttcgaagagatgacgaaacatgggttgaagccgaacgaggagactttccttacggtcttcttggcttgtgctactgttggtggtatagaagaagcgtttttgcattttgattcgatgaagaacgagcatgggattagtccgaagacagagcattatttgggtgttttaggtgttcttgggaaatgtggacatcttgttga

SEQ ID NO: 170172 - DNA, 372 bp, Arabidopsis thaliana nossen
ggaaaatcgaccacaactggtcacttgatctataagcttggtggtattgacaagcgtgtcatctagaggttcgagaaggaggctgctgagatgaacaagaggtccttcaagtacgcatgggtgttggacaaacttaaggccgagcgtgagcgtggtattaccatcgatattgctctatggaagttcgagaccaccaagtactactgcacagtcattgatgccccaggacatcgtgatttcatcaagaacatgattactggtacctcccaggctgattgtgctgttcttatcattgactccaccactggaggttttgaggctggtatctctaaggatggtcagacccgtgagcacgctcttcttgctttcacc

SEQ ID NO: 170173 - DNA, 238 bp, Arabidopsis thaliana nossen
aaaacaacaagaaaaaatggcaatataccaacaaattaatcataacactgggttctccttatctacataggtggggtccactgcttatccttccgtgtggagatcgacgagttcgagccaccacagcaaggagaacaagaaggtccccgtcgccgtcctggtggtggctctggcgagggatgggaggaagagtcgacgaatcatccataccacttcaggaagcggagtttcagtgatt

SEQ ID NO: 170174 - DNA, 371 bp, Arabidopsis thaliana nossen
ataatttataagatcgttaataattttttttgtttgatttcttgcaggaaaataaaatatgtaggatgctgctttttctatttgatctcatcttccaaatttttataaacatttgagcaattgatgtcaaagtgaatacaaaaacaggaaatatagtagtcttatataagacaactagatcataacccgtgctgtagcattaatattttgtataaattaaattgtatactttatttgaattatataagaaatagtatagtataaaagtgatactataatatttttcaatgtttttactatttggatataatattgcattggattgactttgtttaaaaatgttatttttataataaatacaacatatgtag

SEQ ID NO: 170175 - DNA, 229 bp, Arabidopsis thaliana nossen
tcgtggaggagtgatatgattaaaacaaaacactataaatgaactaggggatgtcattattaaaacagtggagacaaatttagggatcttacttgcaaaaacttgttgaaatcttattaaatatacttcacacaaactaaaaatagataacatgattttaccaaattagagagaaccctatatatggaaaagaaatgtggtaaccaaaagtctactagagagaaaatat

SEQ ID NO: 170176 - DNA, 321 bp, Arabidopsis thaliana nossen
ggcagtcattgagtggccaaaaatattttccttggccttcaattgtaccggaaccggagatagagagattgttgatgtaccagaagttgatccatgtgtcctggttaatgtccctagggtttgcacaagccaataaagtttcatcgatgacgaattcaatagaatttttgcatgacccacaaactctacaccaccgaggtagaatgttcctttcggtacgtagattttactacttccacttatccttgtgcatgcacgtttctatacacttgtgaatgcctaattttgtatatgttaagaataagataggttaattattaa

SEQ ID NO: 170177 - DNA, 375 bp, Arabidopsis thaliana nossen
agctgagttataaatcttgatcttcttactcaagagaattctagagttggcttgagagtgacgtgtgtgatgattatgaagcacagtaactgggcctagcgtggaagcataaagcccaatagaaaaggcctttttcttttttttcttcttattcccggaatccgacaatgttcaaagtgtgtagtagattgatgaagaaaaaccagtgtcattttggtagataatcgtatggaggaattttttcttgcaaaagtgatatatatggtggaaaaatatatatgtaaacatagatgtttattgctcttccgcatttgtgttaaacaaatagtgtaacaatatcaaaacagtttttttgttcgtccattcgattgataa

SEQ ID NO: 170178 - DNA, 137 bp, Arabidopsis thaliana nossen
gcctgagctaatgactcgtcttctccagcactatggaaacagccacgttcctttgcgtcttgtatcagattcctccacacagacttgctattcatcaaagttgcctcatttccaagtatccataagcagaacctatg

SEQ ID NO: 170179 - DNA, 383 bp, Arabidopsis thaliana nossen
gataaatttagtggcaagtcccatcattaagccttttagagtagtttctttgttacctcaaatcaattaatgagaccatgcatttatgaaaacgattgtttgcaaatagttaagactaattatttcacacacaaaaagttaaatcaaagaactatgaccagtgaacatggtttacgacatggaaacaaaggatgggataagcttaacatctatcatatcattgattaaattattattattttgactaaatagtaatttggtcaacactattgtatttttttaaaacactaaccactatgattagtacgttttttggaacttatgattagttcgattattctcatgaacttatggtttaatttattcgcataaacttattgatc

SEQ ID NO: 170180 - DNA, 389 bp, Arabidopsis thaliana nossen
cttccgagaaaattggttcgaggctcatttattatctctttctctttgacactctggatcctcttaaatggctgcgctgcccaacactggcccaacgagtgccagctcgatcaactcaatgcgctcgaaccatcccaaatcatgaagagcgagggtggtctgcatcaaggtctgtgaccaccatgcaccccacctccgatgctccggctttgcctttgagcgtatcgtcattgagcctcatggtcttttcttgcccactttcttgaacgcacactaactcacgtttgttgttcactgaaggctgttaatgggaagagttattccgctatgcgccgagacgttcatggagtcaccggtatttggagaaggacaaggacaggctcagagtt

SEQ ID NO: 170181 - DNA, 380 bp, Arabidopsis thaliana nossen
catgaattattttttctaatgacaaaatgtgttctcttgatcgtttggattgttgcagcatcaagtgaaatggaagcttacgtcgccgttttggcgttaagagtatggtttaccagaagtactagaataaaatacggctatatatcttagctgatattaccatgtatttgtttttgtctcaatgctttgtcttattttcatatcatatgttgtattgatgtgctaaaactatgataatagtaccttattagtcatcttctttctagatatctcctccaacgcatacgaacgtaataataatatgtgaagagttttataactattaagtaaccaataatattaagttcctagttttggagtgacattatttataaaaataa

SEQ ID NO: 170182 - DNA, 380 bp, Arabidopsis thaliana nossen
ggcgcaccaacaatctccagggatacgctccgatctgcttggcgcatgaggatttctacatccgacggttgtatcatcggattcaggactgttttggacgtcccatatcaagtgcacctgatgcttggattgatgtggttgagagagtctctgatgacaacaacaagacgctaaagcgaactacaaagactagcaggtgccttaatttgggttcctacaattatcttggatttggttctttcgatgaatattgcacgcctcgtgtcattgagtctctgaagaaattttcagcaagtacatgtagctctcgcgttgatgctggaactacatctgtgcatgcagaacttgaggattgtgttgctaaatatgtcggacaacct

SEQ ID NO: 170183 - DNA, 188 bp, Arabidopsis thaliana nossen
ttcttcaatatccatatcaatcgcatcctatagacataaggaactaggtgaacaagatacagttcatatatttcctcaaggatcgccaaataggctttctagcacaagagagatgtatgttaaagctacatatggtactgcatattatgtggtaaaataaataaagttctataaatggttgttcacat

SEQ ID NO: 170184 - DNA, 373 bp, Arabidopsis thaliana nossen
attttcgtagccgcaagactcctttcagattcttacttgcagctatgggtaaagagaagttttagattggcattgtggtcattggtcatgttgattctggaaaatcgaccacaactggtcacttgatctataagcttggtggtattgacaagcgtgtcatcgagaggttcgagaaggaggctgctgagatgaacaagaggtccttcaagtacgcatgggtgttggacaaacttaaggccgagcgtgagcgtggtattaccatcgatattgctctatggaagttcgagaccaccaagtactactgcacagtcattgatgccccaggacatcgtgatttcatcaagaacatgattactggtacctaccaggctga

SEQ ID NO: 170185 - DNA, 380 bp, Arabidopsis thaliana nossen
gtttcattgaaaatttcaagaaccctagttaataacgataatgggttcgagagttttggcttccttctttgttttcttaatcttcacggtcatcacattgcctcccacgatccaagcttgcactccttgtactcgtcctcatcctccggttccgaaacctccacaacacggcggtggtggaggtggtggtagcaagccgcctccacatcacggtggaaaaggtggtggtaaacccccaccccacggtggaaaaggtggaggaccgccgcatcatggtggaggaggaggaggaggagggaaatcaccgccggttgttagacctcctcccgtagtggtgaggccaccgccaatcataagacctcctccggtcgtctatccac

SEQ ID NO: 170186 - DNA, 374 bp, Arabidopsis thaliana nossen
  unsure (1)..(374): unsure at all n locations
tagatttcttgagattcttagtactcattctttctcttagtggtgcttgagttgctgcagatgcgagcggtgaagcaaaactttaataagtatgagactgatagtggtcacgcacatccgccaccaatttatggtgccccacccagctacacaacaccaccaccaccaatttacagtcctcccatatatccaccaccaatacaaaagcctccgacttatagtcctcccatatatccaccaccaatacaaaaacctcccaccccaacttatagtcctcccatatatccaccaccaatacaaaagcccccgacaccaacttacagtccttccatttatccaccaccaatacaaaagcctncgaccccaacttatag

SEQ ID NO: 170187 - DNA, 352 bp, Arabidopsis thaliana nossen
ggcaaagtgacgactatggagagaatggagagagacgcactggagacgggggctccatatgctccggtgacttatcaccgccgtgttcgtggtgacttggatgacacacttcctaaaccttatttgccgagagcactacacgcacctgacatggaacacccacaaggaacaccagatcatatacataatggccttagtgttcttcagcaacatgtcgctttcttcgatttggacaataatggcatcatttatccctttgaaaccttctctgggttccggctactcggtttcaatttactcgcgtagcttatcttggctgctggtatcaacatagctcttagctatgctactc

SEQ ID NO: 170188 - DNA, 303 bp, Arabidopsis thaliana nossen
tctcttcgttccagattaccgtcattacatcgccgcagtgtagcttctgcgccaaccaactcttccctggtatctcaactcaactaactccaccgtctttcgtcctctcaccttcgtcagatctcgttccagcgaatccgacgtcacaccacaatttgaattggataaagcacaagacaaacagaaaccactaaaccaagcaaatggaatattcttgatcatacttatcaatcttgccatatttatagctcaacacttctatcaagttcgcgggatcaaatcgatgtatttgtctagcgattt

SEQ ID NO: 170189 - DNA, 381 bp, Arabidopsis thaliana nossen
gaaagtctctcccagactagagtcttcctaatttttactactcatcctgacgatgcacctcaatttcttggtcttcttcttccttttttttcttctttttactaaaattttataaaatagcatttcttcttagatagtgcgtttcccaacataagaccctacaaaaatttatgggatgaaaattataataataatttctatgtacttttttttttttttttttttaaaacttcgttttcatctaatactatgcagcccatatactaaatgcctaaatctatacatatttagattgatctttaaatatcaataaaaaatttagctaaattttgactggtttagaggatttttccgatgtgtcattaggattatacaactatg

SEQ ID NO: 170190 - DNA, 382 bp, Arabidopsis thaliana nossen
cgctgagcaactaagagcctttcaggatctcatagttgaaggaaaggttcgctatatcggtgtctggaatgaaacttcatacggagtgacggagtttgttaacacagcaaaactcgaaggactaccaaagattgtgagcatccagaatggttacagcttgctagttagatgtcggtatgaagttgatctggtagaagtatgccacccaaaaaattgcaatgttggcttgcttgcttattcccctcttggaggcggctcgttgtctgggaaatacttggctacagaccaagaagctacaaaaaatgcaaggctgaatcttttcccaggatatatggaacgttacaagggatcactagccaaggaagcaaccatacaatacgtt

SEQ ID NO: 170191 - DNA, 383 bp, Arabidopsis thaliana nossen
attttagtaaataaccaaatataacacttgggctaagagtcaagtggggaatttttcttacatcccgggctcccggagcccaggtatcatatacgcccccaaaatagagagccttgaatactagaagaaaggcacctacacctaacaaaattaagtgaatacccaaaatggtggtcattttatttctatctttccatacataaccgaaaaagggaaaagattcttcaagagtttcgggtcccagaagtgcatgataaataccgccaaagcccaaaactgctgaagaaattaagtgaagtactccagatacaaagtacggaaaggtgtctataacttctcccccaggacctaccccccatcctaaaatggctaggtggggaagt

SEQ ID NO: 170192 - DNA, 368 bp, Arabidopsis thaliana nossen
ctcgattaagcttgaacttggaggatcaatggccgacgttcgcacacactcgcaccagcttcaagtgcaccctcaacgccagcatgaaggaggcatcaaagtcctttatcctcagagtggcccttcttccactcaggtgctagccgtgtttgtcggtgtaccgataggaggaacgctgctgactatagccggtttgacattagccggttcggttataggactaatgctagcattcccgttgtttctcatctttagtccggttattgtaccagcagcctttgtcatcggtctagctatgactggattcctggcttcaggggccataggtctcaccggactatcatccatgtcgtgggtactcaactaca

SEQ ID NO: 170193 - DNA, 380 bp, Arabidopsis thaliana nossen
aggaaaggaacaatgatgaaccagaagacacagtcagtaagcaaaactgcacctgcattcatctgtttgacgcgatatatatccaattaagaactcacgaaaattcgatataatcatggcgcatgattatgaattttgattttgattacctgaaagataatctggaaaacatatccccaaaaaccagctggattactagagtattgactctgttgaatagtattatcagctcctttggatcttgctctctctgagtctatggcttcaatgctatctactctatcgccagctgctcttttgttgtattggtaacatccgtgcaaagaaagaagcgagcctaactgttaaaagataccagatcaaaatgtaagaaacttgag

SEQ ID NO: 170194 - DNA, 383 bp, Arabidopsis thaliana nossen
gcatcaatggcgacttctctctccgtttctagattcatgtcctcctccggcgaccgttatctgcgtcgctgagccgttactttcccccaccgtatccttcaccgcgccgctctccttcacacgctctctcgctcctaatctctctctcaaattccgcaaccgccgcaccaattccgcctccgccaccaccagatccttcgctacgacacccgtcaccgcctccatttccgtcggagacaagctcccagactccactctctcctacctcgatccatccaccggagacgtcaaaacagtaaccgtctcatccctaaccgccgggaagaaaacaatcctattcgccgttcccggcgcattcacaccaacatgctcacaaaaacacg

SEQ ID NO: 170195 - DNA, 337 bp, Arabidopsis thaliana nossen
cccgaggagacactattctcgctgaagggacttccatgccaaaggcaaaggtcgagaaaaagaatttcgaggtatagattgaagaatcgtgggtccaatgtgataaatgtcaggcctggcagcatcaaatatgtgctctatttaatgggcggaggaatgatggggggcaagctgagtatacctgcccatattgctatgtaattgatgtggagcaaaatgagagaaagcctttacttcagagtgctgttcttggagcgaaagatctgccaagaacaattctcagtgaccatatatagcagcggttgtttaaaaggctgaagcatgaaaggactgatag

SEQ ID NO: 170196 - DNA, 383 bp, Arabidopsis thaliana nossen
gtgacaaacggaaaggctcatatacaaatggtgaacgacaacggagaaagagtgttcgaccaagagatctgcagcggacagttactagtcgtgccacaaggcttttcggtcatgaaacatgccataggcgaacagttcgagtggatcgaattcaagacaaacgaaaacgcacaggtcaacacactcgcgggccgtacctcagtcatgagaggtttgccgcttgaggttataaccaatgggtaccagatctctcccgaagaagctaaacgagtaaagtttagcacgattgagaccacactgacccatagcagtccaatgagctacggaaggcctagggcttgaggcttgatgagcgcgtggtggaatagcgtttgaatctaaag

SEQ ID NO: 170197 - DNA, 378 bp, Arabidopsis thaliana nossen
  unsure (1)..(378): unsure at all n locations
gggatgttctgtcactggtgttaaacctgcctccggtgactctcctctgcagcttggtccaaaggaagaggacgtanagaagcctgtcaacaaccccttctccttcttgggacgcttcctcctgggaactctagcagctgcctggtttgtgttaatccctatctacatgtggatcaaggatcagatcgttcccaaagaccaacccatctgatccttctcttctaggacatgatcattgtatcattgtaaacccctcttgtggtaaagaaagattcgagtcctatctatgaacatgcggaatatcattaaccttctttctttacatgtattactagattttcatgttgagatatctatgctacttgttcgataaatttt

SEQ ID NO: 170198 - DNA, 378 bp, Arabidopsis thaliana nossen
cggccccgtgggtttgtaatgtgaagacatcgcgtacacctccaccgcctgatccaaatgaacctaacagtgtggctgaagcaattgcttcctggggggttgattatgttgtgatcaccagtgtagatcgagatgatttacctgatcaagggagtggtcattttgctgaaactgttcagagattgaaattcttgaagccggagatgttgattgaagcactagttcctgatttccgcggagatggtggatgtgttgagaaggtttccaagtcagggcttgatgtcttagctcacaacattgagacagttgaagagcttcagagttttgtgcgggaccatcgtgctaactttaagcagtcattggatgtgcttaggatgg

SEQ ID NO: 170199 - DNA, 360 bp, Arabidopsis thaliana nossen
cgatatctccttcaaatccaaacctggacgattaccaacttttgtcctgatcgatcgtggagattgtggcttcactttgaaagcatggatagctcaacaagctggagcagcagcgatacttgtagctgatagtaaagctgagccattgattacaatggatacacctgaagaagataaatctgatgcggattatcttcagaacattaccattccttctgctatcattactaaaacattgggagacagtataaagtttgctctttccggtggtgatatggttaacatgaagctagatcggactgagtcggttccacatcctgatgagcgtgtatagtatgaactgtggactaatagcaatga

SEQ ID NO: 170200 - DNA, 317 bp, Arabidopsis thaliana nossen
ttgagctctctccgccacgattaatctccgggaatcgacggcactctgggggtttcaatggctgttgtggatgtacctcctcaagttcctcaaagtaaaactagagaccttgacaagcttcttctccgacatgggaatctcgttgaccccggcttcctacccggacccggcctgagggatgacataagggattatgtgagaatctcgttcattggctcggatggcttagatagtgagcttctcacagatctagctatttctccttttcgtaacctcgcagtgatagatatacaccgtattgaggttactaatctcaa

SEQ ID NO: 170201 - DNA, 271 bp, Arabidopsis thaliana nossen
  unsure (1)..(271): unsure at all n locations
accaacgtggcctaaaaaaaatttgttggacaaaacaaacattncaaacaacaccaaccatgcaaaaattcaaaccaaaaactaaggcaagaacccctaacaattaattttggactacgtcataaacctatttcgtatttatctcctccctaattgtattaacagaaacagtgcattcgaataataaaaattaacttatttctcctcatatatcagctacgagaattaccattcttttatttcacaaaaaaaaacacctaccaccaaacaa

SEQ ID NO: 170202 - DNA, 379 bp, Arabidopsis thaliana nossen
ctaaaatcgtaaagttctaaagcggtttttcatcaattttcaagcaatcgagaaaaaagcaatggcgtcagacaaacaaaaggcggagagagccgaggttgcggcgaggctagcggctgaggacttgcatgacattaacaaatccggtggtgctgatgtcacaatgtataaggtgacggagagaacaactgaacatccaccggagcaagataggcccggtgtgataggatcagtgttcagggctgtccaaggaacgtatgagcatgcgagagacgctgtagttggaaaaacccacgaagcggctgagtctaccaaagaaggagctcagatagcttcagagaaagcggttggagcaaaggacgcaaccgtcgagaaagct

SEQ ID NO: 170203 - DNA, 378 bp, Arabidopsis thaliana nossen
tcgcccacaccttctatcgaccattttgaattccctcaggctcgacgagaaggtgtatttaagggttttaggtgcacaacaaaaaggcataaatggatacctactcctcagaatacgccaacttcaactcctgtaacaactacatatgaatcctcttccggattacacccattatctcaagttttggatcgaacaaatccattgacacaaatcagccatgggagaaaattgacatatttgaaccctgtcagataaacaggtcaaactcctaatattcggataccagatatacatcctaatcactataggcgaaccagtcccattgacacatctgaaggaatcaatgttgtacttattggatctttatcaatacatgcc

SEQ ID NO: 170204 - DNA, 383 bp, Arabidopsis thaliana nossen
atttcaaaagaaaacaatcaattgagaaatggcaatgtctggaacatacgtggcggaggtaccgtttgagggatcggcggagaaacactacaagaagtggaggaacgaaaaccacgtcttccaggatgccgtcggccaccacatccaaggttgcactatgcatgacggtgactgggactcccacggctccatcagatcatggaatatcacatgcgatggaaagccggaagtcttcaaggagaagagagagatagacgacgaaaagatggcgttgacgttgaaagggctagagggtcaagcgatggagaagtacaagaagtatgaggttatctaccagttcattcccaagtcgaaggaaggctgcgtctgcaaaatcactctca

SEQ ID NO: 170205 - DNA, 389 bp, Arabidopsis thaliana nossen
cttccgttggaagttaatcgaggcggatttcttcttgaaaggggctaccggaaaaggacttgatgcctataacgcgacacttgctaaaggcggaccaccgccggtaggggccaagaaagccaaccttgatcctataactaaccgaatcatcgaggagtttggttatcaagaaatcggtcatcttagggcgattacggatatgacgggaggaattccacgtccgctaataaatctgacgagagagaatttcgcagtgtttatggacagagcggttggacgcaaatctaatccgcggtttgatccttacgccaactcactcaactatctcttagcttcgtactatatcccttatgttggccttaccggttatgtcggaaccatcccttacc

SEQ ID NO: 170206 - DNA, 381 bp, Arabidopsis thaliana nossen
accgaagttatccttacaagctttctttccggttgacctacaacgggagggtccgaatctttgttccgggattatatctccagaacctcagtcgatgattaaatatgggacgaatttgaagttgaaattttcggtcaccggagaagttacgactccggcgaaagtgactatggtatttccgacgttcacgacgcatagcttcgcgatgaatcagagggttttggttttggacaatgttaagtttacgaggaaaggcacatcgccgatgtatgaggttcaagtgaggactccgaggtcggcgaatattgcatggcctggttattatatgattactgtggtgaatcaagacataccaagcgaaggtgtttgggtaaagttaga

SEQ ID NO: 170207 - DNA, 355 bp, Arabidopsis thaliana nossen
cttccgaatcttttttttttagggttttgaaatctcttaagaactctccacaaacgttagggaattgcatagcagagtaactaaaacttagaatctagggagttgtaaaacatgtaaaaatagttaggtctaaacaatgaccttgaaaatctatatataatgtctaaaaaacgtgtagggaagtattttggggtatattctggagacttcaattcttcaaaccgtcagaattaggctgagctgtgaatggtgtcgacggacacccgttcagattccaaatttgtattttagcttattttcctttgttttcgctccaaaatgctcaatattcttcaaaagtatccaaaagtgtaaa

SEQ ID NO: 170208 - DNA, 387 bp, Arabidopsis thaliana nossen
tccgaaaatgggtcttgttaccaaaggttttaaaatatctcttactcctttctgtttccttgactttcatctgcgccaatgcagtttcatccgcttctccaatgactccaccgtcatcgccggctaagatgagcaggagacttgtggcagttgaaggcatggtttattgcaagtcatgcaagtattccggcgtcgatactctcttggaagcatctcctcttcaaggagcgaccgtaaagcttgcatgcaacaacacaaagagaggtgtgacaatggagacaaaaacagacaaaaacggatacttcttcatgctagccccaaaaaaactcaccacctacgctttccacacgtgccgggcttggcctacgaatcctggacccacgactg

SEQ ID NO: 170209 - DNA, 382 bp, Arabidopsis thaliana nossen
aactcatcaaagtctaatatcacaaagaaagagtttttttaactagcttagctcaaagtgtttgcttaggacaagaagaacatggcgtcttaccagaaccgtccaggaggtcaggccactgacgagtacggaaacccgatccagcagcagtatgacgagtacggaaatccgatgggaggaggaggatacggaactggtggtggtggaggagctacaggtggccaaggatacggaacaggtggccaagggtacggatcaggtggccaagggtacggaaccggtggccaaggatacggaaccgggaccgggactgaaggctttggaactggcggaggagctaggcaccacggccaagagcaactccacaaggaaagtggtggtg

SEQ ID NO: 170210 - DNA, 381 bp, Arabidopsis thaliana nossen
gccgccgtcacttgcaaagcctacgccgccgctctttgcgtcacttgggattccgatatccattctggtgatccactcgctagccgtcacgaacgtgtccccgtcgaaactttcttcgactccgccgaaaccgccgtcgccaaaatctcagcttcttcgacttttggtatccttggctcgtccgccaccaccgttgatttaaccgctgttccggttatggctgatgatctcggtttatgtccgtggttacttcctaatgatttcaacgaaccggctaaaatcgaaatcggaactgaaaacatgaaaggttcttctgactttatgttttctgatttcgatcggcttattgatttcgagtttccgaattcgttcaatcatcat

SEQ ID NO: 170211 - DNA, 344 bp, Arabidopsis thaliana nossen
gactacagcttttacaatgtttaacccgccggcctatgcaggaccagggcttccttgaatctttgtggtgtattcaaacaccaaaccacacaaacactaccacacctgaactgattcccaatacaacaaaaaatatacggacaaatattcatatgattccacataccacatttaaagattccaatttaacaaaagaaattatacctctgactgctgttgcataaattatcattttaacaatcaactgctactataataatatctatgctaccccgtatcaaaataatatcatcccatatcattttttaaactagttcaactaaaatttgcaaaataataaaacc

SEQ ID NO: 170212 - DNA, 253 bp, Arabidopsis thaliana nossen
  unsure (1)..(253): unsure at all n locations
aacccncttcaaaggattgttatttatatatcaccaccaatgagctcgtaaccgagatgaggtctcttttgcaaaacccaacagaaactaatcttcaagacatgatcaattaagttgatgcatatgttaaccgaaccattaatttcccttagttcctgaacctgattgcaaggaaaataaaagacactgattcagaggaagaactcaatgaagcttttaagctttttgataaagaccacaatgaattcatatc

SEQ ID NO: 170213 - DNA, 380 bp, Arabidopsis thaliana nossen
catgacaccaccagcagtttcaagaccaagggagagaggtgtgacatcaagcaagagaaggtcttgggccttttcgtttccttcaccgcttaggatcgcagcctgaacagctgcaccataagctacagcctcatcagggttgatagacttgcaaagctctttgccgttgaagaagtcctgaagcaattgctgaaccttagggatacgggtggatccaccaacaaggacaatctcgtgaacagtgctcttgtccatcttagcatcacggagacacttctcaacaggctccatacacttcctaaagagatccatgttcatctcttcgaatctagcacgggtgattggagaatagaagtcagctccaccatataaagagtcaa

SEQ ID NO: 170214 - DNA, 380 bp, Arabidopsis thaliana nossen
cgaaaaaaatgtgtccggtggagaacaaatggttaaaggtgggtcaaaaaggagctggtcctggggctggaagctcacatgccatgaccgtcgttgggaacaaagtttactgttttggtggtgagcttaagccaacgatccatattgataacgatctttacgttttcgatcttgagactcaagaatggtcgatagctcctgcgaccggagaggctcctttcccctgttttggtgtctcgatggtaacgatcggttcaacgatctatgtctacggtggccgtgacgataaacggagatacaacggtcttcattcgtatgatactgagaccaatgagtggaaattgttggctcctgttgaggaagggcttcctggtcgtagc

SEQ ID NO: 170215 - DNA, 346 bp, Arabidopsis thaliana nossen
cttgtgaacccgggtagaaattaagtggcccggaattttgctggctggtgggtctaagagctcttgggggcacaagaacaaccattcttggataccaaatggagatcaaatcctaaaacttccttcacaatctaaatttaccaaaaaaaaaaaaaaaaaaaaaaaaaaaaaaaaaaaaaaaaaaaacataaaaaaaaaaaaaaaaaaaaaaaaaaaaaaatataaaaaaaaaaaattatattaaaaaaaaacagggcgggcccttttaaaggatcaaacttttcaaccccttcaatgcaagaaaaaaaattttttttggggtaactaaaataaaactcattggccg

SEQ ID NO: 170216 - DNA, 383 bp, Arabidopsis thaliana nossen
cattactgtactatttatggaatattccactaagttatctagaaaagcttgtagtaatgcataatagtggtaatctgacaaatatcatgtagtaatcatggttatgtcatatgtgaggcaagaagattaaatgctttctggacctatacgtctctagttactcttttttaacaaaatagagcctttttcaggagttccttatggcactacttctaattcatctacaggttatcgttctgcaaaaggtaagctccatgtccttagtcaaactaaagtaatttaattgacagtataagaagtggtcatttttgcatgagagtttagttagtatgctgactcgatggtgatgtatgtaatatcatcgccgatgatctccaattgct

SEQ ID NO: 170217 - DNA, 375 bp, Arabidopsis thaliana nossen
gtggtttctgacgtttaaagctaaaaatctagagacttttggtatcccaaaagcaaagcttggtgaaattgaaaaatcaaaccccaaaaccctaaaaagctgattcctttctttgattctcactaccaattcttcccgccagtttcctttccccgattcatccttgacacttgcaacgccatgttgcggcctcgccgatctcttggggtttcatctccggcgaagcagaggaagaaagctgctcctaagaattccatggctacgagagcgaatcgaaagcgtctcccttcttacctcaaacctggctccgccgtagaaatcagctccgacgagattggattccgcggctcgtggtacatgggaaaagtaatcacc

SEQ ID NO: 170218 - DNA, 404 bp, Arabidopsis thaliana nossen
cggggcgacccacaccttccgcgaccccgtggttttggcttttttttcccaatcatccttcaagctcatgggttccttctacctttttgcgggagtctactcctttactaatgggttgcttcaacagtaaacaccggaaaactcaaaacgacggcggagaaaaatcaatcccgatcaatccagttcaaacccatgtactcccccagcatcgtaaacctcaaaccccaacaccaaaacccatcaatcacccaatccatcagcagatttcaacaccgacttcaaatccagtctcagttcgagatccagatacgattttaggtaaacccttccaagacatcaggaaattttacagcttggggaaagaattatgtcgaggtcaatttgggattacgtatatgtgtaaa

SEQ ID NO: 170219 - DNA, 384 bp, Arabidopsis thaliana nossen
gccgatctagaccaagtattcaaaagggttttgagcctgaaaacagagaacaaagatgacaaagacgctatagcccagtgtaagttgcttgtggatgaagctaaagaagaacttggcacctccatgaaaagaatcaacgactcagaggttaataactttgcaaaaatagttcccgatttggacagttggctaagcgcagtcatgtcttatcaagaaacatgtgtcgatggatttgaagaagggaaactcaaaacggagatacgtaagaatttcaattcttctcaagttttgacaagcaattcactcgcgatgataaaatctttagacggatatctttcctcggttccaaaggttaaaacgcgacttcttcttgaagcaagatct

SEQ ID NO: 170220 - DNA, 375 bp, Arabidopsis thaliana nossen
caactacaaaacgacaagcagtctgatgcaacattgctttttttcttctagtttctgttcgttattggatttaataggtagggtactgtaggaatctttatttaaatcgctgccgtttctttgactctttttctttctttatcctcccaagtaaacaaaacgtaaacaaaacaggtatgaaagctataattgtaaaccacgatcaaatttatggaagcattggtttatacatttctcttagtatccactttagggataatttttttcgctattttttttcgggaaccacctaaaatttcaactaaaaaatgaaataatttttcattatcttcattaacgtaatcagcctccaaatatttggaggctgattacgtt

SEQ ID NO: 170221 - DNA, 373 bp, Arabidopsis thaliana nossen
tgatcttgatttggaaggtctaatatgattttttgtagggtggaggacccttgggatcaaaggtggttaatgatgatcaggagaattttagaggtggaactaacaatgatgctcattctaattcttggtaatttacatcgttggattaaaagatgaatccatttcttcttcttgttcatgttaatttattctctttttttcttcgtcaataactgattaattaattaaacttttatatctcccttgcattttttttgtgatccaatagaactatagactatatatttacactaagacttatgagaaaggattaaacctaaggtataagtataaacaatgtctctaagacattagagtgtactcaggtggagat

SEQ ID NO: 170222 - DNA, 380 bp, Arabidopsis thaliana nossen
agcagataaaaaaaaaatggctcaagcagtgacttcgatggctggcttacgtggagcatctcaggctgtccttgaaggaagtttacagatcaacggctcaaaccgtttgaacatctcaagagtctcggttgggtctcagagaaccggacttgtgatcagggctcagcagaacgtgtcagtaccagaaagtagtcgccggtcagtgattggactcgtggcggctggtttagccggtggttcattcgttaaagctgttttcgccgaagctattccgatcaaagttggtggtcctccacttccttccggtggcctacctggaacagataactcagaccaagcaagagacttttcattggcattgaaagatagattttacatac

SEQ ID NO: 170223 - DNA, 390 bp, Arabidopsis thaliana nossen
agccttccgccggttttgccggggggaattctacgtccgttaataaatctgacgagagagaatttcgcagtgtttatggacagagcggttggacgcaaatctaatccgcggtttgatccttacgccaactcactcaactatctcttagcttcgtactatatcccttatgttggccttaccggttatgtcggaaccatcccttaccttgtctacttcaatatcaaaaagctagtggcgggtctattgggggtggaatcgggtcaagacgcagtgataagaacgcttctgtacgagagacagaatgagaaggtggaggaatacggtggagtcacggtggctgagctgaccaatgagatatctaacctccgtaatgaactcggtatgtgcggg

SEQ ID NO: 170224 - DNA, 382 bp, Arabidopsis thaliana nossen
tctcaatcgagaagaaggaacccaacactgagatccatggcgatggtatttgcacaacccaagaaaaacctacttcctctcattctcttcctcttctgtatctccgtcatcattctcctcgttctcgtctccgagaccactcactctaacgccggacgaggaactactttccggcgaaattacaatgatcccgctcctttcactttcctcatcaaggtcctcacctttaaccgtctccattctctctcccgctgtctcagatctctctccgccgcagactacggcgtttccggagacagaggacgcattcacctccacgtctacattgatcatttcaacctcgcgaggaacgatacacctgtggaagataacttgcaaatcg

SEQ ID NO: 170225 - DNA, 361 bp, Arabidopsis thaliana nossen
gtgaatattaaaacttcgaacaaaatcgatttttttgtgttcaattatgatatctaagatatacacatggtaccaaattacttattaattaggtttagagagatgtggaaatacacaataatatgttctatcacacacatttcttcacatctctttatacgaaataacattttaagattattaagccggcatcaatatgctttcttgtcatgaattacatagttttaagaaataaaatcaaagaattttgaatatatgtcacacagaacacttgcacagtttcttgtataaaacacaaattatgctaacaaatcttataaaaccaaacagttttatttgtattgctctatcaagtgccaca

SEQ ID NO: 170226 - DNA, 371 bp, Arabidopsis thaliana nossen
accacattaatattgtctaaaatactatagtgattcatttgagaagagaattacgttttttccccagctggtttggtactcgtagtgacaatgtcccatttcttgagccgtttctagagagtccttaaggtttttttggggaaatggttttctttgtaacgcatcgaccaccgatttcaccatctccttagaattcccaaattctctcgttagactctcctcagctaaatacttcccttaatgaaattacaacgagaaccgtgaatgatttgacatgtgaatagtagaacgatggaataacaaaaatgttagtataattaatgaaaacatcagaattttgcatgctaaaagattggtttttttatgtcttt

SEQ ID NO: 170227 - DNA, 389 bp, Arabidopsis thaliana nossen
cttccgcggacgcgtgggaaaatatatatatatataatcaaacaataataataaagtgattaaattttttaaatccaactaaacgtctaataccataacaaatatagtagtagatcaccaatgacggaaataaactagtaaaacatcgtgaatttacacaactaatatcgggtgtctcactcaccattcgtttcatttttaaggcggcattgtaaagtcttcgtcaaaatgtaaaccataaaatgagtttacgaactgaaaagatttctaaaaatgattgaataaagtctaaaatctcatattatattccaaaataaagagaatattttaaaacccacacccgaccggttcaccagatcataggttaatagtgagtttttgtgggtttt

SEQ ID NO: 170228 - DNA, 388 bp, Arabidopsis thaliana nossen
cttccggccaaattttcttggcgggagatgagagggaaaaatcagagaagtcatgggttactctgtcaatatcttgcctcttcatcgacaagcgctcgttctcctccattcttcgtttgttcaacggcaagtgaaagctttgagcagagacaataataaaattctggagaagttaggagaagcgacatgtatagaagaaaaattggtatttctcagcttctctagaggaatccagaagtctgaaagaataaaactctctttcatgaatttttcggttttgtttttggtatagagatttccggtttggcttataccaacccaacatttccatatttgtttttcttttttttttggacaaatttaatactttcattaaaattaagcctca

SEQ ID NO: 170229 - DNA, 373 bp, Arabidopsis thaliana nossen
aataactccagcaacacaatccattatccatgaaagttagtttttgaatatcagtgttcatactataatatagaagcgatacctagaaatactacttgtaaatttgaaatacactagtttacaccggccttttactctagcactcaaaccaatataaacaacattaaatggtcaaaaaaatatatttcaaagttgagacttaaaaccgaagtattgtactctcatttactaccagattattaaagcgaggtaattaactaaaagtaataaacaaaaacagaaacttgtgtctaaacatattgtagatgacctaatttgaccagtgatgagaaaacggcatgtttatatattgcccctttctatttatatactc

SEQ ID NO: 170230 - DNA, 377 bp, Arabidopsis thaliana nossen
cttggatattattaaggcccgcaataaaccaatagagcctccaaagaaacctgaaaaggcttcttttgtcttgccctcaattccctcgctgtccggagatatattattcaaggcaaatgactctgaggctgatggggagaatgaggaaaataataaaaaggaccagaatagcatgaagaactttgatgcattggaatctccattctcaaaacatctcaagtcttcatgggattcaaaacactttttagattttaccaactacatgaagagtttatccccgtcagctctcgacatggagcttcggatgcttgaaatcatagatgaagatgttgaagaagagcttatcaaaagacctgagtttatattgattgggcaac

SEQ ID NO: 170231 - DNA, 239 bp, Arabidopsis thaliana nossen; identical to SEQ ID NO: 130248

SEQ ID NO: 170232 - DNA, 345 bp, Arabidopsis thaliana nossen
ctcatcaaagtctaatatcacaaagaaagagtttttttaactagcttagctcaaagtgtttgcttaagacaagaagaacatggcgtcttaccagaaccgtccaggaggtcaggccactgacgagtacggaaacccgatccagcagcagtatgacgagtacggaaatccgatgggaggaggaggatacggaactggtggtggtggaggagctacaggtggccaaggatacggaacaggtggccaagggtacggatcaggtggccaagggtacggaaccggtggccaaggatacggaaccgggaccgggactgaaggctttggaactggcggaggagctaggcacca

SEQ ID NO: 170233 - DNA, 385 bp, Arabidopsis thaliana nossen
  unsure (1)..(385): unsure at all n locations
tatcatcaaacgttacgttctcgttttctcaaattccaaacaataccaagaaacctctacttgaaaagagaggattatcgccgcgtgtgtgcctaagagcgatggcgtctgagaaacaaaaacaacatgcacaacctggcaaagaacatgtcatggaatcaagcccacaattctctagctcagattaccaaccttccaacaagcttcgtggtaaggtggcgttgataactggtggagactctgggattggtcgagccgtgggatactgttttgcatccgaaggagctactgnggctttcacttacgtgaagggtcaagaagaaaaagatgcacaagagaccctacaaatgttnaaggaggtcaaaacctcggactccaaggaacc

SEQ ID NO: 170234 - DNA, 349 bp, Arabidopsis thaliana nossen
tgcaaatactgcgagaataagttcacgagcgaaattgctggagagtacaatgtcaattttttttgcagtggcacatctaaaaaggagttcctcctgatcaacaatcagcaggacgcatcatccttgtcgacaacaatctttgctgccacaaacaagtgggtattattcagccagtgttattttttttgatcaacaagaattccgcccacaaccataatatattatcagtgcggaaagaaaggccacaccccatgtttgtgttgtcagaataattttgttttaaaagaattacctaaaagaaactggttttgctccatggactgtacgaggatcaactccacattacaaa

SEQ ID NO: 170235 - DNA, 377 bp, Arabidopsis thaliana nossen
aaaaaaagatagagatggagaatcacacgaccatgaaagtttcatctcttaattgtatcgatctagccaacgacgatcttaatcattctgttgtttccctcaaacaggcatgtttggattgtggatttttctatgtgatcaatcatgggataagcgaagagttcatggacgatgttttcgagcagagcaagaagctttttgctcttcctttagaagaaaagatgaaagtgttgagaaacgaaaagcatcgaggctatacacctgttcttgatgaacttttagatcccaagaatcaaatcaatggggatcacaaagagggttattacattggaattgaagttcctaaagatgatcctcattgggataagccattctat

SEQ ID NO: 170236 - DNA, 339 bp, Arabidopsis thaliana nossen
caccgtgtcatagattttcagtacactataaagtacatatactattgggggtgcttaggtcgtgccatggtactatttaacataacatatgaattttaaatgcctctctatgtttaaccattttaggatgccaagaagtgcaataagagtggtgaaggcaaacacgaaaatacgaagatcatgacgaaccacttggtagtctaaagataaaagcaaggattgaagtctaaactgatacttttattatgatatgaagtttatgaaacgattttggtttttttttgttctcgccttttcctaaatttttgttcttcactattctaagttttagataaattt

SEQ ID NO: 170237 - DNA, 373 bp, Arabidopsis thaliana nossen
ctctatgttgtagttcttgaacagttggctctcttttcaagaatcgtggccgttgacctccgtgcctgtgcgatcaacttcccattcttttaaatgacgagagattcatcaaggaacagctcattaaagccatggcctcgaaagaattttctttttccttctgttgtgattgtcattgttgggataatcgtggcgtttacttatcagtccaagttgaaaccacctccgccgaagctatgtggctcctccggtggtccaccgatcacagcgccgcggataaagcttcaagatgggaggtatttggcttacaaagagcatggacttccaagagagaaagctaaccgcaaaatcgtcttcatccatggatccgatt

SEQ ID NO: 170238 - DNA, 376 bp, Arabidopsis thaliana nossen
agcgaactttatgatcctagttgaggatatttagtgaatgatactgttttggttgaagctgaagtcgctgtacgtaaggttcttgattactggtcatatgactctaaaaaagagactggttttgttggactcaagaaccaaggtgcaacatgctacatgaattctctcctacagacactataccacataccttacttcagaaaggctgtataccacatgccaacaactgagaatgatgcacccacagcaagtataccgttggctctccaaagtttgttttacaagctccaatacaatgacactagtgttgcaacaaaagagctgacaaagtcgtttggttgggatacatatgattccttcatgcagcatgatgtgc

SEQ ID NO: 170239 - DNA, 375 bp, Arabidopsis thaliana nossen
gctctgggagcttatttcgctccttcatccggtcgtggtaccccttcagccactcagccacctggatcagctcaaccaactggatcagctggtgctaagaaactagaagcaaaaggtggtaacgtgggaaatccatgggacgatggtcctcatgaaggtgtgaggaaagtgtatataggtcagggtgattctggtgtatcatacgtcaagtttgtctacgacaaggactctaaggaggtccccggaaatgatcatgggaaaagaacactacttgcacctgaagagttccttcttgaatatccaaacgaatatataacatcggtggagcttaactatgacaaaatatttggaactgaaggtgaaatcataacgatg

SEQ ID NO: 170240 - DNA, 378 bp, Arabidopsis thaliana nossen
atttaaacatttatcttgtgacgtttcacataacaagatatatctacaataaccccaagaaatttaacagaatgaaagtaattacttccctaatctcttctattttgcttaaattcatccacaaagacttccatgagatttatgcaagaatgtccctcctcgatcggtttcttcttcttatcgtgcatggagtggataagatggttccatggcataagcttccagtattcttggggttaacctatcttgaagtacgaagacatcttcaccaacaatacaatcttctcaacgtcggtcaaactccgactgggatccggtttgatcctgctaattatccgtaccggactgctgacggaaaattcaatgatccctttaatg

SEQ ID NO: 170241 - DNA, 380 bp, Arabidopsis thaliana nossen
ctttcgtctctctttctacggttcaaacattaaaaagatagatggagaagaggagctctattaaaaacagaggagtacttagattaccaccagggttccgatttcacccgaccgatgaagagctagtggttcaatatttacgtcgaaaagtaaccggtttacccttaccagcttctgtaataccggaaaccgatgtttgtaaatccgatccatgggatttaccaggtgattgtgaatcagagatgtatttttttagcacgagggaagctaaatacccgaacggaaaccggtcgaaccggtctaccggttcgggttattggaaagcgactggtctcgataagcagatcggtaagaagaagcttgtcgtggggatgaagaaa

SEQ ID NO: 170242 - DNA, 378 bp, Arabidopsis thaliana nossen
atcgactggcttgaaactttccggaaactgcgtttgggtttctcaaactcaaaagatgtctgtactgaggaactttcaaagtttgaagcaggaactttacggacactcttcttgggtttagcagactcagcctcgactaaaagcctgttctgaggttttctgcttatcgttttcttcggttgaggaactggtttccagaagcatgaggctgaccagttctctaaccagatcaagtttgagtttggattggatgtatcatatgcgtgtacaggtagcacttttggtgatgaagcgagaagctgtaaacaaaattatccatcaagatctttaaataaaattagagactccatagtataaaagagatattggatacagtga

SEQ ID NO: 170243 - DNA, 364 bp, Arabidopsis thaliana nossen
cgtcggctgtcagcggactgctcgagctgcttccgcggcgagagcgggtcgccgcgtgccggccgggggacggactgggaacggctctctcgggagctttccccgggcgtcgaacagtcagctcagaactggtacggacaagtgggaaatgttggggtaaaccagaaaagtttgggtagagccggatcgaaatgttggctaggtaaacgtcctgtagtaagaggagtagttatgaaccctgtcgaccatccccatggaggtggtgaagggagggctccaattggtagaaaaaaacccgtaaccccctggggttatcctgcacttggaagaagaactagaaaaagggaaaaatatagtgagactt

SEQ ID NO: 170244 - DNA, 402 bp, Arabidopsis thaliana nossen
tttcaatataatatgtatgaaattgaatataaatatttctaattatgactggttactcagtagaaagttgtcttaaatctatttttcacccgttataatattttttcatgtattgaacagtttatattcgtttttaaaaattcaaattgtggcatatgcgaaataactctaattatttttttataacgatgatattattttcccgcaaaaataaaatcatataaagatgagaagtgaactataataattaataaaaaattaatatgataatttagatatcagatatagtttgttgattttaatttgttatttttttaaaaattaataatgtatttcgtttttttaattaaattaaattaattaaaatttagatatcaaatgttatatgttgattttgattgg

SEQ ID NO: 170245 - DNA, 402 bp, Arabidopsis thaliana nossen
  unsure (1)..(402): unsure at all n locations
aacgatttgtcaacagaaccaaatgggaaaagaagctttattaaactccggtctaattttacacatttatgatattcgtgatctaccaaccaacctatcctttcgtctttttttttttttattgtgaaaactacaaatgcaaaaacaaaactgcatattaataagaaatgttttggatatcatgattctctaaaaacatgaattactccatataactgataataaatttaatcatcgccttcacatctctatttgactatcaaccatataattcgctctaattttctttagtgaaaggtttgggggggtgaatatccatgaaattcatatggatagactntaatggaacataaaataaataaataacgaagtggggattagtagtagtatgtggagaaaagt

SEQ ID NO: 170246 - DNA, 408 bp, Arabidopsis thaliana nossen
gcgtggaggtcagtcagtgacccttgtgggaaaaagcttggagaggtttgttgaccaggatgcagagagatcgcttctgaacgatttgcatatacttgatttagataccatgacctgggaggaaattgatgccgtgggttctcctccgactccaaggtctgatcatgctgctgcagtgcacgctgagcgttaccttctaatctttggtggaggatcacatgcaacttgttttgatgatctgcacgtccttgatctgcaaactatggaatggtcaagacatacacaacaaggtgacgcaccaactccacgtgctggacacgctggtgtgacgattggggaaaattggtatattgttggtggtggagataacaaaagcggggcatctaaaacctgtgtattaaatatgtc

SEQ ID NO: 170247 - DNA, 391 bp, Arabidopsis thaliana nossen
  unsure (1)..(391): unsure at all n locations
caaaccacttgcaaaattcgaatcagatcttctcttcaatcgaggaaaaagaaaggattggctgtagattgnngaatcgaagatgtcgacaagggaagagaatgtttacatggcgaaattagccgaacaagctgaacgttacgaagaaatggttgaattcatggagaaagttgcgaaaactgttgatgttgaggaactttcagttgaagagaggaatcttctctctgttgcttacaagaacgtgattggagcgagaagagcttcgtggagaatcatttcttcgattgagcagaaagaagagagcaaagggaacgaagatcatgttgctattatcaaggattacagaagaaagattgaatccgagcttagcaaaatctgtgatgggattttg

SEQ ID NO: 170248 - DNA, 399 bp, Arabidopsis thaliana nossen
tagacacattcacatcagacttttgatataataattttcaaatcttgtaggccaacctcacatataactggagcacttttcgcattgaaatcacgcaaagccgcccttttaatgtgctgcaagaatgttaaggttgttactaacaaaatacatagtaagtagatattgtaaggaaggcgctttgcttacttctctggtagatgtcttatgcaaggaataaactgcctttgaggcgacctgcgtagccaaacatcgaatgtaaacatgtaaccgagtgatacgaaattagaaaacagtaaaaagagatattcttttctggtgtttaccttcattgccgcagagagaaactccatgtcagcttctttcttccgtgtaccaaatggagggttcattacaacc

SEQ ID NO: 170249 - DNA, 410 bp, Arabidopsis thaliana nossen
ggcctcctggaacaggaaaatcgtatttggctaaagctgttgccactgaggctgtctctaccttttttagcgtgtcttcatcagaccttgtctcgaagtggatgggtgaaagtgagaagctagtatcaaaccttttcgagatggcccgtgaaagtgctccctcgattatttttgttgatgagatagattctttgtgtggtacacgtggagaaggaaacgagagtgaagcttcaagacgtatcaaaacagagcttctagtgcagatgcagggtgttggacacaatgatgagaaagtacttgtacttgcagcaaccaatacaccctatgctcttgatcaagctatccggcgacgttttgacaagcgtatctatattcctctcccagaggccaaggctcggcagcacatgttc

SEQ ID NO: 170250 - DNA, 401 bp, Arabidopsis thaliana nossen
  unsure (1)..(401): unsure at all n locations
gaatattagaaggtgagaccagctattttcatgccacaaatcangnncatgaatgtttaccaaatattaataaggtccccanntnaccctnnacttttctatattatctcgtaaccccactcatacgttttagaagatttttcacacaacttttataagttgatttttaaagaaaaatattgtttattttttctatcaataaatcttcgtaagactttccaataagagatcatttttcttattcctctcgtgacagaagcaaatcatcccatccacacaaagtcacaatccaatacacaagcccaccaatagagactccatctcctcactaaattcatctacaatagtaattcattattgctattatgttactataattgctttaaaatagtttcctatta

SEQ ID NO: 170251 - DNA, 406 bp, Arabidopsis thaliana nossen
cttcactaattccacatactcagagagaaatggcaaccgaaaccgtattatccgcggcggtgagcaatggcaaaagcaaaggatgttgcaagtccggtccaggttacgcgacgcctctcgccgccatggccggtccacgggaaaagctcatctatgtcactgccctttactccggaacggggcgagacaaaccggactacttggcaacggtggatgtggatccaagctcacccacattttcaagcgtcattcacagactaaaaatgccatatataggagatgagcttcaccacactggttggaactcttgcagctcttgccatggtgatgcttctgctgatagacgttaccttgtcttaccaggcttaatttctggtcgcatctatgcaatcgacacaaagaccga

SEQ ID NO: 170252 - DNA, 397 bp, Arabidopsis thaliana nossen
ctggatctgaagaatctccatgactattctcatagatcgccactctgatgagaacgatgcaggagatgagattgtagagaagaatcaggggaatggtaaagaggaagaaacagagttggtgttagatgcaggttttgaggctcctcacaccaactcctttggtcacacctttagggattatgatgctgagagtgaaaggaggagaggtgtggaggaattttacagagtcaatcacattggccaaaccgttgatttcgtgaggaagatgagagaagaatacgggaagctaaaccgtactgagatgagcatttgggaatgttgtgagcttctgaatgagtttatcgacgagagtgatcctgatttggacgaacctcagatcgagcatttgcttcaaaca

SEQ ID NO: 170253 - DNA, 409 bp, Arabidopsis thaliana nossen
gcgtttggattcgacgtttgccttatccgttcagctcatcttcttgttcgtcttcgtcaccggtgaatgagtttcccagaatccgaaattcctaggaagagaacataacaatggcgcagatggttgcgatgcccgtagcgcactcgctctcactcatttgcaattgggcaaaatccaatcctctctctcgcaacacccttgccctcccagcttcaaacactcccaataagcagagtctaagcatcagatgtgctcgtgttggtggagtggagattccggctaataagagaattgagtactctcttcagtacattcatgggattggtcgaactagggctcgtcagattcttggtgatcttcagatggagaacaagattacttaaaacatggcttgaggaaaactcatcat

SEQ ID NO: 170254 - DNA, 367 bp, Arabidopsis thaliana nossen
  unsure (1)..(367): unsure at all n locations
tccgcacccatacaagagtcacgggtttcttttaagctncaactatatatnagttatgtattttccaaattgattagacaataatgcaacaagagtttcattgaaaatttcaagaaccctagttaataacgataatgggttcgagagttttggcttccttctttgttttcttaatcttcacggtcatcacattgcctcccacgatccaagcttgcactccttgtactcgtcctcatcctccggttccgaaacctccacaacacggcagtggtggaagtggtggtagcaaagcccctccacatcacggtggaaaaagtggtggtaaacccccaccccactgtggaaaaagtggaggaccgccgcatca

SEQ ID NO: 170255 - DNA, 198 bp, Arabidopsis thaliana nossen
cttagaagcggtaaagaattacccacaaaagagagtccgaaccagatcactgaggacagtgtggatcaagatggggaggatttctgtcaaaatggaaattccgctgaaaaagcaatagaagagcctatactccaccaacctactcgaccactagctcctgcagcatctcctcttgttgaaaaaccagttgccgccaaa

SEQ ID NO: 170256 - DNA, 222 bp, Arabidopsis thaliana nossen
tcgggattgatctcaaacactcttctccctttcatgtagtcgaggcttagtgtgtcaccaggtgatggagccttcattagcctgtccagataacatattctgtgttagttcaccaggagcaaaaaaggagaacggaaatccttgcttaagaaaaaggtcagatcttacctctccatattggctgaccaaccaaatttaccagatacaagaacacagggggaa

SEQ ID NO: 170257 - DNA, 366 bp, Arabidopsis thaliana nossen
  unsure (1)..(366): unsure at all n locations
cggacgcgtgggtttagctttttcacctccattttcttcgaccagtgctggttccatagactttcgagcgcgcaccttaangaggccatttagcttacaagcaaaatggtgaagatttgctgcattggagctggatatgtcggtgtttcaaccatggctgtcattgatctaaagtgtccatctgttgaagtaactgttgctgatatctctacgccaaggatcaatgcctgaaacagtgatcatttaccgatctatgaccctgatcttaatgatgtcgttaagcactaccgtgtaaagaatctcttcttcaacacctatgtttaaaaacatgtgaaagaagctgacattgtttttgtgtctagcaac

SEQ ID NO: 170258 - DNA, 401 bp, Arabidopsis thaliana nossen
  unsure (1)..(401): unsure at all n locations
gaannccgggggcgttcccacgcgtccggaacccgttaaccggcgacccttatacaatgacccggtccancaannaccgtctgttcctctaagcctttgtactctccctctcttcttctctcctcgccaacgatcccaaaccaatccgccgtgaggtctacgaaagaggtaagatatactacatcagccatcgttacacgcctgagattccagcttgggaatcttcggaaggatcgagaaagacgttcctgctattagccaccaatattaaaaatagatcattccctaacacatcgtagataaaactatctgctcactcttaaactcacttagatgctccaggtcacttcctcggataatcattacgatgctagttttgatactgattccctttatctcca

SEQ ID NO: 170259 - DNA, 253 bp, Arabidopsis thaliana nossen
cttggcaaagagattcggaaggtcgatcccatagccgtgtttgccttatgttgtatgtaccttggttaagacggtaatcaaatataccctcacaaactcgaaatgcatcaccatttgacacttccaaaccaaaaggataaagaaaattagctaaacagcgtaagaaggatcacaaaatattctaatttcatgaacacattttttttatttcatgttaagaaaatgagccactatatacagaggaaattctatt

SEQ ID NO: 170260 - DNA, 330 bp, Arabidopsis thaliana nossen
  unsure (1)..(330): unsure at all n locations
tttatcttcttaccatnnattttccgaaaaaataaaaatctgagggaattcgaggaaacgccattaacgagatctagcacaaactcgtagtgtggtgtagaagaagacaaaagcaaggagcttcttaataaaaccctagagaggtatttgtttctccaatttcaaaagacgagacgtgaagaagacgatcgaagatgaacattttcagattagctggtgatatgactcacctagccagtgttcttgtcttgcttctcaagatccacaccatcaaattctgcgctggtatgtacattttcctctaattcgtctctgaaattaactgaaatg

SEQ ID NO: 170261 - DNA, 369 bp, Arabidopsis thaliana nossen
ttttattttctccttatcaagtttcctctgatcagtcaaatacccatcattcaatcaaatccgtaaacgctcccaaaaaaagatcagcttccaatatttttccccttcttacaaaaaagatgtctatgtcgtctatgtcctccccttcctcagctgtttgttcaccggaccacttctctccttccgaccatctctgctatgtccaatgcaacttttgccaaaccatccttgcggttaatgttccttacacaagcttgttcaagaccgtaactgtccgatgtggttgctgtaccaatctcctttcggtgaacatgagatcatatgttctcccagcttctaaccagcttcatctccaactcggtccttact

SEQ ID NO: 170262 - DNA, 404 bp, Arabidopsis thaliana nossen
  unsure (1)..(404): unsure at all n locations
atggcggaacactcagttcgatgaatgctttgattgaaagttgagtcaggtgctctgagacgtatgcctgtttggctggntcggatgatgttggaatgaatcttcttgctagtgttgctgctgatgagatgtctaaatcgcctgttgcatctccctcagtatctcagcctccaaattccgtgatgaatgaaaattctactgtagggaacaatacaaagctaatggcttcggatggcttgcctcacgagcaacatcaagctgtttgtacctctgtcagtactgagcaaggtgagcaacatgttagcagtagtggcacacagttggagtcagaaataaaaaatgaatctaagaccggagatcgtgataagagctcgaattcaaacactgaagatctgcaaaggttg

SEQ ID NO: 170263 - DNA, 401 bp, Arabidopsis thaliana nossen
ggtctgaccattttagcacacgagccggaagaatcagcactcttaactggcttaatctgcctgttcgacgtctagtcagacttaacgcccttagaggttatctctacagcggaggaatggtgttgccacaatggacggcaaacgcgcacacggtgctatacgtcacaggaggtcaagccaagatacaagtggtggacgacaatggtcagtcggtgttcaatgagcaagtgggacaaggccaaatcattgtgattccacaaggctttgcagtttcaaaaacggctggtgaaacgggtttcgagtggatatcattcaagacaaacgataacgcttacattaacacactgagcggccaaacatcgtacttgagagcagttccagtggatgtgatcaaagcgtca

SEQ ID NO: 170264 - DNA, 402 bp, Arabidopsis thaliana nossen
tattaattaaaaactttttgtagtttagtgtaaaataacataagtagtagcttcaatatataatgatggggctaataaatcaaatatactcattcgatttgagaataatattttcaaaagagaaattatatagattcttataaatatataaattatatatttatgaaagttttgtaaaagtaaaagtaaatatgggttaatttgcaaacttttataaataaaaggtggtaatgcaaaaataaaaatcgaatctattaatatttatttttagaggaaaacatagagaaataaattgaaataaaaacaacttatttataaagttcctctatgtagaaacaaaaatacatatgaacctgcatattttatatttttatctcattgacatcgtgcatggcatcttaa

SEQ ID NO: 170265 - DNA, 402 bp, Arabidopsis thaliana nossen
  unsure (1)..(402): unsure at all n locations
gatggagagaatggagagagactcattggagacggtggctccatatgctgtggtgacttatcaccgtcgtgtgcgtggngacttggatgacacacttcctaaaccttatttgccgagagcactacaagcacctgacatggaacacccacatggaacaccagatcatagacataatggccttagtgttcttcagcaacatgtcgctttcttcgatttggacaataatggcatcatttatccctttgaaaccttctctgggttccggttactcggtttcaatttactcgcgtcgcttatcttggctgctggtatcaacatagctcttagctatgctactctcccgggatggttaccgtctccgttcttccctatatatattcacaacattcacaaggcaaaaca

SEQ ID NO: 170266 - DNA, 434 bp, Arabidopsis thaliana nossen
  unsure (1)..(434): unsure at all n locations
cgggggcggtcccacgcgntccgaagttatcagtctctaataatttctctttgttagattctcaggaagctanggtgtgtggtagaagaagatgtttgatgaggatnctgacnatgaacgcgagattcctggaatgtgtttcttcgcgtaagtaagtagagatctctctacaatctcatgactcaagacactcgacttcatggataagatcacacgtctgaagattggaaaactcaactccgttagatcttcgaaccaaagctctgttttcgaatctttgctctgtttcttccggtcaacggtgaatatacctccgttgtttattggccaaccgtaaaacgacgacagatcggttgaggaagcttggaagacgatggagtctatacactgttccgttatacagagtgattcagctaaagacgagactgattcac

SEQ ID NO: 170267 - DNA, 389 bp, Arabidopsis thaliana nossen
cggcggataaaattgaaatggagctcaacttgaggacttcctccgctgctgctgcggttttgaggagacaagcttctcctctgcttcacaagcagcaagtgctcggcgtcagctttgcttccgcgctcaaacctggaggaggagctcttcgatttccttcccgccgtccgcttcctcgtcccatcacttgctccgcctctccatcaactgccgaaccagcctccgtagaggtgaagaagaagcagttggataggagggataacgtgaggaatatcgcaatcgttgcacatgttgatcatggcaaaactactttggttgattctatgcttaggcaagctaaggttttccgagataaccaaatcatgcaagagaggatcatggactcaaat

SEQ ID NO: 170268 - DNA, 399 bp, Arabidopsis thaliana nossen
gaggacttgaatacggaagcttgagagaatgaaagcgatcgtgatctctgtgccagatactctccaaagacttggcctttataatccaccacctggctcaagcccttaccttggtctcgaatgttctgggaccattgaatccgtcggtaaaggcgtctctcgatggaaagtcggagaccaggtgtgtgctcttctttctggaggaggttatgcagagaaagtttctgttcctgctggacaaattttcccaattcccgctggtatctctctaaaggatgcagcggctttccctgaagtggcatgcactgtttggtctactgtcttcatgatgggccgtctctctgttggtgaatcattcttgattcatggaggttcaagtgggattgggacatttgctat

SEQ ID NO: 170269 - DNA, 241 bp, Arabidopsis thaliana nossen
tgaactttttgtccttcaagttcccatggatgttggacaaacttaaggctgagcgtgagcgtggtatcaccattgacattgctctctggaagttcgagaccaccaagtactactgcactgtcattgatgctcctgggcatcgtgatttcatcaagaacatgatcactggttcctcccaggctgattgtgctgtccttatcatcgactccaccactggtgggtttgaggctggtttttccaa

SEQ ID NO: 170270 - DNA, 403 bp, Arabidopsis thaliana nossen
gcagcaggaagagcaaggagtccggtgatccagctattagagacgaagcgggaacccgattttccaaaggtggatgcatactgagggacttttccagtcgcatgcaccacacttgctgcaccaatggctcggccttctgaaaacatataataatcaacgtatcagcaaaatgtaaacgaaacacggtttgtgacttctgttcatatgtgaataataaaaccaacagatcttaaatatcctctttatattaatgggaaaatcaataagaagtcttatgtaggcaaagcaacgatgagacaaaaaccggaatatgagagtctaaatttgtgtatccaatagtttcacataaaatgtgttagcaagaagtattctctcacaagaaacaaacaatttattttcttga

SEQ ID NO: 170271 - DNA, 402 bp, Arabidopsis thaliana nossen
aatggacccaaggttccaggagagccaacgaagaccggaacctccatgggtgacacggcagcttcagccgtacaaagcttcgctccgattaaccaaatccaccaacatctctgcgcgtttcatttctatgcatatgacatgacccgacaagtggaggcacaccatttctgtggtcacatcaacgaagacatgcgccagtgtctgatctacgacggtcctgatgccaacgctcgtctgatcggtctggagtacattgtgacagagaagctctttatgacattgcctgacgatgagaagaagctttggcacactcacgagtgggaagttaaaggaggcttcttgttcatgcccggtgttcccgaagctattcaacggcaagatctcgaaaaagtcgccaagact

SEQ ID NO: 170272 - DNA, 402 bp, Arabidopsis thaliana nossen
aatggctttcccgcgatttctttctctcctcgccgtcgacactctgtgtgttttcctcaccatttgtgaggcttcctctcgctctctatccactccacctaaaacgaacgtactcgacgtcgtttcatctctccagcaaacacaaactatcctctcactcgacccgactcgttcctcactcaccaccaccaaacccgaatccctatccgacccggttttcttcaattcatcttcaccactatctctagagcttcactctcgagacactttcgtcgcgtcacagcacaaagactacaaaagcttaacactcagtcgactcgagcgcgactcatcccgagtcgccggaatcgtcgcgaagatccgtttcgccgtcgaaagagtcgatagatccgatctcaaacc

SEQ ID NO: 170273 - DNA, 384 bp, Arabidopsis thaliana nossen
  unsure (1)..(384): unsure at all n locations
tcccacgcatccgcttgaaccttgttcctacatgattcttatcaattcgatcaggcacccnatgtttattttcatagtttttatgtaagacaacacnaanaaaccattgntcaactcttttacaacatgaaaaaacctaaaattctgcccttctatccatattttttttttacataagccttaaaattccactccattcatgatttttatcctcacaatcactagccaatatgcttttcttgcatgcctttcttcattcatgtatctatacttttttattctatgactataggtacatcatcaatccatcctttacttattattttaatctttaatgcattattaattacattttttttttttttcttctaaaaaattatctta

SEQ ID NO: 170274 - DNA, 407 bp, Arabidopsis thaliana nossen
cagccgtctgtcttacctccagaagtcgacgacaacaatggcaccgaagtggggagttaaagtggcttcggagaagaagccggagaaagttaccaacccattgtttgagagacgccctaagcaattcggtattggtggcgctttgcctcctaagaaggatctttctcgttacatcaaatggcctaagtcaatccgtcttcaaaggcagaagcgtatccttaagcagaggttgaaggttcctccagctcttaaccagttcaccaagacccttgataagaatctcgccaccagcctcttcaagattcttctgaagtataggccagaggacaaagccgcaaagaaggaacgccttttgaacaaggctcaagctgaggcagaaggaaagcctgctgaatccaagaagccca

SEQ ID NO: 170275 - DNA, 399 bp, Arabidopsis thaliana nossen
  unsure (1)..(399): unsure at all n locations
aaaaaaaagaagggcataaaaataagagcttcaagaacctgcaaagggaataatcggttcgcggcttcttgtgctttgccnagaccctaagcttgattcgatctaactctggcttatcaattctgatcttgtcgtttcgcaatggtggtctgcaaatgcaaaaaggctaccaggctgtattgctttgttcacaaggcccctgtttgcggcgaatgcatttgtttcccggagcatcaaacttgtgtggtccggacttattcagaatgggtgatagatggagagtatgatcagccaaagtgttgtcaatgccaagcaacatttgatgagggggcaggtcatcaagtcactcggttgggttgcttgcatgctatacatacaagttgcctggtttcgcttatc

SEQ ID NO: 170276 - DNA, 393 bp, Arabidopsis thaliana nossen
  unsure (1)..(393): unsure at all n locations
gaaacaagggcgtgcatgatgacaactttgtggtcagtgttgtctgtatggcgcttggcgggagcggccgtggccgtgttctggagaaacctaccgattccggcagatgacaaggatgacttcaaagagtaaatgaagtaggaaaggcggtttgcatcttctccaaacgatgtgattgttttgttgtaatgttagtaaacattacaaaatttgtgttgaaaaacatgaaacaaaatgtgtttaagagacatagaaacaagggcgtgcatgatgacaactttgtggtcaaccttttttttatttctcaattaatggacaaatcttttttggcaaaatataaaaataaaaaaaaaaaaaatcccctntttaaaaaaaatatataaatatataaaa

SEQ ID NO: 170277 - DNA, 381 bp, Arabidopsis thaliana nossen
cacacaaccgttttcatcggaagaagaacaagttggattgattttgcttgggatctcacatctttgatcggattaatctctctgtgaagtcgaagaacgaaaccctagttcccatggatctctcttcacgcttctcatcgatccttatccttctcttgatctccatctccatagcttcggctgagattcgtaaatcagagatccgatccgatgatcgaccaatcatccctttagacgaattcggtttcactcacagcggtcgtcttgagcttgacgcttccaaaatctggctttccaacaacaatcccgatctcgatctctccaaagtgggcttctttctctgcactaaaaacgcttgggttcatgtgatccaacaacttg

SEQ ID NO: 170278 - DNA, 404 bp, Arabidopsis thaliana nossen
cggacgcgtgggtttggatggttcccttaatgacgcagagttgaatgatgtccaggttcgctttctctggtagacactgattattgcattcctaatccttctataaatatgatgctgcaaatttggttaacaggtaaattgttttggtgccccacttgaccctgttgaacttatgggagttaagaaagtggtacaagaaaggcaaccagatggagtaactgaccttggtcttacacttccgggtttcctttttcttttctctctattcatcgagagaggtcgccctgagacagcatgggctatcctacggaaatgtggttacaatgattctttagaactccacgctgagttactacccgttccagctaagcagtctcctgatcaggtgtgtgttgttttaaata

SEQ ID NO: 170279 - DNA, 365 bp, Arabidopsis thaliana nossen
gaaagaaatggttaataatagattaccaagggaaataggtaaaagaaatgtccatccaagatttaatgggtgatccattcttagcctaggtaaagtccatcttgttgcgatagaaacgaacaaaaacaaataagttttagctaatgtaataaagataccaattgttgttccaaaaatttgatccctttgaaatagctccagaatagatatatacggaatagaaatattccaaccgcctaagtatagaactgttacaaataatgaggaaattaatagatttagataagaagcaacgtaaaataaaccaaattttatacctgaatattcagtttgataacctgctattaattcttcttccgcttctg

SEQ ID NO: 170280 - DNA, 404 bp, Arabidopsis thaliana nossen
cggttgatcacaaaccggatagggatgatgaagcggcgaggatagatggtgccggtgggaaagtaatggggtggaacggggctcgtgtatttggtgttctcgcaatgtcaagatccattggcgatagataccttaaaccgtcagtaatttcggatccagaagtgacttcagtgcggcgagtaaaagaagatgattgtctcatcttagcaagtgatggtctttgggatgtaatgacaaacgaagaagtgtgcgatttggctcggaaacggattttactatggcataagaagaacgcgatggccggagaggctttgcttccggcggagaaaagaggagaaggaaaagatcctgcagcaatgtccgcggcagagtatttgtcgaagatggctttgcaaaaaggaagc

SEQ ID NO: 170281 - DNA, 401 bp, Arabidopsis thaliana nossen
gacgagcacgaggatgatttcaccaaaatgtgccgcttctgatgcagctgtattgataagcgctaaagaggagatcaaagttcttctccggactaagttttgccatcccatcttggttagattggggtggcacgatgctggtacttataacaagaatattgaggagtggccactgagaggtggagctaatggaagtcttaggtttgaggctgagcttaagcatgctgcaaatgctggtctgcttaatgctttaaagctcattcagcctctcaaagacaagtatcctaacatctcttatgcggacttattccagttagctagtgccacagcaatagaggaggctggtggtcctgatatcccgatgaaatatgggagagttgatgttgtagcacctgaacagt

SEQ ID NO: 170282 - DNA, 404 bp, Arabidopsis thaliana nossen
aagaacgtatactttttactccaaatttcaattttaagatttaactggctgttgtagagggagccaatcattggggctaatgagatagagaaagagaatgtgttttcaacggattctttttgttaaagaatataaatatatattaatcataatgaggcttttacacacaggtcataattgaatgttaattagggctgtaattaagatataaaaatagcatatgaaaagaacataatgaaccaaaagcggctatatatgattcctccaaagaggagtcaacatgaagctgaatttgtatctggtggtccttttcatctcctttgatgttgtttgcagtggatgattccgcacagaggggttgatctcaagttttcgtgttagttagcgagaaactggttagtgag

SEQ ID NO: 170283 - DNA, 410 bp, Arabidopsis thaliana nossen
  unsure (1)..(410): unsure at all n locations
tcctacttcaatgggtttaccaaagaagtcctctctaccagtttcaacgtgcgggaagaattgctagggagagtggttacnagatcaaaagaaattggtcaagggattatccgaagaatttctccagaccaaatcaaggaacttgctgagcacgctacatctccttcaaacaaacacaaagccaaaaaagaaaaggaggaagacaaagacctaagaacgttgtggactcctttcaatctctttgcaatagatccaatctactccaacgactttggtcatttccacgaggcacatcctaagaattataatcaactgcaagaccttcacatagccgccgcttgggctaacatgacacatggatccttgttccttcctcattttaactctaagaccacatttgtaacgtttgt

SEQ ID NO: 170284 - DNA, 383 bp, Arabidopsis thaliana nossen
ccaaatcatgatccaaaattcacataactgaaggatcaacctaaccgaaggcaatattcataaatggaagcgcaagatatagaaattgtggattcatcagatcaaattgatggagatttcacctgaatagctaagaagcctttgtaattaaggagacaatgagagaacgagatacaagcaggatcacgaacacgagcagcgcgtagatctgcgacggtggcgttacgaagagaaggatcggaggaaaaagtgtttaagaacagatcgtataaaagtgtggataaaagcgttgaggaacaaagcttgtttcctagatgaaacgagatagatcgttcaagagacgaatgagaaaaaatcggcgaatatagatagctagcttacgc

SEQ ID NO: 170285 - DNA, 393 bp, Arabidopsis thaliana nossen
  unsure (1)..(393): unsure at all n locations
gcctgaagtacccctcgttgctccatcggtgaactattagcggaagaacgtggtattagacatagggatagagaggctnnnaancaacangcgaggaatgaccaatgggcggttcgtgttgcacactatgttccttggcttactcattggtagaactcccagagctggttccctggatcaagtgtcgtggctcgcaatctcagtatgttgtccaaagcagacaaagagatcatgtttaagctcagcgctgcaaggagccaacatgaggcacaaataaggcaacaaggaacacacgagacattgcaccgtgacatgattgttggatttggaacttgggagttcgatccaatggagctcgaaaatctgttcccgaacaatgaaagatcggtgcac

SEQ ID NO: 170286 - DNA, 406 bp, Arabidopsis thaliana nossen
ctcttcctctcatcgtctcctccatcggcatcaactatggccaggtcgcgtagtaccttcctgcggtaggagcgtcatccctctcctcaagtctgtgggagctacaaaagtcaagctctatgacgccgatccacaagccctacgtgccttcgccggctccggcttcgagctcaccgtggccctcggtaacgagtacctggctcagatgagcgaccctattaaagcccaaggctgggtgaaggagaacgtccaagcttacctcccaaacaccaagatcgtggccatcgtagtgggaaacgaagtcctcacctcaaaccagtcagccctcacggcagccctcttcccggctatgcaaagcatccacggtgctctggtggattggggcctaaacaagcagatctttgtg

SEQ ID NO: 170287 - DNA, 443 bp, Arabidopsis thaliana nossen
acctgtcccggatttccgggggcgttcccacgcgtccgccatttgcaaaaaacttctctctgaatctcagtgagttctcataaaatgtgtgggatggtgagttttggcgtgtgggctctctttgctgctttactctcacagcagctctttgcttctgttgcttccgtaaggtttgaggatgccaaaacatactacttatctcctccctctggctcacatggaactcctccatcacacacgcctccttcttctaactgtggaagtccaccttacgacccttctccttcaactccttctcacccttcacctccatcacatactccaactccttccactccatcacacactccaactccacacactccatcacacacgccaactccacacacccctccttgtaactgtggaagtccacctttccaccctttcacgccttcacaccc

SEQ ID NO: 170288 - DNA, 376 bp, Arabidopsis thaliana nossen
  unsure (1)..(376): unsure at all n locations
atgacattgaggcggtggatcctgattactacaagaatttgaagcggctgttagagaatgacgtgagcgacatactcnacctcacatttagtatggacgcagatgaggaaaaacacattctttacgaaaagacagaggtgacggactacgagcttaaacctggaggacgaaacatacgggtaacagaagaaacaaaacatgaatatgttgaccttgtggccggccacatacttaccaatgctattcggcctcaaatcaacgctttcctcgaaagctttaatgaattaatacctcgtgagcttgtatcaattttcaatgataaagagcttgagcctctaatcagcgggttgcctgagattgattttgatgatccaaa

SEQ ID NO: 170289 - DNA, 397 bp, Arabidopsis thaliana nossen
caccaactctttataccagcctctgtaacgttcgatcatcttgtatttttgttcaaccactcattggtgtggagtttgttttacgaagaatcaactatggcgacgaagagaagcgttggaactttgaaggaagcggatctgaagggaaagagtgtgttcgtgagggttgatctcaacgttcctttggatgataactctaacatcaccgatgacaccaggattcgtgccgctgttcccaccatcaagtacttgatgggtaatggatctagggttgttctctgcagtcacttgggccgcccaaaaggtgttactcctaagtacagcttaaagcctcttgtgcccaaattgtctgaacttcttggtgttgaggttgtaatggcaaatgactctattggtg

SEQ ID NO: 170290 - DNA, 388 bp, Arabidopsis thaliana nossen
  unsure (1)..(388): unsure at all n locations
ccttggggaaagacaatttttaaatcgaacccatccggnnggtgatgtgcctatcactgttttgtgcggcggaaattaacggacgagagttagattcgaggttatggtctccggtgattgttgctggaggtgaatcgatggctgtggggaatgttgtggatcgggatttcaccggagatctgccggatgagtgtttagctcatgtgttccactttcttggagctggagatcggaagcgatgctctcttgtttgtaaacagtggttgctcgtcgacggtcagagtcgtcatcggttatctctagatgctaaggatgagatctcctctttccttacctctatgttcaatcgattcgattcggtgatgaagcttgctctccgatgtgatcg

SEQ ID NO: 170291 - DNA, 407 bp, Arabidopsis thaliana nossen
aaacaattggcatttgcataaacactttcaaaaacaagtaatcaaaagtggtttagaagcttgatgatggcgacgtcaggtacatacgtgacagaagttcctctgaaagggtcagcgaagaaccactacaagaggtggaagagcgaaaaccaactcttccctgacgccattggccatcatatccaaggtgtcaccgttcacgagggcgactgggactcccacggggccatcaagtcctggaactacacatgcgatgggaagcaagaggtgttcaaggagaagagggagttagacgaccagaagatggcggtgacgtttagagggctggatggtcatgtgatggagcagcttaaggtgtatgacgtcatcttccagttcgtccctaagtctcaagaaggttgcgtctg

SEQ ID NO: 170292 - DNA, 309 bp, Arabidopsis thaliana nossen
  unsure (1)..(309): unsure at all n locations
ccacgcgtcgcgtacatctcctaagttttcttttctgaattcgcagncncnancatttatatcgtatagagattggagggacaccccacancnnccaccaccgatatcgaacatttcacctcaaattttacagtctcgtgtgcctccgcctccttcttctcccccaccgttgcctctgtggggacgacggattcaggtgactactaaagcggacacaatcttgagaccgccttctcttacaccgccttcacatccttttgtgatcccatctgaaaacttaccagtgacttcgtctcctatagagactcc

SEQ ID NO: 170293 - DNA, 217 bp, Arabidopsis thaliana nossen
  unsure (1)..(217): unsure at all n locations
ggaggggcccccactcccaaaccanctnctgnacctcacaagtcgagggagtgtcttcctctgggggtgatcatcaggatctggttgaagtatgcttagaccaaccgcgaaggtatctctatcgtgacgcaaaggcagatccaaggtgatggcaaaggcaggactgacaagacgtaccctgctggcaacagggacctaagtagccatcccgaagacc

SEQ ID NO: 170294 - DNA, 389 bp, Arabidopsis thaliana nossen
  unsure (1)..(389): unsure at all n locations
atcagaatgaatatccatgatcctcaaaccatgaaagatgangaacgtggtttaaaaatagagcgtgggcggtccngcnnngcttgctgggaattggacacagctctgtgcaacatgcaagattatcagacctcttcgagctaagcactgttccacctgtgatcgttgtgtagagcaatttgatcaccattgtccttgggtatcaaattgtgttggaaaaaaaaacaagtgggaattttttctttttcttcttcttgaagttctagcgatgctgataactggtggcgtcactcttgcaagaatcttgagtgacccttcagctccatcatcttttggagcatggatgagtcatgtcgctagtaatcatgtgggtgccttatcctttctgc

SEQ ID NO: 170295 - DNA, 394 bp, Arabidopsis thaliana nossen
gtttccagatttttattcttttcttcttaataaacttttaaaatcctgcgtctcatagtccgtgagttgggaccggcatatccggttttggtgtcgtcggtaaattcctcttcattgcagtggaagctggttcattgagaaataatggatgcatttagagatgctatattgcagcgagctccaattgaaacctttgcactcaagactgttcaacactttatacaacctcagaaacaaacaaagttggctcaagatgaaaaccaaatgcttgaaaacatgctccggacattgctgcaggaactagtggctgctgctgcgcaatcaggggagcaaattatgcagtatggtcagttgattgacgatgatgatgatgatgatgatatacatggacaga

SEQ ID NO: 170296 - DNA, 399 bp, Arabidopsis thaliana nossen
  unsure (1)..(399): unsure at all n locations
gaaaaaatcaatacattcttctatggaacttttactcccacacgcttgaggctcatgtcctgtcactgtggttggctncttagaacgagccgcctctgtcttcggcgactctccttcactcctccacacaaccactgttcatacttggtctgaaactcattctcgatgtctccgtatagcttcaactctctcttccgcttccctcggaatcaaccgcggccaagttgtctctgttattggtccaaacgtcccatctgtctacgagcttcagttcgcagttccgatgtcaggcgcagtcctcaacaacatcaacccacgtttagacgctcatgcactctccgttcttctacgtcacagcgaatccaagctcgtgtttgttgactatcactcaagctcttt

SEQ ID NO: 170297 - DNA, 363 bp, Arabidopsis thaliana nossen
gaactatcttcaacagtttgtgttgccataaatcttattttgtattcatgacgatctgttgactttgtataccattccgatgtaaataaatgatcttagcatagatccggtgtggtctttcaattctataataatggaaacagcaaccctagtcgccatctttatatctgggttacttgtaagttttactgggtatgctctatatactgcctttgggcaaccctctcaacaactaagagatccattcgaggaacacggggactagttaacgtaatcagcctccaaatatttggaggctgattacgttaatgaagataatgaaaaattatttcattttttagttgaaattttaggtggttcccg

SEQ ID NO: 170298 - DNA, 374 bp, Arabidopsis thaliana nossen
gtttttatcgttccggcaggtcatccattcactatactctcgcaagatcaagactttatcgcggtagggtttggtatttatgcgaccaacagcaaaagaacgttccttgcaggggaagagaatttgctgagcaacctcaacccggcggcaactagggtaacctttggtgttggaagtaaagtcgcggagaaactgttcacgagccaaaactattcctactttgcacctacgagtcgtagccaacaacaaattccagagaaacacaagccatcgtttcaatcaatcttagactttgctggtttttgaaaatgcttttttacagtcctaagaaaggaaagagtttaagagtttaatataatctttgtgaagatatg

SEQ ID NO: 170299 - DNA, 370 bp, Arabidopsis thaliana nossen
tctgaatttcgatttcaatggagtcacgcgtgctgttacgcgccaccgcgggtgtcgttggaattccgaaattgagacgaccaatcggagcgatccaccgtcaattcagcactgcatcgtcttcctcgttctcggttaaaccaatcggaggaatcggagagggagcgaatctgatctccggtcgtcagcttcgtccaattcttcttctcgattcgtcggcgatcaacggaggagagaaaagagagattctcaaaccggttaaagccgccgctgctgaaggtggagataccgctggggaagctaaagttggattcctcgccaagtatccatggctagtcactggattcttcttcttcatgtggtacttctt

SEQ ID NO: 170300 - DNA, 369 bp, Arabidopsis thaliana nossen
  unsure (1)..(369): unsure at all n locations
gcgtttaaaccgaaattcaagagcattttaaacaagcagatcgaacaagaggaggcaactatgcatatttggggaaaaagagataataccttggggaggaggagcaccgacaggatgttgttcttgatgatacatctttcttcttcttctgagttctttgagcttttttttctctctctttgtttaaaagcaaactctgttcctttcctttataacgaagctatgccggtgaggaataatgatanagacttttaatttaataaaggaaccagaaaataaaggaaatattctttaaataaagtcttttttgcatcataaacgacacgattaaatttctttgaaaaataggtgatcttcttctaatgtgct

SEQ ID NO: 170301 - DNA, 378 bp, Arabidopsis thaliana nossen
ggagaagattttctcgttaattttgtttgacttgcctcttcgaagcaaccggatgctgtggtctgaatcttttcaagggaagagaagataagctaaacaagagaatggtgacaggttgtgttgatcttcatcaatctttcaaatctgcagattcatcttctgtgccaattcctcctcctcttccatcaaaatctgatggactcaagaaaaaacttgggcatagcagcgtttcgacagccacaagagatatgtgggatcgtcttttcaatgacggatacaaagctgatgtagtcatctatacagataatggcagtatcatctatgctcatgccaacatccttggaactgcttccactgtgatcaaaggcatgttgaagc

SEQ ID NO: 170302 - DNA, 376 bp, Arabidopsis thaliana nossen
accttccgctacaatcttctcctcttacatgcgagcttctccgattctcaggttttgatagcggcttaatagctcgcaattatggatttcgcagccaagaaattcatcaacaaccccaacgatgttgtaactgagttcatagagggtctggtagaaacttatcctggactccagtatttggatggttttcctgaggttaaggtggtgctacgagctgatgtctcggctgcaaaatatgacaaggttgccgttatctcaggtggaggcagtgggcatgagccagcacatgctggatacgttggagaaggaatgctaacagctgctatttgtggagatgtctttgcctccccaccagttgattctatccttgctggaa

SEQ ID NO: 170303 - DNA, 428 bp, Arabidopsis thaliana nossen
  unsure (1)..(428): unsure at all n locations
gcgaaaaacttctctctgaattttcatttagtntctcatnaaaatgagcagggaggggggagtatttgctcgttgtgggcgtctctaatgcatgctttacttctcaacagcanngctctttgcttttctgttcgcttcacgtaagagtattgagcgatgcacannaaacactactatcttnaatctcctccctactggcgtcacaaatggaacatcctctcatcgacacaaacgcctacttcattctaaactgtggcaagtccactcttacgactcattctatcttcaactaccttctcaacccttcaaccttcatcacatacgtccaactaactttcactccatcacacactccaacttcacacactccatcacacacgccaacttcacacacccctacttgtaactgtggaagtccaccttcccac

SEQ ID NO: 170304 - DNA, 361 bp, Arabidopsis thaliana nossen
ggaaatactcctttatttagtattggaccatctatagcagcaaccggtgggttactaagttattcggtgagtccctcaaacaatcaccttgttttagcggatctcaatatcggtatttttttatggattgccatctcaagtattgctcctattggacttcctatgtcaggatatggatcaaataataaatattcttttttaagtggtctgcgagctgctgcccaatcgcttccttatgaaataccattaactctatgtgctatatcaatatctatacgggcgattccgtgaaacagaaacgtggattgctactattcctcatgttctcgaccaatcagctaaaacaccggatatctattta

SEQ ID NO: 170305 - DNA, 397 bp, Arabidopsis thaliana nossen
  unsure (1)..(397): unsure at all n locations
aaaggcccggggcgatccacgcgtgcggcttcaaccatttatcattattttcagtccacaccgctcganaagaggatgcctntacttttatggtgtgtggagtgtataaaatgtatcatttcttggatatcctgctagggccatcttaccttattcgcaagcccttgagaaatttgctccacacattcaacaggttagtatggagagtaatggaaagggagtctcaattgatggtctacctctcccgttcgagactggtgagattgattttggtgaacctggaacaaatggtcaacacagcttttaccaactcattcaccatggacgcgtaatcccttgtgattacattggcattgtgaagagtcagcaacctgtgtaccttaaaggagaggtggtc

SEQ ID NO: 170306 - DNA, 399 bp, Arabidopsis thaliana nossen
  unsure (1)..(399): unsure at all n locations
gaaaaaagggccgacccactcgtccgattgtcttcaaagaacaaatctttcatttctaaaatctttctcttctctcggcgtgtccataaccatgtgtgcggagaagacagngatgaagagttccgatggtgaatctttcgaggttgaggaggcggtggctctcgagtcacaaaccatagcgcatatggttgaagacgactgcgtcgacaacggagtccctcttcctaacgtcacgagcaagatcctcgccaaggtgatcgagtattgcaagaggcacgtccaggctgctgtctctaacgccgaggccgtcgagggtgctgctacctncgatgacgatcttaaggcctgggacgctgattttatgaagatcgatcaagctactctctttgaactcattct

SEQ ID NO: 170307 - DNA, 376 bp, Arabidopsis thaliana nossen
  unsure (1)..(376): unsure at all n locations
ctggactgcaaacccatgcagagtgtagatcaaaggacgtacctgttngnngggtgtggagcaactttgttaggtggtctgcccgacaaaacctgaggctgtgtatatgctgatcttgaacaaatcacacacgcaagaggagtttatccggggatcaatgacaaaaaatccatattcgagtgctgagattggcccactgatgcgggatgtgaaaaacaagatttgtcagcagttggacctgctaggtctactggaagatgactatggcatggagttgcttgtagcaggaaacatcatttcactagacctgagcatagctcaagtttatgagctagtttggaagaaatcaaatcagtcttctacttcactgaccaac

SEQ ID NO: 170308 - DNA, 377 bp, Arabidopsis thaliana nossen
gtttaatatgtttcttcatcaatatttttataccttgtagagtataactagagagcgaataatgaatgcagattgacagatctagagcggaaaacatcaaaaaggaaactataagagcaaaaacaatcgatgtggagaaatatgaggcaaagacgatattggataatacattgaacaatcaacctacgtggttctcttacaatgcttatatcgtcgttgctgacaaatatcggtcagtttttaaataaaactttgcttcaaaattaggattgaattattttaagcgacaagaaacacatttataatagcgatccactttgttgttaattcatcgtaaatagggtttacatcaatatagcaacaaaaattaatttgtc

SEQ ID NO: 170309 - DNA, 258 bp, Arabidopsis thaliana nossen
gcaatcactacttttgccgccttcaagttcctccgccgaacccgcggggggctaccgccaggtttgcaggactcatttaaccaccaaagcctttctactcgctccctgccattgtttaatccacttctcttcgctctcaaagaaaaaaaccaccatctctcctaataccaatctctgcccgtttacggtttccaaatcggaggatctaaacctagtttcgcaccatccacggtggcattttcatatccgagttctccg

SEQ ID NO: 170310 - DNA, 374 bp, Arabidopsis thaliana nossen
gtactcatcgtctccggaagaatatggaggttctgcgcgggacttttttggtgaataatcatccctaggagagctgcgagagaatagaatcaagaacaagcagatctaagaacccaaaaccccacttagacttcaaggagatacctattcagcaacccgtcatcacagctatttgcatcaaggagttcacaaagtgcttcaccgatatcttcaggtaattcctagagcatgcacacattaaaagaacttcaaatcgagtcattttcataaaacttaagctattctagccagagccattatatggatttaagacaacaaacgcaaaaattctaggaaatgaaacaaatagaagaaactttaggtatacctggcaa

SEQ ID NO: 170311 - DNA, 367 bp, Arabidopsis thaliana nossen
  unsure (1)..(367): unsure at all n locations
aaacgttacgttctcgttttcttaaattccaaacaataccaanaagcgtgtgcttgaaatgagttgattatcgccgcntgtgtgcctaagagcgatggcgtctgagaaacaaaaacaacatgcacaacctggcaaagaacatgtcatggaatcaagcccacaattctctagctcagattaccaaccttccaacaagcttcgtggtaaggtggcgttgataactggtggagactctgggattggtcgagccgtgggatactgttttgcatccgaaggagctactgtggctttcacttacgtgaagggtcaagaagaaaaagatgcacaagagaccctacaaatgttgaaggaagtcaaaacctcggac

SEQ ID NO: 170312 - DNA, 373 bp, Arabidopsis thaliana nossen
  unsure (1)..(373): unsure at all n locations
aaaaaacgtctactgagacttatttagaggaaacatcactncnngttggtgcgacaacacatattatggagccgccaacaaanacaagctcaagcccctccttgaatcaaccgaccaccgcgttactgctgtcgaactcgccgccttctttatcgacccacgaccaaaccaagccgttgaaaccgacgacgaatactccaaaccgttgatcgaaaccctcaaatctcttccagagaacgaaaaggtaattctggttggattcagcttcagaggcatcaacatcgctctcgccacccacatattttcggcaaaaataaaggttcttgtgtacctcaacgccatcttgcccgacacaacccacgtgccttctcac

SEQ ID NO: 170313 - DNA, 389 bp, Arabidopsis thaliana nossen
  unsure (1)..(389): unsure at all n locations
ccgtccggcgtgcaccagccttcatcagtgtactggctatggtacnagctcaggggtacgacaacaggatgtatcataacaagttatatggtcagtatggtagcacagggagatctgctttgggttatggttcatctgggtatgattcaagaacaaatggaagaggatgggcggccacagacaacaaatacagaagctggggcaggggtaacagttactattacggaaatgagaacaatgtagatggtttgaatgaacttaacaggggacctagagctaagggcacaaagaaccagaagggaaatctagatgatagcttagaggttaaggagcagactggagaatcaaatgtaactgaggttggggaggcggataacacatgtgttgtt

SEQ ID NO: 170314 - DNA, 368 bp, Arabidopsis thaliana nossen
aagaggaagaaaaatgggtcgagtctcatctattatctctttctctttggcgagctgttgatcctcttcaatggctacactgcccaacagtggcccaacgagtgccagctcgatcaactcaatgcgctcgaaccatcccaaatcatcaagagcgagggtggtcgcatcgaggtctgggaccaccatgcaccccagctccgttgctccggctttgcctttgagcgtttcgtcattgagcctcagggtcttttcttgcccactttcttgaacgccggcaaactcacgtttgttgttcacggaaggggtctaatgggaagagttattccgggatgcgccgagacgttcatggagtcaccggtatttggaga

SEQ ID NO: 170315 - DNA, 362 bp, Arabidopsis thaliana nossen
  unsure (1)..(362): unsure at all n locations
attcaaagcttcaatattttcactagggttctttccctttcgcttgttctataaattgtgtggtgttctttncaattctcacggacgaacaaaccccaaggcaacgagctcatgattgagattgtggcttttgagtaaatgattcactgctcagctagagacaatggtgttggtaacccataaattgcagggttcacatgtcttgtctccttggagttcgccaacatggaccagaggcttgtgtttaaagagacctgcttacgacagtgcactttgttgagaggaaagataagcatttacgattgaagcaaaaatgttgttttagtttacggtccccttgcaacggtggattgagagcaaaa

SEQ ID NO: 170316 - DNA, 254 bp, Arabidopsis thaliana nossen
gtgagttatcttagcaccacattttatcacttacaacctttttattatttggacgaatagaaagtttatagccatgtttttataccaattgaatttcttatatttttcaaataattgtaataccaaaagatattcttagagtaatgtactttacaaattataaaagttgaaaatagcgatatatgggctccatttctaatgatctcaatgcgggaccagcatgtgatatacgaatgtctatatacattattttc

SEQ ID NO: 170317 - DNA, 376 bp, Arabidopsis thaliana nossen
ccttaatccaaattttcgcgctcgattcgtcttttctgtatctcccggaggtccgggacttgggcggatagaggagatgaggagcttgttgttgtggattgcggtggtcgtgtgcttgctatgttcagtcgcggcggtggttcaaagcggatctagcgacggatttgggaaacccagagatactgagactgcgatatcttttctggagtataaattgatggcgccttcggttccaatgatacctctcaccttgattcacggagctgactctaaaggagctgtgtgcttagatgggacgctacctggttatcatctagatcgtggttttggatcaggtgctaacagttggcttatccagcttgagggtggaggatgg

SEQ ID NO: 170318 - DNA, 284 bp, Arabidopsis thaliana nossen
  unsure (1)..(284): unsure at all n locations
ctacaacaacaacaacaacgcttttttcttcaaaaaccctctncngcggcgtcgataccaccgtactgtgtggtctacaaaaccaccgacaaagcagaagatgaagaagaagcagcaacagatgaaccattgtggatcgaatcttcagctacggagtcgacggctacagaagaaaccaccaatcgctgtgattcgttctactaaacggaggaaacagcaacggaggaatgagacatgcggaaaaaaccctaaccctaagagtaatttcgattcgattcgtggag

SEQ ID NO: 170319 - DNA, 397 bp, Arabidopsis thaliana nossen
  unsure (1)..(397): unsure at all n locations
aaaggnccggggcgactccacgcgtccganaaaacgtcaactgagacatatttagaggaaacatcactncnngggggtgcacaactcgaatgtgggagcccccaccaaacacaagctcaagcccctccttgaatcagccggccaccgcgttactgctgtcgaactcgccgccttcttttatcgacccacgaccaatccaagccgatgaaaccgtctacgaatactccaaaccgatgatcgaaaccctcaaatctcttccagagaacgaagaggtaattctcgttggatccatcttcggaggcatcaacatcgctctctccgccgacataatatcagccaagattaatgttctcgaattcctcaacgccatcttccccaacacaacccacctaccttc

SEQ ID NO: 170320 - DNA, 396 bp, Arabidopsis thaliana nossen
  unsure (1)..(396): unsure at all n locations
gggggggggccatgcgtccggcataanctctctgatagttcatgtgcataaaaagtggtgaaaaatgncaagtgtgtacgtatacttgttgtggcgtcaagaagagagagatttctaaatgccaagactattggtcctagtaatccgcttgagctaagattcagggacttgatttgatgattattattgttgtcgctgcatccaacaccttcccaagggaataatcttggggagcaaggatcaccactccaaaccttgttcactttataagttgattttatgctttctatagcatgaactgcattaccaagagaaaatgtgactatgtgagtttcagtagaaatctcattctatctaaatagagattgaaagtggaaactcactgtcttcaattgt

SEQ ID NO: 170321 - DNA, 313 bp, Arabidopsis thaliana nossen
  unsure (1)..(313): unsure at all n locations
ctcggacctgggcagtaagaagggcctctgagcctgggccgaatcgataaccgtgnngttcgcgacccggagatcatcttgatctctaatcactattgctcacgatantgaattaccgaggaagggcgagatgccagctctgggagaaccgttggatcaaccttttattcctatgagtgaattctctgacgctgctgtgatgaaaaagtatgcattgaagccagatgctgaaacccttgacattgtcaatactgccgctaggaagaaaacgattacagtagtgatgaagatatattggggagatcctcgtgag

SEQ ID NO: 170322 - DNA, 389 bp, Arabidopsis thaliana nossen
  unsure (1)..(389): unsure at all n locations
acccacgcaaccganggcatccaactaacaaagcttttattctggtgagaccagaggcaaagctgtggggaanacaggacttgtgtgggttaacaacaagggacaaggcttaggagggccgtaacaagacttctcaaacggcccaaacagcccaacagaaggcccatgagacagcccagtcagctaaagataagacatctcaaactgcccaagcggctcaacagaaagcccatgaaacggcccagtcagcaaaagaaaagacatctcaaactgcccaaacggcacagcaaaaggcccatgagacgacgcaagcatcaaaagaaaagacatctcaagctggcgacaaaactcgcgaagccaaggacaaggcccggagctacttatcggag

SEQ ID NO: 170323 - DNA, 372 bp, Arabidopsis thaliana nossen
atctatcacattttcctagcctctagactccgtccagattcttaccggcggctatgggtaaagtgatgtgtcacactaacattgaggtcattgctcatgttgattctggaaaatcaaccacaactggtcacttgatctataatcttgttggtattgacaagcgtgtcatttagaggttcgagacggaggctgcttaaatgaacaagaggtcctttaagtacgcatggctgttggacaaacttaaggccgaacgtgagcgtactattaccatacatattgctctatataacatctagaccaccaagtactactgcacaggcattgatgccccaagacatcatgaattacatcagaacatgactactggtacct

SEQ ID NO: 170324 - DNA, 358 bp, Arabidopsis thaliana nossen
aagcccggggcgactccacgcgtccgttcagatagtgaaccgttggccttaatcccaccttcttcatcatcgggtggctcgtctacgtgtgggtcgaaatacacgtcatcttcctctccctgcaacagccaaaagagaacaaggaatatgaaagacatcaaacacaacattcatgatagtgacaattcaaggaaataaagagagacgtataaggcaaaaacatcatacatctgtttcttctgtttcctcggcaaaagaataaaccatgttaagcctggccgattaaggttcaatctcccttgtctttaacaagttccacttgttcctgaaagaatgaattcaggaactcgggttagca

SEQ ID NO: 170325 - DNA, 368 bp, Arabidopsis thaliana nossen
aatccgctctctttctctctttcttttttcttcatatggtacgtcatcggcgacatcaattggctcgtgtgtgtgattgacctgtagctatcaatcaatccctgatctgtttaggtttgatctcctctgttttttcctagggcttgttattgttgtttctcgaaaaagaagaagaagcgatggtattgggattttagggattattgcggtttgttgtatatatatatatagaagctgagggattttgtgttgtgaagaacatcgaatcctgtttttttccgtaagaaagttcttagatttctccaagtgaaagaagatgtcatcagctggtgttgccttaaatccggttcgtagcgagccattgatta

SEQ ID NO: 170326 - DNA, 171 bp, Arabidopsis thaliana nossen
gttttcatgaactttaccgtgccatataaggagctttcaccgagtgtgagagtcttatcgaagttgttgggagctaaaactatctcttctaagctaaactgtctacataccggtaaatcctctgaaccaaacttggatgtttcagaaatgtaccctaaatcacaatcacac

SEQ ID NO: 170327 - DNA, 379 bp, Arabidopsis thaliana nossen
ctgccagtgaaccgctggatgcatccgaggacatggaggaatctggtctggacatgatggtgacaaatgtggtcgacacgctcgcatgtttgggcaaagatggagacacggagacggctcgaaaaataagggaaactgtgatataaggtcaagggcggtaactccaagaagcgaaatgctcaattaccggcggcaccacggaaaaggataataccaaagggaggagaacaagtgagtgatagaattaacccgacgcaccatggcacggtgaagggcttaacggtggagtcaagccaccgaaaccaaaggttgacaaatgaaagtaataagttgggattgttttacatttcgaattcgggttcaaattaattattataca

SEQ ID NO: 170328 - DNA, 381 bp, Arabidopsis thaliana nossen
gtccgtcctgattaaccagtttctggtcttagacaaaatgggaatcaggttcgtggaccggttgtgaaattcaaacctgtcaatgatcatgatcgaattgaaggtagagaagctgcagaggaggaggataacaatgtggaggcagagacagagagggagaggaaggttcatgagtgtactgcaagtacgaagagacgcaagaagaagaagaaaagtgagtgttatcgatgcggaaaagcgaaatgggaaaataaggagacttgcattgtgtgtgatgaaaagtattgtggaaactgtgtgcttagagcaatgggttcgatgcctgaaggaagaaagtgtgtgagttgcatcggtcaagctattgacgaatcgaaacggtct

SEQ ID NO: 170329 - DNA, 375 bp, Arabidopsis thaliana nossen
  unsure (1)..(375): unsure at all n locations
cacttatttccaactctgtctctctcaattttctttttctttctccaaacgtgaagttctctatgcgtttgatctcagccgntcttttcttggtgatgatattcgtcgccacagggatgggtccagtcacggtcgaggcacgcacgtgtgcgtcgcagagccaaagattcaagggtaaatgcgtgagcgatacaaactgcgaaaacgtgtgccacaacgaaggcttccccggaggtgattgccgtggattccgtcgtcgttgcttctgcaccagaaattgctgatccatcaatcgattctcatgcatgactcaatcgtcgatctattgtgttttggtacttctttccgtcgtctaatattccgtacgacaacata

SEQ ID NO: 170330 - DNA, 378 bp, Arabidopsis thaliana nossen
atataatatgatttgagtgatcatcagtgtatatatacatacccatccaaatgcaaatggaaggttgttaccggtacctaaaggaaccgtagcaattggaggtggattggataaattaagatcagaaacaactccaaggagccaaccagctgttccatctccccctgcaacctaaattaaacataactcatgcttaatgactaaatcattaacaccttttctacgtacgtattaaagaagataactcacaatgattttcaacttgtcctgaatcttgctagccaaactatcgtcttttaacctctctagattaagataaattctctgcagcaccttatctggagtctctacctccagatcaaaaacctgagtaccaaa

SEQ ID NO: 170331 - DNA, 380 bp, Arabidopsis thaliana nossen
gaaacgggttgttaaatgtcaaaatccagacttggttaaaatgtattttggaaaggtttttctacctctgcaacattgtgcccatgacgtcttttatcaactattgctaaaggtgcatcagataacttcttcgcaaaagcgcgagctcttgcgacgccaccaacatcaggtgaaactaccaccaaatcttcagaggatatggccttacttgctaggtaatcaagtatgacaggctgttcatgaatattaaagcacaaggaaaagaagacataagaaagtctattttcacaaaaaggaacttgatgctcagaggagtcatttaagaaaaacttttttctacctggccataaacatgatcgactggaatatcaaagtagccc

SEQ ID NO: 170332 - DNA, 375 bp, Arabidopsis thaliana nossen
gtgatccttatgttagggttcaatatggagagaagaaacagaggacaaaggtgatttataagacgtggcagccaaaatggaaccagacaatggagtttccagatgatgggagctccttggagctacatgtgaaagactataacactctgcttccgacttcaagcatcggtaactgcgttgtggagtaccaagggttaaagccaaatgagactgccgataagtggataattctccaaggagtgaaacacggggaggtccatgtcagagtcacgaggaaagtcacggagattcagagacgcgccagcgcaggtcctggcacaccgtttaacaaagctctgttactgtccaaccagatgaagcaggtgatgataaagt

SEQ ID NO: 170333 - DNA, 371 bp, Arabidopsis thaliana nossen
gagctacttgagacggaccggctgacgagatgcttcagacgggtaagctgacgagctggttagacgggagagctgacgagcttctctttgtctctaagtgtcctcctggcgtcccccttgacaagacatgctattccgtatttatagccttctgcgtgtaggacattcctccagggttttgacgagcctaccctcttgacttaacattctgcttaggcctttgacttggatttgggccttgggaaaagcaagcccaaatctaacccctaacatgaccactacatgatctataactccatggctttgaagtggcaatagaatctgctaaaatgatctcattattcaaaccacaacactgtcttctttgatga

SEQ ID NO: 170334 - DNA, 375 bp, Arabidopsis thaliana nossen
gattttggaaaacgtgaatgctcattttaacttagaatgaatgattgagacgagtagttaatgctgtttgtagaaatttggaaagataagttggcgaacgagtcattttctagtaagcgtaactaactatttcatcaattaattatgaattttcttcttcttatcaaaaaggtctttcttcaattacataagcttttgcgtttttattccgataatataaaattttgaaaaatcgaatcattaaagaaaataactaagaactggcattttgtatacacgccatgtatatatatatatataactattttatcaatagttacaaattgtaaaattttagtgtttgatggctaatttaagttggacctcaagtcaata

SEQ ID NO: 170335 - DNA, 396 bp, Arabidopsis thaliana nossen
  unsure (1)..(396): unsure at all n locations
cgggggggagccacgcatccgcacaacagcaacatcaaactctaataaacccaagttggtgtatactataggggggatggctggagcttctgcgggggatgagatcanacaggctcagagagctgatggacctgcaggcatcttggctattggcactgctaaccctgagaaccatgtgcttcaggcggagtatcctgactactacttccgcatcaccaacagtgaacacatgaccgacctcaaggagaagttcaagcgcatgtgcgacaagtcgacaattcggaaacgtcacatgcatctgacggaggaattcctcaaggaaaacccacacatgtgtgcttacatggctccttctctggacaccagacaggacatcgtggtggtcgaagtccctaa

SEQ ID NO: 170336 - DNA, 367 bp, Arabidopsis thaliana nossen
ctttttaccagcaagatgttatcttgtccatgaaatttttaaaactagttgaattttgattaattatttgaaattgatcccattataaagtagaaattaatccttgtaaaatttagtttaagagcaaacaattagatattatataactttttaggccaatttaaatcaaacaaataaatataaaataaaaacatgtctattgaaatgatttcaacctcataattttgtcctcttgttagtctatcatttttttatcatcctttttttttcattcaccatttttcattgaaaattaagttaaaaataaagttataggttaagaaattaatatacattttaattttaaatacaatgttttgatgatttt

SEQ ID NO: 170337 - DNA, 367 bp, Arabidopsis thaliana nossen
aagaaacacacttcggaagatggagatcactaacgttaccgagtatgatggaatcgcaaagcagaagctggctaagatggtgtacgactactatgcatctggtgcagaagaccaatggactcttcaagagaacagaaacgcttttgcaaggatcctctttcggcctcggattctgattgatgtgagcaagattgacatgacaaccaccgtcttggggttcaagatctcgatgcccatcatggttgctccaactgccatgcaaaagatggctcaccctgatggggaatatgctactgctagagctgcatctgcagctggaactatcatgacactatcttcatgggctacttccagcgttgaagaagtt

SEQ ID NO: 170338 - DNA, 283 bp, Arabidopsis thaliana nossen
  unsure (1)..(283): unsure at all n locations
taaaactactctttttaccataaactctcaccatttgtttctaaaaaactaatgtatttccaaaacccaaanncnnaaatcccttcactttcccaatatccttcacacaatacaaaaccctaaactcaatctctactatcactcctcctccncataacaaacctacactcttcacatgaatacccattnngttcctctcttataccaacaattccttataaaatcaatccttcattaaacctaaggcttataaacaaagctcgctctcttggttatgattata

SEQ ID NO: 170339 - DNA, 375 bp, Arabidopsis thaliana nossen
gtgcagtaggtggagatactgagactcagaaggatcttgctattgaattgcaggctgaggagcgacataaattaaagagggttattgatacattaaagcagagactggaaacagcaaaagctgacacggaagatcttatctcaaggctgaatcaggagttagccgttcgacaatttctgtcaacaaaggtaagagatttagaggttgaacttgaaacaactcgagagagctgcaagcaaggcatggagaaaacagtcctagatgaaaaggaaagatttactcaaattcagtgggatatggaggaactccgcaagcaatgcatggaaatggaatcgtttttaaactctataaaggacgagaaaacacatattgaga

SEQ ID NO: 170340 - DNA, 294 bp, Arabidopsis thaliana nossen
  unsure (1)..(294): unsure at all n locations
aacaaatactcnnccctanctcttcttctctctccttatcctctcgaaaggctgctgctttcgatgttttctcatctgctttcacgctcaaaagacagagccggagtgatgttgtgtgcaaggctgtatctatcaagccataagctggtgttgaagggctcaatatcgccgataacgccgctcagcttattgggaaaactccgatggtgtacttgaacaatgtagtcaaaggctgtgttgcaagtgttgctgctaagcttgagatcatggaaccatgttgcagtgtcaaggata

SEQ ID NO: 170341 - DNA, 401 bp, Arabidopsis thaliana nossen
  unsure (1)..(401): unsure at all n locations
ggaaaancgggcgggatccacgcatccgctcgattaggttacgatggtgtttctctcgattccaaacgggaagaccgtgtcggtcgacatgaactttgatggagaccaccatctccnccttcnaacaattggcccaccaacgtagtgatgttccacaatctttccttcgttactctctccttatgcgaaaccctagccgcgtgtttgtagattcaaaggattccgattcgatcttattgtccgatctcggtgtttctcgtttctctactgtgattatccatgtcccgcttttgggtggtatgcaagcggctccgccgaagcctcgtcttgatttcctcaattctaagcctccgtcaaattatgtagcgggtttgggtcgtggtgctactgggtttactact

SEQ ID NO: 170342 - DNA, 370 bp, Arabidopsis thaliana nossen
  unsure (1)..(370): unsure at all n locations
ccatcttggaaatggtgaatacgtttccggtctcgtaccgnnattgggctgttgtaaactttggtggtgggtttgatggacnaatgacaatcctcacagatacgtaggttcttaacaatgcgtattggtttgccagggctcgtgcttatcaacccaaacgctgtagcgatcttctcgctgtggtaatgaagtacattttctttatcttcttcctccaagtttaacaaaacctgtgtggtgattggtctatacccagctagtctcagtttgtctgagatttctacgagcattgagttgatttctttggcttttgggtgtgaatcatctttcacaacaaactcatgaagcacgccatcaatgtcgatcaaac

SEQ ID NO: 170343 - DNA, 378 bp, Arabidopsis thaliana nossen
  unsure (1)..(378): unsure at all n locations
cactgaagcaaaagagcaagtcatggcggcgacatcttcctctgcttntcgtcttaatccgaggttttctggccaccgacctttcaaatactcgccagagctctcttctctctccttatcctctcgaaaggctgctgctttcgatgtttcctcagctgctttcacgctcaagagacagagccggagtgatgttgtgtgcaaggctgtatctatcaagccagaagctggtgttgaagggctcaatatcgccgataacgccgctcagcttattgggaaaactccgatggtgtacttgaacaatgtagtcaagggctgtgttgcaagtggtggctgctaagcttgagatcatggaaccatgttgcagtgtcaaggataggg

SEQ ID NO: 170344 - DNA, 262 bp, Arabidopsis thaliana nossen
gaaaaaaatgaaagttcaaattttcatcctccttttgataatctcatggcgtgctgcgaaaattacttctggtcgttctgaatctcaagtccttgatcgaagtaggtttcctgatgatttcgttttcggaaccgctatatcggcctttcagagcgaaagggccacaagggaaagggggaaatcgcccactttttggggataccttaggcacaccctttccggaaggacccatattccaaatggcaatgttggccgccgtttt

SEQ ID NO: 170345 - DNA, 373 bp, Arabidopsis thaliana nossen
  unsure (1)..(373): unsure at all n locations
cggacgcctgggcggacgcgtggttttaaatgatatcataaatatncntggtcggcataacgtaaggtggacgggccaataaaatgaaaacaaaaccaaacatcgcactccaaataacaaaataaacatacataattatttctcgtcatggctaacctcagcctcaccagagagttcttcaagggacttgcctttgggctctgggacaaggaaggtgaagagcataccgataaagttaagaacaccaagcatgatcaatgagttcttaactccgatgcctggtgggtatcctgcgtctaccttggccttgtcttgtgattgagccgcatataggaacccaaaggctccaacaatggctccagccttaccagcc

SEQ ID NO: 170346 - DNA, 409 bp, Arabidopsis thaliana nossen
  unsure (1)..(409): unsure at all n locations
ccggnncggaaancccggggcggcccaacccgtccgtttttgggtttgccttgaaagtgtttgtgtttttgcctctgagaaaaaatgtttgccgactggtaggttggggactatccgtgaatgggtttatgacgctatctctgctcaacgcaatgagctcctctctcttttctccagatatgtagcccagggaaaggggatattgcagtcccaccagctgattgatgagttccttaagactgtgaaagttgatggaacattagaagatcttaacaaaagtccattcatgaaagttctgcagtctgcagaggaagccatagttttgcctccatttgttgctttggctatacgtcccagacctggtgttagggaatatgtccgtgtgaatgtgtatgagctgagcgtagat

SEQ ID NO: 170347 - DNA, 396 bp, Arabidopsis thaliana nossen
acccggggcggcccaagccttccgaacccaacaagctttactctgccaaattttaatcagacaaagcaaaaactgggttaatcaaatattgattggtaaatctataaaaaagttttttaactgaaaaaggaaaaaaatattttatctaacattaaaatgattttagagaataagatgactgacccaagtttgggaacatgagtgtcggtcttaaactcatacttcacagtctttggcttcacagtccattgaaaagcaccgtttttgttctcatgaacaagctcagtggtttggtagtcgtacactgagtggatctcattctcggtgtacttcacgttcggagattcaaccttgaagctttcgatgaacatttttgcctaaggaagactttgagaa

SEQ ID NO: 170348 - DNA, 158 bp, Arabidopsis thaliana nossen
  unsure (1)..(158): unsure at all n locations
cttatccaatatcgaaagatcttccagcttcaattngaaacgnattggagacnnaaaagctttctgcctggtcacaataccnnttgcacccatcgtggaggtcaaaagaaaacatgaagcggttcacaacaacatcaagatttctgtgttctggctag

SEQ ID NO: 170349 - DNA, 289 bp, Arabidopsis thaliana nossen
gataggtaaaatatctaccttggttcaactatcttctagtaactataggtgtagagattaagagttgtggtgactcaaacattttgcttcttctagaatcattcgatagaggaatgtatgcgggacctattggattttttggtggcgaggagagtgaatttgcagtcgggatcagatcagctctagtcgaaaaggtgagcttatttgatctctttctccctttaaaaaacacactttaacactaattgttatagcaaaatcgatcattacggtttttgctacaacttgt

SEQ ID NO: 170350 - DNA, 373 bp, Arabidopsis thaliana nossen
  unsure (1)..(373): unsure at all n locations
ctcaagctaatgtccacaacctacttagtcgcgctttgccaagccggtgggctaagacatgttgttgtgaggctgaagaangcggttaaatcagcagtgagtcaggtggcgaaacgggtcttaaccgttggtgccaacggggagctacatccgtcaaggttcacagaacgtgatgtcctccaagtggttgaccgagagtacgtgttctcatacgcagacgatccctgcagcctcacttacccgctaatgcagaaacttagacacattcttgtagaccacgctttagcggatccagaacgcgaggccaattccgcgacatcggttttccacaaaatcggagcttttgaagccgagctgaaactgcttctcccta

SEQ ID NO: 170351 - DNA, 148 bp, Arabidopsis thaliana nossen
agtcttacatcgattgatactgccctctttgaaacactgatgaggtaaactctaagctttccttgatactatcgttcattgcaacctttaccctttgtctcgaagtaccaaccggcaataatctcatctttcttatataaattgcaat

SEQ ID NO: 170352 - DNA, 326 bp, Arabidopsis thaliana nossen
  unsure (1)..(326): unsure at all n locations
cacgcatgcggctcctctctcacaacagccggatctgtattaccgaagatggagtgcgaatggtgtgttgtgtgtaggaatgtgttgtgggatcgangctgctgatacatcggcggttcatagtatccttcttcacaaaaacaacgaagacaagatcatggtacttgactcacacaagctcgttgctgctagtggcgagcctggtgaccgggttcagtttacggagtacgttcagaagaatgtgtccttgtacaaattcagaaatggaatcccgttgactaccgccgctgctgccaatttcactcgcggagagctcgctactgctt

SEQ ID NO: 170353 - DNA, 383 bp, Arabidopsis thaliana nossen
taaagacttcgagatttgaaacttgtcatttgcatgacatgatgagagaagttggtttgttaaaagctggggaggaaaacttcctacaaattaccagtagccgctcttcaactgcaaactttcagtctactgtcacatctcgcaggcttgtctaccaatatcctactactttacatgttgagaaagatataaacaatccaaaacttcgagctctcgtggttgttaccttggataatttttggatgacaggaatttcgaagtggaacctatacggttcaagctttacaaggttagaacttctgagggtgttagatcttgttctagccaagttgaaaggagggaagttagcttcctgcattggaaagctcatccacttaagatac

SEQ ID NO: 170354 - DNA, 357 bp, Arabidopsis thaliana nossen
  unsure (1)..(357): unsure at all n locations
cggggggggcgccacgcatccgccagcttcgcatcttcttctccggcttgatcttctctcgtttctaaaccggcggtgatcggaatatgtttgtggatcgaanaattctgtcaatcacacaaaaaccgaaaaccaaaaaaaaaccatggcgtttgagaagatcaaggtggcaaatcccatcgtcgagatggatggtgatgaaatgaccagggttatttggaagtctatcaaggataagcttattactccttttgtggagttggatatcaagtacttcgaccttggtcttcctcaccgtgatgctacggatgacaaagttactattgaaagtgctgaagctactaaaaagtacaatgt

SEQ ID NO: 170355 - DNA, 394 bp, Arabidopsis thaliana nossen
  unsure (1)..(394): unsure at all n locations
ggggggacgcacgcatccggagtgctccaaatgatgggatcatcaatcacaatagaaagtgcanagatgtgtacgtttctcatcatcttgagtggctcnagagtttcaatgattgtcaattccagctttggtttcaaccaaggcaacccattaagactcacatatggattggactatgaagggaatgtgtgtggtagcaagcatcgtcaccgtgaccttactcaacttgagcttagatattggttaaaccctaaccaagtttatgaaagtggtttgaaagatggggaacttaaattggctaatgctagaactatttgtctcttggattgccctgcaccttctgatgatactctcaactgggtatgtgactatcctgacggcgagattcgtctca

SEQ ID NO: 170356 - DNA, 391 bp, Arabidopsis thaliana nossen
  unsure (1)..(391): unsure at all n locations
ggtcgataacgcgtccggcaattagaaactgcgattgtttacaaaagtattacaaaaaangtgttggtgcaatataactttgttcagttagaanacacacatctacggtttttatggtttttatgttgtttaagcagcaagaatttgctctttagggttatttacttgatcatatatcgtgaacaaaaaattataggtaattgagaggtcatagacttttgtaatacacaagacatttgttaattgttatcacatactcaacaccatatatattttcaatacctctcgagcatcttctgttatgaattttcttattttctctaattttattacaaaccttatagttactaaatactattcataaccgttcctacttgaaaaaaaattaaac

SEQ ID NO: 170357 - DNA, 283 bp, Arabidopsis thaliana nossen
gtagatccaacgagcaagatctgctctctaccgagatcgttaatcgtgggatcgaaccatccggtcctgagcgccggctcaccaacgttctcggttagggtcaggagacgtttgcctgattttcttcagtcggtgaacttgaagtacgtgaaacttggttaccactacctcataaaccatgcggtttatttggcgaccataccggttcttgtgctggtttttagtgctgaggttgggagtttaagcagagaagagatttggaagaagctttgggactatgatc

SEQ ID NO: 170358 - DNA, 264 bp, Arabidopsis thaliana nossen
taaacagtgaattagaaagagaatgaagtttcaatggaatcgctaacgtgtgtttctccttacatagttggtcctccggccaccactactacgatccccgtttcaacttcacgatcagtgttgattcgtcttacttcacgccggtcttcttaccttttcggcttgtccagctccgggagaccgatttcgatttctagaagaagacacttcgttagctgtaaatcgaccggcggcggaggaggaggatcagataagcttggtggc

SEQ ID NO: 170359 - DNA, 371 bp, Arabidopsis thaliana nossen
attacgacagctctattcagcttctttattcgggtaatcaagtcgggtttgtgttcatacccgtcggtggaattgattcgggtcggattcaatacatggccgccacttttaccgttcattctttccctatttctcctccttcctcctccgctatctccaccgtctctgccgccgttattccagactctccgattattcccggtccaccggatttcactgtaactccaagaaacccagattcaccgtattttccaggatatccagaatcgccggatttaccgggaaatccaggttcaccggatttttctgggaatccgggtcctccgagtttcccgagaaatccaggctcgccggagtttccaggaaaccca

SEQ ID NO: 170360 - DNA, 171 bp, Arabidopsis thaliana nossen
cacacaatttactgaaattttctgaaaaccctatttcataatagtgacaatcctctcttgatgttcaaagatcatccataaaaaaaaagtacgagttaaaacacacatctttaaaatcacaaacaacggttaaacttccttcaacaaccctcccaatctccatccctaaaa

SEQ ID NO: 170361 - DNA, 380 bp, Arabidopsis thaliana nossen
gcggtaacctacaaagcggattttctctcaagaaagacgcagagagcgagtttgagatccctgaaatcgtgggcacattcaggaagaacaaagagagagtcaacgagatgattaaagagagtcttcaaggcaatacaattggtcagagtttgttgagtttgatggcggaaactgtgtcagagtcaacggagatagaccgatacataatgtctagctggtgcagaaagcctttctacgaggttgacttcggatcgggtagtccggtctgggtgggatacgcgtcacataccatttacgacaacttggtgggtgtcgtgttgattgattcaaaagaaggtgatggtgtagaagcatggataagcttacctgaggaagacatg

SEQ ID NO: 170362 - DNA, 396 bp, Arabidopsis thaliana nossen
  unsure (1)..(396): unsure at all n locations
aaacatgtctttaagattttagaagcatcnaaagagggggaaagcgtcaaatctttaagttcttggcaaacccaanggngccttcgctcccaaaccatcttctggacctcacaagtcgagggagtgtcttcctcttgtcctgatcatcaggaacaggttgaaatatgctttgacttaccgtgaagttatctctatcttgatgcaaaggcatatccaagttgatggcaaagtcaggactgacaagacttaccctgctggtttcatggatgttgtatccatccccaagaccaatgagaacttccgtcttctctacgacaccaaaggacgtttccttctccactccatcaaggatgaggaatcaaagttcaagctttgcaaggttagatctatccagtt

SEQ ID NO: 170363 - DNA, 286 bp, Arabidopsis thaliana nossen
cacaggaaaaagtcgcccaatcaccagaactacccggcaaacacatgtcactcgaatgtcctgaaatcaccccttattacagtaagctcaaacacgagactgcatgtaacaacagaccctataacagcccatatgctcgaaccgagtaatctgtaacgcacgatatcccactcatagacgcgcatactgaagacgatcataaagtggaaaaacattcaaggagtacttgcaaccatcatcataacaagtctaacactcatgaagtcaaaaacgccacatgaatgtt

SEQ ID NO: 170364 - DNA, 409 bp, Arabidopsis thaliana nossen
agcacatgtttactataaatgcgacattctcacgctaattttcaatatcaacaatttgccccacttattgatatcgcttaactagttagtaggaaataaaatgaagagctctactacctctatgcagttaattccaacacttttcttcttaaccattcttcttgcttcaccaggtatgcaaatctagtttctcacaaactcacaatattaaaaagttactaaaacatataatatacgcttatattttaatatttaatgcatggggttttacgcatctacttgaataatttaatatttgatgatattgaagaataagtcaattattgattgtttatatgattataattatattattattcaattatttattgaataatgataatgtattatattatagatatagagatgg

SEQ ID NO: 170365 - DNA, 391 bp, Arabidopsis thaliana nossen
  unsure (1)..(391): unsure at all n locations
attgagtctggcagtctgaccatatatagctttggcccccatgtcatatgccaatgttgttggatatgaactgcanaaagtcccgagccacaacctagcacctccgtctggctcacggatctcagcaacccatttaccccatctcctctgtctaactcctatatagtcacaaatcccgttttcaggtccacctttacctttcatacaacccttcctcgaaccttttggaggaggctttcggattgattttggaccaccaccatcgatacaagattctgcctcaatctgctcattgtactctctccattgccttagaatctcagctacatcctcgtgttccacgagacttccttttcctggtagaatcaaaggggatagaagcaagattagc

SEQ ID NO: 170366 - DNA, 334 bp, Arabidopsis thaliana nossen
  unsure (1)..(334): unsure at all n locations
cggacccgtggtcttttatatttccctctctcccnnnnncnctgtccatgtnnatattttttatgttctgtcatccccacaaccactcacttctttcagctctctccattcggcgctctcttctggaattgaagaatcaagattatcaatggcccatacatcaaaatctgtgaatcctagagatgtttacattgtgggtgttgcacgtactccaatgggtggctttctcggatctctttcatctttacctgccacaaatcttggatctttagctattgcagctgctttgaacataacaaatgtttatccacctcttgttcaaaaaatattcttt

SEQ ID NO: 170367 - DNA, 419 bp, Arabidopsis thaliana nossen
  unsure (1)..(419): unsure at all n locations
cgggggggtccaacccttccgggttgccttccttaaccgtcatttatcggctaagctcttccatgacaagtggagtttgcttcctttgcggaagttccttcgncttcacagccaccagggcaagaacctgatgttgagcgagaagattcaaaacctcaacactctgcaacacactttgaggaaagcagaagagtatctagcagagcttaagcccgaaacactgtatgaagagtttgaggccaagtttgaggagattggtcttgagaggggatggggagacaatgcagagcgtgtccttgacatgatccgtcttcttttggaccttcttgaggcgcctgatccttgcactcttgagacttttcttggaagagtaccaatggtgttcaacgttgtgatcctctctccacatggttactttg

SEQ ID NO: 170368 - DNA, 309 bp, Arabidopsis thaliana nossen
ggggcccaacccgtccggttgggccttgagtaggtggaaaaaagacatacaaccttggcaagaacgacgttcggcagattatatggctcatgctcctttaggttcgttaaattctgtagggggcgtacctactgaaatcaatgcagtcaattatgtctctccgagaagttggttatctacctctcattttgttctaggatttttcctattcgtgggtcatttatggcacgcgggaagggctcggccagcggcagcgggatttgaaaaaggaattgatcgtgattttgaacctgttctttccatgactcc

SEQ ID NO: 170369 - DNA, 399 bp, Arabidopsis thaliana nossen
  unsure (1)..(399): unsure at all n locations
gggcgtcccacgcgtgcgatggactgattgttctaaagcttcgatngcaccannacaggggncnttgtaaatttttacgtttttaggacctcncancnatcctcctacggtgaagagcagtcctgatgctcctaagctggctcacgaaaagcttgacaagatgggacctatgtctaacaacgaatcgattatggctgccactatactcctcacggttggtctctggatcttcggagctaattcgcgtgtagatgctgtgactgcacccattcttggattatcagtccttcttgtgacatgtgttgtgacatggaaagagtgcttagctgagtcggtcgcatgggacacactcacctggttcgctgctctcattgcgatggctggttatcttaacaaata

SEQ ID NO: 170370 - DNA, 394 bp, Arabidopsis thaliana nossen
  unsure (1)..(394): unsure at all n locations
aagtaaaatgaatnaattttatgaacaagcgaaagcggcnnnagagttngtttataagtttgtagatctgcaaanacngcanctgcaaagtgtgccatttgatctcaaaataccagaagccattgaaaaccatccttcgtcacatcccgtgacactaaccaaactctcctctgccgtctctgcttctccttcacatctccgccatataatgcggtttcttgtgcaccaaagactcttcaaagaagtccccacaaaaaatagtttatccactggctacactaacacgccactctctcgccgtatagatgatcacaaaacgtgaaataccaaatctcctctgcttctcttgaaaacaagtcccaagatgctttctccatgttttaaacctaactca

SEQ ID NO: 170371 - DNA, 399 bp, Arabidopsis thaliana nossen
gcttcaagcattgatcagcatttccagtccacaccgttcgagaagaatgtacctgtgcttttagggttgttgagtgtatggaatgtatcatttcttggatatcctgctagggccatcttaccttattcgcaagcccttgagaaatttgctccacacattcaacaggttagtatggagagtaatggaaagggagtctcaattgatggtctacctctcccgttcgagactggtgagattgattttggtgaacctggaacaaatggtcaacacagcttttaccaactcattcaccagggacgcgtaatcccttgtgatttcattggcattgtgaagagtcagcaacctgtgtaccttaagggagaggtggtcagtaaccacgacgagctcatgtcaaacttt

SEQ ID NO: 170372 - DNA, 394 bp, Arabidopsis thaliana nossen
aagttatataatcatataatattttgtgttcgattagtgtaacaaaaatggggttagagaggaaagtgtgcggtttggttatggtatctttggtacttatggctattgcaacgatgtgttgtgtccaagctacgatcgacgaagaagcggctaaggatgaatcatggactgattgggcaaaggagaagatcggtctcaagcacgaagacaacatccaacccactcacaccaccacgaccgttcaagacgacgcttggagagcgagtcaaaaagccgaggacgcaaaggaggcggctaaacgcaaagcatatgaagcggttggagccgcgaatgagaaagcgggttcggcatacgagacagctaaatcgaaagttggggagggtttgggttctgt

SEQ ID NO: 170373 - DNA, 398 bp, Arabidopsis thaliana nossen
gtcttttgggtctttcttgttcccataggagagggtttttgggacctggttgaattgttaggttctaggtctctactaaatacttcaagacagaggaaacaatttttcttttcttttttttcttctcccttttatgaatgagaacaaaatggttccaacctttaatttctgacacaaacaaagctttaattctttactaagacatgttctaatatttggagaattattagaaagtttagttattttcttttaaacgtaattcaagccgtgtatttataaactactagagtttggagcaagaaaaattaaaactaatgaaatatgttggaactaatagatatattttactttccagttccacttcttattctaaaatgttccccaatgtcaaacaaata

SEQ ID NO: 170374 - DNA, 393 bp, Arabidopsis thaliana nossen
  unsure (1)..(393): unsure at all n locations
gcgcnattttttttttcttttttggtttctagaaaaactggccagnaacgggcagngtgattttctttgatgtttgcggttcctnnnccaaatcccaaaagatcgaccacaactggttcacttcccaaaggagctttgaaaatagtctgaaagaaacattagaataataagattttaaattgcatctataactttttggtagctattgattttaatatctacttaccttgtaccaagccatagttcggttgaatggtacactttcacctgaccatgtcgaaagtgattctgaactaaacagtttgttctcaaacccgcttaaaccagttttgtagctccattatgagtagacaaatattttacaacagtttcatcaccatttctttcaatgat

SEQ ID NO: 170375 - DNA, 383 bp, Arabidopsis thaliana nossen
  unsure (1)..(383): unsure at all n locations
gttttggaacaagttcatgaactaaggctttttttacactttagaacatggccaattaaaagttttctgtttctgnagcaaaattaaccattcaaatcaattactctccaaagtgtttttttgttttgtttacacatatgtaaagagacgaccgtagttatcaaaagcattttggtcacaacaaagtaagcttaacaatcaatcagcaagtgaaatcaaatgattacaagtgaataaagagacaaagagacctcgtttcaagccttgtgacgcaattattaaacagtagcagcaagaactttcaccaattcacattctttaggcactgttagcacatgatcaaaccattcaacttcccaaaaatttcgcaacttttgcttctt

SEQ ID NO: 170376 - DNA, 367 bp, Arabidopsis thaliana nossen
  unsure (1)..(367): unsure at all n locations
gcggtcttttctgtatacttatgtttactttccccggttccgntgtgtcaggtggctttacgcaggtgatgggatcatctagatatcccttcaacacaacataggtcgtcgaaaggatctcggagacccgccaaagcacgaaagccagaatctttcagaaaatgaattcctattcgaagagtgcataaccgcatggataagctcacactaacccgtcaatttgggatccaattcgggattttccttgagggatattggtaaggaattggaatgtaataatatcgattcataatggattcatatcgatacaaaaaaaaaggttctctatcgattcaacaagtgctgtacttatgggaaagcgattgat

SEQ ID NO: 170377 - DNA, 402 bp, Arabidopsis thaliana nossen
  unsure (1)..(402): unsure at all n locations
cattattttcactgagcgcataacatttttgagacaagagactctctctgtctctgttctctctttctgtccccgtctctccggcgatggttgttgctatggaccaacgcaccaatgtgaacggagatcccggcgccggagaccggaagaaagaagaaaggtttgatccgagtgcacaaccaccgttcaagatcggagatataagggcggcgattcctaagcacntgtgggttaagagtcctttgagatcaatgagttacgtcgtcagagacattatcgccgtcgcggctttggccatcgctgccgtgtatgttgatagctggttcctttggcctctttattgggccgcccaaggaacacttttctgggccatctttgttctcggccacgactgtggacatg

SEQ ID NO: 170378 - DNA, 375 bp, Arabidopsis thaliana nossen
  unsure (1)..(375): unsure at all n locations
gaataaactccaaacaatcatcaatctttctagtctcaaacttagcgaggcaaagcgcttcctttcacagagagagcaaccattacgagactcttcgctataatctccatttgcagagaaatacacaagctngatcagagtccctacgaaaccaagaaaaaaaaaaaccccaatttccggttaattcgagacaaacccagacccgaaaaattctaaaactgaatgaaacaaagccaagtttggatttttaaattacctccgatgtcgagagccaaatgagagatttgagtcggatccatggcgggttttttgtttgggtttttgcaaaattctcttttttcaacgttaaatagaaataaattccaccgatcaact

SEQ ID NO: 170379 - DNA, 214 bp, Arabidopsis thaliana nossen
  unsure (1)..(214): unsure at all n locations
ggataagtttgcaacacaagctatattgattgnctttntctgcatagttttgcttttgctaggtatgaggttgctcaaactagctttgttctgatatttgttaacttctccattccaatttggtgggtttatgaagttgatgacgattacgattatatacaactttgatcctaatttgtattatttgtatcacaaatttcattttgattcaaaa

SEQ ID NO: 170380 - DNA, 394 bp, Arabidopsis thaliana nossen
tctagattcagtttttttcatcaaagaagagcgtcttcataaacgccctgcgtcttcttacgtggaaagctagtttctttcttccacgaaaatgagagagtgcatttcgatccacattggtcaggctggtatccaggtcggaaatgcttgctgggagctgtactgtcttgaacatggcattcagcctgatggccagatgccgagtgacaagactgttggtggaggtgacgatgctttcaacaccttcttcagtgaaaccggtgcaggtaagcacgtcccacgtgctgtctttgttgatcttgagccaactgtgatcgacgaggtcaggactggtacttaccgtcagcttttccaccctgaacaactcatcagcggtaaagaagatgcagcttac

SEQ ID NO: 170381 - DNA, 402 bp, Arabidopsis thaliana nossen
aataaactgggattgttctaaaaagcattctacacattggcgtaagagcgattctttttgtacatgtgagaggaaaaactctaaaatcctcaccatttttctttacaccattctctgccttttatctcactcactcatcagcctaagggggatctttggttctatgtatagtcaaaacggtaagaaactacacaatgtacagattttgcggagaacaaaacaaagctctctctcattatttctccgcagatttttggtttagatcttacctaattctcaaaacgttatggcagagccatccaccctagttaagctgtacaacacttgcggccttacgccaccagaggctggggtaatgactgcaaagccattctcctctctgcatataagaacaaccactta

SEQ ID NO: 170382 - DNA, 329 bp, Arabidopsis thaliana nossen
  unsure (1)..(329): unsure at all n locations
taaaaactccaaaancctcaccatttttctttacaccattctctgccttttatctcactcactcatcagcctaatttttatctttagttctatatataaacaaaacggtaagaaactacacaatgtacatattttgcgtagaacaaaacaaatctctctctcattatttctccacagatttttggtttagatcttacctaattctcaaaacgttataacagaaccatccaccctaattaaactgtacaacactttcgtccttacaccaccaaaggctttagtaataacttcaaaaccattctcctctctacatataaaaacaaccactt

SEQ ID NO: 170383 - DNA, 338 bp, Arabidopsis thaliana nossen
ggtaacaacatcgttttttttttttttggatagaaacttccatattgggtttaaagacaactgtacatgttggcattgatatgagccgataagaggatacatcaaacattctaaaaaacctatctttctttaaaagcaaatatctatctaattctacggagaggcagagacagagtctgaagaaagacgagagagctcgttcatgagaaagatgatacgagagtggtaatcacgagcctggtctaaagattctgcttcaagctcggctagctgtgagcagagacgctcctccgcttcttccgccacctgtgtccgccgccacaactgcaacatctctt

SEQ ID NO: 170384 - DNA, 403 bp, Arabidopsis thaliana nossen
gcgggctgagacccttgttcacaattttgatcattgggaccatttgtacatgttgaaagtcttgggttctatggtagacccaattctttcccacagatgacttacgagcacttcctccagaacgtccaacagatgagtgaaagcttttacgaactgagctgcctctgtgggcactgttccttcctttaccaccatagttatcacctaaaaattcattcaccgctacagcatcacatgggtctaatagtataaaatcccggtagagatgtgtagttgccaactgcaagagatgaaagttaaaacggagttcaagccccaagctctttctgtttttcatactctaagaagtggaaaaacatgctataccagataggattccaattctcctccgtcaccactagta

SEQ ID NO: 170385 - DNA, 399 bp, Arabidopsis thaliana nossen
  unsure (1)..(399): unsure at all n locations
gcgggcaaaaaggtcattatctgattatgccggagaaccccnngcgtaacatgacaaattgtagaagtcttgcgtacncncttcnaagattcaagaaaagacgttgaagatgacaaagaaagcggcgtttatgttcctgacgagagggaagcttcctttggctaaactgagggagagatttttcaaaggccatgaaggtcttttctctatttacattcatacgagtgaccctttttactttgacgatcatacgcccgaaacttctccgttttatcgccggaggattccaagcaaggtcagtaatcaatttcctcattaattcccctcagattatataattgatataggcgaattcttcatagataaacttaattagcctagataatcttgatatagata

SEQ ID NO: 170386 - DNA, 405 bp, Arabidopsis thaliana nossen
  unsure (1)..(405): unsure at all n locations
aaagagatctctttctaccatactagcggaccccttaggatactactactgagtctaatgcgttcctttgatttaagacgagaaattgaaatcttttttttttttatagtaaaattttattcaaattaatcattttgactaacggtttttacgtaaattataagcaaaaaagcagtaggaacgagaatgaagagtgcagtagcaataaatgcaagaatatttacttccataatttaatcgnttattattattattttttttttctttggaatatctcgggatttaatcccatagagatgagaaatctttcgcttgtaaacttactcagatgaattagattgcgatgatatcgaatgaaagaaatatcatgaataacaatatcggagctataaaatcgattcatcg

SEQ ID NO: 170387 - DNA, 241 bp, Arabidopsis thaliana nossen
  unsure (1)..(241): unsure at all n locations
aacagggaacatgtccgnacacggaggnngncatgacaagcggtctttctccggagtcgacaagagatcagatcaacattgtttttggcgatgccgacggtaacaagagggatgcaccgaaactaggggggttggtaagaggaccaggggggttggggaagtgttcaacgaacacaatgcaaagccagaggtcaatgtttgaaagaccctaacggctctctctatatcaacccggaaggga

SEQ ID NO: 170388 - DNA, 342 bp, Arabidopsis thaliana nossen
  unsure (1)..(342): unsure at all n locations
cgggggcgtcccacgcccgcgagagagagagatatgttgtcaattacggacatgatgganagatacccttgtgctacttgaagggttttaggcacccnacactnaccatcgccgngctcgtgttgacttggatgatagacttcctaaaccttatatgccaagatcatttcaagcaccagacagagaacacccgtacggaactccaagccataagaattacggacttagtgttcttcaacagcatgtctccttcttcgatatcgatgataatggcatcattaacccttgggagacctactctggactgcgaatgcttgatttcaatatcattgggtcgcttat

SEQ ID NO: 170389 - DNA, 401 bp, Arabidopsis thaliana nossen
  unsure (1)..(401): unsure at all n locations
gaacgttgtggactcctttcaatctctttgcaataaaaccagtctactgcaacgtctttgtgcatttggacnangcacatcctaagaattataatcaactgcaagaccttcacatagccgccgcttgggctaacatgacacatggatccttgttccttcctcattttaactctaagaccacatttgtaacgtttgtggagaatggttgtgcccgcttcgagatggctactccttataaattccaaagagggcaacaacaatggccaggacaaggacaagaagaagaagaagatatgagtgaaaacgtacacaaagttgtgtcacgagtgtgtaaaggcgaagtttttatcgttccggcaggtcatccattcactatactctcgcaagatcaagactttatc

SEQ ID NO: 170390 - DNA, 360 bp, Arabidopsis thaliana nossen
  unsure (1)..(360): unsure at all n locations
atcttcttcatcgatttctctcttccaaatctcccaaaagatgtcnaacgctanagtgttcttcgacatgtgtctcagcggnactcccatcggacggatcgagatggagcttttcgctgatacaaccccaaacacggcggagaatttccgtgctctctgtaccggcgagaaaggaatgggaaagctaggtaagccacttcacttcaaaggatcgatcttccaccgtgtgattcccggattcatgtgtcaaggaggtgatttcaccgccaagaacggaaccggtggtgaatcgatctacggtgctaagttcaaggacgagaactttatcaagaagcatacaggagctgggattctctcaat

SEQ ID NO: 170391 - DNA, 414 bp, Arabidopsis thaliana nossen
  unsure (1)..(414): unsure at all n locations
gggggaccaagccttgcggaaaagaaaagttnggnttctgtactttcttctctataaaccctnncgtgttcntgtgaaaattattagggtttcgaacaancaaanatgttcaaaaaccaatacgacacagatgttacgacatggagtccaacaggtcgtttattccaagtggaatacgccatggaagcagtgaagcaaggatctgcagcaattggactcagatctcgttctcatgtcgttctcgcttgtgttaacaaagctcaatcggagctttcttcgcatcataagaagatctttaaagtcgatgaccatatcggtgttgcaatcgctggtctcacaaccgacagtcgtgtattgtcttggtatatgagatcggaatcgattaatcactcttttacttatgaatctcctctt

SEQ ID NO: 170392 - DNA, 340 bp, Arabidopsis thaliana
tcaaaccacccttccgtatgcgatgacgacaacacgacaggtacggggtgtctcagaatgtcgagcatatcggtcaagttgcatgtccatgcccttgcggcactcgaggttgaccaaggcagcatggtaccactgactaccgtcacaatcaagttacgtctgcaagcccgtcttcatcaggtcaagcatgcagaaaatgccatcaaacgtaccactagtgtagatgttagatcgctgaggtaccacaagacaactcaggtacagtcgcgaatccacaatggttggtactgcttcgagtatacactcatttggtatgcatccccttacataatactaggga

SEQ ID NO: 170393 - DNA, 423 bp, Arabidopsis thaliana
acgacagaagggggcagtggtggtgggtttccgttgaagtcgtttggtgatcggaattttgcttctcatgggtttaaacctaagaatttcagtaagcctgaacccaatttctctcaggatctggattatgatgatgagtttgatgatgatagagcagagagggaaggattcaacccgaggattcaaagttctaggagctcttcgcgggtgaatggctacagcaggaaggatgggagctatcctcgaaacactggtgcttccaatggctatggatcgtcttctaggttcaagcatgagcaaatgaatgcagcagcagaagttgagtctgacccgatcgatgaagttgtttcttctgttaagatgttgacagaaatgtttgtgacggtggagaattcgaagatggagatgatgagagaaatgggg

SEQ ID NO: 170394 - DNA, 418 bp, Arabidopsis thaliana
gtccagtcacaatctcgggtcgacctcgcttccgctgacacatcactacagctgcgagaacattcaacttcggggcccaggatgaaagcttgtagctcattacatgaaactctctgcatgcagctgcacatgctacggagagtgacatagttagtatgctaaggttagtctctaaaagtggttcaccaatatgtgtgctgcagacgcatcccaacgttgcttcagctcactccattcacatcgcatattacttacgtcctcctgcttaaccgttctctcccggtcatctcagcacctagtctttctacaccaccgctaaatcagtctttacaccaattatcgtgcgtctaactgttacaggtgcgttccacactagattcatgaaaccagcagtctcgagattatcagctgcattggc

SEQ ID NO: 170395 - DNA, 404 bp, Arabidopsis thaliana
gtcgagtcaagcgtcggtacggttgcgatacgacaacagaacgggatcgaaaggctgcagaacacgacattatagtcatgatatagaggaaatgatgaatttcatctccgatcaggtaaagaaactcgcaagctcaacaccagaagagccataccacaataagccagtcgaaggaaccgaaacagctacaagaccagctaccaacgccgagctcatgggaagttccatggtttgtacttaagctgctcaagccgcagctcgttaacaatcaaaccaactccaaaagggtaaaatcgccggagcctctgctgatatcttagacgctgccgagaaatacggtaagttccattaaaagagtaagaatggtcaatacctcgacaaagctgagaagtatctcaacgact

SEQ ID NO: 170396 - DNA, 403 bp, Arabidopsis thaliana
tcgggtcaagcgtcgcttcgtgcgacgacatcgatagagcgggaagaatgagatcgggggaaagagcatgaaccctagcagcagacacaacacgggttcatcgagaagcaagatgactttcacgcgaaggaacggtgggaggaacaagcacaacagatgacacgtcaatccaatcagatgctcgaactgtggcagatgttgccccaaggacaatgccattaagaggttcattgtgaggaacattgtggagcaagctgctattagagatgttcacgaagctagcgtctatgatggatacacattggcgaagctatatgcaaagacgcaatactgtgtctcctgtgctatccactcgcatgtcgttagagtccgttcccgcaccaaccgcatggttcgtaatcct

SEQ ID NO: 170397 - DNA, 122 bp, Arabidopsis thaliana
actaaaaaaaaaaattgaaagatgggagccggtaaatggaagcggccgctctacatgatcaaagctcacttacgcgtgcttgctacgtcacatctcttcgatagtgtgacccaaattcaatt

SEQ ID NO: 170398 - DNA, 391 bp, Arabidopsis thaliana
acgacagaaggggctcagaacaatgtcatgtttgaaggtatcctcctaaaaccgagcatggtgactcccggagctgagtctaaagacagagctacccctgaacaagttgccgcctacaccctcaagctcctccgcaacagagtccctcccgcagtccccggaatcatgtttttgtccggaggacagtcggaggtggaggcaacactcaacttgaacgcaatgaaccaggcaccaaacccatggcacgtgtccttctcctacgcacgtgcgttgcagaacacttgtctgaaaacatggggcggcagacccgagaacgtgaacgcagctcagaccactctcttggcccgtgccaaggccaattcgttggctcagctcggaaaatacaccggtg

SEQ ID NO: 170399 - DNA, 385 bp, Arabidopsis thaliana
gtgcaggtcctggtctagaaggcccgggtagacgtacgcgtacgcgtccgtgtgggtgcgatacgacgagacaacgggacaggagagaagatgcaaagcaagtcatacacgttgtcaagatcaatcagtcttctctgcgtcaccgtcgttcacctcagactgactccgacacagtgttgggtcagcgatggctagtgcggcgtcaggaatagcattccataagagactgccagccaagatttcggcggctgacagcgaacgagaaaaagagtttcactgacaaggacttcgaggagaagcaaaaccaagtgattggtgagaaagttggcgaagctagactaacttacgaggactttgcagtaaatcttccagctgacgaatgccg

SEQ ID NO: 170400 - DNA, 275 bp, Arabidopsis thaliana
acaaaaaaaaaaaaaaaggctctaatgatgacatttaatcggaattaaattgtttcaggcatgagattgtgggcgtggtgactgaagttggagccaaagtgaaaaaattcaacgctggagacaaagtcggagttggctatatggccggctcgtgcaagtcatgtgacagctgcaatgatggcgacgagaactactgtccaaagatgatcttaacgtccggagccaaaaactttgacgataccatgacccatggtggataatccgaccacatggtg

SEQ ID NO: 170401 - DNA, 367 bp, Arabidopsis thaliana
gaaaagagagaagaagcaaaaagagtcatattcgttgaaaacatcattcactcttctctgcgtctccttctttcacccgaaattgtctctgacaccgttttgattcagccatggctaatgctgcgtcaggaatggcagtccatgatgactgcaagctaagatttctggaactgaaggcgaaaaggacacaccgtttcattgtctacaagattgaggagaagcagaagcaagtgattgttgagaaagttggtgaacctattctaacttacgaggactttgcagcaagtcttccagctgacgaatgccgatacgccatttatgatttcgactttgtcactgcagagaattgccagaagagcaagatttt

SEQ ID NO: 170402 - DNA, 315 bp, Arabidopsis thaliana
gttccacacatttctagtatggacaatgcctctctacttggagacgcaatttcttacatcaaggagcttcaagagaaagtcacgatgatggaagatctagagtacgaacagataagagcttatcagaatcatacacagtaacagtacaagaaagtccacaagttgacattcaagctatgaatgaagatgttgttgtaagagtaatctcgcctttggattcacatccagcttcaagaatcatacaagcaatgagaaactcaaatgttagtccaatggaagctaagttatcattagctgaaaacacaatgtttcaca

SEQ ID NO: 170403 - DNA, 306 bp, Arabidopsis thaliana
gacacatctcactgctcactactctcactgtaatcccttagatcttcttttcaaatttcaatggcgtccggtgatgttgagtatcggtgcttcgttggaggtctagcatgggccactgatgacatacctcttgagactgccttcgctcaaaatggcggcgttattgactccaacatcattaatgatcctgagactggaagatccatgggattcggattcgtcaccttcaaagatgagaaagctattaatgatgcgactgagggaatgaacgcgacaccatctcgaatgtcgtaccatcactgttaa

SEQ ID NO: 170404 - DNA, 409 bp, Arabidopsis thaliana
ggtctagaattcacgggtccatccacgcgtccgaagacgacagaaggggggggtcacactgaccaggcccgggcgactgtttaccagacacacaggtctcggcacaatcatacgaccatgtgtaggggctgacgcctgcccactcccggaaggttaatgaacttggagacctgatgacaggggagccgagtaccgaagtcccgatgaacggcggccgtaacgataacggtctcaacgtagcaaaattccttgtactgtaagttccgacccgcacgaaaagcttaactatctgggcactgtctcgcgaacaggctcggtgaccatagacatgtcttgtaacatgcggactacctgcatctgaatacagaaacctatgaagcttcaccgttccctgggattggctttgggc

SEQ ID NO: 170405 - DNA, 345 bp, Arabidopsis thaliana
ggagaagagatcgagagacgaatagtttgatcatcttgtgataaaaggaatggctgcttcagtgatgctatcttcgatgacattgacatcagctggtttcaccgtggtgaagacggtggccagaggattaccgtcgctcataagagctcgtccctcactcataattgtccccagtagtgtcacgaacatcaagaccgacaagaccttcgcaattaacggcaacatggacttgagggactgcgtcgacgcctccggcagacagggcaacgtagaaggtgtttagaactaggtcgacacgtatggatctaatgtcgatggatacagtcctatttacaaccagaacga

SEQ ID NO: 170406 - DNA, 395 bp, Arabidopsis thaliana
cccacgcgtccgcgacagaagggggagaagagatcgagagaagaatagtttgatcatcttgtgagaaaaataatggctgcttcagtgatgctatcttcggtgacattgaaaccagctggtttcacggtggagaagacggcggctagaggattaccgtcgctcacaagagctcgtccctccttcaaaattgtcgccagtggcgtcaagaagatcaagaccgacaaacccttcggaattaacggcagcatggacttgagggacggcgtcgacgcctccggcagaaagggcaagggatacggtgtttacaagtacgtcgacaagtatggagctaacgtcgatggatacagtcctatttacaacgagaacgagtggtcagcgagtggtgacgtgtacaa

SEQ ID NO: 170407 - DNA, 354 bp, Arabidopsis thaliana
gaagacgacagaagggggggaaacaccaaaacagatcaccggcgatcggaaaccggcgacgtaagctatgagcagtacggcagggaggctcgtgacttcaaaatccgagcttgacctcgatcaccctaacatcgaagattaccttccttctggttcttccatcaatgaacctcgcggcaagctcagcctgcgtgatttgctagacatctctccaacgctcactgaagctgctggtgccattgttgatgactcgttcacaagatgtttcaaatcaaatcctccagaaccttgggactggaatatttacttattcccactatactgctttggggttgttgttagatactgtatcct

SEQ ID NO: 170408 - DNA, 319 bp, Arabidopsis thaliana
taacgttgcaatcaaactacagtacgttacggttgcaaaaacacgacataatgctacagttgccagaattcgacagaagggtacggctgcaacactactacatcatggtattgctgccagtagacgacacacgggttttgctgccttagactacacaatgcggatgctgaatgaagatcagctgcttaatgctgtgttacttgtgtttgccaacatgcaagattttccatatgctatgaactctgcataaatcacaaagcatcttgctcttcactccctccatccgtgtcattggtatatctaaaccacatgtgccact

SEQ ID NO: 170409 - DNA, 390 bp, Arabidopsis thaliana
ggtcttacgaatgctgaggatagagaagaagtagatgcaaaggaagaagaaggtcaaattgttggggacactctcactctcaaaagtagtcttcgaaaggttgattcaaattcaacagaagctgagaagagggagaagaagaaggtacaatgggtggatgtgattgggaaggaacttgctgagattcgagaatttgaacctagtgatgaagatgatattgattctgatcgaggcaaaacctgtgtttgtattatcctgtgatccgtccacttaagtttaactgggagatttaaggcaaaagacaaagttggtggcttcagcattaaattccatatacatggagattgtggagcaagtttcaaatataacaattgctatgcaatcatatct

SEQ ID NO: 170410 - DNA, 190 bp, Arabidopsis thaliana
gaaggggacacttaaagagagaaacaaatccttcttctaaaatattcttcaatcttcttctcgaagcttctccaaaaatggcgattacttcttctagaaccagcagatcaaacggatctgcttcgctccgatccaaatcagcgtctacagcgtttttcagcagccacaatcagaacataataatttcgca

SEQ ID NO: 170411 - DNA, 324 bp, Arabidopsis thaliana
  unsure (1)..(324): unsure at all n locations
ggagtggagcatgttgaggtaaacttctacatccgtgggcctcaaggagcagggaaagtgtacacggagatgtttaaagacaaggcagagaaggaatggaaatacacgtacctgatcgtagagattttaacaccttccccagccaaattgatgctggagtcttatttgcctgcctaaagcactcgtatttatgactcagcagatccggaaaacattcagaaacggcttagattgttttagttggggtgttggagaaaagagagagaattgtgttacacatgagctgtangaatgacttcttatcaagcaactgtttgctaattg

SEQ ID NO: 170412 - DNA, 348 bp, Arabidopsis thaliana
gaagacgacagaagggaaactcaaaatccaaccacacacacaatttctcttcctctctagcattaacatcgatcagaaagaccgagagagagagggagaagctgattgattatggctgctgcttcgatttctgcaataggatgtaatcaaactttgataggaacttccttctatggaggatggggaagttccatctccggagaagattaccaaaccatgctctccaagacagttgcgccaccgcaacacgccagagtctcaaggaaagcaatcagagcagttccaatgatgaagaatgtcaatgaaggcaaaggcttatttgcacctctagttgttgtcacacgcaac

SEQ ID NO: 170413 - DNA, 347 bp, Arabidopsis thaliana
  unsure (1)..(347): unsure at all n locations
ggagctcaaattgaaaacacgagcttcctaaaccctagcagcagagtcttccgtaaacccagctctcttagctctcacgcctcgtcaattgttgacctgtaggatagatatgggcaacgagagcaaaacctcggctttggaatcggagaaggtcaaagagactgatgctgtgattgaagatggagttaaggagaaaaagaagaagaagagcaagtcgaaatctgttgaggctgatgatgataaggagaaagtttcaaagaaaaggaaaagatcagagcctgaagagactaaagaagagactgaggatgatgatgaagaatcaaaacgtgggaaganagaagagaatg

SEQ ID NO: 170414 - DNA, 307 bp, Arabidopsis thaliana
ggagatcaaatcaagagtagattgatcagcttgtcatatgagtaatggctgcgtcactgcagcgatcctcgctgccattgcaatgagctggtttcactgcacagaagacagcagcgaggcgattagagtcgcgcagatcagctcatctctccttcccatctgtcgtcactggagtcgagtcgatcaaatccggcacgcccttcgctactaacggcaccatagccttgacgtacgggatcgactcctcgcgtacagcaggcaagggatacgatgttgagtagtccgtcgactcgtatggtgctgacct

SEQ ID NO: 170415 - DNA, 445 bp, Arabidopsis thaliana
aaactcagcactcctagctttggagacttgaaccatttgatctccgcaacaatgagcggtgtgacttgctccttaaggttccccggacaactaaactctgacctcaggaaactcgcggtgaacctaatcccattccctcgtctccatttcttcatggtgggttttgcgcccctcacttcccgtggctcgcaacaatacatctcactcaccgttcctgagctgactcaacaaatgtgggactccaaaaacatgatgtgtgcagctgatccacgtcacggacgttacctcacagcctctgctattttcagaggacagatgagcacataagaagtcgacgagcaaatcctatacatacagaacaagaactcgtccttacttcgttgagtggatcccaaacaacgtgaaatccagcgtttgtgatatcgcaacataagggctcaaaatg

SEQ ID NO: 170416 - DNA, 462 bp, Arabidopsis thaliana
  unsure (1)..(462): unsure at all n locations
cccactcgcccgcccaagcgtccaaccgttgctacaggaccacagaaaggtacggctgctagaatacgacaaaacggtacagctgcaagactacgacagaacggtacagctgcggacaaaacttcattattgctacnggctgctacttaaccaagattgggtaccgatgcccgcatcagacaagtcggtaccgctgccaaaaacactactgctgggtactgtggcacacatccatcgtttggttgcggctgctataaacccttcaacggtccacgatccagatgttgtcagcacgacagctcactcgtcacttcgtggatcccgtggagccatgattttcttcagaaagggtgttaaggaaattaacaagcacgggaaagaggttttgtatgattttggagacaagatcaaccaagctgtcttccctggtcttcaaggtggtccacactaccacactatcac

SEQ ID NO: 170417 - DNA, 237 bp, Arabidopsis thaliana
ggagaagagatcgagagaagaatagtttgatcatcttgtgagaaaaataatggctgcttcagtgatgcaagcttcggtgacattgatacgaggtggtttcacggtggagaagacggcggctagaggattacagtctctcacaagagctcgtcgctccttcaaaattgccgccaatggcctcagcaagattctgatcgacgagcccttcggcattaagggcagcatggacttgaagga

SEQ ID NO: 170418 - DNA, 389 bp, Arabidopsis thaliana
acccatttcttggcttacaacaacaaatcttaaacgttttactttgtgctgcactactcaacctcaatggccgcctcaacaatggctctctcctcccctgccttcgccggtaaggccgtcaagctttcccccgcggcatctgaagtccttggaagcggccgtgtgacaatgaggaagactgttgccaagccaaagggcccatcaggcagcccatggtacggatctgaccgtgtcaagtacttgggtccattctctggcgaatcaccgagctaccttaccggagagttccccggagactacggatgggacaccgccggactttcagctgaccccgagacattcgcaaggaaccgtgaactagaagttatccacagcaagtgggccatgct

SEQ ID NO: 170419 - DNA, 326 bp, Arabidopsis thaliana
acgcttgagcattgggtttatttctcgtgccatctcaatgaatgggaagcttttgatccaagatcgaaacggtggatgcatttgccgagtatgccacaggacgagtgtttcaggtatgcagataaagagtcattggctgtaagaactgatttgcttgtgtttggttgggaagtgatgttcttacgtaatctatacatacagtcttttgactaactcttggtctacagcgaagagtatgaacatgcctagatgtctgtttggctctgctagttactgagacattgcgggttcagcgggtgggtgccactcgagcggtaggattcttg

SEQ ID NO: 170420 - DNA, 323 bp, Arabidopsis thaliana
taatggtggtataatacaatgtataacttggggtgaaatttaagatgtaatcttaatgttgtaaatgtgtactatttctttttatactttttctaaaagataaaggtgaaataattagaacacatacataaatacattttttataagtatagaagaattaagttttatagtggaagtgtttgatgtttagtttgtttaaaaggcatggctttgtcttgtgttgtaatgtaatgtgtacattaaatttttgttcatacaataataatatcaatgtgaatgatatattataaaaaacaaaaaaaattagaaaaaaaacaaaaagc

SEQ ID NO: 170421 - DNA, 413 bp, Arabidopsis thaliana
cggaagacgacagaagggggggctttgcaaactctacactgcttcgtctcttacctcgacattgatctccttaaaatggcgtcggaaaaaaagctctcgaaccccatgagggacattaaggtccagaaacttgttctcaacatttccgttggtgagagtggtgatcgtctcactcgtgcctccaaggtgttggagcagctcagtggacaaacccctgtcttctctaaggcgaagtacactgtgaggtcttttggtatcaggcgtaatgagaagattgcgtgttatgtgactgtgagaggtgagaaggcaatgcagcttcttgagagtggtttgaaagttaaggagtatgggcttcttaagaggaacttcagtgacactggttgctttggatttggtatccaagagcacattga

SEQ ID NO: 170422 - DNA, 338 bp, Arabidopsis thaliana
agtacggatgctacaagacgacagaatggcattaaaacagaaaaatacactagcataatttcaatagacgcctcaacaatggctctctcctcccctgctttcgccggaaatgctgtgaacctttcacctgctgcatcacaagtccttgaaagcggtcgtgtgacaatgaagaatactgttgccaatccaaaaggtccatcaggcagcccatggtactgatcagaccgactcaagtacttggatccattctctggcgagtcacccaactaccttactggatagttccctgaagactacggatgggacacagctggtctatccgctgaacccgagacatt

SEQ ID NO: 170423 - DNA, 385 bp, Arabidopsis thaliana
cgtccgtacaaaagacgacagaaggggacggctgagagaaagtaaagagaaaaaccctaatcttcatcttcatcttcacccgccgtcggccgtaagaggtttcgaagaagcaaagtgagcaacaatggcgggaggcaagatcaggaaggagaagcccaaggcttcgaatagagcaccatcgaaccattaccaaggaggaatatcgttccacaaatcgaaagggcaacatatccttaagaaccctctgcttgtggattcgatcgttcagaaagctggtatcaagagtaccgatgtgattctcgagatcggtcccggtactggaaacttgaccaagaagcttctagaaactggcaaagaagttatcgccgtccaacttgactctcgt

SEQ ID NO: 170424 - DNA, 398 bp, Arabidopsis thaliana
cgggtcgaccacgcgtccgagacaacagaagggggagaagagatcgagagaagaatagtttgatcatcttgtgagaaaaataatggctgcttcagtgatgctatcttcggtgacattgaaaccagctggtttcacggtggagaagacggcggctagaggattaccgtcgctcacaagagctcgtccctccttcaaaattgtcgccagtggcgtcaagaagatcaagaccgacaagcccttcggaattaacggcagcatggacttgagggacggcgtcgacgcctccggcagaaagggcaagggatacggtgtttacaagtacgtcgacaagtatggaacctacgtcgatggatacagtcctatttacaacgagaacgagtggtcagccagtggtgacg

SEQ ID NO: 170425 - DNA, 458 bp, Arabidopsis thaliana
  unsure (1)..(458): unsure at all n locations
gtcgacngacccgtccgcgaaaagaaacagaagggatatgagagagcttcgggagcttttctctaagcttaatcctatggctgaagagtttgttcctccttctctgaataaacaaggaggtaacggtgttaacggtggtttcttcacctctgcaggttccttcttccgcaacaatggctttgctggtaccggaaatggcggatacggtaacgaaaacggtggtttccgacggaagaagagttttggtcaagggaaacgaaggatgaatgctcggacaagcatggctcagcgagaagatgttatccgtagaaccgtctacgtctctgatctcgatcaacaggtcactgaagagcagcttgctggtttgtttgtgagctgtggacaggttgttgactgtcgcatatgcggtgacccaaactcggtccttcggtttgcattcatagagttcactgatgaag

SEQ ID NO: 170426 - DNA, 434 bp, Arabidopsis thaliana
aagaggagagaaccaaagagacaaggaggcatgtttgtgaagatcaacatgtatggtgttcccattggtcgtaaagttgatctcagtgctcataatagctatgagcagttatctttcacagttgacaagctcttcagaggtcttcttgcagctcaaagagactttccatcatccatagaagatgaaaaaccaatcactggattattagatgggaatggagaatatactcttacatatgaagacaatgaaggagacaagatgcttgtaggagatgttccatggcaaatgtttgtgtcttcggtgaagaggctgcgtgtgattaaaacttctgagatttcttcagcattaacatatggaaatggtaagcaagagaaaatgagaagatgaagaaaaagatcttttacagcttttagagaagtagagagatgttacta

SEQ ID NO: 170427 - DNA, 365 bp, Arabidopsis thaliana
  unsure (1)..(365): unsure at all n locations
cgacagaaggggggagctatcgaaaattctgaatctgaaaggtttgagtgaagatgtcttcagatcggaaggttctaagttttgaagaagtttcaaagcacaacaaaactaaggattgttggcttattatttccggcaaggtgtatgatgtgactccattcatggatgatcatcctggaggcgatgaagtcttgttgtcctcaacagggaaagatgctacaaatgattttgaagacgttggtcacagcgacactgcaagggacatgatggacaaatatttcattggtgagattgattcgtctagtgttccagcaactaggacatacgttgcnacacagcnaacagccctacaacaagacaagaca

SEQ ID NO: 170428 - DNA, 356 bp, Arabidopsis thaliana
cctacggtccggaatccgggtcgaccacgcgtcgctgaaaaaaacaacagaagggggagaagagatcaaaagaagaatagtttgatcatcttgtgagaaaaataatggctgcttcagtgatgctatcttcggtgacattgaaaccagctggtttcacggtggagaagacggcggccagaggattaccgtcgctcacaagagctcgtccctccttcaaaattgtcgccagtggcgtcaaaaagatcaagaccgacaagcccttcggaattaacggcagcatgaacttgagggacggcgtcgacgcctccggcagaaagggcaagggatacggtgtttacaagtacgtcgacaagtat

SEQ ID NO: 170429 - DNA, 188 bp, Arabidopsis thaliana
agggagatcagaaagagttgccaagggaatttggatcttgttgattatggctcgaaattaacctcactggatccgaccgaagaggatttgtatcaggccagattgacgtagaacacgcccgactccgtttactgaaacgtggacgagatatggcaagacggattggaagacgattacgcagcagagaa

SEQ ID NO: 170430 - DNA, 426 bp, Arabidopsis thaliana
cccaagcgtccggtacgattctagtgggtatggtgagcctaaactggctctgatcaggcggtggatcaacggtgttgttagtcggaaagtgaaatatctcggtgttttggatgattcatgtgataattatgagttcgagatgcctccaaccctttacacttgtgagaccttagtatacttaacgctcgatggactatccttggctagtcccaagtttgtttctttaccttctcttaaagaactccatctaagtatagttaagtttgccgaccatatggcgttggaaacactcatctcacagtgcccagttctagaaaacctaaatatcaacaggagtttctgtgatgattttgaatttacatgtgtgcgttctcagtcactattgagcttcactcatgttgcggacactgatgaaatgttgaatga

SEQ ID NO: 170431 - DNA, 471 bp, Arabidopsis thaliana
gtcggattccgggtcgaccacgcgtccggcgaaaagacgacagaagggcataaaaaaaaaaaacacaaaaaagtttcaatggccgcctcaacaatggctctctcctcccctgctttcgccggaaaggctgtgaacctttcccctgcggcatcagaagtccttggaagcggccgtgtgacaatgaggaagactgttgccaagccaaagggtccatcaggcagcccatggtacggatccgaccgagtcaagtacttgggtccattctctggcgagtcacccagctaccttaccggagagttccctggagactacggatgggacacagctggtctatccgctgaccccgagacattcgcaaggaaccgtgagctagaagttatccacagcaggtgggccatgctcggagccctaggctgcgtcttccctgagcttttggccaggaacggagtcaagtttggagaggcagtttgg

SEQ ID NO: 170432 - DNA, 189 bp, Arabidopsis thaliana
ggaagaagaaagactctctatgaagtagaaggttctgttttgtaatcaaatgaatatcgagaaaagtgataaattattatgtctgtttgttctaatttaaatcttaatttaattttgcttaaaataaaagaataaaaaacaaatgacagtaaagaacaatttaaatccttaagataaaggtaatacata

SEQ ID NO: 170433 - DNA, 385 bp, Arabidopsis thaliana
acggtcgtaattccgggtcgaccacgcgtccggcgagacgtccatacagcggggagaagagatcaagaggatagtagtttgatcatcttgtgagaaaaataatggctgcttcagtgatgctatcttcggtgacattgagaccatctggtttcacggtggagaagacggcagctagaggattaccgtcgctcacaagagctcgtctctccttcaaaattgtcgccagtggcgtcaagaagatcaagaccgacatgcccttcggaattaacggcagcatggacttgatggacggcgtcgacgcttccggcagaaagggcaggggatatggtgtttacaagtacgtcgacaactatggagctaacgtcgatggatacagtcctattta

SEQ ID NO: 170434 - DNA, 419 bp, Arabidopsis thaliana
  unsure (1)..(419): unsure at all n locations
cggtcggttacncgggtcgagacacacgtttgangaaaaaaaggtaagggtgcgaaaaaaacacaaaaagggaaaggttggaaaaaaacaaaaaaagggaacgatgaatcaatttatagctccgatattgttattcatgatatttcaaaatcgataacatcacaatctaattcatctgagtaagtttacaagcgaaagatttctcatctctatgggattaaatcccgagatattccaaagaaaaaaaaaataataataataaacgattaaattatggaagtaaatattcttgcatttattgctactgcactcttcattctcgttcctgctgcttttttgcttataatttacgtaaaaaccgttagtcaaaatggataatttgaataaaattttactatcacaaaaaaaaaacatataac

SEQ ID NO: 170435 - DNA, 221 bp, Arabidopsis thaliana
aaaaaaacaacaaaagggtacggctgcaaaaagacaacaaaagggtacggctgcaaaaagacaacaaaagggtacggctgcaaaaagacgacaaaagggtacggctgctaaaacactacagaatgggccttaatacatcaattaatgctatcgtcggtgacattggacccggctgttttcactgtgcagaacacggctgctatacgattaccgtcgctcac

SEQ ID NO: 170436 - DNA, 399 bp, Arabidopsis thaliana
ggcgtcagaagaattttgactagaaagaaaaaaaatcaatttcgacggccatttttttctctcatcctttttgattcctctgtttcaccaagtagacgaagtagaagaagaagaagaagaagaaagttttcacctttactctaaaagtttcactttttatgtctgctttgaagctctgagatcggagaaagcaatatctatggcggaagcaagacgattcagcccagttcatgaattagatgttggacaaatactctcagaagcacgacatcgatggcttcgtcctcctgaaatctgtgaaattttacagaattaccaaagatttcaaatttctactgagccacctactacaccatcaagtgggtctgtttttatgtttgatcgaaaggtgctcagata

SEQ ID NO: 170437 - DNA, 340 bp, Arabidopsis thaliana
cccaagcgtccgtacggctgccaaagaacaaagaaaggtacacaatcaaaatatcccctcaacactaaaataattgtaccgactctctctctctctccgtaacaaaaaaatcaccaatggcaaaacaatatctctttgtactcctctcaatctcctatctcttatcactggagctcacggcggccaccgcagcctcacagaccggagcttccaaaaaagccataaacttcatccaatcttcttgcaaaaccaccacataccctgccttatgtgtccactcactctccgtctacgcaaacgacattcaaacaacccctaaacgttaacctgagaacgctat

SEQ ID NO: 170438 - DNA, 356 bp, Arabidopsis thaliana
ggctcgaccacgcgtcaggaaaacgacagaagggggagaagaagaagttgaaaaaattgtaaagtcagtctctccgactcttccttccttccgtgttcaccattgctacacgttctccacgaactttccgatgcccagtcgtcggggacatagctagaccgtcggatctcctgcaaccacatcttccgattacagtaacactactttcaccgatcgttccttcgcgacaacccctgcccgtacatcgaacgacacaaccacctccatcgctcgtcgcatctccggtatcttcatcaactgcttcactcctcgcgattcagtttcctccaactacatcgaccattcagagtcctctt

SEQ ID NO: 170439 - DNA, 414 bp, Arabidopsis thaliana
ggaagcagaacacaagaaacgtgagaaactttgagaagaccaagaagaagaagcagaagaagaagaaaatgaaattggtttggtctccggaaacagcatcaaaggcttatatagacaccgttaaatcgtgtgagaatcttgaaacgccggacgcggcggagttaatagcggcgatggcggcgggatggaacgtgaagctgatcgtggaaacttggtcagaaggagacgcaatagcttcaagtattggtttaaacgtagcaagcaaacacgcaaacgctaaacacatatgtatagtacaaaacccaggatcagaatctgcttacctcaaagctattcaagaatcttcaatctcccttgaactttccaagagactatcgtcgctgaagaaaccggtaaaagcgatgaagaagctac

SEQ ID NO: 170440 - DNA, 368 bp, Arabidopsis thaliana
gattcacgaaaacaaaccacataaactagtcaaagaagaatagatgagttacattataaaaaagttcaagtgagagaaagagaggtccaatggcggagaaagaagaggatgtgaagcttctaggtttttgggcaagcccttttactcgtagagttgagatggctttcaagctcaaaggcgtgccttacgagtacttggagcaagatatagtgaacaagagccctttgcttctccagataaatccggtttacaagaaggttccggttcttgtctacaaagggaaaatattatccgagtcacatgtgatcctcgaatacatcgaccaaatatggaagaacaatcaattcctcctcaagatccttacgaga

SEQ ID NO: 170441 - DNA, 458 bp, Arabidopsis thaliana
cgggtcgaccacgcgtccgtgcaagagacgacagaagggcagggatcagcggatgttgcttataggactccgctggcaccttatgagaaatcaaagtttttaggtttaatggggaggaggatgtggtggcggaagtggcggagatggaggagatttgccggaaaatggaagatgggcttgaggggttacagagaagagttagagaagtgtttcataggttggtgaaaagcagaagtgagatacttgaagtgattgatcactgattgtaatcttttaactttgttgttgtgaaaatttaatctttgagttaactcttttgattaagaaaagagaacaaattacaggtttttattgttttatttatgtgataatctttgatgtatataaattacaattcgtaattaaagaaagataatgtatacaccaggtttaatactaagattgcaaaactattgcca

SEQ ID NO: 170442 - DNA, 447 bp, Arabidopsis thaliana
gcgaaaagacgacagaaggggaaattaaattcgatttttgagacaaagctcgacaagtcgtcggcggcggtgtaaaaatagtcggagctatggcgatgcaggccggagttggcttatccaggatctttctcttagccggagcaggttacactggtacgatcatgatgaagaatggaaaattgtcggatttgttgggtgaattgcagagtttggtgaagggaatggagaaatctggagaagggtctgagggagattctgatgtttctgatgctatagctgcacaggttcgccggttggctatggagattcgacagctagcttcgcagcaacacataacggtcatgaatggagtttctggtgcaaacctacaagcccttgctgttcctgctgcggcattgggagctctcggatatggttatatgtggtggaagggactctcattcactg

SEQ ID NO: 170443 - DNA, 436 bp, Arabidopsis thaliana
  unsure (1)..(436): unsure at all n locations
gggtcgncacgcgtccgatgcaatgagccacactaagctcataggtttttagccacacaccagaagacgacagaagggagagagaaaattcagcatttttgatagctcaagcacttgattctttccaaaggggtttcctgagatcacaaaggccaagtaacaatggcgaaaggagttgcagttttgaacagcagtgagggtgttacggggactatctttttcacccaggaaggcgatggtgtgaccactgtgagtggaacagtttctggccttaagcctggtcttcatggtttccatgtccatgctcttggtgacaccactaacggttgcatgtctactggtccacatttcaaccccgatggtaaaacacacggtgcccctgaggatgctaatccacatgctggtgatctaggaaacatcactgttggagatgatg

SEQ ID NO: 170444 - DNA, 438 bp, Arabidopsis thaliana
aaagacgacagaagggatggctcgatggctcgctaccaggagatttcgggttcgacccattgggtttggggaaagacccggcttttctgaaatggtacagagaggctgagctgatccatggccgatgggcgatggcagcggttcttgggatcttcgtcggccaggcctggagcggtgtggcatggtttgaagctggagcccagccagacgcgatcgctccctcctcgttcgggtcgcttcttggaacccaattgcttctcatgggttgggtggagagcaaacgatgggtcgatttcttcaacccggattctcaatcggttgactgggcaacgccatggtcgaagaccgccgagaatttcgcgaactgtaccggcgatcagggatacgccggtgggagattcttcgatccgttgggtctcgccgggaaaaaccgccacc

SEQ ID NO: 170445 - DNA, 438 bp, Arabidopsis thaliana
ggacttcgagagaagaagccagcaaggaacgatggagattattacggcatcatcatcatcatcatcatcatttggagattaggcttgttgtttgatttcgctacgagaaaatggacaagtacgagcttgttaaagacatcggtgctgggaattttggagtggcgaggctcatgagagtcaaaaactccaaggaactcgttgctatgaagttcatcgaacgttggacttaaaatggttgagaacgtggcgagagagattattaaccacagatcacttcgtcatcccaatattatccggtttaaggaggtggttttgacaccaatgcacatcgccattgctatggaatatgctgctggcggtgagctatttgagcgtatatgtagcgctggaagattcagtgaggatgaggcaagatactttttccagcagcttatctca

SEQ ID NO: 170446 - DNA, 257 bp, Arabidopsis thaliana
cataaaaaaaaaaaacacaaaaaagtttcaatggccgcctcaacaatggctctctcctcccctgctttcgccggaaaggctgtgaacctttcccctgcggcatcaaaagtccttggaaacggccgtgttacaatgaagaagactgttgccaagccaaaaggtccaacaaggaacccaaggtaacgattcgaacgaattaaattattgggtccaatctctggcgaatcaaccaactaccttaacggaaaattccctgg

SEQ ID NO: 170447 - DNA, 433 bp, Arabidopsis thaliana
atggtattaaaatattgtttctttagatatttatagaatatccaaagattttagtaaactgtattacgaaaatatctatcagattttgtcaggattatcgtcttaacattttcttggttttggtttgactagttgaccgtgccgccaccgaaatctgaagggaggcctatttactaccacatcgcggacgaagaaggacacgtggaggaagaatcagccgttggatatgcgttgactttcaaaggaaatagcgtggaacagttgacgcaggcgttgcaagaagagactagtatggatgatgttgtggtctgtacacgccatccttcaaacggcaagctgtttcctcttcgtttgcaacttccacctaatactggaacaatgcatgtcattctagtaacctcaaatacttaacggcaagctgtgtggttccccc

SEQ ID NO: 170448 - DNA, 425 bp, Arabidopsis thaliana
gacagcaacacatatagagatatatactattaaacaataacataacaaagaaaccattttttctcttttgttattgacttaaacaaaaactatcaacgaataattatccttttttgagtttttcccatttcttcttcgtctccatttcatcgtcttctcgctgttcggctatattccgtttcgttggatgaggagaagaagaaagtgaaaaaagttgtgaaatagagagagtttgtttcatgggcaattcatgtcgtggttcttttaaggacaaaatctacgagggcaatcatagtaggcccgaggagaattccaaatccaccaccactactgtttcctctgttcattctcctactacagaccaagatttctccacacagaacaacaatccagctcttgtgaatcctgttaaagaaaccattatg

SEQ ID NO: 170449 - DNA, 421 bp, Arabidopsis thaliana
gaaatcaaaagagagagagatccacaaaattggattgaatcgtcgccggatattccaagagtagagagcttagtttgtctcgcgttgcgtctagatttactgaatatggaggcggagaagtggaacagcgacggtggtgaatacacgtcggaggacgaaggtacagaagattaccgacgcggcggttaccacgccgttcggatcggtgactcattcaaaaccggccggtacgttgtccagagcaaactcggttggggccatttctctactgtttggctctcctgggatactcaatcctctagatatgtggctttgaaggtgcaaaagagtgctcagcattatactgaagcagccatggatgagataacaatattgcaacagattgcagagggagacactgatgataccaaatgtgttgtga

SEQ ID NO: 170450 - DNA, 472 bp, Arabidopsis thaliana
gaagacgacagaagggggtcctgtcgatactcgcacaacatctcctatccataaatccgcgcctgcttttatagaattagatacaaaattatcgatttttgaaacaggaattaaagtagtagatcttttggccccttatcgtcgtgggggaaaaattggactattcggtggggctggcgtgggtaaaacagtactaattatggaattgatcaacaacattgctaaagctcatggtggtgtatccgtatttggtggagtaggcgaacggactcgtgaaggaaatgatctttacatggaaatgaaagaatctggagtcattaatgaacaaaatcttgcggaatccaaagtggccctagtttatggtcagatgaatgaaccgccaggagctcgtatgagagttggtctgactgccctaactatggcagaatatttccgagatgttaatgagcaagacgtacgtctatttatcgac

SEQ ID NO: 170451 - DNA, 370 bp, Arabidopsis thaliana
gaagataaaagatcgagagaattgttcatcgatcatcatgtgtgaaggatgcttgatgcatcagtgctgctatcatctgtgacatagatggcatcagggttcacagtggagaagacagaggataaacgactaccatcgcacataatagctcgttcatccttcacaattgtcgccactggagtctcaaagatgaagaccgatacgcccttcagaattaaatggaccataggcatgacggacagcgtccacgcatccgggacaaaggacacgggatacagtgtttactcgtaccttaacaagtatagatctaacgtcaaaggctacagtcctacttacaacaataatcagtgattagcgacttgtgacatgt

SEQ ID NO: 170452 - DNA, 477 bp, Arabidopsis thaliana
  unsure (1)..(477): unsure at all n locations
ggatggaaatacctttctagagtactcatcagacccagttacatgcgattatgatcgaacttcaggaatccagaccatgaaaaaggtgattacaattcctacatataagcgataagaagaattgaagacgaaaattggaaggaggagctgatgggaaacttaaaaaaatctacacgcagtgacgagttaagccgttctggtccccctcaaattccaaatcctgactggaacaatttgtatcaccgaaccacggtggcctcatgtttggtgcaaggagtttacgcaaaggaaagagacagggaaaacaaccgaaatggttccgagtcattagccacaccttggtggaagagtttcaacttcactttagatgaaagtgaaatcctatatgacgtatttgacggctccatatacggtgctgtcttccanaacatgatcaattatgagaataccccgaactcgatagtaatacctccgcgt

SEQ ID NO: 170453 - DNA, 242 bp, Arabidopsis thaliana
gacccatttcttggcttacaaaaccaaatcttaaacgtttaacgttgtgctgcactactcaacctcaatgggcgcctcaacaacagctctctcctctcctgccttcgccggtaaagccgtcaagctttcgccctcgggatctgaaatccatggaaacgggcgtgtgacaatgaagaaaactgttgccaatccatacggcccatcatgcaccccatggtaccgatctgaccgtgtcaaatgct

SEQ ID NO: 170454 - DNA, 207 bp, Arabidopsis thaliana
agggcttaggagcagatttctattaatgaacaaaggtgcttggactaaaggaagaagatgagagactagtctcttacatcaagtctcaaggtgaaagtcgttggcgacctcttcgtagatccgctggtctcattcttatgctgtcatagctgccgtcttcggtggcttaaatatcgccgacctgatttcattcagaggaagtttatt

SEQ ID NO: 170455 - DNA, 413 bp, Arabidopsis thaliana
acggtcaagtattccgggtcgaccacgcgtccgcagaatcgtcagcagcgtgaggggaaacaaatgaggagacagatctttagatattgatttatgtgatgctaagtgaaattctagagagagatatagatagtgatatcgctcgtggtctctcacctggtcatatgacttcgtagaggaagtctcagccgcatagttatgtgcatggttttgtgacagagcaggatacagctgtggatcgaactgtgtggcaaatggtgtggcattgcactactgctactgattctgagagtgatttcgatcgagtaatcattcaattcactgtggacttcactgacgattctccgagctgttctcttccatgtgggtttttacaccggtttttctatccaactgtctatgtatgtcgcact

SEQ ID NO: 170456 - DNA, 335 bp, Arabidopsis thaliana
agaagacgacacaagggggagtttgatgcagacatgctcaagatacgtaatgagtctgcactcagtgctttatatggggatctcccgaagcaatgcacaacctgtggtctacgcttcaagtgccaagaagagcacagtaagcacatggattggcatgtaaccaagaacgggatgtccaagaaccataagcagaacgcttcacggaaatggtttgtaagtgctagcatgtggctcagtggtgcagaagcacttggagctgaagcagtaccagggttcttgcccacggagccaacaccagacatgaacgatgacgatgatatggcagttcctgcaga

SEQ ID NO: 170457 - DNA, 454 bp, Arabidopsis thaliana
aagaccgaaaagcccttcggaattaacggcaccatggacttgacggacggcgtcgacgcctccggcagaaagggcaagggatacggtgtttacaagtacgtcgacaagtatggagctaacgtctatggatacagtcctatttacaacgagaacgagtggtcagcgagtggcgacgtgtacaatggaggagtcaccggattggcaatttgggcggtaactcacgccggaattcttgccggaggtgctcttcatgtgtacaacacaactgctttggctcagtaaatcgtacagttgttagcgcatgtgtaatcatgtctctataaatgtctctgtgttgttctctttctctctaatgttgtaaaactcagacataccttgaatttacaagacttctagtgtgtgtatcacaaatatagttatatgtggtggaacggactctcattcactgacctta

SEQ ID NO: 170458 - DNA, 325 bp, Arabidopsis thaliana
ccgggtcgaccacccgtcgtacaactggccaaaaaaccacaaaaaggggggtttgattgtaaccaagggccaataaaagttggtaatgggtggtggtttaataagcaagctccaaaagggtaagatctctgttttgaccgaagaagatttataaccaaatatattattgtcaagacctgttgcggctcagggaagaagtgtaaaattcacaagatgtatatctacgaagagaggagaggcatcaacagatgtgactccaatactccactttacaatatggacgacatctatgagggtttagaatgttatgatgatgagacgtcta

SEQ ID NO: 170459 - DNA, 412 bp, Arabidopsis thaliana
gacagaggggggtcgaccttttttctctcacttacccaagaaaagcttttttcgcgttttccaccgcaaccaccgtcaccttgaaccgccggagccgccgcacggaaggctcatcatccgccgtggcaattttttgaggtgtacaaggcattgcctatttgacgaaccaggaaatggttaaaacgcatggatagttttgatttacaagatatatcatgtcgcactgcatagacggtttcaagcatgtatgctcctcttttttccggtgttttgatatcgatatttacagacactctggacgccttggtgaccctgaacttcttgcgagacagacagtttttagcgtgagtgaaatacaggctctctatgagctgtttaagaaaatcagcagtgctgtgattgatgatgggct

SEQ ID NO: 170460 - DNA, 127 bp, Arabidopsis thaliana
gatctctccaacgccttaagcaaaatgtttagctctttgaccggaaactacgccaagttcttgaaagaggtgaaaggagacatgaaaaagccagagaattattgtgaaaaaccaattttggggaaca

SEQ ID NO: 170461 - DNA, 337 bp, Arabidopsis thaliana
ggagctcagtcagagagatatcgccgagagcactacaatttcaaaaccctcggagaagttacaaccagagaatgtcagtcgaggaagacgccaccgttagagagccactcgatctgaatcggttgagtagcgaacagaggatctatgtcgagctccgatctgaccgtgaactccgcggcaagcttcacgcttttgatcagcatttgaatatgattctgggtgatgttgatgaggttattacgactatagacatcgacgacgagacatatgatgagattgttcggacaacgaagcgaacggtaccgtatctattcatgagatgagatggactgatatt

SEQ ID NO: 170462 - DNA, 394 bp, Arabidopsis thaliana
gcgaccccaggtcaggcgggattacccgctgagtttaagcatatcaataagcggaggaaaagaaaccgctagttctcaaaaacaaatccccaagatggcatgagcagttgcagtgctggtgcctcaacttcaagggaagagtgactgtggcttcagttaagaatttccagcttgttgcagagattgacgcttctttggatgcgccgcctgaagaacatgagagggtgatcttacagtttggcaaaatcggtaaggatattttcaccatggattatcgctaccctctatctgcttttcaagcctttgctatatgcattagcagctttgacaccaaaccggcatgttgaagggtaaactttaccaccgagttaatcaatctcggcaaatcatcata

SEQ ID NO: 170463 - DNA, 325 bp, Arabidopsis thaliana
aaaaaaacgacagaggggcaagtccaccaacaagacaaggttaacttacaaactcggtgttaatcactttgctgatttggcatggtaagattttcaaaggaccacacttggtgctgctcagacctgcactgccagttgaaatggcagtcacaaggtcacaatcgcagctcatccagacacagttgactgcatataacatggtatcgttagtccggtcagacatcacggatgtcgtggatcctgctgtacattcagcataactggagctcttgaggcaacttaccatcatgcatttgctcaacgaatattctctctctgagcaaca

SEQ ID NO: 170464 - DNA, 345 bp, Arabidopsis thaliana
  unsure (1)..(345): unsure at all n locations
gatgaagggaataactctagagacagggacaaaagtactcactcagcaactgttgttgacgatctaaagtatcgtttgatggatactaccaaagagtttaaggatgttcttaccatgagaaccgagaatatgaacgtccatgaaagtagaaggcaactcttctcttcanatgcttcagaagaatcaacaaacccattcgttcgccagcgtcctttggctgctaaagctgctgctaatgaatctgtactccttcatggcaaatggtcctctcatctcatctcagtagtccatggagccggagaggagatctcacatgtgcacanatcacacacacacacacacaca

SEQ ID NO: 170465 - DNA, 404 bp, Arabidopsis thaliana
atatcaagaaaatgattaatagcactaaccatcagaggtttagcgaggaacacatcaagtcacttgagcttatatatgagtctgagacgatgcttgagccgaggaagaaggttcaggtagctaaagatctagggctgcaaccaatacaagtggctatatggtttcaaaacaagacggctcgatggaaaactacacaacttgagaaagagtataacactcttacagccagttacaacactttggcttcacaatttgaggtcatgaataaagtgaatcaatctctggtctctgagctgcagatactatacgaagatatgcacatgcctaaagaagaaaagcatcatgagtgttgtggtgatcaatgactggatctaagcatcagcacagagtctcataatggaaac

SEQ ID NO: 170466 - DNA, 181 bp, Arabidopsis thaliana
ggaaaacccttgaaggaataatcaatttgttaaccttgtaaaatcaaaatgggcggcttcattaaggcaacctccggtgatattgaaacaagctggtttcacggtggagagtacggctgctagaggattaccgtcgcgcacaatagctcgtccatccatcacaattgtcgccagtggcgtc

SEQ ID NO: 170467 - DNA, 336 bp, Arabidopsis thaliana
agcagcgatcatgagagaaggtccgaatcttctgaagctagcgaggaaagagcagtgtttagctttggggacaaggcttagatccaagtacaagatcacttaccagttttacagagtgtttcctaacagtgaagaagttgttgcagctattatgcaagatgttgacacagacaaggacggacgaataagctatgaagagtttgcggcgatgatgaaagctggaacagattggaggaaagcgtcgaggcagtattcccgggaaagattcaacagtttgagcctcaagttaatgagagaaggttcattgcaattagaaggcgagaattaagaaaggtt

SEQ ID NO: 170468 - DNA, 229 bp, Arabidopsis thaliana
catttccaaaaaaaaacaacaaaaaaagaaaaaaaaaaaaaataaaaaaaatataaaaaaaaaaaaaatcagataaaaacagcagacgatctaggggatagaagcttatggtacacatgtatgcgacgtcataactcttcaatcttgtcaccaaatttcaattcattggacgtcgtttttcattctcgtgccagggaaaactctggggttacccaccttagtctccttg

SEQ ID NO: 170469 - DNA, 420 bp, Arabidopsis thaliana
gtcgacccaggcgtccgctgaaagaaaacaacagaagggggactttgatgcatccgtacgaaaatggagctctgcaccaggtctaccacaatcatcactcatctccctgcgagcttcaacggccatggatatctagcgggaaaatctgttgatagaatctcacttcctctccagcgaaacgttgcgtctctcgttcttcaatcccgcacgttgcgttgtagtagaaagtttccaggagaaacagttactgaagaaacatcaacaggagtcaatgagtttggtgtggaggatcgtgatggagtagttgttgcagccgaagagaaaaactcgaatagtgaagctcctcaagctgaagatgaggaaactcaagccctagagtttttgaacgataattaacctggactcagacaagacatattc

SEQ ID NO: 170470 - DNA, 331 bp, Arabidopsis thaliana
tgggatttgcgctgtacgtgcaaatgcctctgatggtatcctctgcaccgttcttggacaaaacgctgttcatggtgcgtttgctggatacagtggaatcacggtaggcataatcaacactcactatgcatatttgccaatcactgaggtaattgcatatccaaaatcagtggatcctaatagtcgaatgtggcatcgttgcttgacatcaacggaccaacccgatttcatctagaaagatattattattcaatcacgagacagactgatgataacaataagccttgatatgtatagacagtagcattcttggttccttgttatgatgtat

SEQ ID NO: 170471 - DNA, 289 bp, Arabidopsis thaliana
acgcataaccacttgggtccaaatgcttctgaaggggatgctgcaagccagggtgggtcaagcacagtgactttggatctggttaatggctgtcatagactagcgttggagaaaaacgaaagggataatacgatgcaagaggttctgattcaacaaatggcgtcatcgttaacaaaagattcgaaatttacagctgctcttgctgctgctatatctgggaggttaatggagcaatctagaacatgaacgtttttagtgaatgtattgtttttgtttgtttagaatgatt

SEQ ID NO: 170472 - DNA, 200 bp, Arabidopsis thaliana
tactgcaggagcacaaaagggtacagccgcaagtacacgacaatgcggggacatgagatcgcgagaataacaccttgatcatcttgtgagaccgtcaatggatgcttcactgatgcgagcttcggtgacattgaaaccacctggtcttcactgtggacaacaccgttgctacaggattaccgtcactcacaagagctcgt

SEQ ID NO: 170473 - DNA, 348 bp, Arabidopsis thaliana
ggacttagttgtttttaaggaattgtggaccgtaggagaggagatttattatggtcccggaacaaattccagaggtttccgctcatatcatgcagtgatagtatccagtattgagatctataaaggagaagtggtggccatctgtaagatgagcaatggtactaaagtttgtgacgaaggatatgttagggtttctctagcgacaacatacatggttgtgggtgccagtcctaaaaaaagaacatgttcgggctacttctaagccgatgcatcttctctctgaattcatcatcatagatatagatgagaatgagaaagagaaagagagagagagagagaaagaaactg

SEQ ID NO: 170474 - DNA, 406 bp, Arabidopsis thaliana
ggccaaaactgaataaagaaaaggtttacacaaatcttataatatctgacgcatatataggcgagattgctgacgataagctttttcgttttgtttccatggttttgtgacgaagaagagaaaaagaataagaagtcagttttttctcaatggcttctcatagctattcaacacttaggtttagtctccttcaagagctaagaagcaacgagatcatcaagacaagccgggcttatctggtgaatcctggaggaagaaaatatgagatattaccggagagctcctttaacctgaaatcacaactcttggagccattgaaacctttttcttcttttagtaagtctaagcactttttggagtttgattcaaccatggataagcatagactcatggatgttcatgaaac

SEQ ID NO: 170475 - DNA, 259 bp, Arabidopsis thaliana
tgggggagattgaaagcgaaatcatttgatcaccatgtgatcacctaaatggatgcctcagtgagtctatcttcggtgacattgacggcagctggtttcacggatggagattacggcggcttacaggattaccgtcgctcacaagagctcgtccctccttcaaaagtgtcgccagtggcgtcatgaatatcatgaccgacatgcccttcggtatttacggcagcatggacttgagggatcgcgtcgacgcctccggcag

SEQ ID NO: 170476 - DNA, 450 bp, Arabidopsis thaliana
  unsure (1)..(450): unsure at all n locations
aaaaggagagaagggatccgacggggaaaaagagttccgacaagaatcgagaactgaaagatttgtcatttgtctctcaaatatctgtggagagaagagaaattggaataaagaagacagtgttgtgagagagagagagagagagagatgagttcgtctctacctctgaggctacttcttcctcttacaacttctctgatttctcctcctcctcctcctccagattctttccatactccttcgtcgctcagatcgaaaaaccctaatttcaaacgccgattgtcttcttcttcctgttgttcttcncagtcgcagcttttctctgggagatgcagatcctattcgcggtgtgttaccatgttgcttacagaacacatgagaaatcaatggaagacagaaatcttgacagataaagatgnacacattgaatgtgtgcttgaatcggatgaa

SEQ ID NO: 170477 - DNA, 466 bp, Arabidopsis thaliana
  unsure (1)..(466): unsure at all n locations
gggtcgacccacgcgtacgcgaagagacgacagaaggggtcggctaaagctttcgctgactactacaacaatggcgtcctcatccctttcccctgctactcagcttggttctagcagaagtgctttgatggcgatgtcaggtgggttgtttgtgaagccaacgaagatgaatcatcaaatggttagaaaagagaagattggattgagaatttcttgtcaagcgtcgagtattccagcagacagagttccagatatggaaaagaggaagactttgaatcttcttcttcttggggctctttctctacctactggctacatgcttgtcncttacgctaccttctttgttcctcctggaaccggaggtggaggtggtggtactccagccaaggatgcccttggaaacgatgtagttgcagcggaatggcttaagactcatggtcccggtgaccgaaccttgnaccaagga

SEQ ID NO: 170478 - DNA, 362 bp, Arabidopsis thaliana
taccttatgaagtcaaaaaaaaaaaaaaaaaaaaaaaaaaaaaaaaaagaaaaaaaaaaaaaaaaaaaaaaaaaaaaaaaaaaaaaaaaaaaaaaaaaaaaaaaaaaaaaaaaaaaaaaagcggccgcccaaaaggatctaaacttacttacgcgtgaatgcaacatcaaaaccctccaaaagggccaccaaaattcaattcacggggggcctttttaaaaaatcttaacggggaaaaccccggggtaatacaacttaaaccccttgaacaaaaaacccctttttcaagagggggtaaaacaaaaaaggcccccaccgttgtcccttcccaaaatttgtgcacccgtaatgggaaaggggaa

SEQ ID NO: 170479 - DNA, 411 bp, Arabidopsis thaliana
acgcgtacggacaacagaaggggatcgaggacacttcattactctcttctcctgaatctctttacctttttacgttgacattgatcctcgcagtgtctgattttgatcgaagaagaagaagagatcgggattttttcgcggttgtatatcgcctatggacgaggtgatgacagcggcggacgttggttcgttaggtggcggcaatagggcgttgtacggatctcctccgtcgcataatctgtttcctcacaatctcgcaatcttctccgcttttcttgccttcgctcttgctcagttcctcaaagtcttcactaattggtacaaagaaaagaggtgggactctaaacgtatgattagttctggtggaatgccttcttctcattctgctactgtcactgccttagctgttgc

SEQ ID NO: 170480 - DNA, 299 bp, Arabidopsis thaliana
ggcagaaacagcttttcaacaacggagataagctctttagttgtaagctctaacactttcctccctcatattcacatctattagtgcaaatcaagaataacttaaaccaatccattacaattcttccatttctttgctttcagctcgacataaccgacgggtttcgatagaacaagtccatgtgacagattctctttccgtaaactcgataaacctgtttcataaacctatatgttatccaatatcatccatcatcacttcaagaaagagcaaaagccattttagtgtttgtgcaacaa

SEQ ID NO: 170481 - DNA, 298 bp, Arabidopsis thaliana
tggggaggtggcggcggtagacgcgacggtggaggacgatacagcggcggcggcggcggttactcctcaatgggtggtggtggcggaagctaccgtggtggaagacgtgacggatgacggaagtctaagtgaattggtacgcaagcgatatgcaacttgggactctgagcttgggaagcaaatagaagaatgaaaagctgattttgagtatcttgagaagaaagctaaagagtttggagaaccaaaggtttcttctgctaaacacgaactcgctgagaagattttccaatctgcaatg

SEQ ID NO: 170482 - DNA, 317 bp, Arabidopsis thaliana
gattatcaaagagagagagagatagagtgaaaaatggaagagaagagtgcttcacaattgggacttgtggtgtttcttctattgtttcttttggtcccaacccatacggagtcttccctgccttctcaacaagaatcactcccagtgatcggatcgtcaacgaggttgatgagtacctataagaccaacagtaacatagattttgagggatcaatcagtggacaagccggtggtggtcaacaaaatccctagtttacctttctccatcgtcgttcccgattactatggaggctactacacttcaaatatatgtatta

SEQ ID NO: 170483 - DNA, 365 bp, Arabidopsis thaliana
cgcgtacgtacgaagaagacgacagaagggggactccttccttccttgcagcaaaaagcaatccgccgtcgagcttcgttcgtctctcagaagaagctgcaaatatggcgacagcgtatcaaccaatgaaaccagggaaggctggtttggaagagccactcgagcagattcacaagatcagaattactctctcctccaagaatgtcaagaacttggaaaaagtgtgtactgatttggttcgtggagctaaggacaagagactgagagttaagggtccagtcagaatgcccaccaaggttctcaagatcactacccgtaaagctccttgtggtgaaggaaccaacacatgggacagattcgagctt

SEQ ID NO: 170484 - DNA, 326 bp, Arabidopsis thaliana
ggaagagatcgagagaagaatagtttgatcatcttgtgagaaaaataatggctgtttcagtgatgctatcttcggtgacattgaaaccagctggtttcacggtggagaagacggcggctagaggattaccgtcgctcacaagagctcgtccctccttcaaaattgtcgccagtggcgtcaagaagatcaagaccgacaagcccttcggaattaacggcagcatggacttgagggatacggtgtttacaagtacgtcgacaagtatggagctaacgtcgatggatacagtcctatttacaacgagaacgagttgtcagcgattggtg

SEQ ID NO: 170485 - DNA, 334 bp, Arabidopsis thaliana
ccacgcgaccgcggagtttacaagtacgtcgacaagtatggagctaacgtcgatggatacagtcctatttacaacgagaacgagtggtcagcgagtggtgacgtgtacaagggaggagtcaccggattggcaatttgggcggtaactctcgccggaattcttgccggaggtgctcttcttgtgtacaacacaagtgctttggctcagtaaatcttaaagttgttagcgcatgtgtaatcatgtttctataaatgtttctgtgttgttctctttctctctaatgttgtaaaactcagacataccttgaatttataagacttctagtgtttgtcca

SEQ ID NO: 170486 - DNA, 301 bp, Arabidopsis thaliana
ctctcctctacccctcagcttctactggatctctccagcagacacgatcttgttcggagagattcgtaggggaccgatctatcacggcttcaagggcacacacaaatggaccacgacaagacaggatgccaaagcccacctgaaggtcccaagctatgtactaacaactgcggtttctttggaagcgctgccacaatgaacatgtgttccaactgtcaaaacgatatgttgttccaacacggacaaggcgctcagtttgcatcagcactgtctggaagatcggtcatccaagcaacaatca

SEQ ID NO: 170487 - DNA, 471 bp, Arabidopsis thaliana
  unsure (1)..(471): unsure at all n locations
gggtcgacnacgcgtccgaagaagaaagaaagggctgtcgggaataaacgagtcagagacgggttagacctcgactcgccggacgtgaagcggttaagagatgatttgttcgatgactctgggcttgacccagtgagtcaagatcttgactcggtgatgaagagtttcgagaatgagttatcgacaacgacggcggcgctaagctccggtgaaactcagccggatcttggataccttttcgaagcttctgatgacgagctgggtttgccaccgccgcttacgccaccgcaaacgcttcttcctccgtcgtgtgaagaaacggtgacggaattggtacgagcctcgtcggattcatcacacgttggagagttaagtgggtttgacgatcatgtcacggagttcggaccttgcgatcttggtgatgatgggcttttcgaatatttcgatgggtgtttaaattccggcgatttg

SEQ ID NO: 170488 - DNA, 284 bp, Arabidopsis thaliana
tccggaagacgacagaaggggactcttcattgttttcttctctctatcccctcttcattttcccctctgatcgcaagtgattttaggcttctgcaacgaagagatggctttagtcggaggtgttggcgatgtccctgctaatcagaacagtggtgaggttgagagcctcgctcgtttcgctgtcgatgaacacaacaagaaagagaatgcacttcttgagtttgcgagagttgtgaaagcgaaagaacaagttgtaaccggaacactgcatcacctgactctgg

SEQ ID NO: 170489 - DNA, 418 bp, Arabidopsis thaliana
gaacgaggttgacattaggcgaaaggatcttctgccggtatatgataattttcacagtgtgtataccagtatgcgcaacagaggattttctggggaaagagattcagattcttcttcttcttctgaccctggacaagttaaagaaatgcatccattcaatggtatggtttaccccgaagatgaggaaagaagagggagtgcccattttgcactaactccaaaccaaaatcctcataccggaattgtaacatttaaacagcctgtagtttccatttcttctgctgtgaaagacactgattatatagacgacgacgctcatgtcttgccaaagaacgcctccctgcccgctgaaacaaaaattgaaaacagcagtgggataagtggagattcaaatgtaagttctaaccgttctgatatg

SEQ ID NO: 170490 - DNA, 379 bp, Arabidopsis thaliana
gaaggtcacggcgagacgagccgtttatcattacgataggtgtcaagtggaagtgcagtgatgtatgcaagctgttgatgaagatattgatttgaagcaaatgagagacatagctgctgctaaaaagcgttgggatggtttgttaagggaaggaaaagtgaagcttcttacaccaagagaagcaggctatgctatttctctttcaaacaaacctctccttgatgttcgtccctctagcgagcgcaacaaggcatggattaaaggctccacttgggttcctatcttcgacaatgatgacaaccttgacgctggaactctttccaaaaaagtcactagttttgctatggggggatggtggagtggagcaactacactatct

SEQ ID NO: 170491 - DNA, 425 bp, Arabidopsis thaliana
acgacagaagggggagaagagatcaagagaagaatagtttgatcatcttgtgagaaaaataatggctgcttcagtgatgctatcttcggtgacattgaaaccagctggtttcacggtggagaagacggcggctagaggattaccgtcgctcacaagagctcgtccctccttcaaaattgtcgccagtggcgtcaagaagatcaagaccgacaagcccttcggaattaacggcagcatggacttgagggacggcgtcgacgcctccggcagaaagggcaagggatacggtgtttacaagtacgtcgacaagtatggagctaacgtcgatggatacagtcctatttacaacgagaacgagtggtcagcgagtggtgacgtgtacaagggaggagtcaccggattggcaatttgggcggtaactctcg

SEQ ID NO: 170492 - DNA, 442 bp, Arabidopsis thaliana
cacacgcgtccgcccacgcgtccgcagcatcggctaatatcggattcgatgagtcaaacccgatccgaatggtctccgatggtctccgggaggtagaagaatctgtttcccagatcttaggtcaatctcgtcacgttctctctttcgctcgcttcactcaccgatatggtaaaaagtatcagaacgtggaggagatgaggcttcgattctcgattttcaaggagaatcttgatttggtcagatccaccaacaagaaaggcttatcttacaaactcggtgttaatcaatttgctgatttgacatggcaagagtttcaaaggaccaagcttggtgctgctcagaactgctctgccactttaaagggcagccacaaggtcacagaagcagctcttcctgaaacaaaagactggagagaagatggtatcgttagtcgggtcaaaga

SEQ ID NO: 170493 - DNA, 216 bp, Arabidopsis thaliana
  unsure (1)..(216): unsure at all n locations
gaaagagacgcatttaaaagcaaatgaccaacaagcgacttcaccatccatctcttacaaccctccaagaacactggctgttttccttcactttctagacaaaacanaaaccatcttctagagaaaataaaccaacatgggagagacagaaaccatggcaacaaactaactaaaccatagtatatattatctatactaatattatcggcccatggg

SEQ ID NO: 170494 - DNA, 427 bp, Arabidopsis thaliana
cagaaggggactctcagacattttgtcaaacagatggtgctcgtttctgaatcagcttaagaactaacaaggagacagacactaagcttggtttttctctccgattagacggaggaaaaagtgaaaacgaggggcttagacgagtgatgtgatagagatggaaggagttgagctagaattagaaagaagaagcaagttcttgaacagtttgatacagaagaagaaggctaaagaacagcaagatcagaaagatgagttcaatgttcgtgttagggcttcagatatgcctttgcctcaacagaacagagcctttagtttgtcgcgtgagattttgaatgctactccagggaaagctgataacaaaagactcgctcatgccctaaaaaaggacttcgattcagcctacggcccggcatggcactgcatt

SEQ ID NO: 170495 - DNA, 305 bp, Arabidopsis thaliana
  unsure (1)..(305): unsure at all n locations
gatcgtgcgtctgtacggaccacaaaaggctctctctttatttctctgtgagatttttttaggatctgagagagccaaagatcatggaggaaagccaagaacttgccttgacccagttgagaaaatcggtcgagaaactctcttcttctactgagggatatgacaaaccaacattgatgaggttcctggtggcaagatcaatggacccagtcaaagcancacagatgtttgtagattggcaaaaatggagagcctccatggttcctccaactggattcatccctgagtcagaagtgcaggatgaa

SEQ ID NO: 170496 - DNA, 426 bp, Arabidopsis thaliana
caaaaagacaacagaaggggatccaaaaaaaacaaaacaaaaaattatattcaagagaaaaagaaaaaaatgaatttcatctccgatcaggtaaagaaactctcaagctcaacaccagaggagccagaccacaacaagccagtcgaaggaaccgaaacagctacaagaccagctaccaacgccgagctcatggcaagtgccgaggttgtagctgaagctgctcaagccgcagctcgtaacgaatcagacaaactcgacaagggtaaagtcgccggagcctctgctgatatcttagacgctgccgagaaatacggtaagttcgatgaaaagagtagcactggtcagtacctcgacaaggctgagaagtatctcaacgactacgagtcgtcacactcaaacggtgctggtgggtctcctcctccgacg

SEQ ID NO: 170497 - DNA, 174 bp, Arabidopsis thaliana
gagatacacacatttgagactcgatcatccacaagaaattaagaaggtcagaacatcaagtggtgggaagaagatccgagtggaagtgtcgcctagcggcaaaattcatgcggaaactaatcatgtttcgcttcgtgacttacaccactccgataaggctcacgaggagtccaa

SEQ ID NO: 170498 - DNA, 406 bp, Arabidopsis thaliana
tggagaaacactttagcacggtgcgacaagatggcgagctcagtgacgctgcttctatggagtcttcttcttctcggtacactaagcgctattcaggccaaaaagtctaaggaaaacttaaaggagatcacacacaaggtttattttgatgttgaaattgatgggaaagcagctggtcgtattgtcatgggtctatttggcaagacagtccccaaaactgtagagaatttccgagctttatgcactggggagaagagttaaaagcgttgccgtacactataaccggagagagcgccgattccgtcgtcagaagaatcctcgtaaacaatcatgggtaaggtacacggttccttggctcgtgccggtaaagtgagaggtcagacaccgaaagtggcaaagcatgata

SEQ ID NO: 170499 - DNA, 405 bp, Arabidopsis thaliana
caagtggctgtgatggcgatggagagcctcgtcggagctccggtgcggtggagaaggaggaagaaatagtgaaagatgaggagaggagatccaatgcgtcggtgtgttcggtggaaatagatctggagcttggattgcctgagaaagttgtacatttgtcgcaatctgagagagattgcaggatttgtcacatgagcttagatgcagcgaatcttgaatctggtgttcccattgagcttggctgttcttgtaaagctgatctcgctgctgctcataaacactgtgctgagacttggttcaagatcaaaggaaacaaaatctgtgaagtttgtgggtcgattgcgggtaatgttgttggaagtgttgaggtggagtctgaggaaagccggaatgaagcaaatggtg

SEQ ID NO: 170500 - DNA, 289 bp, Arabidopsis thaliana
cggcatcaaaaggcaagatcacacaaacgtttcaatggccgcctcaacaatggctctctcctcccctgctttcgccggaaacgctgtgaacctttcccctgcggcatcagatgtccttggtaacggccatgtgacaatgaggaatactgttacgaagccaacgggtccatcaggcagcccatggtacggatccgaccgagtccagtacttggggtccattcactggccactcacccacctaacttaccggaaagttccctggagaccaccgatgggacacacctggtct

SEQ ID NO: 170501 - DNA, 164 bp, Arabidopsis thaliana
cggggagaagagatctagagaagaatagtttgatcatcttgtgaaaaagataatggctgcttcagtgatgctatcttcggtgacatgtggtcgagctggtttcacggtggagaagacagcggctagaggtttagcgtcgctcacatgatctcgtgtctccttca

SEQ ID NO: 170502 - DNA, 295 bp, Arabidopsis thaliana
gcaatccaaacctgggtccgaacctatgttgaacgctactatccaaacccgaaccttatcaaaacagactctgagctccaatcttggtactcagaatcaatcaacgtcggccacgctgacctccgcgacgctgattggtggccggagttatcaaccgtcgacgacctcgtgtcgattctaaccactctaatctggctcgcctctgctcaacgtgccgctctaaactttggacaatacccttacggtggctacgtcccaaaccgaccaccgttgatgcggcggttaatccccgacg

SEQ ID NO: 170503 - DNA, 238 bp, Arabidopsis thaliana
ggagaagatatcgagagaagaatagtttgatcatcttgtgagaatgataatggctgcttctgtgaggctatcttcggtgacattgtagccagctggttgcacggtggataatacggcggctagaggattaccgccgctcatgtgatctcgtcactccttcaatattgtcaccagtggcgtcattaagatcatgatcgacaagccttgtcggaattaggcgcagcatggactttatgga

SEQ ID NO: 170504 - DNA, 280 bp, Arabidopsis thaliana
aagaagacgactcagtggggtgattgccaggagttttgagaggattcatcgaagcaacttggtgggaatgggaatcatctcattgtgctttaagtccggtgattacgcagataggcttggattgactggtcacgaacgctagacgatgtatctcccaagcgatatctcacagataagacttggccaatatgttaccgtcactatcgacaacggaaaatctttcacttgcacagtccgcttccacacatatgtggaattggcatactttaaccatggatgc

SEQ ID NO: 170505 - DNA, 375 bp, Arabidopsis thaliana
atccgtaaagccgagaagacgacagaatggggaagctttgtttcatctgttgttccctgtgaccatggctactccactctcaatctcatcaaatcctctcacctctcgccattgttaccgtctccacttatcctctacttcagtcaatggaaatgtaagtgttttgggggcagacccaagtcatcattctatctctgaaactcaacctaaaccttaaaacgatgaaaccatgagcaatttgcgagaccccttgttgtggttagccaaactgcggctacgtcgtcggcagttgtatctccggagagattccgtttggataatcttggaccacagccaggttcgaggaagaatcacaatatacaaggttgaggtatc

SEQ ID NO: 170506 - DNA, 390 bp, Arabidopsis thaliana
tccgccaacgcgaacgtacgggaagacgacagaagggggagaaagaaaaacaaaatggcttcgatgggtggattacacggtgcatctccggcggttcttgaaggaagcttaaagatcaatggctccagccgtctgaatggctctggaagagtggcggtggctcaaaggtctagacttgtcgtcagagctcagcagagtgaggagacttctcgccggtccgtgatcgggcttgttgctgctggtttagctggtggctcgtttgttcaggctgtcctcgccgatgctatttcgatcaaagttggctctcctccagctccttccggtggccttcctgggacagataactcagaccaagcaagagaacttgcattggcattgagagacaggttt

SEQ ID NO: 170507 - DNA, 195 bp, Arabidopsis thaliana
gggagatctcagcgcttaagaccttcacatcttgtatcttcttatagattactttcatagaagagagagataatgagggatggagaggatggggaagtttctagtagtagacttgtcgatgcgggggggtgatcagagagatgatatcatggctctaagttgtgaggcttgtgatagttggggcttctttgagat

SEQ ID NO: 170508 - DNA, 448 bp, Arabidopsis thaliana
acgcgtccgccaacgcgtacgtacggctgcggacgacagaaggggcacacaccaataattaattagacaaaagataagagagaatagagagagagagcaatggccaatgcgaagcccttttgtctcctcggcttcttttgtctgttattacagttattctccatcttccatatcggaaatggggaattggagatgaactattacaaagagagttgtccaaaagcggaagagataataagacaacaagtggagacgctttactacaaacacggtaacacagccgcatcttggctccgtaatctcttccatgactgtgtcgtcaagtcgtgtgatgcgtcgctgctgctagagacagcgagaggtgtggaatctgagcagaaatcgaagaggagtttcggtatgagaaactttaagtacgtttagaatatcaaagacgcactcgagaaag

SEQ ID NO: 170509 - DNA, 343 bp, Arabidopsis thaliana
agaaagacgacaggatggggagagacgagggtgagagaggagggagaatgccggcgggacacggagtgagggcgagaacaagagatctgttcgcgagaccattcaggaagaagggttatattccactctccacttacctcagaaccttcaaggtcggcgattacgtcgatgtcaaggttaatggagctatccacaagggtatgcctcataagttctaccatggtcgtactggtcgcatctgggatgtcactaaacgtgccgttggtgttgaagtcaagagacagattgggagcagaatcatgagggagacgatacatgtgcgtgtggagcatgtgcaacagtc

SEQ ID NO: 170510 - DNA, 466 bp, Arabidopsis thaliana
  unsure (1)..(466): unsure at all n locations
cgggtcgacccacgctacgatgcaagacgacagaaggggagaccaacanataaacattaaacccaaatgatatattttggtagatcaatcgacaatcattatacaacaatgatgacaaaaacattggagattgatttgagatcagcagaagggcttaagctaaaccgaagacccatcaagaaaaagactttcgccgtcgtaaaaatcgacgagaaatgtcgaaaatctaatcttgacgaatcgagaagaagcaatcctacatggaactataaatcagagatgcccatcaatggtaatgaacagtttatcttcattgaggtattttatcgaacaggttctgggcatgataaaaaaatcggagaagctaaaatcccaacgaatgatttcatgggaaggtattcacctgaaggtcacttaaacttcttgagctatagattgagagatgagtttggtgataagtgtggga

SEQ ID NO: 170511 - DNA, 442 bp, Arabidopsis thaliana
tgcgaagacagaaggggagagagagagaacagcagccaaacactcatttctccacatcttgagagaaaaaaacagagcaagtatattagagatctcatggcgatggcggtctccggagctgtcctcagtgggcttggttcttcgttcctcaccggaggcaagagaggtgccaccgcattggcaagcggcgtacgcactggagctcacagagttggcaggaaaactcttattgtcgctgctgcggctgctcagccgaagaaatcttggatccctgccgttaaaggtggtggcaacttccttgaccctgaatggctcgatgggtcgctaccaggagatttcgggttcgacccattgggtttggggaaagacccggcttttctgaaatggtacagagaggctgagctgatccatggccgatgggcgatggcagcggttcttggga

SEQ ID NO: 170512 - DNA, 381 bp, Arabidopsis thaliana
cgtcagccctcaagtcggtgctgtaaaagatgaaagcttggggaagcatggttgcgaactcagactcgcagtctgatatgtctagtactattcgatatgtcgactgtccaaattgcaactccttttatgggagttgcctgatgtaacacagtgtgagttacatgcgtcaaatcctccattgtctatatggagtctcatgccactagagagaaagcgtagaactacattgtagttgcggaacccaaaggagcagtgctactgttgttgtcggaggggtttatccgtggctatcgtcgaggttatacgtaccgtttacccgatggcgttcataacgataaagggcgtgctgactttctgcagtaccacgcttctgctattcat

SEQ ID NO: 170513 - DNA, 364 bp, Arabidopsis thaliana
cccacgcgtccgcccacgcgtccggaagacgacagaaggggagaagagatcgagagaagaatagtttgatcatcttgtgagaaaaataatggctgcttcagtgatgctatcttcggtgacattgaaaccagctggtttcacggtggagaagacggcggctagaggattaccgtcgctcacaagagctcgtccctccttcaaaattgtcgccggtggcgtcaagaagatcaagaccgacaagcccttcggaattaacggcagcatggacttgagggacggcgtcgacgcctccggcagaaagggcaaaggaaacggtgtttacaagttcgtcgacaagtaatgagctaacgtcgatgggatacag

SEQ ID NO: 170514 - DNA, 437 bp, Arabidopsis thaliana
aagtgagcgtgttgatgcataacgaacgatgccattttccgcatcaatctcatcgccttcttcttctgtcgcgcttcttcgatcgcctctctctttcttcatcttcactcccaaaaccctaatcttcaccagaaccaggatctctggtttcccttatcttgcttcccggcgatcccgcgatttcatcaacgggagggatgatttcgctgacgatacgaggagctggaaccggaagatcaaaccggagtatgggttcgatgaggattacgatggagaagaagatgatgatgatcatgaggaagaagatagaagcttggatctgttacttagatttgtagaaaatgttttcagaaagatttctaagagagcaaggaaagctgtccgatcaattttgcctgtttcgatctctacgaagctcgtggggttttcagtgaatg

SEQ ID NO: 170515 - DNA, 388 bp, Arabidopsis thaliana
gacccatttcttggcttacaacaacaaatcttaaacgttttactttgtgctgcactactcaacctcaatggccgcctcaacaatggctctctcctcccctgccttcgccggtaaggccgtcaagctttcccccgcggcatctgaagtccttggaagcggccgtgtgacaatgaggaagactgttgccaagtcaaagggcccatcaggcagcccatggtacggatctgaccgtgtcaagtacttgggtccattctctggcgaatcaccgagctaccttaccggagagttccccggagactacggatgggacaccgccggactttcagctgaccccgagacattcgcaaggaaaccgtgaactagaagttatccacagcaaggtgggcca

SEQ ID NO: 170516 - DNA, 323 bp, Arabidopsis thaliana
ggagtcaacacaacatcttagcagctcaacatgtccgggtcgtgcgtactggtgatcagatccagtttttggcccatggattctgtactgaccaatcagcttaggacttgatccttccgtacctcactcacaactacagagtcgacctccatgacctagattgcgctggcaatgtcgacaccgaatacctcgatttcaagcgttacacatctcactatccttacgtcggtgatcttcccaccatcgatgatccacccgtgatcgagtactgtacgtacctaggccactctgtgtcggctatgatcggtgacagctcgtcgatt

SEQ ID NO: 170517 - DNA, 186 bp, Arabidopsis thaliana
ctggtacagctgcaacaagattccagtcagtggaagtcgcatagattcatacattcctctgcagattagtgagttcacatctgtagacgcattgaatcagattcacattgcacattcagcatttctcgatagaatgcttctccagcttcgctccacttgcaagtactacagctgttaccctaatga

SEQ ID NO: 170518 - DNA, 219 bp, Arabidopsis thaliana
tacagtagactacagaacgagaaggctgctacaatacgatctaacgggcaggggagatagagagaatgataatgtggtcatcatgtgagattaataatggctgcttcactgaggctaacttcggtgagattgaccatatatggttttacggcgtggaacacagcagctacaggattaaagttgcttacaagagctcgtgcctccttcaaagttgtcgcc

SEQ ID NO: 170519 - DNA, 386 bp, Arabidopsis thaliana
  unsure (1)..(386): unsure at all n locations
cgacccacgcgcccgagacgacagaagggaacccaaaaaaaacgattttgagaaaaccatctcactgattagcaagatgtcgtcggctcgttctgcgatcacaaagctaaagctggctcgatcctttggggagaggcagattggtgcatcgcgttcggtggtatcgactcgaggaccggcgattcggtacttcagtgacgataaaggtcgtgtgctcagcgaagaggaacgcgcgaaagagagcatgtatatccagaaaatggagagggagagactggagaagaaggagaaactcgagcaagataagctagatggtgaganaggaagtgccaacanganacctgagacaaacaagccatgagtttatcactcacagtatacaagat

SEQ ID NO: 170520 - DNA, 335 bp, Arabidopsis thaliana
aaccaagcgtcgagagagatcgtatcacaaaacctcgctcgctagctatgtgaagaaactatcatcgatataaaactttccggcgacgttttcggacttccgagagcaagttttgaggtggctttatgcgccaaaacatctaaccggagtgtcgttgtacggtgcttattagttttcaataacacgcttcagttatggggaatgcttgttgtgttgctactcgagacaaaatggttgtgcacaatacatcagcagtcgagaattttcaaagaaacaatgtgaggtattctcctaactggagcttccgatgggataatagaagaggacgcgtggca

SEQ ID NO: 170521 - DNA, 474 bp, Arabidopsis thaliana
ccgggtcgaccacgcgtccggacagcgagaacgacagaatgggggagttggaggtgggattgtgttggccattgttgttgttattattgggcttagaggaacacaaaaagctatgagctcgacgttcttgttctctggtgttgttcctctgcgtgtgagatcggttttgactccagctaatccggctaccgatagagcttcaatggcgagttcctctggtgctaagtgggctcagaaaaccatcacgcttccaccgctacgtcgtggatgtcatcttattactccagagatattgaaagaaataagggaagacttgtcacatttcaattgtggtcatgctcatgtcatcttacaacacacaagtgcttctctgacagtcaatgacaattatgagtcagatgttcaagctgagactgagactttcttgaacatgattgttcctgaggggacatcagcgccttggaggcatactat

SEQ ID NO: 170522 - DNA, 404 bp, Arabidopsis thaliana
tccgcccaagcgaacgcggacgcgtggtgcggttgcgtgggcggacgcgtgggcgagaccacgacagaaggggaccaaatccaataataataaaataagagaagaaaatttcccaaaatcaaaaaccgtgaatcgaatcaaaatcctttctaatatgaatgaaataacccaaaacagcacaaaccgcagcaacagcattgccttctttcaaaagaaccttaaacacaaatccaaacacttctcttgtaatcttacgagcttcaacaagcaattaccttctcgatttcccaaaaaacgcaagcaacagaaacaccgatatccagatcaccataaccgtcggaaccgcaaacgcagtcgccgcaaccatcgacatgggtctaaacacaggtccctaaaacacagac

SEQ ID NO: 170523 - DNA, 311 bp, Arabidopsis thaliana
gctacgtcagtgatgctatcttcggtgacattgacaccagctggtttcacggtggagaacacggcggctagaggattaccgtcgctcacaagagctcgtctctccttcacaattgtcgccagtggcgtcaagaagatcatgaccgataagcccttcggaattaacggcagcatggacatgagggacggcgtctacgcctccggcagaaacggcaacggatacagtgtttacaagtacgtcgacaagtatggagctaacgtcgatggatacagtcctatttacaacgagaacgagtggccagcgagtggtga

SEQ ID NO: 170524 - DNA, 468 bp, Arabidopsis thaliana
  unsure (1)..(468): unsure at all n locations
ggtccggaaaaccgggtcgacccacgccttccgacgaacaagaagaacaacagaaggggttttacggtcctttccgtgaagccctggactcaaacccgcgtttcggagacaaganaacgtatcagatgaacccagcanactacagagaggcattgattgaggcacgtgaagacgaggctgaaggagcagacattctcctggtgaagccaggtcttccatatttggacatcatacggcttttgagggacaagtctccattaccgattgctgcataccaagtttctggagagtactcgatgatcaaagcagggggagtcctgaaaatgatcgatgaagagaaagtgatgatggagtcactgatgtgtttacgcagagctggagcggacatcatcctcacgtacttcgctcttcaagctgctacttgtttgtgcggcgagaagcggtagaatagacaacaggactgtgttt

SEQ ID NO: 170525 - DNA, 409 bp, Arabidopsis thaliana
gacgacagatggtggcctctgagaaattgtggtcgcctacagctccacagaagatacggaaatggatgagtcaaaggttgtagttccagagtcggtgttgaagaagaggcacagagatgaggaatgggcttttgttaagaagcataatgttgaatccgccaataagaagaacgcctagaacatgaagcttattttcaaaagaaccgagcaatcctccaaggaatatgtcaagaacgagaatgagttgatctcgttcaaacgcgacgccaagcttaagggaggtttcaatgttgaccctgaagctaagctcttgttcatcatccgtatccgtggtatcaatgccatatgacctaagactaagaacattctccagctcttgcgcttgagacagattttcaatggtgttttc

SEQ ID NO: 170526 - DNA, 334 bp, Arabidopsis thaliana
tggctcaagcagtgacttcgatggctggcttacgtggagcatctcaagctgtccttgaaggaagtttacagatcaacggctcaaaccgtttgaacatctcaagagtctcggttgggtctcagagaaccggacttgtgatcagggctcagcagaacgtgtcagtaccagaaagtagtcgccggtcagtgattggactcgtggcggctggtttagccggtggttcattcgttaaagctgttttcgccgaagctattccgatcaaagttggtggtcctccacttccttccggtggcctacctggaacagataactcagaccaagcaagagacttttc

SEQ ID NO: 170527 - DNA, 394 bp, Arabidopsis thaliana
  unsure (1)..(394): unsure at all n locations
tgggacccatttcttggcttacaacaacaaatcttaaacgttttactttgtgctgcactactcaacctcaatggccgcctcaacaatggctctctcctcccctgccttcgccggtaaggccgtcaagctttcccccgcggcatctgaagtccttggaagcggccgtgtgacaatgaggaagactgttgccaagccaaagggcccatcaggcagcccatggtacggatctgaccgtgtcaagtacttgggtccattctctggcgaatcaccgagctaccttaccggagagttccccggagactacggatgggacaccgccggactttcagcntgacccgagacattcgcaaggaaacgtgaactanaagttatccacagcaggtgggccatgctc

SEQ ID NO: 170528 - DNA, 449 bp, Arabidopsis thaliana
  unsure (1)..(449): unsure at all n locations
gccaaacattcgttacggcggcaaaaaaacacaaaagggggatgtggcaaggctacacttgtgtntgcacttgattatcttttcaagacaacanaaaagaagtcagcgacgatatccgtagacgatttttacttgactgcagaaggccaggctgaattgagaaaaaagaatccaggaaatgcacttctagagtatcgtggaaatgcaggaagtcatgatctgaaactttctgttgaaacactagaagccctgtcgaaactgaccaaagaaggcttaaagatgaaggtacctaagtacaataagtctgcctatagtgggagaggtgacagggccgattcatcaacatggcctgaagttgaaggacctctatcggttattctctttgagggatggatgcttggttttaagcctcttccagctgacgttgttaaagcagttgacccacagct

SEQ ID NO: 170529 - DNA, 333 bp, Arabidopsis thaliana
tcattgaacaaaaaaaaaaaaaaaaaaaaaaaaaaaaaaaaaaaaaaaaaaaaaaaaaaaaaaaaaaaaaaaaaaaaaaaaaaaaaaaaaaaaaaaaaaaaaaaaaaaaaaaaagcggccgcccaaaaggatcaaagctaacttacccgtgaatgcaacttcaaaacccttcaaaagggccaccaaaattaaattcacgggccgtcgtttaaaaacttcctaacgggaaaaaccctggggttaccaaacttaacccccttgaagaaaatccccctttcccaaactggcgaaaaaccaaaaaggcccgaaccattcgcccttccaaaaatttgc

SEQ ID NO: 170530 - DNA, 310 bp, Arabidopsis thaliana
gacccatttcttggcttacaacaacaaatcttaaacgttttactttgtgctgcactactcaacctcaatggccgcctcaacaatggctctctcctcccctgccttcgccggtaacgccgtcaagctttcccccgcggcatctgaagtccttggaatcggccgtgtgacaatgaggaagactgttgccaagccaaacggcccatcacgcagcccatggtacggatctgaccgtgtcaagtacatgggtccactctctggcgaatcaccgagctaccttaccggagagttccccggagactactgatgggac

SEQ ID NO: 170531 - DNA, 362 bp, Arabidopsis thaliana
gcgtccggcgaaaagtcgatacagcgggaaaaagacggcagtaaggggagagggataaagccatgtctgcgattgataatcctagcatcagtagttttggtggttcacgtcgccgcatcatctagtggcatattatcggattcgattcatcagtcccgatccgagtggtcaccggatggtcgctgggacgtagaacactctgtttcctaaatcttatgtcaatctcgtcacgttctctcattcgctcgcttcactcaccgatctggtgcaacatatcattgcgtgacggagatgaagcttccagtctcgattttcaaggataatctgtatatgattagatccaccagtatgaaacgcttatc

SEQ ID NO: 170532 - DNA, 446 bp, Arabidopsis thaliana
ccacgcgtcaacccaagcgtccggcgagatgactacagaaggggacaacaactaaaaccacatttatcattacagtctgatttgagctaagttctctcatcataaactctccttggagaatcatggctatttcaaaagctcttatcgcctctcttctcatatctcttcttgttctccaactcgcccaggctgatgtcgaaaactcgcagaagaaaaatggttacgcaaagaagatcgattgtgggagtgcgtgtgtagcacggtgcaggctttcgaggaggccgaggctgtgtcacagagcgtgcgggacttgctgctacaggtgcaactgtgtgcctccgggtacgtacggaaactacgacaagtgccagtgctacgctaacctcaccacccacggttggacccgcaagtgcccataagaagaaacaaagctcttaaatgctgcg

SEQ ID NO: 170533 - DNA, 378 bp, Arabidopsis thaliana
cgtccgcccagcagtccgcccacgcgtcttgagaaagttatggagcagctgccaggtcatcatggtgctactggtaccggtggtgttcaccacgagaagaaaggaatgacggaaaaagttatggagcagctgccatgtcatcatggatcacaccatactggaaccaacacaacttagggtactactaacactggtggtgttcaccacgagaaaaaaagtgtgaccgaaaaagttatggagaaactaccaggtcatcatgggtcacatcaaactgggactaacacggcttatggtactaacactaatgtcgttcaccatgagaaaaaaggtatagcagaaaagattaaagagcaactgccaggtcatcatggaactcac

SEQ ID NO: 170534 - DNA, 357 bp, Arabidopsis thaliana
cgtccgtcaagagcgggaagacgacattatgggaaccaaacaaatcgagaaagacgaacacttacaaaaaaaaatctctttgtgagctttagcgatcgtaacaatggcgaacgaggtgattcttcttgatttctggccgagtatgttcgggatgaggacaaggatcgcattgagggagaaaggtgttgaatttgagtacagagaagaagatctaaggaacaagagtcctttgcttctccagatgaatccgattcacaagaagattcctgttctcatccacaatggtaaaccggttaacgaatctatcatccaggttcagtacattgacgaggtctggtctcacaagaaccctatcct

SEQ ID NO: 170535 - DNA, 366 bp, Arabidopsis thaliana
cgtccgcgaagaaacgacagaaggggatggttttgtgacttgtgtgcgagtttgtacaagctttactgatatagaaatgccgttgccgatgcagtctctcttcctctgtttctgattcctgaataaatttgttaaacgatggagaagatcgttcgttcttcttcgctgattctacttgttggcctccttctttttatgaattttcacggatttgtccggatcgccgaagcaacgaagcgacggatcgagatctccgatgacctagacgacgttgaagacaatgaagaagacgagtcatggaaagagtgggggaagaaagcaacgaccccggaatttgattcgcctccggatttcaccaatatggga

SEQ ID NO: 170536 - DNA, 267 bp, Arabidopsis thaliana
ggagatcgaatcaagagtagtttgatcagcttgtcataaaaataatggctgcgtcactgcagcgatcctcgctgccattgcaaccagctggtttcactgcacagaagacagcagcgagacgattagcgtcgcgcagaacagctcatctctccttcacaactgtcgccactggagtcgagacgatcaggtccgaaacgcccttcggtactaacggcaccatagccttgacggacggcatcgactcctccggtacagcaggcaagggat

SEQ ID NO: 170537 - DNA, 398 bp, Arabidopsis thaliana
  unsure (1)..(398): unsure at all n locations
gcgaccccaggtcaggcgggattacccgctgagtttaagcatatcaataagcggaggaaaagaaagtgagcgcgaaggctaaggctaagcccgttcctcgtgccactgctgctgcaactaagaggaaagctgttgatgcgaagcccaaggctaaggctagaccagccaaggcagccaaaacggccaaggttacatctccggctaagaaagctgttgctgccacgaagaaagttgctacggtggccacaaagaagaagactccggttaagaaggttgtgaagccaaagacggttaagtctccagcaaagagggcttcttctanggttaagaagtgaagttagggtttgtaggtagaagaatggttaacgatagtttagacttgtataattcaatcatct

SEQ ID NO: 170538 - DNA, 446 bp, Arabidopsis thaliana
acgcgtcaggcaggaagacgacagaatggggaagaagaagatgtcgatgattccgatcagcaatcgccggagactatctcccggcgatagaatctgggaaccatttgaactcatgaacacctttcttgatttcccatcaccagctctctttctttctcaccactttccctcactttctcgagaaatattcccacaaacttcatcatccaccgtcaatacgcagctcaattggaccgagactccgacggctcacgttttcaaagcgtatcttccgggagtggattaagacgaagtgattgcgttcgtagatgaagaaggatatcttcagatctgtactggcgacaacaagttcatgagcagatttaagcttcctaacaacgccttgacggattaggtcacggcgtggatggaggacgagtttcctgtcgtgttcgttgagaaagatg

SEQ ID NO: 170539 - DNA, 304 bp, Arabidopsis thaliana
ccggccgacgagctcactaaactgcggccgccctttttttttttttttggagttagaatgctatgcattccaaaccagagaagattcagataaaacagagactaaaaaggctgttcacacagtaataattcttgcacatgaacactaaagcagatcgattataggaaacactgatacagtcagtactcagtagtttgagggcacctacgggaagcatgtcatactacagatggtaaacgttccagtgcttactgatgaaacatcatcagtatgcgcaatcgtgtttttcatcatacatcgtatc

SEQ ID NO: 170540 - DNA, 433 bp, Arabidopsis thaliana
ggtccggaatatcgggtcgacgcacgcgtccggcaagaagacgacagaagggggagaaaggcaatggagtcggctaaatcaatcatcggtggccaccaaaatgtcatcctgatgcgtcatggtgatcgactcgacaatttcgagccactctggacttcaacagctgcgagaccgtgggatccaccgcttgctcaagacggtaaggatcgggcctttagaactggtcagagaatccggtctcaacttggggttccgattcaccgtgtcttcgtctcccctttcctccgctgcatccagaccgcttccgaagtcgttgccgccctctcagccgtcgatttcgatcccattgctatgtcatctaaagacgtgctttccatcgacaatactaagatcaaggtggctattgaatttggatttgtccgagatacgcacc

SEQ ID NO: 170541 - DNA, 409 bp, Arabidopsis thaliana
agactacattaggggatctctctttgttcgctttgtggggaacgaactatggccgagagatggaggaacacggctctactcgtcatcgacatgcagaacgatttcatagaggaaggtgctgtgacgcaagtgaaaggaggaaaatctatagttcctaatgttatcagagtcgtcgaactcgcgaggcagcgtggtattctcgtaatttgggttgttcgagaacatgatcgtcaaggaagagatgttgaattattcaggcgccataactacagttctgagaaagtcgggccagttattaaaggcacccgtaagagcagaattggttgatggattgatgatcaacgaagaagatgactataagattgtgaaaactcgtttcagtgctttctttagtaccaatcttcattcc

SEQ ID NO: 170542 - DNA, 153 bp, Arabidopsis thaliana
aagacgacagaagggggagaagagatcgagagaagaatagtttgatcatcttgtgagaaaaataatggctgcttcagtgatgctatcttcggtgacattgaaaccagctggtttcacggtggaaaaaacggcggtaaaaggattacgttcgcc

SEQ ID NO: 170543 - DNA, 320 bp, Arabidopsis thaliana
gggtactgtgcacgtacaggacaactcaacttggagtatgacattatgcccagcgggatccttgagtcgtttctttagaatcaaacaaatcaaattcttgactggtcacagagattcaaaatcatcaatcacataccctctgtactctgctacatgcatcagcagtgggttcaactaatcagtcacaaggatattacaccagcaaatattcttcttgatgatgacataaatgcgacactcggtgattttggacttgcgaagctatgtgactacgggattgactctcattcctcgaatgtgacaagtacatatggatacaa

SEQ ID NO: 170544 - DNA, 432 bp, Arabidopsis thaliana
acgagctcactaagcggcggccgccctttttttttttttttggagttagaatgctatcaattccaaaccagagaaaattcaaataaaacagagactaaaaaggctgttcaaacagtaataattcttgcacatgaacactaaaccagaacgataataggaaacaaagatacagtcagtactcagtagtttgagggcacctacggaaagcaagtaatactacagagggtagacgttccaatgcttaatgatgaaacatcatcagtacaagcaaacgtgtttttcatcatacaccgtatcactttcacaaatggctgcagtcattccgcagcataaggagattgacttcgagaagcaacatcaactttgcgcagaagaacacggctaccaagagatggggaactctcaatgctacgcctttcaagagaaatctcc

SEQ ID NO: 170545 - DNA, 347 bp, Arabidopsis thaliana
gaaccacgacttgtgttgtggcttaaacacagaaatggcttctttaccgttcggagtttcgaatctatgcagaaatcacgaggttctgtctgcgtctgtaaggcttcttccggttgggcgacaaaccacaggattcggagctgcgaacaaagtcctaaaaagaatccaaggaactaaaatgtcaacatcaattgaaaagggaaagaaacagagaatgagatgtacaattaactcaaactctactgaaaactgaaaacaattctgcaacaaaaccaaaaacaacccctttaatttcaccaagaaaggagttaaaatgaaaagaattggaattaatgcaacttggaacc

SEQ ID NO: 170546 - DNA, 355 bp, Arabidopsis thaliana
tgcgatgcgacaacacaacgggagggggcagcactcaaacggataataagcagattctctggaaaaagaagaatacgactgattcaactgacgcaaacgtcgcagccagtgccgtcggctcaatgcagcctgtttaacgatgagttaacaggaagtctgtgcttcactagcccgatgcccaccgacgacgatgacttcactagcatagctttgatcgcgttcaacgccaccttcgatgctatcggcaacaagaacatggagatcagagtcggagttcacgctcagcttggtcttgtagacgatgtgtccaagcatctcgctatgattcgcgacgaacttgaaggttatgctgata

SEQ ID NO: 170547 - DNA, 308 bp, Arabidopsis thaliana
gaatccatcacaaacaaaacacacatcaaaaacgattttacaagaaaaaaaaaaaaaaaaaaaaaaaaaaaaaaaaataaaaattcaataagttttgattcaaaaaatacaaaaaacgcggcagcgctaaaggttaaagactctatatccgcccgctctaaaggttccagccttacttgcgcgtggcggaaattttattccccttcgatcgtttccccaaatttcatttcccgggccttcgtttttcaacgtcgttaagggaatagccctggctttccctaactcaatcccctttcagcccatccccg

SEQ ID NO: 170548 - DNA, 268 bp, Arabidopsis thaliana
acccaaacgtccgtacagaagacgacagaagggggaagcaaattagcactgaccgatcgatccatggaaaaagtgaagaaggatgtatactcggtttgggcattaccagatgaggaatcggagccccgattccaaaagctaatgggaactttgagatccgaattcactgggccaagaatcgttcctcacgtcaacgtcgccgtatctgcttaaccgacgggagacgaagccgagaaaatggtctaatcaactttcgaacggcctaaaa

SEQ ID NO: 170549 - DNA, 439 bp, Arabidopsis thaliana
cacgcgtccgcgacaaaaggggagacaaaagctgactctacgctctctcaaaagtcgaatatcccaaattcgatccgttttccggcgataatctccgatctagatctgatggcgaaagaaccagttcgtgtgctcgttactggagctgcaagacaaatcggatatgctcctgtacctatgattgcaaggggtatcatgcctggtgctgaccaacctgttatcctccacatgttggatattcctccaactgctgaagctttgaacggtgttaagatggacttgattgatgctgctttccctcatcctaagggtgttgttgctacaactgatgccgttgagggatgtactggagtcaatgttgccgttatggttggtggtttctcgaggaaagaaggtatggagaggaaagatgtgatgtccaagaatgtttccatctaca

SEQ ID NO: 170550 - DNA, 363 bp, Arabidopsis thaliana
ggagaagagatcgagagaagaatagtttgatcatcttgtgagaaaaataatggctgcttcagtgatgctatcggctgtgacattgattccacttggtttcaaggtggagaacatcgaggctataggattactgtcgctcacaggagctcgtttcacattcacaattgtcgcaaatggcgtcaataacatcaataacgacaattgcatcagaattaactgtagcatggacgtgaaggaccgagtcgacgcctccggctgacacggcaaaggatatggtgtttacaaatgcgtagacgaatatggagctaacgtcgatagatacagtcgtagttatacgagaacgactggtcatcgagtggtgac

SEQ ID NO: 170551 - DNA, 336 bp, Arabidopsis thaliana
ggaacacttaagtaatggttacaaggacatcaaatttatgtcatcttcttctgtctttggttattctgctcttgtttatcttatctcaaattggattcgcccaggctaaacgtctccaacaaaggaacaaattgagtttggattgcgttcctcttcctcctcccctccacctcttcgtggtatcgttaaaccacttatcgcttcgtttcactccgcatcgcctaatgataatggctcataagacataaatcatcattctgcaggataagacgtcacgatagttttttaagtgttttgttataaatatacatgttgtcctcatactttttagttata

SEQ ID NO: 170552 - DNA, 345 bp, Arabidopsis thaliana
gatagatcgagacaagaatagtttgatcatcctgtgagaaaagtaatggctgcttcaatcacgcattctgcggtgacactcacaccatctggtttcacggatggagaacacagcagccacatgaatagagtcgctcacactagctcatcactcattcacacttatctcaagtgacgtcccaaagatgtagatcaacctgcccttccgacatcacggcaccatgcacatgaaggacagcatcgacacctcccgcgaacctggcctgggatcctgtagtcagccgtacgtcaacgtgtatgcaactaacatcgatggactgattcctatctacaccgagatcaaatg

SEQ ID NO: 170553 - DNA, 318 bp, Arabidopsis thaliana
  unsure (1)..(318): unsure at all n locations
agacagaaggggaaagaaattaaaagtgttcttgttgctgtagaacacaaacagaacaaacaaaaaatcaattgaagagtctctcagtcgttaggggaagcaaatagagaaatggctagctttactgcctccgcttccaccgtcttcgccgctcgtccggctctccttctcaagcctaccgtcgccatctctgctcctgttcttggtttgcctccaatgggtaagaagaanggaggagtgagatgttcaatggagacaaagcaaggaaacgtctcagtcatgggggctggagtttcagctgcagcaacagctgctttg

SEQ ID NO: 170554 - DNA, 487 bp, Arabidopsis thaliana
  unsure (1)..(487): unsure at all n locations
tcggaactccgagtcgacccagcgtctgcaataagacgacataaggggacaaaaggaaaatatgagtgaggagaagaggaagcaacacttcgtgctagtacatggtgcgtgccacggcgcatggtgctggtacaaggttaagcctcttctcgaggctttgggccatcgtgtaaccgccttagacctagctgcttccggtatagacacaaccaggtcaatcaccgacatttctacatgtgaacaatattctgagccattgatgcagctaatgacttcattgccgaatgatgagaaggttgtactcgttggtcatagctttggaggtttgagtttagccttagccatggataagtttcccgataaaatctctgtctctgtcttcgtgactgcattcatgcccgacaccaaacactcaccatcgttcgtcgaggaaaagtttgcaagcagcatgacnacagaaggatggatgggctctgagctcgagaca

SEQ ID NO: 170555 - DNA, 305 bp, Arabidopsis thaliana
gcaagtctccatactgagtcgtaataacgacagaagggggacctcaaactcaaagtcgagtaattgccgatctaaaacacagggggtgattcagaaatccccaaaattcgactaaaaactaaaaccctatccctaattcatcctgattttgatcgccgtataaaagactcgcattttctgggcttaatatggcggttccggtgctgggttgatttccgatcttcattgtacttagatttttgggtttcatcatcgcagctttggttttgacattgactgttcattacagatgaagcttaactctt

SEQ ID NO: 170556 - DNA, 429 bp, Arabidopsis thaliana
  unsure (1)..(429): unsure at all n locations
agctgcgaagacaacagaaggggcatccanaaaaaacagtacacaaaattatattcaagagaaaaatgaaaaaatgaatttcatctccgatcaggtaaagaaactctcaagctcaacaccagaggagccagaccacaacaagccagtcgaaggaaccgaaacagctacaagaccagctaccaacgccgagctcatggcaagtgccaatgttgtagctgaagctgctcaagccgcagctcgtaacgaatcagacaaactcgacaagggtaaagtcgccggagcctctgctgatatcttagaccctgccgagaaatacggtaagttcgatgaaaagagtaacactggtcagtacctcgacaaggctgagaagtatcccaacgactacgagtcgtcacactccagccggtgctggtggtcctcctcctccga

SEQ ID NO: 170557 - DNA, 420 bp, Arabidopsis thaliana
agacgacagaaaggatggatagtttattacaagggtttttggatgagcatagagctaacaaagacagattggagtttaagaacaccatgattgctcatttacttgattctcaagaaaaagagcctcataactacagtgatcaaaccatcaaaggtcttatactgatgatggtagtaggaggcacagatacatcggccttaaccgtggaatgggcaatgtcaaatttattgaatcatccacaaatactagagaccacgagacaaaacattgatactcaaatggaaacatcaagtagtcgtcgtttgttgaaagaagaagatttggtaaacatgaactacttgaaaaatgttgtgtcggagacactaagactttaccctgtggcaccacttatggttcctcatgtgccatcttctgactgtg

SEQ ID NO: 170558 - DNA, 474 bp, Arabidopsis thaliana
acggaacgcgcgagacgacgcaagaccctatactgagtcgaaataacgacagaaaggggagccatttaaatctgattcatatcaaaaaattttcgatttaaaaaaaaaaccctcaaaaggtgttgatacggaaaaagaaaagggaaagaagaagagaatggatctagaatcggtgaaaaagtatctggaaggagatgaagacgaaaaggccaaggaaccaatggtggcgaaattaccacacagattcctcgaacgattcgtaaccaatggtcttaaagtggatctcaacgaacctggccgtatcgtctgctccatgaaaatccctcctcatctcctgaacgcaaggaaattcttacacggaggagcaacggggacgctggtggatttgataagatcagcagtgatctacacaaccggagcttcaaaatccggggtttcaatggaaaataatgtttcaaaacctgaagccgcctt

SEQ ID NO: 170559 - DNA, 362 bp, Arabidopsis thaliana
agggaaagtggagtttgctgtcagggccaacggttatcctcggcggagctgtaattgctgccgtcgccgtcggattcgtcttgcaaaacgtaacgaaaggggagcagaatatcactgtctcaacatgcaagtgagaatacaaatggacagatgctacaagatgtgatgatcatgtgatttgatacaatttagctcttgcagtgtacaagctcaataatgcttttgtaagcttttgaatatacatatcgttgtggtgtattcagattcctgttactaataatgcaatttcaatttccaaaaaaaaaaaaacaaaaaaaaaaacaaaagcggccgatctataagattcaagcttacgtacacgt

SEQ ID NO: 170560 - DNA, 353 bp, Arabidopsis thaliana
  unsure (1)..(353): unsure at all n locations
cggcctgccaaaaaaacaacaaaaggggaaaaaccaaaaaaaaaaaacaacaaccaaacactcaattccccaaaaccttaaaaaaaaaaaacaaagcaggtaaaataaaaaatctcagtgcgattgccgtctccggagccgtcctcagtgggcttggttcttcgttcctcaccggangcaagagaagtgccaccgcattgacaagcggcgtangcactggagctcagagagttggcaagaaaactcttattgtcgctgctgcggctgctcagcctaagaaatcttggatccctgccgttaaaggtggtggcaacttcccttgacctgaatggctcgatggctcgctaccagga

SEQ ID NO: 170561 - DNA, 331 bp, Arabidopsis thaliana
aactaatgtcaggaaaccaacagttgaatactcaatcgaggaatatgccaaaatcatgtcgaccaacttagaatccgctttccatttatctcaaattgctcatcctcttctaaaagcatctggtgtcggaagcattgtgttcatctcctctgtatctggcctggtgcatcttagcagtggatctatctatggtgcaactaaaggagcacttaatcagcttacaagaaatctagcttgcgagtgggcaagcgacaacatcagaaccaattgcgtggcgccatggtacatcaagacctcacttgtggaaatgctacttgagaacaaagatttg

SEQ ID NO: 170562 - DNA, 409 bp, Arabidopsis thaliana
tcgcaactctctatagtgagtcgtatgatgcgataagaggacacaaggggatcgagagaagaatactttgatcagcttgtgagaaaaataatggctgcttcagtgatgctatcttcggtgacattgaagccagctggtttcacggtggagaatacggcggctagaggattaccgtcgctcagataaggtcgtcaccccttcacaattgtcgccagtggcgtcagtaagatcactagcgacaagcccttcggaatcaacagtagcatggacttgagggacggcgtccacacctctggcagaaatggcaatggatacggtgtttacacgtacgtcaacacatatgcagctaacgtcgatggatagagtcctacttatgctcagaacgagtggtcagcgactggtgacgtgt

SEQ ID NO: 170563 - DNA, 252 bp, Arabidopsis thaliana
gtcagagataatggcgtacagtgcgtgtttcatagaccagagcgcattggtgtcatcatctgcactatcgtcatcttcctcctcagctcagcgtcacatgtcgcactccacacctgttcagtatatcgtgtcactcagcagtctcatgagctacgatagctcagccgtctcgcgctgtcatggtcgtagtctcatctgctgaaccggtactgctggttccatcatatctcctgctgatgggtcctatcgtga

SEQ ID NO: 170564 - DNA, 461 bp, Arabidopsis thaliana
  unsure (1)..(461): unsure at all n locations
caagcctccattatggcgccaaaaaaccacaaaaagggaaggtttgaattcctcctccaaaccattaaaaagattggttgaaggaaaccacagaaatcaaccatggctccgtgcaaaaacttggagaaagctaaggctgcanganaaggtagccaattggaagctaacaagaaagctatgtcgattcagtgcaaggtttgtatgcaaacattcatctgcacgacatcggaagtgaaatgcanggagcacgcggaggcgaagcatccgaaagccgatgttgtcgcttgtttccctcacctcaagaagtgatgaaagctattatctcaactataaaggattccaatgtataacgtatggatcctcatctttcctatgtttgtatcaaagtctcgacaaattttatggtttctatttctctctacttgtttcaacaataagtctcttgctatgattatataatg

SEQ ID NO: 170565 - DNA, 125 bp, Arabidopsis thaliana
ctgggcatccgaatggaacatacggtcatcatagtctaggaacgagtgttatgcagcatcagtgttgctttcttcggcgactacgacgatggaatcggctagccttgggagacttagaacggatt

SEQ ID NO: 170566 - DNA, 158 bp, Arabidopsis thaliana
tcgcaacactctatagtgagtcgtaataacaaagaacggggacaacgcagctcaggctttaataaagctaatacaagttattgggaaacagagatgggtttggttacagatgatgttagagctatggcagagatttacaccggagatcacacatgtag

SEQ ID NO: 170567 - DNA, 374 bp, Arabidopsis thaliana
  unsure (1)..(374): unsure at all n locations
gtacggctgcaaaaagacaacaaaaggggggcgccaccattaaaaccccccaatcccaacctgcaaaatttcacggtaggtatttgaaatggcgacagttccaggacaattgatctgggagatcgtgaagaacaacaactgtttcttggtgaagcagttcggtagaggaaattctaaggttcaattcagcaaggagactaacaacctcaccaacgttcactcttacaagcactctggtcttgcaaacaaaaagactgtgaccatccaggccgctgacaaagaccaagctgttgtgctcgccnnacacangaccaagaagcagaacaagcctaagctctctgtcaacaggtctatccctcaagaaagaattcccc

SEQ ID NO: 170568 - DNA, 257 bp, Arabidopsis thaliana
acacacaaggggggctccagcaatagaatctctcgatcgccagctgcgagacttcaccgtgggtagttgagatggcgacagttccaggacacttgatctgggagatcgtgaagaacagcacctggttcctggtgaagcagttccgtagaggaaattctaaggttcaagtcagcacggagactaacagcctcaccaacgttcactcttacaagcactctggtcatgcaacacgaagactgtgaccatccatgccgctg

SEQ ID NO: 170569 - DNA, 317 bp, Arabidopsis thaliana
cggatatcgcgggtcgactaagcgtctatagtgacgtcgtgttaagcagcgagaggtcgagctaccgggagacatcgagagggtaatatttcgatcatcctgtgagaaggtacatcgctgcttcagtgatgtcatggtcggtgaccgtgaatccagctggttgcacggtggataagaccgccgcgataggattaccgttgctcacgagagctcgtggttccatttaaattctcgtcagtggcatgtcgaagatcatcaccgacgacccctacatgaagcttccgtagcacgcacttgagggagtgcttcgacggtca

SEQ ID NO: 170570 - DNA, 407 bp, Arabidopsis thaliana
gacccatttcttggcttacaacaacaaatcttaaacgttttactttgtgctgcactactcaacctcaatggccgcctcaacaatggctctctcctcccctgccttcgccggtaaggccgtcaagctttcccccgcggcatctgaagtccttggaagcggccgtgtgacaatgaggaagactgttgccaagccaaagggcccatcaggcagcccatggtacggatctgaccgtgtcaagtacttgggtccattctctggcgaatcaccgagctaccttaccggagagttccccggagactacggatgggacaccgccggactttcagctgaccccgagacattcgcaaggaaccgtgaactagaagttatccacagcaggtgggccatgctcggagccctaagctgcg

SEQ ID NO: 170571 - DNA, 373 bp, Arabidopsis thaliana
ggatcagatctcaacgacgacgagccatggcttcaactttcagcggcgatgaaactgctcctttcttcggattccttggcgctgccgccgctctcgttttctcctgtatgggagcagcgtacgggacagcgaagagcggggttggtgtagcgtcgatgggtgtgatgagaccagagcttgtgatgaaatcgattgttcctgttgttatggctggagttttaggtatttatggtttgatcattgctgttatcatcagtaccggaatcaaccctaaggccaagtcttactatctattcgatggctatgctcatctctcttccggtcttgcttgtggtctcgctggtctctccgccggtatggctattggaattgt

SEQ ID NO: 170572 - DNA, 383 bp, Arabidopsis thaliana
agctgtcactacagcagggacatcataaggatatggacaactgtacagtggggtcgctcgcgaatcgttctcacacttcacgcctgtacaatctttgagacaggaaagtcttagaaacctcagggtctatgtaacatctatggctaagttccaacgtttacatgcatacaaggttaacgttaatctcagacacacggatatcgaagacacacagcttgcaataatccaattgatagctatatccagatgagatatgcaatcattcattttgtgctgtacgtccatatgtggtgtcctgacatagatggtcacctgagatggagatgttggaaaactcgtaacattggaaaaatcttaccataatttaaaaaaaagcgggcgct

SEQ ID NO: 170573 - DNA, 246 bp, Arabidopsis thaliana
tacgatagacattgaatctgtgccaaagttccttaccactctcagattgttggatctttacaaccaccccggtgaatatgtggcaatgaattcagagatctccagcgcaatgcgagctgagaacaaagaatttctggagaagatggaaagctacgaaacaccaatgtcatgcttcaagaacaacaaaggagattccattcttcaccttgctgctgcttttggtcatcttgagctagtaaagagcat

SEQ ID NO: 170574 - DNA, 334 bp, Arabidopsis thaliana
agacgacagaagggggagatcgagagaagaatagtttgatcatcttgtgagaaaaataatggctgcttcagtgatgctatcttcggtgacattgaaaccagctggtttcacggtggagaagacggcggctagaggattaccgtcgctcacaagagctcgtccctccttcaaaattgtcgccagtggcgtcaagaagatcaagaccgacaagcccttcggaattaacggcagcatggacttgaaggacggcgtcgacgcctccggcagaaagggcaagggatacggtgtttacaagtacgtcgacaagtatggagctaacgtcgatggatacagt

SEQ ID NO: 170575 - DNA, 445 bp, Arabidopsis thaliana
cggctgaagacgacagaaggggtgaagcgtgatctgtcacggatcgtgagtaatttgaagcttgtggtgtttcctaatccgtatagggaagatcctgggaaagcacttagggattgggatctatggggaccttttttcttcattgtgttcttggggcttactctttcgtggtctgcttccgttaagaagtctgaagtatttgccgtggcatttgcactacttgcagctggggcagtgatcctcacactaaatgtgctgcttctgggaggacatataatctttttccaaagcctaagccttctaggctactgtctatttccgctagacgttggagcagtgatctgcatgttgaaagacaatgtgatactgaagatggtcgttgtgtctgttactctttgcctgaactcttgggctgcttaacccttcatgagcgccgcaattaaac

SEQ ID NO: 170576 - DNA, 253 bp, Arabidopsis thaliana
ggcggtttccgaaactgcaaatggctcagtaaatcagtgtataatttgtttgatgggaactagctactcggataaccgtagtaggtctagagctaatacgtgcaacaagaccccgacttatggaaaggacgcagttattcgataggatgtcgacgccggctctgcgcgttgcactgatgattcatgctaactcgacagatcacatagtctctgtgctgtcgatgcatcattcacatttcgggactaccaggtt

SEQ ID NO: 170577 - DNA, 445 bp, Arabidopsis thaliana
acgacagaaggggggaaagagcagaagaaatttgcagaagagagaaaaacaaaaatggcggttctttgctcgtcttcgacggtgatactctcttcttcttccgtgaaatcctccggaagtgagagaaagtctccgtttttagggttctctttaacggctatctcgaagccgtcggtacgagtcggcatttatgcgaattcgaaaagaggattgcaagtgaagtgtgaagctgagccgacgacgacgacttctcttgttccggcgaatcaacgatggatgttcgacgaagaagaagctaatggccctgacatctggaacacgacatggtatccaaaagcttcagaccatgtgaacacggacaagccctggtttgtggttgatgcaactgacaaaattcttggtagattggcatcgacaattgctaatcacatccgtgggaaaaatc

SEQ ID NO: 170578 - DNA, 399 bp, Arabidopsis thaliana
ctgtcgcaccacgaggcgctgtctacgagtcgggttgtttgggaatgcagccccaatcgggcggtaaattccgtccaaggctaaatacgggcgagagaccgatagcgaacaagtaccgcgaggtaaagatgaaaaggactttgaaaagagagtcaaagagtgcttgaaattgtcgggagggaagcggatgggggccggcgatgcgtcctggtcggatgcggaacggagcaatccggtccgccgatcgattcggggcgtggaccgacgcggattacggtggcggcccaagcccgggcttttgatacgcttgtggagacgtcgctgccgtgatcgtggtctgcagcacgcgcctaacggcgtgcctcggcatcagcgtgctccgggcgtcggcctgtgggc

SEQ ID NO: 170579 - DNA, 376 bp, Arabidopsis thaliana
agacgacagaaggggacaacaacagattttaaaaaaccccaaaaactttacattcttaacaatttcaaccctatgggcttacttgatcatctctgggatgatactgtcgctggtccacggccagagaacggcctcggcaagcttcgtaaacaccataccttcagtttccgacctagctccggcaatgatcaatcggaagctggaagtgcgagatcgtacggtgaggattcgctaccggaagaagcagtgaaagttacacgtagtatcatgataattaaaccaccgggttaccaaggcagttcagctccagcttcgcctgccggttcaactccgccgctatcacctttctctccgccgctgtctccgttctctgagc

SEQ ID NO: 170580 - DNA, 331 bp, Arabidopsis thaliana
  unsure (1)..(331): unsure at all n locations
ggagaagtcaaaagatgtgtccttttcaaaatctatcctttcttaaaaacatatcaccagagagaattgatcaaaaccacaagaaataatgattagagcgctgagcacgaggaaggttcgaggcagctacaagaagctcggcgacgaagaagaagcaggcgcagggcttttagaagtgaaaccggagagcgttcctacaaatccccatggtcaatccccgaaggtgaataaaccggtggagaaaaccaggggttcggctcaccctctatttagtttcttcganatgagtctaaagaggaagaagaagaagaagagcacgacgactgcaaaa

SEQ ID NO: 170581 - DNA, 439 bp, Arabidopsis thaliana
agacgacagaagggggggttaggtttgtcttcaaaatcgtcagaagaagaagaagaagtcaaagacgataacaatgacgtcatcatcgtacctccgatttgcgatcgccgtcgtagctttcctctcaatcaccaccatcaccaccgcacgtccttgcaaaaccttcctaatctcctcatattccctctcaataaccccagaaaaccctaacctcgaatccgatttcacctccacacgattcgtcaccgttttcacaatccgtcgtctaaatcctcatcacgtggttcctttcttcgtcaatcgtcgtcacgagaagccacagatccaatcggatcgttccctccctttgatctctgataacatcaattcgtttagagatcgaaccagagatattcttagcgtcgtcgtcgcgcctttgttcggtgttggttgtggtgct

SEQ ID NO: 170582 - DNA, 255 bp, Arabidopsis thaliana
ggcagacgcgagagaccttggtaactaggccaggtatggtcgccacttcatccggcgctgctgcttcttcatcgatcggtagccgggtggtctccgacattagctccatttcatgccggttcactaactggttcggattcggaaccatcagctcatctcccacgtaagcttggacgggtatcacaaaccggccgccacggttccgatgcgcattctcatcctggtatctcgacggttcacttgtctcggactacg

SEQ ID NO: 170583 - DNA, 397 bp, Arabidopsis thaliana
  unsure (1)..(397): unsure at all n locations
ggtgtgtttggagaagaagaagaacagatcaaatacgaggagagatctctaaagagatttatcgtttcaaatttgttcacgttgagaagtttaatttagattaaacaacaaaaagatgggttactggaattccaaggttgttccaaaattcaagaagttattcgagaaaaatagtgctaagaaggctgctgctgctgaagctaccaagacctttgatgaatctaaggaaacaatcaacaaggaaattgaggagaaaaagacagaactccaaccaaaggtcgtggaaacctatgaagccacgtctgcagaagtcaaggctttggtgagagaacctaaggtggctggtttgaagaaaaactcaacggctgtgcanaagtactcgaggagctagtcaaaa

SEQ ID NO: 170584 - DNA, 283 bp, Arabidopsis thaliana
accactcgtacgcccacacatccgggtagcggcgagaaaacaacacagagagattaacataagaatagtttgatcatcttgtgagaaaaataatggctgcttcagtgatgctatcttcggtgacattgaaaccaactggtttcacgggtggagcagacggcggctagaggattaccgtcgctcacaagagctcatccctccttcaatattgtcgccagtggcgtcaacaccattaagaccgactaacccttcggaattaacggcatcatggacttgaaggacg

SEQ ID NO: 170585 - DNA, 350 bp, Arabidopsis thaliana
  unsure (1)..(350): unsure at all n locations
ggaactttccaagagttgaagaaaatcacagaaagccttagcacagagaagagagtatggaagctctgaggtgggctctagacaacctcaagctctcttcgtcttcttccgattcatcattcgtcgtgctccacgtccagccgtcgccttctgtagccgccggcgtgagtcccggcaccatacctttcggtggtcccagtggtcttgaggttcctgctttcactgctgcaatcgagcaacaccagaagcggatcaccgacaccatcctcgaacacgctagtcaaatttgtgctgaaaaatctgtgaatgtgaaaacacaagtggttattggggatccangtataaaatct

SEQ ID NO: 170586 - DNA, 329 bp, Arabidopsis thaliana
  unsure (1)..(329): unsure at all n locations
gaaagaagaaggtgggaaaggaatcatgtcacctattgctaatgattatgatgaagacgacaatatatctaagattgagaatggatcttctgtgagcatcgatgacagggaagttttacctcgtcctccgccattaccacctgggataagaccatctggatttgagtacgagtcaagaagaaacccctgttgccaagacagacgatgatgacatatttgttggtgaacgcgtcgattacacggttcctgntanagatgtgacacagagtcctatttctgacgacatggaagaatctcccagagataaggagaaagtatcttatttcgat

SEQ ID NO: 170587 - DNA, 175 bp, Arabidopsis thaliana
gaaattctgagaacaaatgggttcgaagagaagagaccatccaagctttcacatcgtgagttgttacatttgctttctttgtttaaccaagctggaatttttttccatgatattacatcattacaaatggatctacacgaataatgagaagttttctttaatgttttaacacaga

SEQ ID NO: 170588 - DNA, 400 bp, Arabidopsis thaliana
agacgacagaagggcataaaaaaaaaaaacacaaaaaagtttcaatggccgcctcaacaatggctctctcctcccctgctttcgccggaaaggctgtgaacctttcccctgcggcatcagaagtccttggaagcggccgtgtgacaatgaggaagactgttgccaagccaaagggtccatcaggcagcccatggtacggatccgaccgagtcaagtacttgggtccattctctggcgagtcacccagctaccttaccggagagttccctggagactacggatgggacacagctggtctatcggctgaccccgagacattcgcaaggaaaacgtgagctagaagttatccacagcaagtggggcaatgctcggagcccctaagctgcgtctttccctgagc

SEQ ID NO: 170589 - DNA, 369 bp, Arabidopsis thaliana
taaaaaaaaaaaaacacaaaaaagtttcaatggccgcctcaacaatggctctctcctcccctgctttcgccggaaaggctgtgaacctttcccctgcggcatcagaagtccttggaagcggccgtgtgacaatgaggaagactgttgccaagccaaagggtccatcaggcagcccatggtacggatccgaccgagtcaagtacttgggtccattctctggcgagtcacccagctaccttaccggagagttccctggagactacggatgggacacagctggtctatccgctgaccccgagacattcgcaaggaaccgtgagctagaagttatccacagcaagtgggccatgctcggagccctaagctgcg

SEQ ID NO: 170590 - DNA, 377 bp, Arabidopsis thaliana
caataaggtaatagaagctgctgagaagcctgaggagacgatagtaccaaggcaatttattgatttaggccctacgagagcagtaggtgaggccgaggatgtgtcaaattcttcatccgaagatagaactcgttcggggggttcttctgcagccgagaggcgtagtaacgggaagagacttgggcgtgaagaaagccccgaaactgagtccaacaaaattcagaagacgagaatatcaaccaacggtagtgaatttaggtttccggtgagtctctcaagtattcgtgatcgtgaagatgaagatttttcatctggcgttgctggagataatgaccgtgaagttcccggcgaagtggatttcttctccgacaagaaat

SEQ ID NO: 170591 - DNA, 418 bp, Arabidopsis thaliana
gactccaaaaaaatcaaacccaccattcaaacaaaacacaaaaacaacaaaaaaaccatttccccaaaaaaaaaaacaaaaacagaggatgaaacaaaaccagagctagtgagagctgcgtcggtgaggagtttagggcacaagaatgagatagacatgttgatacaagagaagctgcaacagcagaagcaacagaagcaaggagggttgcctaagagctcgagtactgggatggcgaggatagaggaagaggaagaaacagaggaaggatctgtgaatccgaaggtgaagaagactaagaaagtctctgatcttttgtatcctcgtagcaaatcttacgccgttactactagtacccctatcttgtaacttctcgtcatcctttttcttcttcttaattttagtattttgtggattg

SEQ ID NO: 170592 - DNA, 374 bp, Arabidopsis thaliana
gatcttccagaagaacaagatagccagtgagagtgatcctttagtaagagccgaacttcacaaactaaacggaaatggtcaagaacatgatcattcatccacatcaccaaaatctgatgaagcatctcgctctaccgttggacctcaggaaccgcaaagcccttatgtggaagcaccgaaacttggagaagagcaaatcaactatcacttcccaaggcctgcgccgcctccaggagcacagagacactcttaaactggcaatggattgattcacagatgaacgaaaaggttattttttcctttttttgctatataatataagtctttatgcatatttgatatatttgcaggtgttggtattaccattatgtaat

SEQ ID NO: 170593 - DNA, 380 bp, Arabidopsis thaliana
  unsure (1)..(380): unsure at all n locations
ggggccaagacggagcttatccgttacgactgcgtcattgcacggaaagaagaaatccatggatatggccgaacgaggtctcgaaactggccggagatctcttactgtttctcgttctcctttgggtttaacaggaggcgaacggactgtgaaacggttaaggctatcgaaagcacttacagtaccagcaacaacaactatatatgaagcttgtaaaaggatggcttcacgacgagttgatgccttgttgttgactgactctaatgaaatgctttgtggtattcttactgataaggacatagctacaagagtgatttcacaggaacttaatgtcgaggaaacacctgtatctaaggttatgacgangaacccaatgtttg

SEQ ID NO: 170594 - DNA, 442 bp, Arabidopsis thaliana
cgacagaaggggggggaagacaattccgagaaaatagagagtagagagatcctaaagagtcaaaagaggtcaggtgattgattaacccgttgaataatctccttctcccgttgaatcgggtcgaaatagttgaactttaagccaaaccctagcttgaggaggaagaggaatggtcggcgtgatgaacagattgaggaatctggacgcttaccctaaaatcaatgaagatttctacaggcgtactctttctggtggtgttatcaccctcgcctcttctattgtcatgctaattctcttcttctccgagcttcagctgtacattcacccggttactgagactcagcttcgtgttgatacatcaagaggagagaagctacggattaattttgatgttacattccctgcgcttcaatgttcgattagtagtcttgattccatggag

SEQ ID NO: 170595 - DNA, 328 bp, Arabidopsis thaliana
ggtttttaaaaaaaaaaaaaaaaaaaaaaaaaaaaaaaaaaaaaaaaaaaaaaaaaaaaaaaaaaaaagacaaacaaaaaaaaaaaaaaaaaaaaaaaagcggccgcccaaaaggatccaagcttaagtacgcgtgcaagcgaagtcaaaacgctcccaaaatgtcacccaaattcaattcaaaggccctccgtttaaaacatcttgaccgggaaaacaccggggttatccaaaataaaccccctttaaaaaaaaccccttttgcaaaagggggtaaaaaagaaaagggccccacaaatttcccttcccaaaaattttgcacccccaa

SEQ ID NO: 170596 - DNA, 455 bp, Arabidopsis thaliana
aattcgagcggccactttttctaattttctcttcttcttcttctttctcgttttgagagaaaacaaaaaaattctgagtctacaggtttcacgaaaaggagaagaaaaaaacaatggcggatcagctcaccgacgatcagatctctgagtttaaggaagctttcagcttattcgacaaggatggtgatggttgcattaccaccaaggagctgggtactgtgatgcgttcccttggacaaaacccaaccgaagcagagcttcaagacatgatcaacgaagtggatgctgatggtaacggtaccattgatttcccggagttcttgaaccttatggctcgtaagatgaaggacaccgactctgaggaagagctcaaggaagcattccgggttttcgacaaggaccagaacggtttcatctcagcagctgagctccgccatgtgatgacagaccttggg

SEQ ID NO: 170597 - DNA, 336 bp, Arabidopsis thaliana
gtaaaaaaaaaaaaaaaaaaaaaaaaaaaaaaaaaaaaaaaaaaaaaaaaaagcggccgccctacaagatgcaaccttactaactcgtccatgctacgtcataacacttctacaatgtcaccaaaattcatttcatcggcggtcgttttataacatcgtcactgggaaaaacctgctgttatccaacataatcaccttgcagcaaaacaccctttcttcaccaggcgtaataacaaagaagaccccaccaatgatccttctcaacaattgttcagcctcaatgatgaataggacgacccctgtagtagcgcattaatcaccgcgggtgttgtggtt

SEQ ID NO: 170598 - DNA, 445 bp, Arabidopsis thaliana
gaagttctcagatcctggtcagctcaactacccaagtttctcggttttgtttgggggtaaaagagttgtgcggtacactcgggaagtaacaaatgttggtgcagcaagctcggtttacaaagtgacggttaatggagctcctagtgtcggaatctctgttaaaccatcgaaactttcgtttaaaagcgtgggagagaagaagaggtacacagtcacgtttgttagcaagaaaggagtgagtatgacgaacaaggctgagtttggttccatcacttggagcaatccgcagcacgaagtgagaagtcccgttgcattctcttggaaccggttttgataaaaaaactaacatccctagtgatgatgttttctatttaagttatcttgattgggtttaggctaaaccaaagcccatcatgagccataagtagtgggaagtgttcttgtg

SEQ ID NO: 170599 - DNA, 393 bp, Arabidopsis thaliana
gaagacgacagaagggggacggagacaaaaacacacacgacgaagaaatctccgggcggtcgagaaaaagaagtttctggttccaagagatatgtcagttggccaattcatctacatattgagtgctaggttacatttgtctcctggtaaagccttattcgtgtttgtcaacaacactctccctcaaactgctgctctgatggactcggtctacgaatcttacaaagatgatgatggattcgtttacatgtgctatagcagtgagaaaacctttggttgatccaataatgatgttagtgtctgtgtacatatactttaaacataagatgttcactacatcacaagacatcaaacacatgttaagctttatatgacagcggcgtgtgttatcac

SEQ ID NO: 170600 - DNA, 427 bp, Arabidopsis thaliana
gagaaacggaagatctgcaactgaatctggagaagactgcttttccgggctcacaaacaggtgtctaatagaagttgtagacaaagcctatagcggaaccatcatcacttgcaagattcatgacatggttcgtgatttggtgatcgatatagccaagaaggattcgttctctaacccggaaggcctcaactgtcgtcaccttgggattagtggaaactttgatgagaagcagatcaaagttaaccataagctgagaggcgtagtgtcaacaactaagacaggtgaagtgaacaagctcaactcagacttagctaagaaattcacagactgcaaatatcttcgggttctcgatatctcgaaatccatatttgatgctcctctgtctgagattttggatgagattgcaagccttcaacacttagcatgt

SEQ ID NO: 170601 - DNA, 421 bp, Arabidopsis thaliana
ggacacaccacaaccctggaccaacaacactgtgtatgtcgccaagaaaaacggggcagtgcgcgtgtgcattgactgcacccctgccaaccaggtgactgaggatttcgattggccgctgccgcgcctgcaggacctgcgccaccgtctggccggggccagatggttctcacgtatggatctcagcgacgcgttcttccgcatcagcgtgcctcacgaaatgcggtaccccaccacctacacatgcgacaacgttgactactggttcacaaaaatgccgttcggactcaagacggcaccgagtgtgtttcagcggttcatggaccacgttcttgcgcgttgcaagaacgaggctttctggtacatggacgatgtactggtgactgccgacagtcgggaagagctcgtccgccggacgcgc

SEQ ID NO: 170602 - DNA, 368 bp, Arabidopsis thaliana
gaagcaaagagagagaaaacaaatcgaggatctgaatcgtcaaacactttactttgttttgtatgttcttcattgcaacacattaatatacttattccaaattacacaagcacagtggtctaagccagagacaaattcttgaaactaaaccatacgattcttgaaaccggaactaaacacttccagatatgccgagattggatcgcaatttactgtaaatttttgctttctcttgctgagatttagtgtctctttacatggtactctacttttattaaggtttagtataagaagaaagttagaagcagaaattttttggtcaaggagagatttggttatcgtgattttagccattgttcggttagtgt

SEQ ID NO: 170603 - DNA, 443 bp, Arabidopsis thaliana
gaagacgacagaaggggattcaataacccttacaacaccgaatataactttgaaaaaaaaaacaaatggcttcaaagaactcagcctctcttgctcttttctttgcgctcaacatcctctttttcaccttaaccgttgcaacaaattgcaactgcaagccaagtcctaaaccaaagccagtcccaagtcctaagcccaagccggtccaatgtcctcctccaccccgtccttcagtcccaagtcctaatcctaggccggtcacacctccacgcacccctggttcatccggaaacagctgtcctattgatgctctcaagctcggtgtatgtgcaaatgtcttaagcagtctactcaacatccagttgggacagccatcctctcaacaatgttgctcgctcatccaaggtttggttgacgtcgacgctgcgatttgtctatgcact

SEQ ID NO: 170604 - DNA, 278 bp, Arabidopsis thaliana
ggagatcgagagaagactacattgatgagcttgtgaatcaagtaatggctgcttcagtgatcctatcatcggtgacatgtgagccacctggtttcacggtgcgagtagacactgaggaccagatgattatcagtcgcgcacaagagcgcggctctccgtcaaaagtgtcgcaaatgggctcatcactctctcaaccgtgtcgcccttcgggtctaacagctgcatagacttgagggactcgcgtctacaccgccggaagaactggcaggggatactgt

SEQ ID NO: 170605 - DNA, 402 bp, Arabidopsis thaliana
  unsure (1)..(402): unsure at all n locations
gaatgatgaagatcctctttacgccgacgtacctaaacctccgaaggataaatcggagaggaaaccgtatccgactccgatgaaggagttgattcgtcgtgcgaaagaggagaaacaactgagaaaattacaaccatgtcgagttctcgaagatccaccggataatggtttacttgtgccggaacttgtcgacgtagctcactgtgttcaccgatgccgtaacatgttgctctctggcctctctaaaatcattcatcatgttcctgttcatcgttgcagattgtgcgctgaggttcatattggcaagcaaggtcatgaaatcaggacttgcactggtcncgggagtggttcaagaagtgcgactcatgtttggaaaagaggaagagtgagtgatgttgtgtt

SEQ ID NO: 170606 - DNA, 228 bp, Arabidopsis thaliana
gaagaagacagattagcaaatttcagtggttttggcttattagatgaagaagagactgttgaagatgaagtatcacatatcactgttggattcattagagctactgagaaagaaccccgagactgtattcaatgacagattagcaagtttcacttgttttggcttagtagagattgttgaagatgaagtatcacatgggactataggatccactgaagctatggagaa

SEQ ID NO: 170607 - DNA, 371 bp, Arabidopsis thaliana
  unsure (1)..(371): unsure at all n locations
gatcaccaaaaaagaaagcaatttgtcttcaaaacatatttctctctctaaaacctctttttcataaaaggttgcgtcatctatacgaatccatacgtctctttgcttttctccgatcggtcttcttttctcatcgccggaacgctttggtaatgtttctcatttctccgatcattattgttgtttcgccgttgagctgattatttcgtgttggtatgtataaacaagccgatcgttgtttccttttttctcttgtgattgtgtgatgatggattgtttctttttttcggtttaatccggtttattcncggttttgctgctacatcggtgacttttcccacaatcttcgggtatgatcgcgatcatgtccg

SEQ ID NO: 170608 - DNA, 252 bp, Arabidopsis thaliana
ataccggctgcaaaaagacgacaaaaaggggaaacaaaaggtccttttgatgggtttgggatttggtggggtccccccaaaaatgccaaaccaaggaacttcccccccggccctcaatccctccccggaccccttgggaagccggtccaaccgttaaaagcctccgggataaccatagagaacccaacaaaaattgatgacgaacaatgggcttgctaaatggattctctattctttccttaatccaacaaa

SEQ ID NO: 170609 - DNA, 449 bp, Arabidopsis thaliana
  unsure (1)..(449): unsure at all n locations
acgacagaaggggaattcagacacctgactcgtcttctcatcctacccccaattcaatattcgtcgccaatatgccgcaaagacactcgaagaacaacaatgatcttgcgtatttcacttacgacgagaagaagttaggttatggaactcagagagagagagattggggagagactcgatcaaaccctttgatgcttgttctctctgcttgaagcccttcattgatccgatgtgttgccataagggtcatgtcttttgcagagagtgtatacttgaatgtttccttgctcagaagaaagatatccaaaggaggcttgctgcacattcgtctcagaagaagcaagataaggatgaagaagaagagaggctaatgttacanaaggcgagagagctcgacgaatttgatcaagcaaaacatagtgcaatgcctccaaacagtgacaagaatc

SEQ ID NO: 170610 - DNA, 423 bp, Arabidopsis thaliana
  unsure (1)..(423): unsure at all n locations
ggaggctgagataacagacgcggcgaagaggtcccttccgattaaaagtcgcaagcattcaacgatggcttccatcacgaattatgtccgatacatggctcacaagctcgagtactctctcactctcagccttaagaaacatactagagagaagctcagtgaccgggaactctttggtgtagtcatgaagaatctattctatggaagaataagctacttacactcggacaaaggaaaagagatggccccaaccatgggaacaaatgaaagcacgctacttgtccgtaagctaccagttgttgatacaaggtacattttcgtangggatgctgttgtcttgaaggacccgaatgaaacaaataagtatatagtcagaagactagcagccttagagggatctgaaatggtatcaagtgatgagaa

SEQ ID NO: 170611 - DNA, 446 bp, Arabidopsis thaliana
  unsure (1)..(446): unsure at all n locations
cccacgcgtccgcccacgcgtccgcccacgcgtccggaagagatcgagagaagaatagtttgatcatcttgtgagaaaagtaatggctgcttcagtgatgctatcttcggtgacattgaaaccagctggtttcacggtggagaagacggcggctagaggattaccgtcgctcacaagagctcgtccctccttcaaaattgtcgccagtggcgtcaagaagatcaagaccgacaagcccttcggaattaacggcagcatggacttgagggacggcgtcgacgcctccggcagaaagggcaagggatacagtgtttacaagtacgtcgacaagtatggagctaacgtcgatggatacagtcctatttacaacgagaacgagtggtcagcgagtggtgacgtgtacaagggatgagtcnacggattggcaatttgggcggtaactctcg

SEQ ID NO: 170612 - DNA, 431 bp, Arabidopsis thaliana
cccacgcgtccgacgacagaaggggacccatttcttggcttacaacaacaaatcttaaacgttttactttgtgctgcactactcaacctcaatggccgcctcaacaatggctctctcctcccctgccttcgccggtaaggccgtcaagctttcccccgcggcatctgaagtccttggaagcggccgtgtgacaatgaggaagactgttgccaagccaaagggtccatcaggcagcccatggtacggatccgaccgagtcaagtacttgggtccattctctggcgagtcaccgagctaccttaccggagagttccccggagactacggatgggacaccgctggactttcagctgatcccgagacattcgcaaggaaccgtgagctagaagttatccacagcaggtgggctatgctcggagccctaagctgcg

SEQ ID NO: 170613 - DNA, 398 bp, Arabidopsis thaliana
  unsure (1)..(398): unsure at all n locations
caaactatggagagcatcaggctaaaaaacgaaaaagccatcactgaaggaggaaccattggttctcgttacaaagaagctgacaagtcctgcaaagtgatgtcgggtagattcttccctgaaaatgcctgcctcaaaggtacagccattattactgctgtggttctagctgctgtagctgtactagcttccaacctgtaggctgaagaagatggtggactcattggttctgcacctatacttcaatgcaaacacctcagctttgaagaactaagagagatataccattgtccttgctttccttttgctaagagtttgtgaatatattgagatatgtcgtcaatcttgttgttgggtattgttcactcaaatagacgtttgacanaaaanaagtatat

SEQ ID NO: 170614 - DNA, 411 bp, Arabidopsis thaliana
attctataagaagcactatggagaagaggacatgaaggatcttatagaggacctggagtggaataaagtaaatgatttcaaatggaggaacttatatgagttgaaggttatagctgtgcaacaaaaggagaaggaacttggtggtcgactgaaagaacgttacaaggacgaaaatgaaaggaaacaaagtcgacaaactaaggtctgctcgaaagctcctccaagcaaaagaccattttggggtaatagtgcatcaggttacaatcttgggcatgtgaagagcaacatcatgaagaaggcaaaaatagatctgttgaagagtcaagaagtgaaaaatcttactgcgattaaaaggaacaccattcagaagagtttcagtagttctactccaaagaaaactggcttatctgc

SEQ ID NO: 170615 - DNA, 283 bp, Arabidopsis thaliana
ggagcgaaaatggtgaaagcaactaaggcagagaagaagatcgcctacgataccaagctatgtcagcttatcgatgagtacacccagatcttggtcgttgcggccgataacgtcggatcaactcagcttcagaacatcagaaagggtcttcgtggagactccgtcgtgcttatggggaagaacactatgatgaggcgttccgttaggattcacactgagtacaccttccctcaagcagagaaggtcaaggaatacttgaaggattcaagcaagtttgctgttg

SEQ ID NO: 170616 - DNA, 427 bp, Arabidopsis thaliana
agaaggggaaggcaatcaaaaaaatatggctgcgtctcccaagataggcatcggtattgcctccgtctcatcgcctcaccgtgtctccgccgcctcatccgctctttctcctcctcctcatctcttctttctcactactactactaccacacgtcacggcggctcctatctcctccgtcaaccaacccgaactcgctcttctgattccctccgcctcagagtctccgccaccgccaattctccgtcttcttcttcttcaggaggcgagattatcgagaatgtagtgattataggctccggtcccgccggttatacggcggcgatatatgcagcgcgcgccaatttgaagccggtggtttttgaagggtatcagatgggcggagttcccggtggacagttgatgacaactactgaagttgagaatttt

SEQ ID NO: 170617 - DNA, 441 bp, Arabidopsis thaliana
cggacgcgtgggtcaggcaagtcgtcccggaggagaacgatgaacaactcctcaacgcagaacatcacttcactctattcaaatccaagtacgagaagacttacgcgactcaggtagagcacgatcatcggttccgtgtcttcaaagctaacctaagacgagctaggcgtaaccagcttctagatccgtctgccgtccacggcgtcacgcagttctcagatcttactccgaaagaattccgccgcaagtttttaggactgaaacgccgagggtttcgtcttcctactgatactcagacggcgcctattcttccgactagcgatcttccgacggagttcgattggcgtgaacaaggagccgtcacacctgttaaaaaccagggtatgtgtggttcatgctggtcatttagtgcgataggagctcttgaaggagcacattttc

SEQ ID NO: 170618 - DNA, 356 bp, Arabidopsis thaliana
cataaaaaaaaaaaaaaacacaaaaaagtttcaatggccgcctcaacaatggctctctcctcccctgccttcgccggaaaggctgtgaacctttcccctgcggcatcagaagtccttggaagcggccgtgtgacaatgaggaagactgttgccaagccaaagggtccatcaggcagcccatggtacggatccgaccgagtcaagtacttgggtccattctctggcgagtcacccagctaccttaccggagagttccctggagactacggatgggacacagctggtctatccgctgaccccgagacattcgcaaggaaccgtgagctagaagttatccacagcaggtgggccatgct

SEQ ID NO: 170619 - DNA, 421 bp, Arabidopsis thaliana
cccacgcgtccgagacgacagaaggggcttcacaaacacaacatatccacaatacaaaacacaactttcatatataacaaaaaaagttatagaaatggccaaagacgtggaaggacctgagggatttcagacaagagactacgaagatccgccaccaactccgtttttcgatgcggacgagcttaccaagtggtctttatacagagccgtcattgccgagttcgtagccactctcctcttcttgtacatcaccgttttaactgtcatcggttacaagattcagtccgacacaaaagccggtggagttgactgcggcggcgtcggaatccttggcatcgcgtgggcttttggtggcatgatcttcatccttgtctactgcaccgccggtatctcaagtggtcacataaaccctgcggtgacg

SEQ ID NO: 170620 - DNA, 291 bp, Arabidopsis thaliana
tacggctgctctatgacgacaaaaaggcaccgtcgctacaacacgatacaccggtactgctgcgagtctatcacacatcgatacagctgcgataagacaacataaaggtacagcctgcatgaagacgacagaatggtacagctgcaatcatacgacacattggcacactgtggaagtgtaaaagtttcaagcttgttgaggaatcgtttcggttcatctaaaggatcaaaccttatctatgcatgcatgtgtacccagacagcttctacattgtccactatcctcaattca

SEQ ID NO: 170621 - DNA, 369 bp, Arabidopsis thaliana
ggacatccagatatgtctaccgccaagattgattagtctgtggtttaattttctcttcacaaagaccactattttgttataacaacgctcttatgcttgaacaaacatatcaagcggctaaagttggcaaaaacatttgttgattcaattggtatttgatacaaaaaaaaaaaaaaaaaaaaaaaaaaaaaaaaaaaaaaaaaaaaagaaaaaaaaaaaaaaaaaaaaaaaaaaaaaaaaaagaaatgaaaaaaagcaacaaaaaaacaagaaaaatcaacgacaggaaaaagggggccccccaaagggtttaaactttctttccctgtgaaagggaacgttaagggccttcaaagggtgccccaaaag

SEQ ID NO: 170622 - DNA, 341 bp, Arabidopsis thaliana
gacccatttcttggcttacaacaacagatcttaaacgttttactttgtgctgcactactcaacctcaatggccgcctcaacaatggctctctcctcacctgccttcgccggtaaggccgtcaagctttcacccgctgcatctgaagtccttggtagcggtcgtgtgacaatgaggaagactgttgccaagccaataggcacatcatgcagcccatggtacggatctgcccgtgtcaagtacttgggtccattcactggcgaatcatcgagctaccttaccggatagttccccggatactacggatgggacaccgccggactttcagctgaccccgagacat

SEQ ID NO: 170623 - DNA, 424 bp, Arabidopsis thaliana
ggtccacgcacgcgtccggatgcgaaaacgacagaagggggggataagttttctaaaaaatcgaagaaagatcgatggctctagatatctgcgtgaaggttgccgtcggtgctcctgatgttctcggcgactgtccgtttagccaacgtgctcttctgacacttgaggagaagaagcttccctacaagacccatctgattaacgtctccgacaaaccccaatggttcttagacattagtccagaggggaaagttccggtggtgaagcttgatggcaaatgggtggctgattctgacgtaattgttggacttcttgaagagaaatatccagagccttctctcaagactcctcctgaatttgcttctgtaagattcaaaatctttggtgcttttgtgactttcttgaagagcaaagacgctaatga

SEQ ID NO: 170624 - DNA, 425 bp, Arabidopsis thaliana
ttctcgggacgaatgatgcatccgtagggatgctaaagactatatgcaggggacagattaagtatggcacttcaagtcgttgttcttcgtccattcttcttcttcttcttcatcgtcttcttgacaattctacaacagtcctcttctgctcgggttcttacaatcagcaagcctgatagacatgagtacgccgcaagtgctcgttggcttgtcgctcagaattcttggggtgttcttagcacactatccgttgatcataaaggtgctcccttcgggaatgttgtatcgtttaatgatggtttacccgagaaaggtaacggtataccttacttttacttaacaacacttgatccaactgcaagacacgtacttagagaccagagagcttcacttgcaattagtgaatctcctcttgggacttgtac

SEQ ID NO: 170625 - DNA, 416 bp, Arabidopsis thaliana
tttttgaagcttctctctgcttatcgacacgatggttctcgaggcgactatgatatgtatcgacaactccgagtggatgcgaaacggagattactctccgtctaggttacaggcgcaaacggaagctgttaatcttctttgcggagccaaaacccagtcgaatccggagaatacggtggggattttgacaatggctggcaaaggagttagagtattgactactcctacctctgatcttggcaaaattctggcctgtatgcgcggccttgatgtgggaggagagatcaacttaaccgcagctatccagatcgcccagctagctcttaagcatcgccaaaacaagaatcaacgctgaaccaatggatgaggacagtgcgttgctagatcaggcaattgctatgtctgttggtgatgtg

SEQ ID NO: 170626 - DNA, 390 bp, Arabidopsis thaliana
gacccatttcttggcttacaacaacaaatcttaaacgttttactttgtgctgcactactcaacctcaatggccgcctcaacaatggctctctcctcccctgccttcgccggtaaggccgtcaagctttcccccgcggcatctgaagtccttggaagcggccgtgtgacaatgaggaagactgttgccaagccaaagggcccatcaggcagcccatggtacggatctgaccgtgtcaagtacttgggtccattctctggcgaatcaccgagctaccttaccggagagttccccggagactacggatgggacaccgccggactttcagctgaccccgagacattcgcaaggaaccgtgaactagaagttatccacagcaagtgggccatgct

SEQ ID NO: 170627 - DNA, 229 bp, Arabidopsis thaliana
gacgggtgccaaaagacgacagaaggggaaaaggttcactacgcaagtctttaatgtgcatctcgagatgtcttctaagataacatgaatgtttcaatagagacttagccacgttacgatggaagctgtgagatgtggatatgcctgcgcgggcgctctagaggatcgaagcttacgtacgcatgcatgcgatgtcaaaactcttctagagagtcacgtaaattcatgt

SEQ ID NO: 170628 - DNA, 385 bp, Arabidopsis thaliana
gaagaagagaagaagaagaaccttacaattgcttttgtaaatattgtaagtagtttaaggacgtcactacctacatacatggatttatgtggaactcagatgctgcgcctctcatcgcctcatttcaaaacccttcatttggttagtcttgcatttatttatccatttcaatcttgatcgcatggaaaatgctagcaatctcgatctcatggaacattttcacgtgaggcatgcacaaggagtccacaatatagcattagaagagaagggagagaaacctgaatcagaaaagctttttgacgcccacctttctccaaagggtctgcaacaggtttcgggaaggcgcaaccaaatccttgaatcaggattacttagcactgtcgag

SEQ ID NO: 170629 - DNA, 363 bp, Arabidopsis thaliana
ggacgcatgacccatcggccgacacagcgatggagatgcgcaaaaaccggagaagggggtgctcgagagttgtgagaatgacgatgaggacgtgcgatcttcaaccgaagagaacgagactgtgcgatcatcaaccgaacgggaacaagtaggtgcgatcttccaccgaagctgggaggggagaagatcctcacgaggataccgataacatccctgagagcggtgcgatccacttgcaaattatgggacgcttgaaccaaagatcgggttctgggtgaagcagcggcgcaatttttgggggttatgacgatggattcaagagtccgttcagtgaaattccagctccgtcgcagcaaggaggaa

SEQ ID NO: 170630 - DNA, 394 bp, Arabidopsis thaliana
gacttcagtctatagccgcgcaagaagacgattctctctcttgagttgaagaaatgaagcacaacaatgttatccccaatggtcacttcaaaaagcactggcagaattatgtcaagacatggttcaaccagcctgccaggaaaaccagaagaagagttgcgaggcaaaagaaggctgtgaagatcttccctcgtccaacttctggacctctccgccctgttgtgcatggtcagactcttaagtacaacatgaaggtcagaaccggtaaaggattcactcttgaagagctcaaggctgctggtatcgcaaggaagttggctaatgctactcaagttcaaggagactacttgcctattgtacgtgagaagcctaccatggaactcgtcaagctgac

SEQ ID NO: 170631 - DNA, 406 bp, Arabidopsis thaliana
ggcccatgacccatcggtcagcgatgtctaataagataacatgcaggggacgagctatatcgtgatacacagtacgattgtatcagtctgtgtgcagaaaaataatggtgtgcgtcagtgatgctatcttcggtgacattgaaaccagctggtttcacggtggcgaagacagagggtacaggattaccgtccctcacaacagctcgcccctccttcaaaattgtcgccagtggcgtcaagaatatcaacaccgacaagcccttccgaattaacggcagcatggacttgtaggacggcgtcaacgcctctggcagaagtggcaagggatacggtgtttacaggtacgtcgacaattaatgagctaacgtcgaaggatacaatcctattgacaactagaaccagtggt

SEQ ID NO: 170632 - DNA, 196 bp, Arabidopsis thaliana
ctggggaagagatcgagagaagaatagtttgatcatcttgtgagaaaaataatggctgcttcagtgatgctatcttcggtgaaattgaaaccagctggtttcacggtggagaagacggcggctaaaggattacggtcgctcacaaaacgcagtccttcctcaaatatggtcccaattggggcaagaagattaagaa

SEQ ID NO: 170633 - DNA, 394 bp, Arabidopsis thaliana
attctcgggacgacccacgcatccgcaagaagactacaggagggggagaagagatcgacagaagaatagtttgatcatcttgtgagaaagataatggctgcttcagtgatgctatcttcggtgacattgaaaccatctggtttcactgtggtgaagatcgccgctagaggattaccgtcgctcacaagagctcgtcactccttcaaaattgtcgccagtggcgtcaggaacatcaagaccgacaagcccttcggcattaacggcagcatggacttgaggggctgcgtctacgcctccggcagaaagggcacagggtactgtgtttacaagtacgtcgacaagtatggaactaacgtccatggatacagtcgtatttacaacgacaacgattggt

SEQ ID NO: 170634 - DNA, 265 bp, Arabidopsis thaliana
cgggctagacaggcaaccattgtgatgcgaaactgcaacagttcggcttagcgtggtcgcggccgaggtacaagctttttttttttttttttttttttttttggcattgtccaaaatattttattctttaaggggaacagccatgtattattcaaatgaagggatcacattaaaagaaacccactcataagaaacagcctccattaacattcaagcagcagtcattaaaaaaaatgtttcgacagccaagttttcttcaaaatat

SEQ ID NO: 170635 - DNA, 415 bp, Arabidopsis thaliana
cccgggtcgactcacgcatccgcccacgcgtccgaagacgacagaagggcacgatcaacaccgttgaggccaagatccatgatcatgagggcattcctccggatgagcaaatgcttattttcgccggcaagcagctagaggatggccgtacgttggctgattacagtatccagaaggaatccatcctccacttggtcctcacgctccgtggtggtatgcacattttcgttaaaaaccttacgggaaagacgattactcttgatgtggggagttctgacaccatcgacagcgtcaaggccatcatgcaagacggcgatggtattcgtccggaccagcaaatgctgatcttcgccggaaagcacttgggggatggcagaactcttgctgactacaatatccacaaggagtccaacct

SEQ ID NO: 170636 - DNA, 464 bp, Arabidopsis thaliana
  unsure (1)..(464): unsure at all n locations
gcctgccgttacggtgccagattcncgggaacattcacgggtccacccacgcgtccgcgagaggacgacagaagggaaggtctggcagtttgacgaagctatcatgtgtgtggcttggaatcccctttccaggcttccagttttagccgttgccatgggacgagatttgttttttctgaacactgaacttgggactgatgaggaacaggaaattactaaagagaggcttcactcaggaaacatcccagaaccagacgcatctgttgcagcaattgtaacctggctacctgatgagttatatggagggattaagataagacattttaagagcatatcgtctattgaccggcatcgtaaaggagactatctctcaacagtgatggcatccggggaaacacggggagtggtattgcaccaactgtcaaaacagaaaacacaaatgctcccatttaagattcgtggac

SEQ ID NO: 170637 - DNA, 339 bp, Arabidopsis thaliana
tcacgcgtccgtaaggctgacaaaactacagaagggggaagacgaaacaatacagatggcttctcaaagttctatactttttctggttatcgtcttcatcttcaggtgttcctcttcaattccatggtcaagtcgcgctagtgcacatgattatgattgagatgagcatatcaggtgcgttgggcgtaatttctttcaacgtttcagggaaagtcctgaatagtgtaataggaccattgcctggtctgcatcatgtccttgagtcgcttgaagttcctccgagcattgagaacacaagtatgggtgtattgacagtggttaacgtagtcctttcaaatg

SEQ ID NO: 170638 - DNA, 335 bp, Arabidopsis thaliana
  unsure (1)..(335): unsure at all n locations
tggggaccttttcgatttcgtctccattgatgatattcgatagttagtggctaatttgctatcatctcactgcttcaattttggctcctcatcggaaatggcgtttttactcaacacctcgatttcatctcacctccgatcttcttcccataagacggatggtgctttagctcaatcccgtcgcgggttccatgtggagctaggtgctcgtgagaaagctctcttggctgatgatgcatctttgaggagattcaagtcgcataagaaaggtgttcatagattganaagaagtggagatgtgctcacagttgtcgttgtcgctggatgctgctatg

SEQ ID NO: 170639 - DNA, 305 bp, Arabidopsis thaliana
ggaacgaccagcccatgcacgaaacctgttaccagatcgctttggccatcaaggacgaagtcgaggatcttgagaaaggaacacttgctttgaagggaggctactatgactttgttaatggctcctttgagctttgggagctccagtttggaatttcccccgttcattctatatgaactaacacatcaccatcaccatcgctaccaccaccatcacatacatcatcatcgtcgtcatcatcatgatcagcatcttcatatatacatgttttactcttatctaattgctacctgtaatggtataca

SEQ ID NO: 170640 - DNA, 443 bp, Arabidopsis thaliana
  unsure (1)..(443): unsure at all n locations
ggtacgcctgccggtaccggtcgcaaattcncgggtagacccacgcgtccgcccacgcgtccgtgtcggtcatagattgccaaaattcacagaagctgagaagaagttgctaaagggttctacagattacgtaggaatgaattactaaacttcagtgtttgcaaaagaaattagccctgatcctaagagtccgagttggacgactgattctcttgttgattgggatagcaagagtgtggatggatacaaaattggtagcaagccgtttaaaggggaactgggtgtgtattcacaaggtgtgagataccctttgaagtatattaaggggaactatggggagacacaaattatcactgcccagaaagggtacagagaaaaccttggggagaagcacattgacgtatactttgggacacacgatatcacagagaatattatatccc

SEQ ID NO: 170641 - DNA, 279 bp, Arabidopsis thaliana
cataaaataagataaacacataaaagtttcaatggccgcctcaacaatggctctctcctcccctgctttcgccggaaaggctgtgaacctttcccctgcggcatcagaagtccttggaagcggccgtgtgacaatgaggaagactgttgccaagccaaagggtccatcaggcatcccatggtacggatccgaccgagtcaagtacttgggatcattctctggcgagtcacccagctaccttaccgggagaatttcctggagactaccgaatgggacaca

SEQ ID NO: 170642 - DNA, 356 bp, Arabidopsis thaliana
  unsure (1)..(356): unsure at all n locations
ggttgccttgaatttagtttctttccttattttgtttgaggtttattatattgatgatagggttttggaaacttttttaattgattttagcttatagagaccaaaaaccctagaaaaatacgattcctacgacggcgacggttgatgatgagccgggacagattaaacgtgctctgattgatgcttctgccggagctatctctggtggtgtttctcgttctgtaacttctcctcttgatgtcattaagattagatttcaggttcagctagaaccgacgacttcatggggtttggttcggggaaacttgtcangagcttctaagtatactggaatggtacaggcgactaaagatata

SEQ ID NO: 170643 - DNA, 367 bp, Arabidopsis thaliana
ggtacgcagatggtgaagatggtgagatgtcgtggttcaacgctggtgtgggaattggtcttggtgtctgtgtatgtttttggcattggggttggtctgctggttcgcacctatcaatcaaccaccaaaaacttcagatggacgattatctagtttcattcaaattgcctactctctctctctccctctatgctctaaatccaatccgttgcacatcacttttgactgcagtactctaagctatatagtctaatctaatactgctgtctagtataatttttgatttatgtaccttttttaatcacattgtgccttcatgttttggcagaattcattttcccttcttcttgtgtttggtcacattcac

SEQ ID NO: 170644 - DNA, 379 bp, Arabidopsis thaliana
ttcacgcgtccgtacaggcgtcagaagagcagagaaggggatatccacaggtacagctgacaactttcatatataaggtacagaggtataaagatggccaaaggcttgggatgacctgagggatttcaggcaggacactacgaatattcgccaccaactccgtttttcgatgcggacgagcttactaactggtctttatgcaaagccgtctctgccgagttcgtcaccagacgcctcttcgtgtacatcaccattttagatggcaccggtgataagattcagtccgacacaacagccggttgcgttgactgccgaagagtccgcatccctgaaatctcgtgggcgtctggtggcatcatcatcatccttgtctagtgca

SEQ ID NO: 170645 - DNA, 215 bp, Arabidopsis thaliana
gaaaaaaaaaaggggaaaaacaaaaaaaaaggaaaaaaaaaaaaacaatcaattcacaacatcatgaaaagagaggaacaaaacaattaaattataagatctcatggcaatggaggtctccggagctgtcctcagtgagcttggttcatctcatcgtcaaatcgagcaagagatgtgacactggaaatggaatgcggtgtacgcactggagctca

SEQ ID NO: 170646 - DNA, 285 bp, Arabidopsis thaliana
  unsure (1)..(285): unsure at all n locations
acacaaaaaggtaacggctggcgagaaagacgacagaaaggggccgataatcagctgcagcaacccaaaaccaagggaatcccgccggtgcaaccttttgtagcgccgttgtcgtatctattacgaacatggagatgacaacgagaaggtgaatatcctactataccgtctttccgctacggcgaagagatccgtgtctcacattccggcaagccggtgatagcgtatacgcanaagacatggaaatttggatcaggagctccgatgcacgccgagagtggttac

SEQ ID NO: 170647 - DNA, 308 bp, Arabidopsis thaliana
gatagtaaatccagagaacgtctcttcttcttcttcacttgccggagaagatggatttgttgttctgtttccgaccgaatcagacttgtcggggaatttcagttttgcctgcttttagcataagcaatctttccgccgtcaatcgtttccgttcgacgacgagtcttcgttttggatttccggcgacgccgtttcgtcggactccaaactttaccttcaaaactcacgcgaagaggaagaataaaacgagtactttcgaaccgaaaccgaataaagtcgaagagttgatcattgaagaagaagaagaa

SEQ ID NO: 170648 - DNA, 358 bp, Arabidopsis thaliana
atctggactgtttttgtagtggcagcactggcgtaacaattcttaaacaggggtctaatctcttcatgggaaacatcggggattctcgggccatccttggatcaaaagacagtaacgattctatggtggcaactcaactgacagttgatctgaagccggatttacctacggaagctgagaggatcaaacggtgtaaaggtcgagtatttgcgatggaagacgagccagaggtgccgcgagtctggctaccttatgatgatgcacctggattagccatggccatggcgtttggtgacttctgtctaaaagagtatggagtcatttcagtacctgagttcactcaccgtgttcttacaga

SEQ ID NO: 170649 - DNA, 389 bp, Arabidopsis thaliana
gaaatcaaaaagcttcgctgtggaggtaagtaggaggaagacgatggcgttagagaagcacatagagaagatactcttcagcgatgaagtaattgcgcaccgggtgaatcagcttggaatcgatattacttctgatttctccggtgactcggaggaaactcctatttttgtcggcgtagccactggtgcttgcctcttcttggccgatctcgttaggcgaattgacttgccaatagctatagatttcattagagctgagtcttacggctctggtactgtatccagtggagttccagagtatcatttgacttaaagcttgacatcacgaacaagcacgttgtcttggtcgaggacattgtggatactggcaatacacttagctgcctgat

SEQ ID NO: 170650 - DNA, 378 bp, Arabidopsis thaliana
gggagtttcaggtagtttccatcgttcctttgtcaggaacaaaccaacgactcaaaatttaaccagagatggtggaaggtgaagaacagaggaggatcacacacttggatctgagaaacgagccccagtttccaatggttttcgttagagaatcgacttgtttcgctaaggacgatctcgctatcttcccgtcgagactctcagattcgtccttctctccgtccgattcagacgaacaatttcaatttagccggaaatcgcattctcagccatcggaagatgtcgggaaatctccgtggaaatccgtaattgagattgatattatccaaggttggtggaagattcttctcgttcgagtaatgtcaaatttccagaatt

SEQ ID NO: 170651 - DNA, 410 bp, Arabidopsis thaliana
ggtttttcagaagtctcttgctgcatacattaaaaatcacgtttattcaaacgcgaagacagaagatttatggacctgagccaagagaaaacacgaatcttaggttctttagcatcttgcccagaccccactatagttcaagatgttcttaacttcgtattgtctgatgaggtccgtaatcaagatgcactttatgggccttccggtgtaagttgggaaaggcgttaagttacctgggaatgggtacaaggaaagtgggaatttataagaaacacatggggctccggatttctcataacacgcttcataagtgcagttgtatcgccgtttgcgtcgtttgagaaagccaaagaagtggaggagttttttgcaacaagatcaaagccttcgatggcaagaaccttgaagca

SEQ ID NO: 170652 - DNA, 391 bp, Arabidopsis thaliana
  unsure (1)..(391): unsure at all n locations
ggaccgagcttgatttatcgagctttgtggacatcgaagacgatcaagacttttgcaataagcttgccaaagaagaaaacctcgtcgttttaccagggattgcattcagtcagaagaactggttgaggcattctatcgatatggagactccggtattggaggatgcattggaaagattgaagagcttctgcgatcgccattccaacaaaaaagctcccctcaaagacgtcaatggtgttaagtaaagggtcaatatggttatttgcctaagtcatttacgtatgctataatgataaataaatgagtgtttcttggtttgaggtaaatcatgaacactttaagtgtattgtaacanataaaatgggtgcacttaatatcaatcgtgtgtaat

SEQ ID NO: 170653 - DNA, 373 bp, Arabidopsis thaliana
gggcgtcttcttctcttgttcgaatcgctgtcgtcggagacatccatggcttctggaacctagatgaagatcgaaaggctctacgagttctccaggtgattttggtgaagaacacgtcccactggttcaaagtgttgccgctcttactttccctaaagcagtcagtattggggaatcatgatgcctggttcacccaagattttccaacgaaagaaagtcaaaaacaaaacggtgttcaaatgcaactcgatatccttggtgacgagcatatacgatagcagcgcatggacttcccatcttttaagctcagtagtgttggtggtcaacccttttcacatggtggggatcgattgtttcggaaaaatctgcttgt

SEQ ID NO: 170654 - DNA, 131 bp, Arabidopsis thaliana
ggaaaaaataaaaaaaagatataaagtactatcgtcaactatacaaaaatcaattcaacacgtagcaaattacgtctcctcctatcgcttcactttgctctatccaatgcctctgttcaagatttctgtgt

SEQ ID NO: 170655 - DNA, 343 bp, Arabidopsis thaliana
  unsure (1)..(343): unsure at all n locations
gaagaatctctttattgggattgcaatttcaaacaaactttacatcttcttcttctctctgcttttgccttcacgacgagtagagagagccatggacacactcattgctcagttacggagacgattttgtgatttcaccattagtctctatcaccaggggtttttggacgatcaattcacagaattgaaaaagctgcaagatgaatgtagtcctgattttgtggctgaggttgttactctcttctttgaagactgtgagaagcttatcagtaatatggctagagctttagatcagacaaganatgtagatttcaaactggtaggttctagtgttcatcaactc

SEQ ID NO: 170656 - DNA, 339 bp, Arabidopsis thaliana
gacccatttcttggcttacaacaacaaatcttaaacgttttactttgtgctgcactactcaacctcaatggccgcctcaacaatggctctctcctcccctgccttcgccggtaaggccgtcaagctttcccccgcggcatctgaagtccttggaagcggccgtgtgacaatgaggaagactgttgccaagccaaagggcccatcaggcagcccatggtacggatctgaccgtgtcaagtacttgggtccattctctggcgaatcaccgagctacctttacggagagttcctcggagactacggatgggacaccgccggactttcaggctgacccgagac

SEQ ID NO: 170657 - DNA, 344 bp, Arabidopsis thaliana
gaagggggagtagggaaaaagaaaagaaaagtagagtactatcttcctcttaaaccaaccattcaaaatgttgcgtactatcttcctcttatctcttctctttgctctatccaatgcctctgttcaagatttctgtgtcgcaaacctgaaacgcgctgaaacccctgcgggttacccttgcattcgtcacattcatgtcaaagctacagactttgtcttctcgggtttaggcactcctggaaacactacaaacatcatcaacgccgctgtcacaccctctttcgcatcacatttcgggggtcagaatggtcgacgcctctctacagctatacttgaattacctc

SEQ ID NO: 170658 - DNA, 72 bp, Arabidopsis thaliana
cccacgcgtccgcccacgcgtccgcccacgcgtccgcggacgcgtgggcggacgcgtgggcggacgcgtggg

SEQ ID NO: 170659 - DNA, 414 bp, Arabidopsis thaliana
tttttgaagcttctctctgcttatcgacacgatggttctcgaggcgactatgatatgtattgacaactccgagtggatgcgaaacggagattactctccgtctaggttacaggcgcaaacggaagctgttaatcttctttgcggagccaaaacccagtcgaatccggagaatacggtggggattttgacaatggctggcaaaggagttagagtattgactactcctacctctgatcttggcaaaattctggcctgtatgcacggtcttgatgtgggaggagagagcaagacaagaagctgctgccaagaaggcggccgatgaggcaggtcagaaagacaaagatggggacacagcttccgcctcacaggagacagttgctaggacaactgacaagaatgctgaaccaatggatg

SEQ ID NO: 170660 - DNA, 403 bp, Arabidopsis thaliana
cataaaaaaaaaaaaacacaaaaaagtttcaatggccgcctcaacaatggctctctcctcccctgctttcgccggaaaggctgtgaacctttcccctgcggcatcagaagtccttggaagcggccgtgtgacaatgaggaagactgttgccaagccaaagggtccatcaggcagcccatggtacggatccgaccgagtcaagtacttgggtccattctctggcgagtcacccagctaccttaccggagagttccctggagactacggatgggacacagctggtctatccgctgaccccgagacattcgcaaggaaccgtgagctagaagttatccacagcaggtgggccatgctcggagccctaggctgcgtcttccctgagcttttggccaggaacggagtc

SEQ ID NO: 170661 - DNA, 393 bp, Arabidopsis thaliana
aggaaaacgacagaaggggaaaagcagataaaaaaaaaatggctcaagcagtgacttcgatggctggcttacgtggagcatctcaggctgtccttgaaggaagtttacagatcaacggcccaaaccgtttgaacatctcaagagtctcggttgggtctcagagaaccggacttgtgatcagggctcagcagaacgtgtcagtaccagaaagtagtcgccggtcagtgattggactcgtggcggctggtttagccggtggttcattcgttaaagctgttttcgccgaagctattccgatcaaagttggtggtcctccacttccttccggtggcctacctggaacagataactcagaccaagaaagacttgcgttgtaatctgttgatgtcgatg

SEQ ID NO: 170662 - DNA, 248 bp, Arabidopsis thaliana
ccgagtcgacccacgggcccgtacagagaagaagacagaaggggaaaaatgtgtcgaattcaacatgtttttataatgctgctaggtgtgtgtcgaaaagtctaatgccaaaataccttccatcttcactatacacactatcacgaatcactttcgaatacaattcacaggcactcatctatccatttacgcatagagaatcacacactttgattaatctcattcgacctacagcacatccgcctttc

SEQ ID NO: 170663 - DNA, 389 bp, Arabidopsis thaliana
gatgaagacaacagaagggggaacaccaagaaggactaagacagcaccaggaacacgatgggtgaagcgggcaacgatgggaaagaagaaatgattcgggcatggtatctggacgatagtgacgaggatcagagacttcctcaccacatggatgctaaacaatttgtatcattggacaaacattgcatatctcggaatactctagctggagacttgatgctaataagtatggatccgattaagattataaaagtgatccgtgaatctcgtggttacacttatcatggacttttgtgacgtatgcctcgacaaacttccacgctacgaagtgaaagtcaagagcttattcaaagaacatttacgcactgatgatgagatacgttactgca

SEQ ID NO: 170664 - DNA, 370 bp, Arabidopsis thaliana
tcgaccagcctccgtagagaagacagacagaaggggttcttcagttggggaagaggattctgcggcggccctgatgttcatgcccctcagagcttgccttcacctctatctttcagagaagttgctgtaggatggaatcatgctttactactgaccgtcgatggtgaggtgttcaagcttggtagcactcttaataaacaacctgagaagcaacaactgcaaatagattcctctgaagctccctttgagaaagttccggattttgatggagttaaagttatgcagatagcagcaggagcagagcattctgctgccgtaacagagaatggagaagttacgacatggggatgggggagaacatggtcagcta

SEQ ID NO: 170665 - DNA, 455 bp, Arabidopsis thaliana
gaaaacgacagaaggggacaaggattgaaaatgaagggacgtcaaggagagagagttagattgtatgttcgtggaacagtcctcggttacaagaggtccaagtcgaaccaataccctaacacttctctcgtccagattgaaggtatgaacactcaagaggaggttaattggtacaagggtaagcgtttggcttacatctacaaggcaaagacaaagaagaacggttctcactaccgttgcatttggggcaaagtcactaggcctcatggtaacagtggtgttgtccgttctaagttcacttcaaacctaccacccaagtcaatgggagctagagtcagagtcttcatgtaccctagcaacatatgaggaggctagatttcaacaagtatcggaaggaatcgccattatcatttctcaggagctgtagttttatctattcacttttattctagact

SEQ ID NO: 170666 - DNA, 476 bp, Arabidopsis thaliana
gcgggtcgacccacgcgtacggaaaacgacagaaggggagagtaaagaagataaaaaacacaatttgaagcttttataatattttctcagaaactttcaaagagcttagaaaaatgagtacagctactttcgttgatattattatcgccatcctcttgcctccactcggtgtctttctcagatttggttgcggggttgagttttggatatgtttggttttgacgctacttgggtatattcctgggatcatatacgccatttatgtcctcaccaaatgatttaccatctatcatcatctccttgaacagctgttccgtcgtgttctcctatctttgtgactgattcagcgtttctttttctttcatcagagtttttatgtttcaagtaatttaattaatcatcactgttgtgtttgcattgttatataaatgttgtgttgatataaaagaagagagcgttgggttgtgctttgtgtg

SEQ ID NO: 170667 - DNA, 417 bp, Arabidopsis thaliana
  unsure (1)..(417): unsure at all n locations
ggtacgaaaatggagctctgcaccaggtctaccacaatcatcactcatctccctgcgagcttcaacggccatggatatctagcgggaaaatctgttgatagaatctcacttcctctccagcgaaacgttgcgtctctcgttcttcaatcccgcacgttgcgttgtagtagaaagtttccaggagaaacagttactgaagaaacatcaacaggagtcaatgagtttggtgtggaggatcgtgatggagtagttgttgcagccgaagagaaaaactcgaatagtggtgcgatagttgctctctacttaacgtctgcaatcgtcagttcactcgaagcaatcnctctgtttcctaagctaatggaagtagttggtctcggatacacactctggttcactacccgttatctgctatttaag

SEQ ID NO: 170668 - DNA, 289 bp, Arabidopsis thaliana
gaatcctagttttctccaaaaacgttttgtcaaggaaattttcttcatcgatggagaagaagctgactttgttgttgttggttgtggtggttttgttcgtaaatctaacacacgccaccgttaaggttcacatttgtcctagagaatctgcaaaagattatatcttatggtttcgagataagtcagccttgcaacgtcctgcttttgtcactgacggagatgatcggtggctataaatggctgcagatatggttgataagaagaataaatgtgactatgcggctttact

SEQ ID NO: 170669 - DNA, 381 bp, Arabidopsis thaliana
tcgaccacgcctccggctgacagaagacgacagaaggggacgaatgagatcggcaacaagagcgtaaaccctagcagcagacacaacacgggttcatcgagaagcaagatgactttcaagcgaaggaacggtgggaggaacaagcacaacagaggacacgtcaacccaatcagatgctccaactgtggcaaatgttgccccaaggacaacgccattaagaggttcattgtgaggaacattgtggagcaggctgctattagagatgttcaggaagctagcgtctatgagggatacacattgccgaagctatatgcaaagacgcaatactgtgtctcctgtgctatccactctcatgtcgttagaatccgttcccgcaacaac

SEQ ID NO: 170670 - DNA, 216 bp, Arabidopsis thaliana
  unsure (1)..(216): unsure at all n locations
taccgtcgctcaaaagagctcgtcgctccttcaanattgtcgccagtggcgtcaagaagatcaggaccgacaagcccttcggaattaacggcagcatggacttgagggacggcgtcgacgcctccggcagaaagggcaagggatacggtgtntacaagtacgtcgacaagtatggagctaacgtcgatggatacagtcctatttacaacgagaacg

SEQ ID NO: 170671 - DNA, 397 bp, Arabidopsis thaliana
cataaaaaaaaaaaaacacaaaaaagtttcaatggccgcctcaacaatggctctctcctcccctgctttcgccggaaaggctgtgaacctttcccctgcggcatcagaagtccttggaagcggccgtgtgacaatgaggaagactgttgccaagccaaagggtccatcaggcagcccatggtacggatccgaccgagtcaagtacttgggtccattctctggcgagtcacccagctaccttaccggagagtttcctggagactacggatgggacacagctggtctatccgctgaccccgagacattcgcaaggaaccgtgagctagaagttatccacagcaagtgggccatgctcggagccctaagctgcgtcttccctgagcttttggccaggaac

SEQ ID NO: 170672 - DNA, 360 bp, Arabidopsis thaliana
gacccatttcttggcttacaacaacaaatcttaaacgttttactttgtgctgcactactcaacctcaatggccgcctcaacaatggctctctcctcccctgccttcgccggtaaggccgtcaagctttcccccgcggcatctgaagtccttggaagcggccgtgtgacaatgaggaagactgtcgccaagccaaagggcccatcatgcagcccatggtacggatctgaccgtgtcaagtacttgggtccattctctggcgaatcaccgagctaccttaccggagagttccccggagactacggatgggacaccgccggactttcagctgaccccgagacattcgcacggaaccgtgaact

SEQ ID NO: 170673 - DNA, 302 bp, Arabidopsis thaliana
tcgaccacgcgctccgtacagctgaagacgacagaagggggaggaggttacggaggaagcggtggtggtggaggatggtaattcctttaattaggtttgggattaccaatgaatgttctctctctcgcttgttatgcttctacttggttttgtgtgttctctattttgttctggttctgctttagatttgatgtaacagtttgtgattaggtattttggtatctggaaacgtaatgttaagtcacttgtcattctctaaataacaaatttcttcggagatattatctctgttgattgattct

SEQ ID NO: 170674 - DNA, 435 bp, Arabidopsis thaliana
  unsure (1)..(435): unsure at all n locations
ggagactcagaaaaaaattcaaaatccgtaaatctgatgatgcattccgtttcacggctcgcgaggaggttctgtgcaacgctcgctactgctacggcggagattagcggcgaggctgctgcttctgttccgacgaaggcgaaaaagcatcggtcaatatacaagaaactctcaagccttggcacgaggggaggagggaaaatggaggaaacgctaaatcagttcgtcatggaaggcgtacctgtcaaaaaacacgacctcattcgctacgcaaaggatcttcgcaagtttcgtcaacctcaacgcgctctcgaggtctttgagtggatggaaaganaggaaatagcgtttactggcagcgatcacgcgattcgtgtgaatctaattgcaaagagtanaggcttacaggcggctgagacctacttcaacagttta

SEQ ID NO: 170675 - DNA, 134 bp, Arabidopsis thaliana
cacaatcaatgaaaaatacaatggataatgaaatacagatgtgtgaaaaataaaaggatatttgttttcattattatactcattttcaacaaaaaaaaagaaaaaataaaaggtaaaaataccaaaaaagaaaa

SEQ ID NO: 170676 - DNA, 393 bp, Arabidopsis thaliana
gataacaaacacaaaaatcaaaaggggtcatttactatcttttaagagacgacatatatagttcccgaccaataaaacaaaatggggtgacctgagttcttcaacacataacataatggccggagttttcaaaacggttacgtttcttgttttggctttcgctgccgttgttgtcttcgccgaggactacgatgttggtgatgatacggaatggactaaacctatggaccccgagttctatactacctgggctaccggtaaaaaccttccgtgttaggcgaccaagctccaaaatttgcatttcccctcctggggaagccatgactgttggcaatttgttatcacaaagcctgcaattctgaaaaacccgttgagaaaagagaaaaccccctt

SEQ ID NO: 170677 - DNA, 384 bp, Arabidopsis thaliana
agacgcgagtaaagcagagaaaggggtacaaaaaggtcaagagaagaatagtttgatcatcttgtgagaaaaataatggctgcttcactgacgataggatccatgctaatgtaaccatctaggttaactgagagcactactagtaggtacacgaatattcatctcacagaacatcgcttcacaccgtcatgactgtcgaaaatgctgtcattaacatcattatcacattgccttacacattacttgcaccatctgctttaaggacggcgtcgaccgcaccggtagaacatgccaagaattacgcatttagaattgcgtctaggactcaccatgtaacgtcgcaggatacactcctagtttgaaggataaccactggttaaccac

SEQ ID NO: 170678 - DNA, 316 bp, Arabidopsis thaliana
aagacggcagaagggggatacagagagatttgaatcgatggtcatatggagagaatatatatagccatggtaatgaagtcagtttctaccttggccgtatttgccatcatcgttttggttatcgttgaaatgcgataaatatcagcccaaggtaccaactgtctgacagaatatgtgcggtaatgtgggtttcagctattgtgcgcctaggatatttccgtcattcggttatcggaactgccgtaagaatcaaggcctacgggaagtagataccgtacacgatgtgtacgagctggtagtaagatatgtttatgcg

SEQ ID NO: 170679 - DNA, 323 bp, Arabidopsis thaliana
ggatacagatgcagagagaacaacaaccaggtcacgcagttctccacatcatgagagagccggacagatcaagtatacttccagatcacatggagatggtcgtctcaggcgctgtcctcaatgggcatggttcttcgttcctcatcggatgcaacacaggtgccaccgcattggaaagcggcgtacgcacagcagcacagagaggtggcatgcaaagtcttagtgtcgctgcagcaggtgctgaacctaagatatcttggctctctgccgtcaaatgtggtggaaacgtccttgacgctgaatggctcgatggctcgctacca

SEQ ID NO: 170680 - DNA, 391 bp, Arabidopsis thaliana
  unsure (1)..(391): unsure at all n locations
agccgccagaacaacgacacaatggtactgctgcaagacgacaacaggagggtacagatgcaaaaagaccacaaaacaggtcactcatgctcacacacaccacagaaagggccggccagtacaagtaacctcccagatcgaaactgaaatttttcatcacagacgctatatgcaatagccattattcaacgttcttcatcgaatggaactccggtaagctgccataacatggcgaccaacgcatagcttcaccgaaaggtatcattcaaagacgcagtgcaactctatcaggaaatgtacctggaattcactggcactacaacatcagatcacacgcaactgacctaaccgctggatactacaacacaacacaccaagacnggtatctgcc

SEQ ID NO: 170681 - DNA, 214 bp, Arabidopsis thaliana
aaaaggggacagcagatcgagacaagcataatgtgatcatcgtgtgagaaccataatgggtgcttcagtgatgctaacttcggtgagattgagacgagctgggttcacagtagggtaagactgcggctagaagattaccgtcgctcacagcaactcgtcgctccttcagtattgtcgccagtggactcaagaagatcaagaccgacagaccctt

SEQ ID NO: 170682 - DNA, 338 bp, Arabidopsis thaliana
gggctggaatacgacgacagcatcgaaatcgctggttggggtcctaaaagtggctctttcaactgtcattttcccttcttttgtcgtgaacctggtcaactaatcttccgcatgatctacacacgttccatgactgtcacagatctctcgtttaggtgatagttgcactagcgtgtggatcagaggttctgatttgaccagagctaccagccttgtgtacaggagctcgactttgtctacttcatcacgtagtgtcagcgtcatgacatgatcaaccagaccttgaacttctttatccgtatgtacagttccagcttctatgtacctgtccacagtga

SEQ ID NO: 170683 - DNA, 320 bp, Arabidopsis thaliana
atatgaaatgatattttagtgcattggtgtgtggcgtcattaagtgtcaattagagtctatatagatttgtaattagattgaattatgtgtttgggttttcattacggtttttgatgaaaaggtactggtttttggttgtatacaaaccacagtgtcatgttgtatctcttctttacgtgttactgcacttcatggagtcctgtgtctcctaagatcagagaattgatcgaaaaagtacggacaagaagtgagaaaactgtgcgaaaggctaacagagacgttgtcagagactttaggtttaaaaccaaacaagctcatg

SEQ ID NO: 170684 - DNA, 322 bp, Arabidopsis thaliana
gttgatggaaagagtgataagtgcattgctatatttcgtcaagctatcgctagtggagtcacagtagtattgtactcaccgggcactttctatggatattgtcaccaccgtgttggtgtgaaaggtgctagattatggtggtgtgaatacttcttcctcagtttcttgccttctttcacgagatacccctccacatggacatctcagtctcctaagatcagagaattgatcgaaaagtacggagaagaagttagaaaactgtgctaaaggctaacaaagacgttgtcagagactttaagttttaaaccaaacaagctcatgc

SEQ ID NO: 170685 - DNA, 403 bp, Arabidopsis thaliana
cgggtcgagccacgcgtccgcagacacgtgggacgacagaagggggaaaaacagagagagagaacaacaaccaaacactcatttctccacatcttgagagaaaaagacagagcaagtatattagagatctcatggcgatggcggtctccggagctgtcctcagtgggcttggctcttcgttcctcaccggaggcaagagaggtgccaccgcattggcaagcggcgtatgcactggagctcagagagttggcaggaaaactcttaatgtcgctgctgcggctgctcagcctaagaaatcttggatccctgccgttaaaagtggtggcaacttccttgaccctgaatggctccatggctccctaccaggagatttcgggttcgacccatttggttttggggaaag

SEQ ID NO: 170686 - DNA, 376 bp, Arabidopsis thaliana
aggggttggttcatccagatgaatgcgaagacccatacttgcgtttagtatatgcttcgtcatgggctatatctgtttactatgccttccaacgaacttggaagcctttcaatcctattcttggggagacatatgagatggtcaaccatggtgggatttcttttatttctgagcaggttagccatcatccaccaatgagtgctggtcatgccgagaacgagcacttcatttacgacatcacatcaaagttgaaaactaaacttttgggtaactctgttgatgtttaccctgtgggaagaacgcgtgtaaccctcaagaaagatggtgtggttctggatttggtgccgcctctcactaagattcacaatctaatatt

SEQ ID NO: 170687 - DNA, 357 bp, Arabidopsis thaliana
gaggcgtgagtgcaagaagacgagaggagggggaagagatctagagaacaagagattgatcatcttgtggcatcaataatggctgcttcagtgatactatcatcagtgagattcacagcagctggtttcacggtggaaagaacagcggctatcagattagcgtcgctcacaataactcgtctctccatcagaattgtcaccattggcatcaagaagatcatcagcgataagcgcatcaggattatcaggaacatggacttgacggacggcatcgacgccaccggaaaaaatgtcaacggatacggtgtttactagtacgtcaacatctatggagctaatctcaatggatacaatcct

SEQ ID NO: 170688 - DNA, 368 bp, Arabidopsis thaliana
gagagagaaataatttgatcatcatgtgatagataaactggctgcatcagtgatgctagcttcagtgacactgacatcagctggattcacagtagataagatcacggttaaaagattagcgtcgctcagaatagcgcctcccaccttcacaattgtcgccattggcgtcaacaccattaagatcgacaagctcttcggcattaaccgcatcatggacatgagggacagcgtctacacggacggcatcaacggcaacggatacggtgtttacggatacgtcgacaactattgagctaacgtctatggatacaatctcaattagaacgataacaattggtcagcgaatgattgcgtgtccaatggaggag

SEQ ID NO: 170689 - DNA, 256 bp, Arabidopsis thaliana
gctgcaaacgacagaaagggacccatttcttggcatacaagaagaactcctacacctcttactttgtgctgcactactcaacctcaatggtcgcctcaacaatgggtctctcctcccctgtcttcgacggtaaggtcgtcatagctttcccccgcggcatcggaactccttggtaacggccgtgtgacaatgaggaagactgttgccaatccaattggcccatcacgcagcccatggtacggatctgaccgtgtca

SEQ ID NO: 170690 - DNA, 366 bp, Arabidopsis thaliana
tggcataaaaaaaaaaaaacacacaacagtttcaatggccgcctcaacaatggctctctcctcccctgctttcgccggaaaggctgtgaacctttcccctgcggaatcagaagtcctatggaagcggccgtgtgacaatgacgaagactgttgccaagccaaagggtccatcatgcagcccatggtacagatccgaccgagtcaagtacttgggtccattctctggcgagtcacccaactaccttaccggagagttccccggagactacggatgggacacagctggtctatccgctgaccccgagacattcgcaaggaaccgtgagctagaagttatccatagcaggtgggccatgctccgaaccc

SEQ ID NO: 170691 - DNA, 456 bp, Arabidopsis thaliana
ttccgggtccacccacgcgtccgaaacgacagaagggtacgaggctgagtatgtttcgttgcatgtgaggagaagtaaccgagcagcattcaatctatacactgagacattaggctacaagattaatgatgtagaagcaaagtactacgccgatggggaggatgcttatgacatgcggaagaatctcaaggggaagcagaaccatcaccacgcccacggtcatcatcatcaccatggaggaggatgttgttctggtgatgcaaaagttgtagaaacagctcaagccgtagatggtaaagcagtttccaaatgagattcgaaagcagataattatgagtatattgaggtgggttcactggctcgctctagtacttctcactatttccattcatatgattccgagtgacaaatacatttggtgaccactctgtgttactcctttgtccttccttgggt

SEQ ID NO: 170692 - DNA, 377 bp, Arabidopsis thaliana
ggtggtactgctgcaagaagacaacaggatggagtagagaatatggaatcgacagattaggtcaagcagccgcatctcagcgtaacgatcagctccctgaaacccgtggggctgcatggactgtcgcaatagaacttcagagcgtagataaaagagctcatcggcacagcagccctgagacatcatcagcagaagaacaggaaatcccggcggtacaaccaattacttgagaaactttctgcgagtcaattctgtcagctcttagcgcacaaaccgtgcttcgtgtcaacagtgattgtcactgttactgctcgggacggtttggttactacaagttcagcatcttcatcccaattagaaacagtttctagtacaag

SEQ ID NO: 170693 - DNA, 414 bp, Arabidopsis thaliana
  unsure (1)..(414): unsure at all n locations
tgcagtacgatcgagnatccgggtcgaccaacccttcggccaagccttcgttacggtggcaaaagaccacaaaaaggggaaaaaagattcatagaagaataatttggttaacctgtgagaaaaataatggctgcctcacatgatgctatcttcggtgacattgaaaccagctgggttcacggtggagaaaacagcggctacaggattaccgtcgctcacaagagctcgtccctccttcaaaattgtcgccagtggcgtcacgaagatcaagaccgtcaagcccttcggcattaacggcagcatggacttgagggactgcgtcgacgcctccggcagaaaggacaagggatactgtgtttacaagtacgtcgacaagtatggagctaacgtcgatggatacagtcctatttacaa

SEQ ID NO: 170694 - DNA, 380 bp, Arabidopsis thaliana
gacgagtcaggcgacgggtcagtcggctgtaaggagacgacagaagggggaattggattcgggggaacacttgggaatgagagaatttgcattgatgaagactttgggaacatcagagtccgtcatcatgcaggtgatagaacttaccagtcaggctctcgtttccgagaccagggttatttaccagtacaggctttggttctagatattgaagcatgggggttaagtggaaacaaggctagggaaattcaacaaaaataacagaaaggtagaagagcttttcactaaacagcgtcgaacagatcgacttaaaaacgtttacgatctgggaagattcacctgagaaaatgatgatggatatgatgggtaatcctaatgct

SEQ ID NO: 170695 - DNA, 354 bp, Arabidopsis thaliana
cgacagaagggggaccaaaatcgtccattgaagtgaacagtcagcatcgttttgcttgcttgtgcgtttctctcgaactctctccatggctgttgcgctccaattcagccgattatgcgttcgaccggatactttcgtgcgggagaatcatctctctggatccggatctctccgccgccggaaagctttatcagtccggtgctcgtctggcgatgagaacgctccttcgccatcggtggtgatggactccgatttcgacgccaaggtgttccgtaagaacttgacgagaagcgacaattacaatcgtaaagggttcggtcataaggaggagacactcaagctcatgaatcgaga

SEQ ID NO: 170696 - DNA, 336 bp, Arabidopsis thaliana
gatcgaaacagggaagaattaagagataagaaaacaaaaaacattttccatctctctctctctctctctcgcctgcttcaagatatggatcgggaaagttccgatgacatcatgaaatttctcgacggcatggttagttccgacgatgttcgttttggcatcatcgacgaatgaaatcactcaccgacgtatctagcttcctccgataaactggatatgagtgcgttaattcgaaatctaagtggacaagctcgcatgagatccctgcatgtgagcatgaatacttggaggacgtggacaaatcggtttcatagaaaggcgagatcctggtggtga

SEQ ID NO: 170697 - DNA, 440 bp, Arabidopsis thaliana
  unsure (1)..(440): unsure at all n locations
cccaagcgtccggccaagcctccggggaaaagaacacaaaaagggaacaaaatcaacggagcaaaagttacttccgaaaccctaaaaaaaacacgatgatgctcaagcaagctgcgaagaaggccctaaggcttacgtcacgtcaatcaacaccgtggtctgttggtatcctccgaacctaccatgagaacgtcatcgaccactacgataatccccgcaacgttgggtccttcgataangaatgatcccaacgttggtacgggactcgtangagctcncgcttgtggtgatgtgatgaaacttcaaatcaaggtcgatgagaagactggtcaaatcgttgatgctcgctttaagacttttggttgtggttcagccatcgcttcttcatctgttgccactgaatgggtgaaaggcaaagctatggaggatgttctgaccaa

SEQ ID NO: 170698 - DNA, 414 bp, Arabidopsis thaliana
  unsure (1)..(414): unsure at all n locations
ggaagaagaaatggggttccttaagccaaccatggcgattctttttctagcgatggtcgccgtttcatcagccgtggacatgtcaatcatctcctacgacgagaaacatggcgtctccaccaccggtggccgtagcgaagccgaggttatgagtatctacgaggcatggttggtgaaacacggcaaggctcagagccagaactctcttgttgagaaagatcgacggttcgagatctttaaagacaatcttcgtttcctcgatgaacataacgagaagaatcttagttatagattgggtttgactcgttttgcggatcttactaacgatgagtatagatccaagtatcttggatcataagaagaagaagaaactacaatagttaatcaatcanagagaagtaagagaaatggcag

SEQ ID NO: 170699 - DNA, 342 bp, Arabidopsis thaliana
cccacgcgtccgcacaggcgtcagtacggctgcgagaggggagcagaagggggaaaactcatcaccatcgtcgcaaaaaatcatgtcccgatcaatccagttcaaacccatgtagtccccgagcatcgtttacggcatcacccagcactaacacccatgactcaaacattccatcagcacatttcatcacggtcatgacatccagtctcagttcgatatctcacacctgagaatttcttgctttcgagtcatgaggcgaatgccacgcttaacgctactgatttcggtttgtccgtcgtcatcgaagcaggtgaagtttaccgggatatagttgggagtgct

SEQ ID NO: 170700 - DNA, 441 bp, Arabidopsis thaliana
  unsure (1)..(441): unsure at all n locations
cgagaatacgacagaacggggattcgaagctgcagagaacgcgaaacagtgagagagacagacagaagatatacagatgggtgtggataagcaagtcatcagacccggcaacggtcccaaacccgctccgggccaaaccgtcaccgtccattgcaccggattcgggaaagatggtgatctatcccagaagttctggagtacaaaggacgagggacaaaaacctttctcgttccaaatcggtaaaggtgctgtgatcaaaggatgggatgaaggcgttatcggaatgcaaattggagaggttgctcgcttgcggtgctcatcggattacgcatatggcgctggtggatttccggcatgggggattcagccanactctgttctcgactttgaaatcgaagtactgagcgtgcagtaatgatctccccagctcctagactgtgg

SEQ ID NO: 170701 - DNA, 448 bp, Arabidopsis thaliana
ggtcgacacacggcgtccgcgtgacgacttgatgatctgcagaattcggcgtaccgtggtctcggccgatgtatagtcagcatctattcatgggcaccgtgaagagccagtctctggaatcttagattaccaggtaagactgacaatgctgattagtcgttgagctgaacgtactgttgcaatcctgctccgggtccttcgctaattctccagactcggtgtatcgactgcattggacaggaatggcctgtgggagccattgccatctcagcatcctagccagtcgggtttgatgcttccaaacttcacgctcatcagactttggctcaccagcttcacgtaatacgcacccttgaggaagtacctgtgaccgtcgctctgcaggtccacgacggcatccaagttatcggggatgtcattccatggatctgcgatgagcttgggaaat

SEQ ID NO: 170702 - DNA, 448 bp, Arabidopsis thaliana
  unsure (1)..(448): unsure at all n locations
ctccgcccaaacctccgttacggtggcaaaaaaacaacagaagggtacggttgcaaaaagacaacagaaggggtacccgaaaaacaacggttggcaaattcatcccttgctttcaattgtaaaagtgtaacattccggaaactatttcctgattatgtcaaaaagtacagccagcaacaagtagctgaagaagaagcagccactcaacagacaacaacatctgagaatcaggattttcctcagaaggacaatgcgaaagtcgaatcagagaaaagcgttggtcttaaaaaggaaagtattcaagaagtgggattgaaagagaggagaaggaacaagaaagaagcattaccgggttggatagtattgttgctagtatcgattgtcggtgttgtaatggcgttgcctttgcttcagctgtgatttagatgcanatgcaacgcaacacaac

SEQ ID NO: 170703 - DNA, 203 bp, Arabidopsis thaliana
atgatggatatctgcagaattcggctttcgatcggccgccctggcaggtacgaattaactctgttcctgccgctgctgctgcacggaaccgacgtcacacccatccagggatgtggcgatgcgatccaattccgcttccgtaacgggcatgtgggtgtcctcccactccctcgcattccccagcaccctttccacgcaactca

SEQ ID NO: 170704 - DNA, 390 bp, Arabidopsis thaliana
gacccatttcttggcttacaacaacaaatcttaaacgttttactttgtgctgcactactcaacctcaatggccgcctcaacaatggctctctcctcccctgccttcgccggtaaggccgtcaagctttcccccgcggcatctgaagtccttggaagcggccgtgtgacaatgaggaagactgttgccaagccaaagggcccatcatgcagcccatggtacggatctgaccgtgtcaagtacttgggtccattctctggcgaatcaccgagctaccttaccggagagttccccggagactacggatgggacaccgccggactttcagctgaccccgagacattcgcaaggaaccgtgaactagaagttatccacagcaggtgggccatgct

SEQ ID NO: 170705 - DNA, 323 bp, Arabidopsis thaliana
acatctcatagccatgggatacggcgctgttcctgacgttataaaaactggacgactctttgataccgtttttgatgttgaccacgatacaagaaagggcacaagctcaagttctagaacctaatggtttcagcttcgacggagctgatgctcctggtgttgattatgctctcaatatggcgatatccgcgtggtaccatggtacagagtggtttaactcgctgtgcaagacggtgatggagcaagactggtcatggaaccgtcctgcacttgagtaacttgaactctagcactctgcacgcaactaagaccacatcaaatgg

SEQ ID NO: 170706 - DNA, 421 bp, Arabidopsis thaliana
gaaaaaagtaaaaagtaaaagtaaaaccatcattattagttggtactctcctctctatctttctctcacactcatgggtcgtccaacagatttcaaagagcttcagattccaggttacgtactaaaaacactttacgtcatcggtttctttagagacatggtcgatgctctttgtccttacatcggtctaccaagttttcttgaccacaacgagacctctcgatccgagccgacccgactcgctctctccacgtcagcaactcttgccaacgagttaatcccggtggttcgtatctccgatcttttaaccgatccggaagattgctgcacggtttgcttatccgattttgtatccgacgataagattagacagctgccgaagtgtggacacgtgtttcatcatcgttgtttagaccgttgg

SEQ ID NO: 170707 - DNA, 424 bp, Arabidopsis thaliana
  unsure (1)..(424): unsure at all n locations
agacgacagaagggggcagacgcagccatgggtatcgatcttatcgcaggaggtaagagtaagaagaccaaaaggactgctcctaagtccgatgatgtctacctaaagcttctcgtcaagctttaccggtttttggtgaggagatctaacagcaacttcaatgctgtgattctgaaaaggcttttcatgagcaaagtcaacaaagctcctctttcactctctaggcttgtaaagttcatgactggcaaggatgacaagattgctgtgttggttggaactatcactgatgatttgagagttcatgagattcctgccatgaaggttactgccttgaggtttactgagagggctanggctagaattgagaaagctggtggagagtgcttaacctttgaccagcttgctctcagagctccattgggac

SEQ ID NO: 170708 - DNA, 446 bp, Arabidopsis thaliana
ctcacgggtcgacgcacgcctctatactgatgcgtaataacgacagaagggggtcgcaataacaataagaaagaaggaaaaagagaaccagagatggcgatggcgacagcatctacggtatttgttctaccggccaatgtcacctcggtcgccggcgcttcgtcgtccaggagctccgtgtctttcttgccgatgagaaacgccggttctaggctcgtagtcagggcagccgaagatcctgctccggcttcctcttcttcaaaagattctccggcagctgccgctgctccggatggagctactgccaccaaacccaagccaccaccgattggtcctaagagagggtctaaggtcaagattctaaggagagaatcctattggttcaagaacgttggatcagttgttgccgttgatcagggacctaagactcgatacgcggttgtggt

SEQ ID NO: 170709 - DNA, 387 bp, Arabidopsis thaliana
gcatattgttgtctgcagctatatgaaaaatggtctaatgttgacaatatatgttctccttatgtaatcaatcaaatgctctacacttatgcatgcaaacgtgttcactacatcatgcaatctttgcatctcctagagataaattgtccacaaacaaccattctgcagtttacagttcgccagcgagcatgcctcaagttaccacaagggtctactttatcaatgattcatcatgtcttataaatgtcactttaaagaaaggcttcaaaatgttaaggacaccattggcatcaatagatcaatttaagcgtaattcctccatgcttataccttaacacaatctagccttgatccatctagttcatctagtgttacttcacatcttta

SEQ ID NO: 170710 - DNA, 417 bp, Arabidopsis thaliana
  unsure (1)..(417): unsure at all n locations
gcgggtccacacaagcctctatactgactcgaagaagacagangggagggattgaattcggtgaaagtaaattacgtttcagatatcatcataacgaaagtttatgaagaagcttgtgttggcgctcgaagaagagtggccaaataaagatgaacctctgtgtgtgtgtgtgaaaattgctgtgttttttaagcctttgtgtgtctctaaggaacgtagagatatgggaaaatggatgtaaaaaagaatgtaaatagagagcccccaaaggcaaagtgagagcatcatcattaacataaagccaaatcggcttttcctttgtaaatcagctcctttccactggatagagatggaatggcaaaagtgttgttccctctcttttgtttcgaaaaaagtgtgaatgaaaagatctttgtt

SEQ ID NO: 170711 - DNA, 464 bp, Arabidopsis thaliana
tcgccggtcgacgcaagcgactgtactgacgtcgtgttaacgagtcagtggtgctgcggaaattctataaaaaggaaacgaaaaacttaaaacccaaatcttatcactactctaaaagaatcttcatcatggcctcagtaacctcagccaccgttgcggtcccatcttgcatccggccttaaggcctcatgcatcaaatcatccgccaccgctcagaatgccaagctgcttgctgttgcatcgaccgtcgcttacagtgaattcatctcggagaagaacttcggagtcgcggtcgtagccgctgtagcttcaattgctttggccggaaaggccatggcagtagaagtgctcttgcgaggaggggatcggtcgtgagcttttactcccatcgagatctctatacgtcaaggagagaagattgtgttgaggaagatctctggatacccacacaatgttgtcgtcga

SEQ ID NO: 170712 - DNA, 452 bp, Arabidopsis thaliana
gtgggtcgacgcaagactctatagtgagtcgtaataacgacagaagggggaggtcaaggatgaggaaacagaagcaacttggtgatttgatcaacgaagtcactcttctcaagaatgataacgctaaaatcactgagcaggttgatgaagcttcaaagaaatacattgaaatggagtctaagaacaatgtcttgagggcacaggcttcggagttggcggataggttgagatcattgaactctgtgcttgagatggttgaagaaattagtggtcaggctttggatattcctgagattcctgaatctatgcagaacccttggcagatgccttgtccaatgcaaccaatcagagcttctgctgatatgtttgattgctgaagatggatgattcatatctgaaggatcaaaaatgaagcattgagttcgagtctttggtctgttttacttactgtc

SEQ ID NO: 170713 - DNA, 455 bp, Arabidopsis thaliana
gtgggtcgacgcaagcctctatactgagtcgtaataacgacagaagggggaaggtcgtgagaaaagaaaaacacttctcaatctttctacagtcttcttcttccaaaagaacaccatcttccttcgtaatgtcagagaaccagtccgaagaagtccagcaaatcgagaagctctatgagttcagtgagcgtctcaatgcctccaaggacaagtctcagaatgttgaggattatgaggggatcattaagatgtccaagactagtatgaaggcaaagcagcttgcgtcgcagctaattcctcgctacttcaagttcttccctagtctctctactgaggctttcgatgcgcatatggactgtatcgatgatggagatcttggggtacgtgttcaagccatccgtgggctcacgctgttttgtaaggatacgccagatattttatctaagattgttgat

SEQ ID NO: 170714 - DNA, 443 bp, Arabidopsis thaliana
tcgtgggtcgacgcaagactctatactgattcgagataacgacagaaggggacttgagtgttgactgttgaccgcgacgaatctgtcggaaaccggaatcaccatggattttcctcagacgaagcttgattatcatgtagacatgttcaatcttcagtctcattccagatttctcaccttatttatggcgcaagatggacgcatagctctaatactataatcaacggtgtttcatccacaatgtggtggccagccgtcagacaccggtttaattgttttctccggttcggatttgaaattttccgttcaagatgttcgatcaacagacggaattgttctccattacagagttttcaaaggttcgaatcctgaaattggaattgatagtgagagagggacataagtttacttaactgttgatgaatcaaagcgtagactcaatt

SEQ ID NO: 170715 - DNA, 462 bp, Arabidopsis thaliana
  unsure (1)..(462): unsure at all n locations
cacgtgggacgacgcaagactctatactgagtcatatgacgacagaaggggatcaaaggggtttttagggtttcgtcactcgccgataatcctctctctctagaaaacatgactgccgaacagaaagtggagctcgccgccaaattggaagagcagaagatcgatcttgataaacctgaggttgaagatgatgatgacaatgatgaggatgattccgaggacgatgacgaggcggagggacatgatggggaggccggtggccggtcaaagcaaagcagaagtgagaaaaagagtcgtaaagctatgttgaagcttgggatgaaaccaatcactggtgttagccgtgtcaccgtcaaaaagagcaagaatatcttgtttgtgatatcaaaacctgatgtgttcaagagtcnagcttcagatacatatgtgatctttggtgaggccaagatagaggatttgagc

SEQ ID NO: 170716 - DNA, 455 bp, Arabidopsis thaliana
cgggtcgacacaagcctctatactgatgcgagataacgacagaagtagaagaaaccaaggcgaaatcaaaaagctcagcaattttccagatttctctaattgacgatggcgctttgtgctactactcaaaggactatccgtatagcggcgacgctccggcgtgttgctcgacctttcgctactgacgcggtggttgagtcggattacaagcgtggtgaaatcggtaaggtctccggaatcccagaggagcatctttctcgcaaggtgataatatactcacctgctagaacagctacccagtcaggatctggaaaactcggaaaatggaagattaacttcgtctccaccttaaagtgggagaatccgttgatgggatggacttctacaggttgaccctatgctaatgttggtgactctgctcttgcttttgagtctgaagaagctgctaagtcttt

SEQ ID NO: 170717 - DNA, 459 bp, Arabidopsis thaliana
gtgggtcgacacaagactctatactgattcgtattacgacagaagggggagaagagatcgagagaagaatagtttgatcatcttgtgagaaaaataatggctgcttcagtgatgctatcttcggtgacattgaaaccagctggtttcacggtggagaagacggcggctagaggattaccgtcgctcacaagagctcgtccctccttcaaaattgtcgccagtggcgccaagaagatcaagaccgacaagcccttcggaattaacggcagcatggacttgagggacggcgtcgacgcctccggcagaaagggcaagggatacggtgtttacaagtacgtcgacaagtatggagctaacgtcgatggatacagtcctatttacaacgagaacgagtggtcagcgagtggtgacgtgtacaagggaggagtcaccgggttggcaatttgggccgtaactctc

SEQ ID NO: 170718 - DNA, 380 bp, Arabidopsis thaliana
ggtagttgatcgatgtaagacaactatgatcaactcgggacatgtatcatggccgcttcagtgatgcaagcttcggtgacactgacatcaactggtgtcactgtggagataatcgcggataaaagagtacggtcgaccatatgagcacgtgtgtccatcatgattctctccagtggagtcaatcagattaacacagatattcgctgctggtctaacggcaccatggacttcaaggacggcttccacgcctccggcagtaacgggatcggatagtgtgtctacacgtacttgcactgatatgagatcagtcgacatatgatacaggccaaattactgagatactcaatggtccacgagtggcgatctgtgaatagtacgag

SEQ ID NO: 170719 - DNA, 442 bp, Arabidopsis thaliana
acaagactctatactgagtcgtataatacagagaggggatattggatggttaaaatctggacgtgccaatacacatgagttaggtgacgtgctagtcaaagcatcagtactttccgagctccaacgcacggtacttaaagcggaagctgctctgcgtgaaaaggaagaagagaacgacattcttcaacagaggcgtcaacaatatgagaaacggtggtcagagtatgagacacagatgaaattaatggaagaaatctggcataagcaaatgaggtcgttgcagtcgagtctttccataacagagaaaagcttagctgttgaggactcatcgataaactcagatacatctgtcaatgcgagttgatcaactgattgggattcaggcagtaattagttcaggatccaaattagcaatggactacggtcaagactacagcctatg

SEQ ID NO: 170720 - DNA, 458 bp, Arabidopsis thaliana
gcgggtcgacgcaagcgtctatactgatgcgagacaacagaaggggacactcagagaagaagaagaagaaaaaaacagagctttacaatttctctctacagagatcgaagatatggaaggcaaggaagaagacgttagagttggagctaacaagttcccggagagacaaccaatcggaacatcagctcagagtgacaaggactacaaggaaccaccaccagctccgtttttcgaacctggtgagctttcttcatggtctttttggagagctgggatcgctgagttcatcgctacttttctctttctctacatcactgtcttgactgttatgggagtgaaaaggtcaccgaacatgtgtgcttccgtcggaatccaaggaatcgcttgggctttcggtggtatgatatttgccttagtctactgtaccgctggtatctccggtggacacatcaacccag

SEQ ID NO: 170721 - DNA, 458 bp, Arabidopsis thaliana
ctcgtgggtcgacgcaactctctatactgagtcatattagaagggggagaagagatcgagagaagaatagtttgatcatcttgtgagaaaaataatggctgcttcagtgatgctatcttcggtgacattgaaaccagctggtttcacggtggagaagacggcggctagaggattaccgtcgctcacaagagctcgtccctccttcaaaattgtcgccagtggcgtcaagaagatctagaccgacaaacccttcggaattaacggcagcatggacttgagggacggcgtcgacgcctccggcagaaagggcaagggatacggtgtttacaagtacgtcgacaagtatggagctaacgtcgatggatacagtcctatttacaacgagaacgagtggtcagcgagtggtgacgtgtacaagggaagagtcaccggattggcaatttgggcggtaactctcg

SEQ ID NO: 170722 - DNA, 458 bp, Arabidopsis thaliana
ctcgcgggtcgacgcaagcctctatactgatgcgaaataacgacagaagggggagatacggaagaatcagatcaacgcatgcgaccaagtaaatcaaaatcgggttgaagaagaaagagataagctttcacatcaatttttgaaggcgcgaaatggggaatacttcatcgatgctgactcagtacgacatcgaagaagttcagagtcattgtcatgatctatttgagcagcaggagattttatctctgtatcaacggttttgccagttagatcgaaacgcaaaaggatttatatctgctgatgagtttctctctgtgcctgagtttgcgatgaatccactctctcagaggctgcttaagatggttgatggtttgaactttaaggattttgttgctttcttgtctgcgtttagtgccaaggctagtctaagacagaaagttcaattgatctttatagtc

SEQ ID NO: 170723 - DNA, 425 bp, Arabidopsis thaliana
ctcgcgggtcgacgcaagcctctatactgatgcgaaataacgacagaaggggaagtgagagaaagagaggtccaatggcggagaaagaataggatgtgaaccttctaagtttttgggcaagcccttttactcgtagagttgagatggctttcaagcttaaaagcgtgccttaccagtacctggagcaagatatagtgaacaagagccctttgcttctccagataaatccggttgacaagaaagttccggttcttgtctacagcgggaaaattttatccgagtcacatgtgatcctcgaagacatctaccacatatggaataacaatccaattcttcctcacgatccttacgagaaagccatggctttattctgggccaagttcgttgatgaacacgttggactagtaacttttaagtctgtggca

SEQ ID NO: 170724 - DNA, 423 bp, Arabidopsis thaliana
tcccgggtcgacgcacgcgtctgaaacagacgtctgtaaggctgcgaagacgacagaagggggaaacagatcggaaaatcgtcgagagagagagagagagagagaatgtcgtatcttcttccacatctgcactccggttgggctgttgatcagtcgattctggccgaggaagagcgtctcgtcgtcattcgtttcggccatgactgggatgagacctgtatgcagatggatgaggtgcttgcgtctgttgctgagacgattaagaactttgcagtcatttatctggtggacatcactgaggttccagacttcaacaccatgtacgagctgtacgatccttctacggttatgttcttcttcaggaacaagcacatcatgatcgatcttggaactggtaacaacaacaagatcaactgggctctc

SEQ ID NO: 170725 - DNA, 315 bp, Arabidopsis thaliana
  unsure (1)..(315): unsure at all n locations
cacaagactctatactgattcgaaataacgacagaaggggagatcaattctcagctgacattgaggtttatctcagatcgaaatcgagaagaagatgtttctcactangactgagtatgacagaggagtcaatacattttctcctgaaggtcgtctctttcaagttgagtatgccattgaagctatcaagcttggttctactgctattggtgtaaagacgaaagagggagttgttcttgcagtcgagaagcgtattacttcgcctttactggagccgagtagtgttgaaaagattatggaaattgatgaccatat

SEQ ID NO: 170726 - DNA, 326 bp, Arabidopsis thaliana
gcatacgtcagaacagaattcggctcaaggacccacgtctgtgctcacctgtactacactgtggctacccaaatgggaattcacgtcgtcgagccttacaatgcaggccagggtactcgcgtaacacacagctgaggctgttgatctttacatctggcattataagcgcgacgacacgcgcatagggcctgcgtttgacgtaatgggtcgtgtgccacacggaacatcttttctggataaacaggccaaagaaaggtcttgcgacatctacctacgatcgttcttagagccagtgtatcgtagtgactagcacttctcgatcatat

SEQ ID NO: 170727 - DNA, 339 bp, Arabidopsis thaliana
aacaccctatagtgagtcgtattacgacagaaggggagagacactttttctaattttctcttcttcttcttctttctcgttttgagagaaaacaaaaaaattctgaatctacaggtttcacgaaaaggagaagaaaaaaacaatggcggatcagctcaccgacgatcagatctctgagtttaaggaagctttcagcttattcgacaaggatggtgatggttgcattaccaccaaggagctgggtactgtgatgcgttcccttggacaaaacccaaccgaagcagagcttcaagacatgatcaacgaagtggatgctgatggtaacggtaccattgattt

SEQ ID NO: 170728 - DNA, 410 bp, Arabidopsis thaliana
ggagaaagaaaaacaaaatggcttcgatgggtggattacacggtgcatctccggcggttcttgaaggaagcttaaagatcaatggctccagccgtctgaatggctctggaagagtggcggtggctcaaaggtctagacttgtcgtcagagctcagcagagtgaggagaagaagtcactcaaggatctcaccaccaagctcttcgataccatcgacaatctggattatgcggcgaagaagaagagtccttcgcaggctgagaagtactatgctgagacagtctctgctttgaacgaagttcttgccaagcttggttaagcattttaatttctgcatttttcttgtaaattattattcttggtttttgttcttgagtactttagactcaaattcgtgaatctgaatttatgt

SEQ ID NO: 170729 - DNA, 303 bp, Arabidopsis thaliana
gatattaaatccagagaacgtctcttcttcttcttcacttgcccggaaaaatggatttgttggtccgtttccaacgaatcaaactttcgggaatcattttgccgcttacatagaacttcccctatcttcgttcacacatctcgttggtttccgcacccttctcgctcaacttactcactcaccaaagaaataacatacttcaacaaccataatcagattgtcatgaaaaaaagaaaaagaatattctccgaaaatcagaaacaacagttcacgatataatatacaaacatacatacttagtca

SEQ ID NO: 170730 - DNA, 393 bp, Arabidopsis thaliana
gaatatcgggcttgttttcagtccgtatggagggaaactggcggaggttgcggttaacgcgaagccgtttcgacatcgaggcaagcttttcaaggattcagtactctgtgaactggaaagaaaactctgcagagatagagaaggggtacttgaatcaggctaaggtgctttacagtttcatgaccgggtttgtgagcaagaatcctaggagttcttacttcaattaccgggatgtcgatatcggtgtgaatgatcatgacgccaatagttacaatgaacgagacgtgtatggaacgaagtatttcggagagaatttcgatcgattagtgaagattaaaaccgcggttgatcccgggaatttcttcagggattgacagagtatacctaccttaa

SEQ ID NO: 170731 - DNA, 403 bp, Arabidopsis thaliana
gtcgacccaagtctctatactgagtcatgataacagaaggggggatgaatctaaagcaattgtcagatttcagcatctcccatggaggaatcaagattcgattctgaagatgttgattatgctgagattgttgttgttcgtcatggtgaaacatcttgggatgccgagagaaaaatccaaggtcatttggatgttgagttaaatgatgcaggaagacaacaagcacagagagttgcagagcggttatcgagagagcataagatatctcatgtatactcttctgacttgaatagagcctttgagactgctcagatcattgctgctaaatgctgcaagcttgacgtgcttaccgatcgtgatttgctggaaagacatttaggagatatgcaaggacttgtgtatc

SEQ ID NO: 170732 - DNA, 455 bp, Arabidopsis thaliana
gcgggtcgacccaagcctctatactgattcgaaataacgacagaggggaaccaaaaaaaaaacacctccgatctcggcgagagaaagagaaacgatctgtgagagagaatggatcagatcttgaacaaggtaggctcgtactggttaggtaagaaggtgaacaagcagctcgattccgtcggtgacgatatcaactctttgtcttcgagcatcgaaggaggaacaaaatggttggtgaacaaaatcaaaggaaaaatgcagaagccattgcccgagttactaaaggagtttggtttgcctgtggggatctttccacgtgatgcaaccaactacgagttcaatgaacagacgaggaagttaactgtctttattccatcaatctgcgaagttggttacaaagatacatcagtcttgagattcaccactacagttaccggatttctcgagaagggaaa

SEQ ID NO: 170733 - DNA, 394 bp, Arabidopsis thaliana
tctatagcgagtcgtattagacagaagggggagaagagatcgagagaagaatagtttgatcatcttgtgagaaaaataatggctgcttcagtgatgctatcttcggtgacattgaaaccatctggtttcacggtggagaagacggcggctagaggattaccgtcgctcacaagagctcgtcactccttcagaattgtcgccagcggcgtcaagaagatcaagaccgacaagcccttcggaattaactgcagcatggacttgacggacggcgtctacgcctccggcagaaaaggcaagggataccgtgtttacaagtacgtcgacaagtatggagctaacgtcgatggatacagtcctatttacaacgagaacgagtggtcagcgattggtgacg

SEQ ID NO: 170734 - DNA, 421 bp, Arabidopsis thaliana
ctctaaagtccgtcgtattacgcagtccgcccacgcgtccggacgacagaaggggacttcatcgctcttttatcgttaataatcataaagaaaatcaaagactcgaaccgaaatcttcctccgagcccactgaagctaccggttatcggaaacctataccagcttcgaggattgtttcacaaatgtcttcacgatctctccaagaaacacggacccgtgttgcttctccgtctaggttttctctatatgtttgtgatctcatcgaccgaagcagctgaagaagctcttaaagtacatgaccttgagtgttgtaccagacctataactaacgtcacatcagaactctggcgtgacggtcaagatatcggcgtagccccatatggtgagtccttgagagagtttgcgaagctttccttttctc

SEQ ID NO: 170735 - DNA, 194 bp, Arabidopsis thaliana
aatcaaagcatgctctacagtctctgtcgaggatccagtgacggttctagcatgtcagtccatgcagtctgtaaaagtgggtcataccgacgatcatgacgactttctgagtgcataagatgcatgagcattcgtgtccgatgaacaatagccgtcacgacacaggtacaccaccgttgatcagtcgaaatgac

SEQ ID NO: 170736 - DNA, 440 bp, Arabidopsis thaliana
aagactctataatgacgtcgtattacgagaagacgacagaaaggacctggaggtgtcactatcaagaagacaaaccaagctttggtctttggcttctacgatgaaccaatgactggaggtcaatgcaacttggttgtcgaaaggctcggggattaccttatcgagtctgaactctaaaaccaaggtttcatttcaggttcttcttaactaaagagtgtcaatgcactttttattgtgattgattgtaatgctttcaaacacaaatcatttgttactttagaaccaattgtgattgattggtctccttcgttaccgagtttgagtttgtgtgttcttgtaatgacatttgatcacttgtttctccataataagagagttttaagcatttgaaacaaaaaaaatggcttccaaggctttggttctgttgggtctctttgctg

SEQ ID NO: 170737 - DNA, 459 bp, Arabidopsis thaliana
tcgtgggtcgacgcaagcctctatactgattcgtaataacgacagaagggggagaagagatcgagagaagaatagtttgatcatcttgtgagaaaaataatggctgcttcagtgatgctatcttcggtgacattgaaaccagctggtttcacggtggagaagacggcggctagaggattaccgtcgctcgcaagagctcgtccctccttcaaaattgtcgccagtggcgtcaagaagatcaagaccgacaagcccttcggaattaacggcagcatggacttgagggacggcgtcgacgcctccggcagaaagggcaagggatacggtgtttacaagtacgtcgacaagtatggagctaacgtcgatggatacagtcctatttacaacgagaacgagtggtcagcgagtagtgacgtgtacaagggaagagtcaccggattggcaatttgggcggtaact

SEQ ID NO: 170738 - DNA, 402 bp, Arabidopsis thaliana
ggtcgacccaagcctctaaagggagtcatataaaacagaaagggatagcgaaacgtggtaatccaagattgatagtggcaattcatggagctgcaagtggaattgggcaatctttatctttgctgagtaaagatgaaccctcttgtcacattacgtcatctctacgatgttgtcaatgcacctgacgtcactgctgacgtcaatcatatggacactggagctgtctgtctcaggttcttgggagcaatacagcgtgatgactcactaacgggtatggatcatgtgattataccagcctgtatatcgatgaaaccacggatgattcacgatgatctgtttaaaatcactgctgggattgttaatacactatgtgaaggtgtagcatcatgttgtcgtaatgct

SEQ ID NO: 170739 - DNA, 446 bp, Arabidopsis thaliana
gggtcgacccaagcctctagattgaatcatactacagaaggggggatctcaaaaccttaatatctgaacttcgccgtcgagagcatccatgggtcgtgtcatcagagctcaacgtaagggtgcgggttccgccttcaaatcccacactcaccaccgcaaaggtccggctaagttccgtagcctcgatttcggcgagagaaatggttacctcaagggcgtcgtgacggagatcatccacgatcctggtcgtggtgctcctcttgctcgtgtcactttccgtcatcctttccgtttcaagaaacaaaaggagctcttcgtcgccgccgaaggtatgtacaccggtcagttcttgtactgcggtaagaaagctactctcgtcgttggaaatgttctccctcttagatctattcctgaaagagctgttgtctgcaacgtcgagcatcacg

SEQ ID NO: 170740 - DNA, 269 bp, Arabidopsis thaliana
  unsure (1)..(269): unsure at all n locations
naggggagaagagatcgaaagaagaatagtttgatcatcctgtgagaaaaataatggctgcctcaatgatgctatcttccgtgacattgaaaccagctggtttcacggtggaaaagaccgccgctaaaagattactgtccctcacaagaactcctccctccttcaaaattgtccccaatggcgtcaagaaagtcaagaccgacaagcccttccgaattaacggcaacatggacttgaaggacagcgtccacgcctccggcacaaaaggc

SEQ ID NO: 170741 - DNA, 388 bp, Arabidopsis thaliana
tcatgacagaaagggcaggagagccatttggatagactaaacgttcctgtgagctggctggggttaacaaaacttgtgagttggttctactctgatgagttgccaaagcctccatcgggttgcaagtggaacaacatggacactgaggcaaagctggatgagcttcaagcttatgtggagatatactcgctttctgaatggtggattatggaagaacttcaaaacgattgcgctcatgtgattctctcttgcttggaatccgctagagagttatctatcagaacaatcgaattagctgcgagtttctcgatgtcgaaactggtggaagctgctgccaatcatgcacctcctatttatcatcagcttcgtgactcaagtgagctcgatg

SEQ ID NO: 170742 - DNA, 445 bp, Arabidopsis thaliana
ctctatactgagtcgtataaagaaggggacaacaaacacaaaaatcaaaaggggtcatttactatcttttaagagacgacatatatagttctcgaccaaggaaagaaaagggggtgacctgagttcttcaacacataacataatggccggagttttcaaaacggttacgtttcttgttttggttttcgctgccgttgttgtcttcgcggaggactacgatgttggtgatgatacggaatggacgagacctatggaccccgagttctatactacttgggctaccggtaaaactttccgtgtacgcgacgagctcgaatttgatttcgctgctgggaggcatgatgtggcagttgtatcagaagctgcatttgaaaactgtgagaaagagaaacccattagccacatgaccgttcctccggtcaaaattatgctaaacaccactgga

SEQ ID NO: 170743 - DNA, 416 bp, Arabidopsis thaliana
acgaaagaaggggacagaaacaaacataagccaatggaaacaaaaaaattctaaggtgaaaaaagccaatcagaagctgagtaaactctaagctcacagaaaaatggcgtctcttcttggaacatcttcttctgcaatctgggcttctccttcactctcttctccttcctcaaaaccttcctcctcccccatttgcttcaggccaggaaaattgtttggaagcaagttaaatgcaggaatccaaataaggccaaagaagaacaggtctcgtttacatgtttcggttatgaatgtagccactgagatcaactctactgagaaagtagtacggaagtttgattcaaagaagagtgcgagaccggtttatccatttgcagctatagtagggcaagatgagatgaaattatgtcttttgt

SEQ ID NO: 170744 - DNA, 446 bp, Arabidopsis thaliana
cccaagcctctatactgattcgaaataacgacagaaggggggggaaaaattggactattcggtggggctggcgtgggtaaaacagtactaattatggaattgatcaacaacattgctaaagctcatggtggtgtatccgtatttggtggagtaggcgaacggactcgtgaaggaaatgatctttacatggaaatgaaagaatctggagtcattaatgaacaaaatcttgcggaatccaaagtggccctagtttatggtcagatgaatgaaccgccaggagctcgtatgagagttggtctgactgccttaactatggcagaatatttccgagatgttaatgagcaagacgtacttctatttatcgacaatatcttccgtttcgtacaagcaggatccgaggtatccgccttattgggtagaatgccttctgctgtgggttatcaacc

SEQ ID NO: 170745 - DNA, 424 bp, Arabidopsis thaliana
gtccgtgccgctgcgagcgacaaaaggggacggaagaatcagatcaacgcatgcgaccaagtaaatcaaaatcgggttgaagaagaaagagataagctttcacatcaatttttgaaggcgcgaaatggggaatacttcatcgatgctgactcagtacgacatcgaagaagttcagagtcattgtcatgatctatttgagcagcaggagattttatctctgtatcaacggttttgccagttagatcgaaacgcaaaaggatttatatctgctgatgagtttctctctgtgcctgagtttgcgatgaatccactctctcagaggctgcttaagatggttgatggtttgaactttaaggattttgttgctttcttgtctgcgtttagtgccaatgctagtctaagacagaaagttcaattgatcatt

SEQ ID NO: 170746 - DNA, 447 bp, Arabidopsis thaliana
tcgcgggtcgacgcaagcctctaaacagacgtcctggaaaagacgacagaaggggaatcacacacaaggagagaagagagaaagagagaaagagagacagagataatggcgtacagtgcgtgtttcctacaccagagcgcattggcttcatcagccgcatgatcatcatcttcctcctcatcccagcgtcacgtgtcgctctccaaacctgttcagatcatctgtaaagctcaacagtctcatgaagacgataactccgccgtctcccgccgtcttgctctcactctcctcgtcggcgccgctgctgttggttccaaagtatctcctgctgatgccgcctacggtgaagctgcaaacgtgcttgggaagccaaagacgaacacagacttcttgccatacaatggagatgggttcaaagtgcaggttccagcaaaatggaacccaagc

SEQ ID NO: 170747 - DNA, 443 bp, Arabidopsis thaliana
tcgtgggtcgacgcaagactctaaagtgagtcatattaagggaaaacgaaaaacttaaaacccaagtcttatcactactctaaaagaatcttcatcatggcctcagtaacctcagccaccgttgcaatcccatctttcaccggccttaaagcctcaaccatcaaatcatccgccaccgtcagaatccaaactgctgctgttgcatcaccgaagcttatagtgaagtcatctctaaagaacttcggagtcgcggtcgtagcggctgcagcttcaattgctttggccggaaacgccatggcaatagaagttctcttgggaggatgggatgggtcgttagcttttattcccaacgacttctctaaagctaaaggagagaagattgtgttcaagaacaacgctggtataccacacaatgttgtcttcgatgatgacgagatcccaag

SEQ ID NO: 170748 - DNA, 310 bp, Arabidopsis thaliana
  unsure (1)..(310): unsure at all n locations
caaagtgataacttgatcattgcgccaacgangtgcccaataccgccgagaacttccgcgcgctgtgcactggcgagaacggcgtgggcaaatccgggaagccgctccactacaacggctccaccttccaccgcgtcatccccgagttcatgtgccactgcggccacttcacccgcggcaacggcaccggccgcgagtccatctacggcgagaagttccccgacgagaagttcgtgcgcaagcacaccgcccccggtgtgctctccatggccaactccgggcccaacaccaacagctcccagttcttcat

SEQ ID NO: 170749 - DNA, 433 bp, Arabidopsis thaliana
ctctatactgagtcgtattaacgacagaaggggactcaccaatcaaactcaaaaaactcttgaatttttcaagaacaaaagaaaaatacatctttaatggcggccatgaactcgagtgttctcacttgcagctacgcaattgctggctctggctcggtagagcttaaccagaaagttggtttggtgaattcatcagttgggtttggtcagaagaaacagatgattatgcctgtgatcaaagctcaacgcgttgttggtgatgatgttgatggatctaatggaagacgatcagccatggttttcttagcagctacactcttctccactgctgctgtttctgcttctgctaatgctggcgtcattgacgaatacctcgagaggagcagaaccaacagagaacttaatgataagaagagattggcaacaagtggag

SEQ ID NO: 170750 - DNA, 169 bp, Arabidopsis thaliana
acgaagactccgatccacgtggtgtggtcatgggttaggatacaacctccgaaggtgaaggcctttctcgccgtggtcactggcatggcggctttggttcttctcatattcattgttcacgattaccacaatcgcttcgttgccgctgatgctgttcattccatccgga

SEQ ID NO: 170751 - DNA, 341 bp, Arabidopsis thaliana
ggattttgcaagaactatttccggaacctggaaggcttcaatttatttatgctgatcttggagatgccaaagctgtcaacaagatattcacagagaatgcctttgacgctgtgatgcatttcgctgctgttgcatatgttggggaaagcacacaattccctcttaagtattatcacaatattacatcgaacactttggtagtattagagacaatggctgctcatggagtaaagactttgatatattcaagcacttgtgcaacgtatggggagcctgatattatgccaattacagaggaaactcctcaggtgccaatcaacccatatggtaaggccaagaag

SEQ ID NO: 170752 - DNA, 289 bp, Arabidopsis thaliana
tgtcgtagtcgaactagccatgttgggagcacaagtccaaacatgatacatcagactaaactcaacgtcaaaaatgcgtacctgaatggcaagcacacaggtttcaagtcaccacttctgtctgcgacgtctcgtctcgtgaccaacgagtgaaactcatggcatctgtctcatctctctaacagggaatactcaacatcctcgtcaacactgtgggaacgtcaataatcaagccgaccacagagtatacagcagaagatttctcttgtgtaatggctacaaatcacga

SEQ ID NO: 170753 - DNA, 312 bp, Arabidopsis thaliana
aagatcggcttgaatgcatagcactgtcaaaaccgtggttaactgtgagtttcttccctacggtatcaatttccagcgccgagttgccacagggagactctgcgatggaccagtccctgccgatttgctatccgaacaactgggaataatgtccaatgtcccaatatacctaattccgattccaaagtccaaatatcctataaccggtgtcacgtttgcgtccggaggttctggttatgatactagatcaccgaatcttgtggcagtaacatcattagatcatcaattgagtgaattcaaggagtacatttc

SEQ ID NO: 170754 - DNA, 254 bp, Arabidopsis thaliana
cacacgcgtccgcccacgcgtccggacgacagaaggggaccctaacatagcccttgcaaaccataaccaaaccatcatcatcatcatctcttggtgacagaagaaaagagttgaggaacagagaaaatggcagcacaagcacttgtgtcttcttcacttacctcctctgttcagacagctagacagatatttggctcaaaaccagttgcgtctgcctcacagaagaagagttcctttgttggtaaagctgctgc

SEQ ID NO: 170755 - DNA, 369 bp, Arabidopsis thaliana
tacatgggagatgaatatggccatactaaagggggaaacaacaacacgtattgccatgacaactatatgaactatttgcggtgggagagaaaggaagaagcacattcggacttcttcagattctgccgtattcttatcaagtttcgtgatgaatgtgaatcacttggtttgaatgatttcccaacagcaaagcgtctgcagtggcatggtcttgctcctgagatcccaaattggtctgaaacaagtcgatttgttgcattttcactggtcgattctgtgaagaaagaaatctatgtggccttcaagaccagtcatttagccagacgtgtttccctaccgaataggccaggatacggatgggagccagtt

SEQ ID NO: 170756 - DNA, 456 bp, Arabidopsis thaliana
gcacaggacctagactcgcgggtcgacgcacgcctccaaagtggcgcgaagaaaacagaagggagaagatatcgacacaacagtaatttgatgatcttgtgagacaaatactggatgcttcagtgacgcaatctgcggtgacattgaaaccaactggtttcacggtggcgaagacggcggctagaggatgaccgtcgctcacaagagctcgtcactccttcaacattgtcgccagtggcgtcaagaagatcaaggaccgacaacgcccttcggaattaacggcagcatggacttgaaggacggcgtcgacgcctccggcagaaaaggcaagggatacagtgtttacgagtacgtcgacatgtatggagctaacgtcgatggatacagtcctatttacaacgagaacgagtggtcagcgagtggtgacgtgtacaatggacgagtcaccggattggc

SEQ ID NO: 170757 - DNA, 398 bp, Arabidopsis thaliana
ctcgtgggacgacacaagactcaaaactgattcgaaataacagaagggggcaaatcaaatggatcgtcttaagctttatttctccgttttcgttttgtctttcattatcgtctcggtttcgtcgtctgatgtcaacgactgcgatgatctcgtgatccgtcaggtggttggtggagccggacctcatgttttgacctcagatgatcagttgtctctcttcaagcggaagttcgggaaggtctacgcttccaacgaggagcatgactatagattctcggttttcaaagcgaatctcatgcgagcgatgcgtcaccagaagttggatccgtcggcgactcatggtgttacgcagttctcagatctgactcggtccgagtttcgtaagaagcacttggggg

SEQ ID NO: 170758 - DNA, 461 bp, Arabidopsis thaliana
ctcgcgggtcgacgcaagcctctatactgattcgaaataacgacagaaggggatcgaaacaaaaaataattaagagagaaaaaaacaaaaaacattttccatctctctctctctctctctcgcctgcttcaagaaatggatcggcaaagttccgatgacatcatgaaatttctcgacggcatggctagctccgacgatgttctttttggcttcctcgacgaaggaaaccactcaccgaagtatctagcctcctccgagaagctggctatgattgcgtcatttccaaatctaagtggagaagctctcatgagatccctgcaggtgagcatgaatacttggaggtcgtggacaaatcggtttcaaagaaaggcgagatccgggtggtgatcgaactatgttttagggcggagtttgagatggcgagaggcagtgaagagtacaagcgactcatcggaatgtta

SEQ ID NO: 170759 - DNA, 435 bp, Arabidopsis thaliana
actcgtgggtcgacgcaagactctatactgattcgtaataacagaagggggcaaatcaaatggatcgtcttaagctttatttctccgttttcgttttgtctttctttatcgtctcggtttcgtcgtctgatgtcaacgacggcgatgatctcgtgatccgtcaggtggttggtggagccgggcctcaggttttgacctcagaggatcacttttctctcttcaggcggaagttcgggaaggtctacgcttccaacgaggagcatgactatagattctcggttttcaaagcgaatctcaggcgagcgaggcgtcaccagaagttggatccgtcggcgactcatggtgttacgcagttctcagatctgactcggtctgagttccgtaagaagcacttgggggttagaagtggctttaagcttcctaaagatgccaaca

SEQ ID NO: 170760 - DNA, 427 bp, Arabidopsis thaliana
ggtgtcataagacgacagaaggggactccgacgtacctcctcttccccgttaccttctcagagtttttagtagtcttcctttggaacaatgagtgacgtgtttgatggatatgagcgacaatactgtgagctctcggcgagtctttcaaagaagtgttcctctgctatttcgcttgatggagaacaaaagaagcagaagttgtctgaaataaaatccgggctggaaaatgcagaagtattgattaggaaaatggatctcgaggcaaggacccttccacctaatcttaagtccagcctccttgtcaaattaagagaattcaagtctgatctgaacaatttcaaaactgaagtgaagagaatcacatctggacagttgaacgctgctgctcgtgatgagttgctagaagctggtatggctgacacaaag

SEQ ID NO: 170761 - DNA, 454 bp, Arabidopsis thaliana
ctcgtgggacgacgcaagactctatactgagtcgtaataacgacagaagggggccgggaggaatgaaccggttgaaggagcaaaaggggccgaagttcgacggcgaagaatcacctccacctgattttgatgaagatcgaagtgtgggtgaggtagacggaggagatcacacgccattcgctggaggtaaagtcagaaggaaagcgtctcgctatagagagcatcgtggtgactatcttcacgtttcttctcgtcctggattgatgcgaattctggagaaacaaggtgatacatcgattctttttgctgataaagttttgaagttcaccggctcggggaagatgaaacggcgtatttttatcctcactgattttgcgatctatctaattgatcccgagactgaagctatgaccaggagaattgctttgtcatcagtagagaagatgtgtttaag

SEQ ID NO: 170762 - DNA, 454 bp, Arabidopsis thaliana
ctcgcgggtcgacgcaagcctctatactgatgcgaaataacgacagaaggggaatgttaaagcctatttacgaagaggaaccgcaagagaaatgttaggcgattgcaagggagccatagaagattccagatacgcacttgtgctggaaccaaacaacaaacgagcgtctctctcagcagagagactgagaaaattccagtgagcttcttttgtccgtacctcaccgatcattgagaaaacgtttgttccttagaatttgtccaagagtatatgccaattttgtcaacacttgtcttttgcgtctgatatttaggcattttatctagagataccttttgcaagtccgccgagaatggaaaattataatatccgatgtttatttgaaacgttctctaaaattggatatcaaaaagtaatgttaatcttaaacaccggataccggcattcccggtcc

SEQ ID NO: 170763 - DNA, 445 bp, Arabidopsis thaliana
gtccacgcaagactctatactgagtcatattacgacagaaggggacacaaaacacaaaaaagaacaaatatggagaaacaaatctctctattgctctgtctactcctcttcatcttctcaatgtcatcctctctccatgaaaccgaagctcgaaaacacaataaatataaacccgcaccgatcatgagcctagtcccaagaactctctacgaccaaatcttcatccacaaggacaacaacgcatgccctgcaaaaggtttctacccctatgaagctttcgtggaggctacaagatccttcccgaagttcgggagcgtaggaaacttttggacaaggcgacgcgaagtggctgcgtttttggcgcagatatctcacgagacaacaggtggttgggccacggcaccagacggaccatatgcgtggggattgtgttttaaagaggaag

SEQ ID NO: 170764 - DNA, 459 bp, Arabidopsis thaliana
ctcgtgggtcgacgcaagactctatactgattcgtattagacagaaggggacaccgagaaaggcaatggagtcggctaaatcaatcatcggtggccaccaaaatgtcatcctgatgcgtcatggtgatcgactcgacaatttcgagccactctggacttcaacagctgcgagaccgtgggatccatcgcttgctcaagacggtaaggatcgggcctttagaactggtcagagaatccggtctcaacttggggttccgattcaccgtgtcttcgtctcccctttcctccgctgcatccagaccgcttccgaagtcgttgccgccctctcagccgtcgatttcgatcccattgctatgtcatctaaagacgtgctttccatcgacaatactaagatcaaggtggctattgaatttggattgtccgagataccgcacccaatctttattaacagtgaagttg

SEQ ID NO: 170765 - DNA, 458 bp, Arabidopsis thaliana
  unsure (1)..(458): unsure at all n locations
gtgggacgacgcaagactctatactgagtcgtaataacaacagaaggggagagtaaagaagataaaaaacacaatttgaagcttttataatattttctcagaaactttcaaagagcttagaaaaatgagtacagctaccttcgttgatattattatcgccatcctcttgcctccactcggtgtctttctcagatttggttgcggggttgagttttggatatgtttggttttgacgctacttgggtatattcctgggatcatatacgccatttatgtcctcaccaaatgatttaccatctatcatcatctccttgaacagctgttccgtcgtgttctcctatctttgtgactgattcagcgtntctttttctttcatcagagtttttatgtttcaagtaatttaattaatcatcactgttgtgtttgcattgttatataaatgttgtgttgatataaaa

SEQ ID NO: 170766 - DNA, 404 bp, Arabidopsis thaliana
ctcacgggtccacgcaagactctatactgactcgtagtagacagaagggggaaatcgaacgatttataaaatcgtcgtctggctttcgacgatctgctgacgaagaccatggcgccgattttcagatccacttcccttatcgctttttctctcttcttcttcttctttgcttccactcttccgatctcatctgggtctgaggatagttacacgatcacgggtagagtgagggttccagcaagcaccgtgattggtcatgcagctaaattctcaaatatcaaagttatactcaacggtggacagcatgttactttcctcaggccggatggatactttaccttccacaaagtgccagcggggactcatcggattgaagtttatgcactgggctacttcttctcccc

SEQ ID NO: 170767 - DNA, 354 bp, Arabidopsis thaliana
agctgcaggagaaatatacggtggtaaaaggcggttaaaggctttaacagatgtttttccaaatgtggtgaggaaagaaactctactcgattcttctgatttgagtttttgtaaaaaccattcttctcaaatggctgctcttgattaccttatctctcttgaaagtgatatattcgttcctacttattacggaaacatggcgaaagtcgtggaaggtcatcgcaggttcttggggttcaagaagacaattgagctaaaccggaagctgttggttaagctgatagatgaatattatgaaggattgttgagctgggaagtgttttcaaccacggttaaggcctttcacgctacacg

SEQ ID NO: 170768 - DNA, 463 bp, Arabidopsis thaliana
tgggtcgacgcaagagtctatactgattcgagataacgacagaaggggagaacgtgtaacacttttgtatatgtagataatagtagaacgaaaaaaaactctttgtagagagattctgcttctatatggctttctcttacgcatcattctctatacccttcaatggtttcgctgcaaatccgtctccgattacttccgcttttctcggcccatcattgagattctccaccagaacatcaaaaactcggaatccgagtaatggggtttcagtgaaatcgtcaaatagtcataggtttctagtcaaatctaaaaatttcagtgtctatgcaagggctgcagcagagaagtctgttcacgatttcactgtaaaggacatcgatggtaatgatgtttctctggacaaattcaaaggaaaacctttgttgatcgttaacgttgcgtcaagatgtggtttgacatcatc

SEQ ID NO: 170769 - DNA, 378 bp, Arabidopsis thaliana
gacacacaaaaaaaaaagtcacgtgtaaatgtattatatgttctctgttttcttgtgaccaaagaggcagattttgaacctttggattttttttcggatcttgatcaaaataaagattcgttttggttttgaagcttctacaagtgtttgattagacaagaaggtgaaaatgtcggcttatacgcatccgatggagagggagctctccggtcaatccagccgaggcaattccgaattggggagtcagtattcgatataatctggatgttacatgacatctttagcatcttccatcttcatagcttctctagtaacatttggagttttgatgataacacttcgtattgctttatcatccatgttacaaagctgtgagaa

SEQ ID NO: 170770 - DNA, 454 bp, Arabidopsis thaliana
ctcgtgggtcgacgcaagcctctatagtgagtctaatgatgttatcatcagtaccgggattaaccccaaggctaaatcctactacctcttcgacggatatgctcatctctcttctggtcttgcttgtgggctagctggtctttcagctggaatggccatgggtatcgttggcgatgctggtgtcagggccaatgctcaacagccaaagcttttcgttggtatgattcttatcctcattttcgctgaagctcttgctctatacggtctcatcgtcgggatcattttgtcctcccgagctggtcagtccagagccgaatgagaaaagagtgcggttcttgaagtccgcatgattctttcttccccttttcaccggtctcttcatagagccgggatcttcttatattgtttgtcaggttagtagagagacacagtggttttgttccttgtggcatgt

SEQ ID NO: 170771 - DNA, 456 bp, Arabidopsis thaliana
ctcgtgggtcgacgcaagcctctatactgagtcgtaataacgacagaagggagaagaacaacaacactaagcaaaaaagaaaagctcaagccgagagagacaatggcatcaacattcacgagctcaagcagtgttcttaccccaacaacattccttggccagactaaagcctcaagctttaacccccttcgtgatgttgtctctctcgaatctcccaagtacactatgggaaatgatctttggtatggacctgacagagtgaagtacttaggacccttttccgttcaaactccgtcttacctcaccggagaatttcctggcgattatggttgggacaccgccggtttatccgcagaccctgaagcctttgccaaaaacagagctcttgaggtgatccatgggagatgggcaatgttgggagcttttggttgcataacccctggaatttctcaaaag

SEQ ID NO: 170772 - DNA, 137 bp, Arabidopsis thaliana
aaatcaaatctgatcaaggcgagaatcttacaaaagccatttttagagctttgcaaaaaccatcttgcctgttaaacaaaaaatttggagctgcaaatgactctcataaagtggccgccctagaggatccatcctta

SEQ ID NO: 170773 - DNA, 452 bp, Arabidopsis thaliana
cgggtcgacgcaagcgtctaaagcgagtcgtctaaagaagggggagcaccgatcttggtacggacattggcaagtatgtgttatttcgtgtttcggcagcggtttaggagcggcaacgattcacagagaaggattaggagagggagtagtaagtcgttttcatggtcttactctcatcatgtatccgattttgaagatgaatcagatttcgagaagattattgctctttgaattaagtttcttaagcgtctttgtatagatcgtctcttctctttgcctttcttccaacgcaagtctgtgttgtattcttagaataaatcttgttggtacatattagtatcatatatagcaataaagtcgccacaggccatatctgtattgtttcttttgttctactactggaagtggttactatatgtacaattcattcgagtactagtgaagtgtaatgt

SEQ ID NO: 170774 - DNA, 455 bp, Arabidopsis thaliana
ctcacgggtccacgcacgcctctatactgatgcgagataacaacagaagggggagatcgagagaagaatagtttgatcatcttgtgagaaaaataatggctgcttcagtgatgctatcttcggtgacattgaaaccagctggtttcacggtggagaagacggcggctagaggattaccgtcgctcacaagagctcgtccctccttcaaaattgtcgccagtggcgtcaagaagatcaagaccgacaagcccttcggaattaacggcagcatggacttgagggacggcgtcgacgcctccggcagaaagggcaagggatacggtgtttacaagtacgtcgacaagtatggagctaacgtcgatggatacagtcctatttacaacgagaacgagtggtcagcgagtggtgacgtgtacaagggaagagtcaccggattggcaatttgggcggtaact

SEQ ID NO: 170775 - DNA, 422 bp, Arabidopsis thaliana
gaccacgcaagactctatactgagtcgtaataacgacagaagggctggttggatcatcactacctactaaatttaatccagctattgtacaaaaggttgtagatgagctttctcctagtaattttcgaattttttgggaatcacagaaatttgaaggacaaactgacaaggctgagccatgagcatatgcaagagattttggggttgctgttcaactacattcagctattacaacagactggtgtttgccagtggatttttgatgagctctcagctatttgtgagacgaaatttcattatcaagacaaaataccaccaatgtcctatatagtggatattgcatcaaacatgcagatatatccgaccaaggattggctggttggatcatcactacctactaaatttaatccagctattgtaca

SEQ ID NO: 170776 - DNA, 393 bp, Arabidopsis thaliana
gtaggacgtcgcaacactctatagtgagtcgtattacgacagaagggggagaagagatcgagagaagaatagtttgatcatcttgtgagaaaaataatggctgcttcagtgatgctatcttcggtgacattgaaaccagctggtttcacggtggagaagacggcggctagaggattaccgtcgctcacaagagctcgtccctccttcaaaattgtcgccagtggcgtcaagaagatcaagaccgacaagcccttcggaattaacggcagcatggacttgagggacggcgtcgacgcctccggcagaaagggcaagggatacggtgtttacaagtacgtcgacaagtatggagctaacgtcgatggatacagtcctatttacaacgagaacgag

SEQ ID NO: 170777 - DNA, 255 bp, Arabidopsis thaliana
ggacataaaaatggcgacttcgatgattcacagattgttcaaacaaggcacaaagatcgtcggcgttggactcaattacgcttctcacgccaaagaacttggcaatgccctcccaaaggacccgattgtgttcttaaagccaacttcgtcgtacctggaaaacggtggaacaatagagatcccacatccactggattcacttcaccatgacgtggaacttgctgtactaattgggcagaaagcacgagatgtccc

SEQ ID NO: 170778 - DNA, 310 bp, Arabidopsis thaliana
agaaaaatctctagagctagcagagtaaaatcaattaatattttggagaacatcaacgaatttactcaacaactatggcctcatggtgacggtaacgagaatatcggtaaaacgatccagttgtttgcggagaagtcagtggaaatagatgtgatggtgagaagaatggtaatggagagctttggaatagaaaaatacattgatgaccatctaaagtctacggcgtatgcgactgatgaagtatattgcaccacctgagggtgatgctaatactactgttgacgataatgctgatactcttggcaagctt

SEQ ID NO: 170779 - DNA, 347 bp, Arabidopsis thaliana
agacgccagtaaagcagcgaaaggactacagagtggggtcaaagtgtggagcctaaggagaagcagactgtatataaaattgaccaaggatacatagatgctgcaggatccttggcacgcttgcatcctaaagtctcaatcaacacgatcaatgacgggaacgaaccatgcttcttcaccatctacttttcttgagatgccactaacactatcatacatggaaattcaatccagaaacaggcagcgttcatatctggaactcagtacgttatgtctgatcactcgaacagtgagaaccacggactaaagcagacggctcacgcaataactgacttatcatcagcatc

SEQ ID NO: 170780 - DNA, 405 bp, Arabidopsis thaliana
aaaagacgacagaaggggacgcacaacaatagactcaaagcaaacgcaactcatatccaatcgcttttaaacgccaataatcgcgttacagtaacaactcgagaaatggtaacactaatcgtggccaccaccgccgatccagcgtcgatcaaccctgcggcggcgcttctcgccatgcccggttggaccgccggacctatcttaccgccggacataaagagttttagtaacaagcaaacgagagtgattcaacacgatagatctatagtaaaagaagacgatctcgatttacgttgggaagaagctaccggtgaagttgttgatgaagtcatcttcctcagccgtcacaccgccgtctcaaatcgtcctgctttaactgttcatccgattggagtgcttcatcta

SEQ ID NO: 170781 - DNA, 447 bp, Arabidopsis thaliana
  unsure (1)..(447): unsure at all n locations
ggtcgacgcacgcgaccgaaatgactacagaaaggtgttgagaaggccgaacaagacaagagaagtgccgttatccgcgcccagggagaagccaagagtgctcagctcattggtcaagcaattgcaaacaaccaagcgtttatcacgctcaggaagatcgaggctgcaagagagattgcacaggccatagcaaactcggcgaacaaggtttacttgagctcagacgatcttttgcttaacctacaagggatgaatttggatgttgatgcaaagaactagagaggtttcttaagtaaaactgcatgtgggtcattttgtcttttaagttcctagaatccgttggaacanaagcttgatttgtactactanatactactttttaaaatcctgggattagtctanctcaaggtgaaaagttgaaaaagaagatactgttctgctgaatga

SEQ ID NO: 170782 - DNA, 440 bp, Arabidopsis thaliana
ctcgtgcgtcgacgcaagcctctatactgattcgaaataacgacagaagggggagaagagatcgagagaagaatagtttgatcatcttgtgagaaaaataatggctacttcagtgatgctatcttcggtgacattgaaaccagctggtttcacggtggagaagacggcggctagaggattaccgtcgctcacaagagctcgtccctccttcaaaattgtcgccagtggcgtcaagaagatcaagaccgacaagcccttcggaattaacggcagcatggacttgagggacggcgtcgacgcctccggcagaaagggcaagggatacggtgtttacaagtacgtcgacaagtatggagctaacgtcgatggatacagtcctatttacaacgagaacgagtggtcagcgagtggtgacgtgtacaaggggggagtcaccggat

SEQ ID NO: 170783 - DNA, 348 bp, Arabidopsis thaliana
tcgtccgtcgtcgcaaccctatatactgacgtcgtattatctacaagatccgacctaacgtgggagcggatacgacgtcagaactctactaggagtgaaagttgcattaccgatcaaaggatggtcgtcatgtctgctcgtcacagctcttttactgctctttctctatctcgcagctctgcattcctcggccatcgttcaatttcgcctatttcccactccgtcagctctcatgtcacttccgctgagtaaccatgtcttgttcgtgaatggcacacgcgttgtaaccgaacagaatgcacagcaggtattcttctgattcgccacatgatccatgtccagtttggc

SEQ ID NO: 170784 - DNA, 455 bp, Arabidopsis thaliana
ctcgggcgtcgacacaagcctatatactgatgcgaaatagcgacagaagggggacaaaaaaagaaacagtgaagaagaaaaaaaagaaggtcattttcattttctccatttgatttttgccgaccggagaaaatatcttcttgccgtcttcttcttcatttcaccaggaacttttatttgaaatcggtttgatttagccatggcaaacgcggcatcgggaatggctgtgcatgatgattgcaagctgaaatttatggaactgaaggcgaaaagaacattccgtaccatagtctacaagattgaggataagcaagtgattgtagagaaactcggtgaacttgaacaatcatatgatgactttgcagctagtcttccagctgatgattgccgatattgcatttacgatttcgactttgtcactgcggagaactgccagaagagcaagatcttcttca

SEQ ID NO: 170785 - DNA, 455 bp, Arabidopsis thaliana; identical to SEQ ID NO: 132383
  unsure (1)..(455): unsure at all n locations

SEQ ID NO: 170786 - DNA, 452 bp, Arabidopsis thaliana
  unsure (1)..(452): unsure at all n locations
ctcgtgcgtcgacgcaagcctatatactgatgcgaaataacgacagaagggggtcccaatcaaacaaatcgagaaagacgaacacttacaaaaaaaaatctctttgtgagctttagcgatcgtaacaatggcgaacgaggtgattcttcttgatttctggccgagtatgttcgggatgaggacaaggatcgcattgagggagaaaggtgttgaatttgagtacagagaagaagatctaaggaacaagagtcctttgcttctccagatgaatccgattcacaagaagatttctgttcccatccacaatggtaaaccggttaacgaatctatcatccaagttcagtacattgacgaggtctggtctcacaagaaccctatccttccttctgatccttacctgaaagctcaagctaggttctgggctgatttcattgacangaaactgtatgatg

SEQ ID NO: 170787 - DNA, 442 bp, Arabidopsis thaliana
  unsure (1)..(442): unsure at all n locations
actcgtgggtcgacgcaagcctctatactgattcgaaataacgacagaaggggactcactaaagcatcacataacactcacacacacactttctcttctcttattttctcagttcttttagctcttttctctacatatattcaaatggccaccatcgaggttgaacaagtgactccagtagcagctgagaacatcgaggtgccaccaccaaaggctgtggagtcggaggaagtcaccaccgtctccgagtctcctccagcttcggtaacagaatctcaagcgcctgtcgaagtaacaactaaagatttggtcgtggaagagacagagaaaccaatcgaagaaacagaggaagctcaagttgaaactccggaggttgtggagatcaaganagatgaagaagctcggttgaaactccggtggttgtggaggatgagagcaaaac

SEQ ID NO: 170788 - DNA, 461 bp, Arabidopsis thaliana
ctcgtgggtcgacacaagactctatactgagtcgaaataacgacagaagggggaagaccaaaaactagtggacaaagaaaaagaacaaaaacctaatttcaggaaattcaataaatatcatcctccggataagttgttattgtacgtttaccaaattcaagaacaagaaaaaacttttcctttgaaacaaagaaacatggatttcttcaccgatcaagtaaagaagaaattctccgacaagaaaccggagagctctgatccggagccaaaccacaacaaaaacaaacccggtcacacggagccaacaacacataaacccggtcacggcgagccaacaacacataaaccggtctccaacaccgatccgacaacacacagaccggctacgaacgctgagctcatggctagtgccaagatcgtagccgaagctgctcaagccgctgctcgtcacgagtcagaca

SEQ ID NO: 170789 - DNA, 455 bp, Arabidopsis thaliana
tcgtgcgtcgacgcaagtctatatactgattcgtataagacagaagggggaagagatcgagagaagaatagtttgatcatcttgtgagaaaaataatggctgcttcagtgatgctatcttcggtgacattgaaaccagctggtttcacggtggagaagacggcggctagaggattaccgtcgctcacaagagctcgtccctccttcaaaattgtcgccagtggcgtcaagaagatcaagaccgacaagcccttcggaattaacggcagcatggacttgagggacggcgtcgacgcctccggcagaaagggcaagggatacggtgtttacaagtacgtcgacaagtatggagctaacgtcgatggatacagtcctatttacaacgagaacgagtggtcagccagtggtgacgtgtacaagggacgagttcacggattggcaatttgggccgtaact

SEQ ID NO: 170790 - DNA, 460 bp, Arabidopsis thaliana
tcgtgggacgacacaagactctacagtgagtctcattgccggttcacagatcttcagcgatggagggctcgattacttgggaaaccctagcttggttcacgctcagagcattttggccatttgggccacacaagttattttgatgggagccgttgaaggctacagagtcgcaggaaatgggccattgggagaggccgaggacttgctttaccccggtggcagcttcgacccattgggtttggctaccgacccagaggcattcgctgagttgaaggtgaaggagctcaagaacggaagattggctatgttctctatgtttggattcttcgttcaagccatcgtcactggtaagggaccgatacagaaccttgctgaccatttggccgattcagttaacaacaacgcatgggccttcgccaccaactttgttcccggacagtgagccaaggtttatctgtat

SEQ ID NO: 170791 - DNA, 299 bp, Arabidopsis thaliana
tcgttcgacaacgcaacactctatagtgagtcgtattaagacgcaagaagacaacgtagcggcataaaaaaaaaaaggagagaagagtttcaaaggccgccacaacaatgagcctctcatcccctgctttcgcgggaaaggcagtcaacctttcgccagcgggatcacaactccttgcaagctggcgtgtaacgatgatgaagaatgttgctagcccaaagggtctagcaggtagctcatggtactgatcagagcgattcaagtgattgggtccattcactggcgagtcacccagcgaa

SEQ ID NO: 170792 - DNA, 460 bp, Arabidopsis thaliana
tcgtaggacgacgcaacactctatactgagtcgtaataacgacagaaggggacaactgaagaagaaggcaaagccctttctgatatggttgccgagaaacttcagattggaggagaagaagagaagaaggaaacgacgacaaaggaagtggagaagatctctaccgagaaggcagcatcggaggagggtgaggcggtggaagaggaagtgaaaggaggaggaggaatggtcgggaggattaaaggatggttcggtggtggtgcgactgatgacgtgaggccagaatcgccacattctgttgaagaggctccaaaatcatctggctggtttggtggtggtgcgaccgaggaggtgaagccaaaatcgcctcattccgttgaagagtctccacaatcacttggctccactgttgttccggtgcagaaggagctttaagaatatgagaactgagattttcaag

SEQ ID NO: 170793 - DNA, 459 bp, Arabidopsis thaliana
ctcgtgggacgacgcaagcctctatactgacgtcgtgactagaagacgacagaagggggaagtgacacagcgaagttcgagtatgagccgcaagagagataaaccctacacaaaccgtcacacgccggcgcgaatttcgaaacgccggcgaccatgggcgccttcgtcatcggagcacgatgagattatcgacaaaccgatcaccaaacctccgccgccaccggcgttggtagttatgggacttcccgccaactgttcagttctggagctaaagtctcgattcgagatctacggttcaatctcccgaatccgaatccataaggacggaattggctccgtttcgtatcgaaccgccgagtcagcagaagccgccattgctggtagtcacgagccttctttcggtatctccatcgattccaaaaagttggatgtggtttgggcgacggattcattggtgaa

SEQ ID NO: 170794 - DNA, 452 bp, Arabidopsis thaliana
gtaggtcgtcgcaacaccctatagtgagtcgtattaaccacagaaggggagaagagatcgagagaagaatagtttgatcatcttgtgagaaaaataatggctgcttcagtgatgctatcttcggtgacattgaaaccagctggtttcacggtggagaagacggcggctagaggattaccgtcgctcacaagagctcgtccctccttcaaaattgtcgccagtggcgtcaagaagatcaagaccgacaagcccttcggaattaacggcagcatggacttgagggacggcgtcgacgcctccggcagaaagggcaagggatacggtgtttacaagtacgtcgacaagtatggagctaacgtcgatggatacagtcctatttacaacgagaacgagtggtcagcgagtggtgacgtgtacaagggaggagtcaccggattggcaatttgggcggt

SEQ ID NO: 170795 - DNA, 450 bp, Arabidopsis thaliana
tcgtgggtcgacacaagactctatactgagtcgtattaacgacagaagggggagcctcgaagaaagcaaataaaatctagagaagcttgtttctagggtgtcgactctcgacggccggtacgatttttcaactgcttgttctaaggaatcatgaagcctgtcttttgcggaaactttgagtatgatgctcgtgagagtgatcttgagcggcttttcagaaagtacggcaaggttgagagggttgatatgaaagctgggtttgcttttgcctatatggaagatgaaagggatgctgaagatgcaattcgagcgcttgatcgctttgaatatggtcgcacaggacgcagactccgtgttgagtggacaaagaatgaccgtggaggtgctggaagatcaggtggttcgaggagaacatcttctggcttgaaaccttcaagactctgtttgcga

SEQ ID NO: 170796 - DNA, 454 bp, Arabidopsis thaliana
gttggtcgtcgcaactccctatagtgagtcgtattagacagaagggggagagagatatagagagcatcaatggcgtcgtcgtcaagactttgcgattcgtgcaaatcgacggcagcaactctattctgccgcgcagacgccgcgtttctctgcggcgactgcgacggtaagatccacacagctaacaaactcgcatcacgtcacgaacgagtttggctatgtgaagtatgcgaacaagcaccagcacacgtcacgtgcaaagctgacgccgctgcgttatgcgtcacgtgcgaccgtgatatccactcagctaatccactctctcgccgccacgagcgcgtaccaatcactcctttctacgacgctgtaggtccagcaaaatcggcgtcctcctccgtcaatttcgtagatgaagatggccgtgacgtcactgcttcgtgggttttagctaaag

SEQ ID NO: 170797 - DNA, 454 bp, Arabidopsis thaliana
cgcgtaggtcgtcgcaacaccctatagtgagtcgtattacgacagaagggggggctttgcaaactctacactgcttcgtctcttagctcgacattgatctccttaaaatggcgtcggagaagaagctctcgaaccccatgagggacattaaggttcagaaacttgttctcaacatttccgttggtgagagtggtgatcgtctcactcgtgcctccaaggtgttggagcagctcagtggacaaacccctgtcttctctaaggcgaggtacactgtgaggtcttttggtatcaggcgtaatgagaagattgcgtgttatgtgactgtgagaggtgagaacgcaatgcagcttcttgagagtggtttgaaagtaaaggagtatgggcttcttaagaggaacttcagtgacactggttgctttggatttggtaccaagaacacattgatctgggaatc

SEQ ID NO: 170798 - DNA, 433 bp, Arabidopsis thaliana
gggtccacgcaagactctatactgatgcgaaataacgacagaaggggggtactgtagacgtaaaggagaactctacttggtgtatgactttatgcccaaaggaagccttgataagtttctttataatcaaccaaatcaaattcttgattggtcacagagattcaatatcatcaaagacgtagcctcgggactctgctacttgcatcagcagtgggttcaagtgattattcacagggatattaagccagcaaatattcttcttgatgaaaacatgaacgcgaagctcggtgattttggacttgcgaagctatgtgaccacgggattgactctcaaacctcgaatgttgcaggtacatttggatatatatcaccggagctgtcgagaacagggaagtcaagcacaagttctgatgtttttgcatttggagtgttc

SEQ ID NO: 170799 - DNA, 454 bp, Arabidopsis thaliana
cgcgggtcgacgcaagactctatactgattcgaaataacgacagaaggggatgtcgagacaaaatgcaggcatacacactaccattcgtattcggagaattattgcgggtatcggtgttgaaattgtgtttcccatatactctcccaacatcaaagagataaaagtggtgagtcacaggaaagtaagaagagcaaggctttactatctgagggacaagcttcctcgtctgtccactttcaagtgaacaccatccaccgtgctgtgtttgacctccagaggtagtaatcttccgcattgtgctctttttttgtaagaattgtttctttctttcttttttttaagcctgtaagtcattccctgcacattttctgagaaagtaaattaagattagttgaacttccggttgatggatgtagacctgttccttgtttgataatgaatgatatatggctt

SEQ ID NO: 170800 - DNA, 441 bp, Arabidopsis thaliana
cgtgggtcgacgcaacaccctatagtgagtcgtattatccacagaagggggccgtttctgttttaacaaaacaagtatcaggccgttccaagcgttcactaacgacacgacgtttgtttatgaaccaaaaagacgaatttttcaaaacctcgtcggagaggtttaggcttaaagaaacaaattgttggaatctcaattctcgaatctgacatctcggagaagagatatggcgacagagtcatcggaatcggaagaagaaggaaagattagtggaggaaactataagccaatcatagacgacgatctaagagagatgggtaaaaacgcagcttggagccgtagctcttgtaagcccggcaatggcgtcaccactctccgcgacgacaatctcgagacttattggcaatcagatggggttacaaccacatttgattaacattc

SEQ ID NO: 170801 - DNA, 321 bp, Arabidopsis thaliana
gcgggtcgacccaagactctatactgattcgtaataacgacagaaggggacccatttcttggcttacaacaacaaatcttaaacgttttactttgtgctgcactactcaacctcaatggccgcctcaacaatggctctcccctcccctgccttcgccggtaaggccgtcaagctttcacccgcggcatctgaagtccttggaagcggccgtgtgacaatgacgaagactgttgccaagccaaagggcccatcaggcagcccatggtacggatctgaccgtgtcaagtacttgggtccattccctggcgaatcaccgagcta

SEQ ID NO: 170802 - DNA, 465 bp, Arabidopsis thaliana
  unsure (1)..(465): unsure at all n locations
ctcgttggtcgtcgcaacaccctatagtgagtcgtattacgacagaaggggctacaacataatcagcgacagctcaaacgttgatatttttctccggcttttctagggtttaaattttctttccgatcagagattaatggcgactctagactccgacgttaccatgattcctgccggagaagcctccagcagcgtagccgcgtcgtcttcgaacaagaaagctaagcgattcgaaattaagaagtggagcgccgttgctctctgggcttgggatatcgttgttgacaactgtgcgatctgcagaaaccacatcatggatctttgtatcgagtgtcaggctaatcaggccagtgccacaagtgaagagtgcactgtancttggggggtttgcaatcacgccttccactttcactgcatcagcagatggctaaagactcgtcaagtttgtccaatggataacagtga

SEQ ID NO: 170803 - DNA, 425 bp, Arabidopsis thaliana
cgcgttgttcgtcgcaacaccctatagtgagtcgtattaaccacagaaagggagctcaagcttctacgtcatcttcgacatgagaatgtggttgctcttaaagatgtaatgatggctaatcataagagaagctttaaggatgtttatcttgtttatgagcttatggatactgatcttcatcagattattaagtcttctcaagttcttgcaattgacgattttgatgaaaatgagctccaagaggctgacaaaatgataaaggaggaggggaagtttctgtgtgtgtcaatgggacatgagaacaagacacttgatgattttgtagaagctcacaacacatgcgtgaatgatctcatgtatttccccactcgaagcgcttacgagctctcaggtgttgctgggaacgcggacaaagttgcagcttt

SEQ ID NO: 170804 - DNA, 447 bp, Arabidopsis thaliana
  unsure (1)..(447): unsure at all n locations
ctccctggtcctcacaacaccctatactgagtcataataacagaaggggatgactggaagaggctttactcgaacaccaaatccaacttccgtgaggttgctatcaaaggattctgggacatgtatgacccggaggggtactcactatggttctgtggctataagtacaacgatgagaacatggtctcctttgttacactcaacaaggtangagggttccttcagcgtatggacttggcacgtaaatactcctttggaaagatgcttatttgcgggtcagagggtcctttcaaggtgaagggtttatggcttttccgtggaccagagatccccaagttcataatggatgaggtgtacgacatggagctgtacgagtggactaaggttgatatctccgatgaagcacagaaggagcgtgttagccagatgattgaagacgctgaacca

SEQ ID NO: 170805 - DNA, 453 bp, Arabidopsis thaliana
  unsure (1)..(453): unsure at all n locations
ctcgcgggtccacgcaagactctatactgagtcgtaataacgacagaaggggagggttttgcaaaaccaacaccgaagatccaacacgatgggacgaagacctgcgagatgttactgtcagattaagggaaagccatacccgaaatcacgatactgtcgtggtgtgccagatcccaaaatcaggatctacgatgttggtatgaagaggaaaggtgttgatgagtttccattctgtgttcatttggtttcatgggagaaagagaatgtgtcaagtgaagcacttgaagcagcacgtattgcttgcaacaagtatatggtgaaatctgctgggaaagatgcttttcatttgaggattanggttcatcctttccatgttctcaggattaacaagatgctttcgtgtgctggagctgataggcttcagactggaatgagaagtgcttttggtaaagc

SEQ ID NO: 170806 - DNA, 445 bp, Arabidopsis thaliana
  unsure (1)..(445): unsure at all n locations
actcgttgttcgtcgcaacaccctatagtgagtcgtattacaacagaagggatgccacaactgcatcaaacgccgaagaaagcagttggggtacctattgccctggagaggaacccagtcctccaccggagtatgaaacttgtttaggtgacttgtacagtgttgcttggatggaagatagtggtatgcacaatttacagactgagactctgcaccagcaatatgaacttgtgaaaaggaggactgcacctgttgggtactcttatggttctcatgtcatgcaatatggcgatgtaggaattagcaaggataatctcgatctttatatgggaacaaaccctgccaatgacaattttacctttgcggatgcgaattcactaaagccaccttcaagagttacaaaccagcgtgatgcagatcntgttcatttttgggaaaagtaccg

SEQ ID NO: 170807 - DNA, 381 bp, Arabidopsis thaliana
tcactactaggacgcgttgtacgtcgcaacaccctatagtgagtcgtattatacagaacgggactcgcagaatatgtgttctcatctgactcctccgatctgccatgtctcggcttttccaacgctaagaagtttcacagacgcggcgaacgagggggaggaaggagatagatctctttttccgtcgcgataataataagaaataaacgtgtctataggctgtcactgaagagttgattcatacggatagaggatataagtgacagatgggatatcgagcttttggggtcctgtgacctctactatacagtgttgtgagatgcactacgcctactcatcctacattgctgagttcgacaacactatatccaatgtccctgg

SEQ ID NO: 170808 - DNA, 451 bp, Arabidopsis thaliana
tcactagtaggacgcgttgttcgtcgcaacaccctatagtgagtcgtattaatcagcttgtatagaacgctgatgaatgcatggtcctcgacaatgaagctctctacgatatctgcttccgtaccctcaaactcagcactcctagctttggggacttgaaccatttgatctccgcaacaatgagcggtgtgacttgctccttaaggttccccggacaattaaactctgacctcaggaaactcgcggtgaacctaatcccattccctcgtctccatttcttcatggtgggttttgcgcccctcacttcgcgtggctcgcaacaatacatctcactcaccgttcctgagctgactcaacaaatgtgggactccaaaaacatgatgtgtgcagctgatccacgtcacggacgttacctcacagcctctgctattttcagaggacagatgagcac

SEQ ID NO: 170809 - DNA, 451 bp, Arabidopsis thaliana
gcgtaggacgtcgcaacaccctatagtgagtcgtaataaccacagaagggcgctggagctgatgtaaccgatagtggcatgcttgcacttggtaagtcagatgttcccattacgcaactgtctctccgcggctgtaggagagtcagtgacagaggaatatcctatctgttgaacaatgaaggaacaatcagcaaaacattgtcaacacttgatctcggtcatatgccaggaatctcagacagagccatccacacaatcacacactgttgcaaggctttaacagagctgagtatcaggagttgctttcacgtaacagattcttcgatagagtccctggctacatgggaaagacaagcagagggaggaagcaaacaattgaggaagctcaatgtccataactgtgtgagcttaactactggagcactgagatggttaagcaagccgtcttttg

SEQ ID NO: 170810 - DNA, 437 bp, Arabidopsis thaliana
cgtgggtcgacgcaagactctatactgagtcgtaataacgacagaaggggacataagagggaaaaggaaaatgacttatggggaggaggagccggttagcccgatggcgcgtgtattccaatcgccgggcatagacttatgtgccgtgaccatcatgggtttcaaaacaaagattaatcccgacgttgttcttgatgccttgaagcaaaatgtctccaagcatcctcgtttctccagcatactgtccgataatggtgcaaaatggatcgagaccgaagttaatgtagaagatcatgtaattgtaccatacatagacgcggaagagataggtgaaggtggacaaagcttcatcgatgattatatgtcacgtctcacgatgattcctctcgatagatcaagaccttgtgggacattcacatccttaacgtcaaaacctc

SEQ ID NO: 170811 - DNA, 350 bp, Arabidopsis thaliana
  unsure (1)..(350): unsure at all n locations
cgtaggacgtcgcaacaccctatagtgagtcgtattaaccacagaaaggggctgtcgctcgtctacatttacactcggagcttagaccttccaatctaccggcggcgaaaatgggtttcaagaggtacgttgagatcgggagagtagcacttgtgaactacggagaagatcatggaaagctcgtcgttatcgtcgacgttgttgaccagaacagagctttggtggatgcccctgatatggagaggatccagatgaacttcaagaggttgtctcttaccgatattgtcattggcatcaaccgtgtgccanagaggaaggctttgatcgaggcaatggaaaaggctgatgtg

SEQ ID NO: 170812 - DNA, 399 bp, Arabidopsis thaliana
  unsure (1)..(399): unsure at all n locations
ggtcctaaaccagaacaatatatgatcttgaaaatatatttaaaatcttttgttttctccttgtaggctttcctgttgtgtttgtaccaagcgggaaaactggcgtttttacacccaatgataagtatgatacaaaccgtcgccttctcctctcttctctagcttctcatgttgtagctcgaggtgacttctacagtaattcacttggccaagtctatgatcgggtgtatgctttggggatgttcatctcaagttgttgaacanaggtttgctcanactgtatcgaccttgcttctaaagaggtgttagangaatgtaccaaccagacaaaaggcattgcctggcccgaaaatgggattccttgtatggtacgttactccaaccgttcgttttctggat

SEQ ID NO: 170813 - DNA, 437 bp, Arabidopsis thaliana
  unsure (1)..(437): unsure at all n locations
gactcgcgggtcgacgcacgcgtccactgtgagacgacgaaagaagggggagggtttcttactctgctgcttcttcttcttcttcagtagagcgagatcctctcgcgctctctatcgctacatataaccatgggtttatcaacgaatctccatagcctcgacctccgttcaactttcttcgccggtctacgtacatctccaatcccttccaatttcatcaaaatctcttccatttccaaccctagacgcgatatctccaccatcagagcccaagtctccaccatcagcctcgagacctccgttaaacagcgtcaagacgaaatcgaatctcttttctcgaagcaaccctctcagcaggactccgatcggaaacgaaacgggaagagttccanaaacggagcttctgggatatcttcaggtgtgaagctagagaacat

SEQ ID NO: 170814 - DNA, 451 bp, Arabidopsis thaliana
gcgggtcgacgcaagactctatactgatgcgtaataacgacagaagggggagaccaatactttcaccaaacagcaaaacaagaagaacaacaacactaagcaaaaaagaaaagctcaagccgagagagacaatggcatcaacattcacgagctcaagcagtgttcttaccccaacaacattccttggccagactaaagcctcaagctttaacccccttcgtgatgttgtctctctcggatctcccaagtacactatgggaaatgatctttggtatggacctgacagagtgaagtacttaggacccttttccgttcaaactccgtcttacctcaccggagaattccctggcgattatggttgggacaccgccggtttatccgcagaccctgaagcctttgccaaaaacagagctcttgaggtgatccatgggagatgggcaatgttgggagc

SEQ ID NO: 170815 - DNA, 445 bp, Arabidopsis thaliana
tatactgagtcgactaaagaagggggagatcgagagaagaatagtttgatcatcttgtgagaaaaataatggctgcttcagtgatgctatcttcggtgacattgaaaccagctggtttcacggtggagaagacggcggctagaggattaccgtcgctcacaagagctcgtccctccttcaaaattgtcgccagtggcgtcaagaagatcaagaccgacaagcccttcggaattaacggcagcatggacttgagggacggcgtcgacgcctccggcagaaagggcaagggatacggtgtttacaagtacgtcgacaagtatggagctaacgtcgatggatacagtcctatttacaacgagaacgagtggtcagcgagtggtgacgtgtacaagggaagagtcaccggattggcaatttgggcggtaactctcgccggaattcttgc

SEQ ID NO: 170816 - DNA, 446 bp, Arabidopsis thaliana
tcgcgggtcgacgcaagactctaaagtgagtcgtattagacagaaggggactcgccaagaagtttcctttcctttgattgcacaactaatctcaaactaaaagatcttctctttaggcatacccagatctttctctctctaaagtctccacctttcacggttttttgcttctcacctgaatccaatcaatctcgccggagtgaattcaccttcctccggttgactcgtcggacttagtccgacctttcaattcgtagattctgtttacaattcactgatcgtttgattagaaatgggttacttgttcttctaagtctctctttagctgaaagtttgttgctttacgactcttcgatttacccttacttgttcaagttcttcatcaaattcgtagttatggcgataagaatcactttcacttactccacccatgttgctcggaatct

SEQ ID NO: 170817 - DNA, 460 bp, Arabidopsis thaliana
gacgcgtaggacgtcgcaacaccctatagtgagtcgtattaaccacagaaggggacctcaaagaaaacatcgaaatcttagagaagaagaaaagaaaaagaagagaaatgacagagaagaaagagatggaagtggtgaaagggctcaacgtggagagatacatgggccgttggtacgagattgcttctttcccatcaaggtttcagccaaagaacggcgtcgacactcgcgccacctacacccttaaccccgacggtaccatacacgtcttgaacgaaacgtggagcaacgggaagaggggttttatcgaaggcaacgcctataaggccgatcctaaaagcgacgaagccaagctcaaagtcaagttctatgtccctcctttcctcgcaatcattcgcgtcaccggagactactgggtgctctacatcgatcctgactaccagcacgctctcattggcca

SEQ ID NO: 170818 - DNA, 423 bp, Arabidopsis thaliana
  unsure (1)..(423): unsure at all n locations
gtgggtcgacgcaagactctatagtgacgtcgtattaagcgtccgacagaagggggtcgtgcgatacagttctgggtttgctgaagaagactctggaaaaaagttcatccatcacaattgattcgtgttcttgaaacgaatctatcgattcaaacacatgaaacattcggtgaatcggcctccgacaccagatgaagacgatgtggcggatggtttcgagaaagacaaggtcacgcttcgagaaatcatcaacgtcaagttggtggagagtggagagaaggagaatctaatggagcttgtgagagatagattggtggagtgtggttggaaagatgagatgagaattgcttgcagggagcatgtanagaagaaaaggagaanagatgttacagtcgatgaactgattcgagtgatcactcctaa

SEQ ID NO: 170819 - DNA, 353 bp, Arabidopsis thaliana
cctatagtgagtcgtattaaacaatagggaacactacgccggagaccaataaccagactttcatcaaccagcatggtctgatacagtttgatccaatcgataacatcaacctcaggagtaccggcaccaacaacagcttcttcaccctcggattctttcacgaaaacacgacgaactcagagacgactcctccttctctatatagcaccgacgttcttgttcatcaccgtgacgaaaacttcaacgcgggttctaacgtgtcagccacggcactacttcagaaagctacacacatgggtccagtcagaagcaacgacccatccgctttgttcagacgcttagcttcttcggct

SEQ ID NO: 170820 - DNA, 461 bp, Arabidopsis thaliana
gactcgtgggtcgacgcaagactctatactgagtcgtagtagacagaagggggtacaagtggaattttgaaaaaagaagcagagagcgatggagagagtggttgatctcttcggagtcggagaagctaattcccagaagctactcgaaggaggcaaagatctcagcgagatccaacagggattgttcataggatcagtagctgaagcgaataacaaggattttctcaaaagctctaatatcactcatgtcttaaccgttgctgtggccttggctcctccttatcctgatgattttgtctacaaagtcattgaagtggttgatagatccgagaccgatttgacagtatatttcgatgagtgttatagcttcatcgaccaagctattcaatctggtggtggtgttttggttcattgcttcatgggaatgtctaggagtgtgactatagtggtggcttacctga

SEQ ID NO: 170821 - DNA, 404 bp, Arabidopsis thaliana
gtcgacgcaagactctatagtgacgtcgtagaagacagaagggggaagagatcgagagaagaatagtttgatcatcttgtgagaaaaataatggctgcttcagtgatgctatcttcggtgacattgaaaccagctggtttcacggtggagaagacggcggctagaggattaccgtcgctcacaagagctcgtccctccttcaaaattgtcgccagtggcgtcaagaagatcaagaccgacaagcccttcggaattaacggcaacatggacttgagggacggcgtcgacgcctccggcagaaagggcaagggatacggtgtttacaagtacgtcgacaagtatggagctaacgtcgatggatacagtcctatttacaacgagaacgagtggtcagcgagtggtga

SEQ ID NO: 170822 - DNA, 440 bp, Arabidopsis thaliana
cgtgggtcgacgcaagaccctatagtgagtcgtattaacgacagaaggggaccatagaaatgaatctgatcatggatctaaacatgaaaagagtaatgttacacgagcttgtgagtatttttgaagaagaaggagctcaagtaatgagtgctaatcttcagaacttgaatgataggaccacttacacaatcatagcccaggctatcattagtcggattggcattgatccatcaaggatagaagagagagtacggaaaatcatctatggatatatatattttgaagcatgaaatcccaaatgataagtctacgctaacgctagtgtgttttttcacacatgtgttagttctttaaatatgagatgagtaattgcttttgagttcgattatgataaatatgttgaccgtcaacataagaaaccttaaaacgttgtcgtttcg

SEQ ID NO: 170823 - DNA, 461 bp, Arabidopsis thaliana
ctcgtgggtcgacgcaagcctctatactgattcgaaataacgacagaagggacaaggttgttgaagtgaatcctatcagtaagaaagaaatcaaatggtctgattataagaaggtgcctattcttactgtagatggtgaacaaatggttgattcttcagtgataatcgatagcttattccaaaagatgcaccctgaaatttccaagtccgaagatgatgaagagactaaatggcgcaagtgggtggacaaccaccttgtgcatcttttgtcaccaaacatatacaggaatacttcagaggctcttgagtcctttgaatatatcaccacacatgggaatttcagtttcactgaaagattagtggcacagtatgcaggagcaacggcaatgtactttgtatcaaagaaattgaagaagacatataacattacagatgaacgtgcggctctttacgatgctgca

SEQ ID NO: 170824 - DNA, 451 bp, Arabidopsis thaliana
gcgcgggtcgacgcaacaccctatactgagtcgtaataaccacagaagggcaggaatgatgacaattaaccttgacctaaagagaggaggaaacggaaggttcttgaaaactgcggcttacggacactttggaagagacgaccctgacttcacctgggaagtcgtcaagccactcaagtgggacaaacctcaagcttaaattttacctactctgtttctgtcttcattccacaaaccaattatctgctcacttttttatttctctgtttttgtggtttattgtgtttatgtatcattgtacttgagctatttcaattgggtgtttgtttttatggcgacttttacacggcttggagtaagtttcatgttgttcttatataattataaccatgaaaaattaatataaaaaaaaaaaaaaaaaaaaaaaaaaaaaagcggccgctctacagga

SEQ ID NO: 170825 - DNA, 142 bp, Arabidopsis thaliana
gggtcgacgcaagcctctagactacatcatgggagagcaacagtcatcaaagagccaatggcttcttcaggtttcagcggcgatgaaactgcgcctttcttcggattcctcggcgccgccgctgcgctcgttttctcctgta

SEQ ID NO: 170826 - DNA, 450 bp, Arabidopsis thaliana
gcgggtcgacccaagactctatactgactcgtattagacagaaggggatcctcggtgatagcggggtgggaaaaacctctttgatgaatcagtatgttaataaaaagttcagcaaccagtacgaggcaaccattggagccgacttcttgaccaaggaagtacagtttgaagatcgacttttcactttacagatctgggatacagctggacaggaaaggtttcagagccttggtgtagccttttaccgtggtgctgattgctgtgttcttgtatatgatgtcaattccatgaaatcatttgaaaatctgaacaactggagggaagaatttctgatccaggcgagtccatcagatccagagaattttccatttgttcttatcggaaacaaggttgacgtggatgatggaaacagcagagtggtttcagagaaaaaggctaaagcttggtgtg

SEQ ID NO: 170827 - DNA, 446 bp, Arabidopsis thaliana
tcgttggtcgtcgcaacaccctatagtgagtcgtattacgacagaaggggaagtgaaagtgaagagctttttcgaagaacatttgcacactgatgaagagatccgttactgcgttgcaggaagcggttactttgatgtgagggatcgcaatgaagcttggattagagtatgggtaaagaagggaggtatgatagtcttacctgctggaatatatcatcgcttcaccgtagactcagacaactatatcaaggcaatgcggcttttcgtgggtgaaccggtctggacaccatacaatcgcccacacgaccacctccctgcaaggaaagagtacattgataatttcgtgaaggtgaatgaaggtggtgtcatagacgcgtcagcctagaggattctcagtcttatgcatcagattctcataaactaagcatacagtaaagaaagctttc

SEQ ID NO: 170828 - DNA, 325 bp, Arabidopsis thaliana
gtcgtcgcaagactctatagtgagtcgtattaaccacagaaaggggagaagatatctagagaacaatagtttgaccatcttgtgagaaaaataatggctgcatcagtgatgctatcttcggtgacattgagaccagctggtttcacggtggagaagactgcggctagaggattaccgtctctcacaagagctcgtccctccttcaaaattgtcgccagtggcgtcaagaatatcaagaccgacaagcccttcggaattaacggcaacatggacgtgagggacggcgtcgacgcctccggcagaaaaggcaagggatacggtgttt

SEQ ID NO: 170829 - DNA, 417 bp, Arabidopsis thaliana
agacgtcagcaccacgcgtccgcggaagcgtcggctacaaaaaaacgacaggtagggctactttgtttaaaggtaacgataacgctgctaaacgtcgacattctggcacttttacgtgcaacaaaccccgacttatggaagggacgcatttattagataaaaggtcgacgcgggctctgcccgttgctctgatgattcatgataactcgacggatcagcgcaacattcttttagagaccattggagataagtttgagcaatggaacctcaagattcgcaaagaaaaagctatctatcacaccttgaacatgcttagtcttgatgtgactaagaagtgccttgtgggtgaaggctggagtcctgtctttgcagcaacagaaattcaagatgcattgcatcgtgctgcggttgactcca

SEQ ID NO: 170830 - DNA, 391 bp, Arabidopsis thaliana
gaaagcaaaacacagaaaaagccattctttttgccccttgagtgctttcagctcttcccacaaggttacagaagtaatgtcacgtgtgtacgtcggaaatttggacccgcgagttactgagcgtgaacttgaggatgagttccgtgcctttggagttgtcaggagtgtttgggttgcccgtagaccacctggttacgcttttctagatttcgaagatcctagggatgcccgtgatgctatccgtgctttagatggcaagaatggctggagggttgaacagtctcacaatcgaggtgagcgtggtggcggcggtcgtggtggtgaccgtggaggtggtggcggcggccgtagtcgcactcctccaagatacagaaggagcctaagctatgga

SEQ ID NO: 170831 - DNA, 432 bp, Arabidopsis thaliana
  unsure (1)..(432): unsure at all n locations
gacagaaggggaccaaaatcagcggagcaaaagttacttccgaaaccctaaaaaaaacacgatgatgctcaagcaagctgcgaagaaggccctagggcttacgtcacgtcaatcaacaccgtggtctgttggtatcctccgaacctaccatgagaacgtcatcgaccactacgataatccccgcaacgttgggtctttcgataagaatgatcccaacgttggtacgggactcgtaggagctcccgcttgtggtgatgtgatgaagcttcaaatcaaggtcgatgagaagactggtcaaatcgttgatgctcgctttaagacttttggttgtggttcggccatcgcttcttcatctgttgccactgagtgggtgaaaggcaaagctatggaggatgttctgaccatcanaaacaccgaaatcgcanagcatct

SEQ ID NO: 170832 - DNA, 328 bp, Arabidopsis thaliana
gggccgagaaaaaaaaaaatgttgccggtcacaagtcgccgccatttcacaatgtccctatatatgctccgttcatcttctccacacatcaatcatcactctttccttcttccttcttttgtttcctccaaattcaaacaccatactttatctcctcctccttctcctcctcctcctcctcctatgggtgcgtgcatcgacacctgccgcactggtaagccccagatttctcctcacgattggtgaaggagctaagattggtgcggggtctgtggtgttgaaagagctgccgccgcgtacgacggctgttggaaatccggcgaggttg

SEQ ID NO: 170833 - DNA, 420 bp, Arabidopsis thaliana
gagagaagaagaagaagaagaagatgagtaataatactaataatacagagatgaataatctagcgatggaagaagaggatgaaggagagattttccttggtgaatccgatgttctccgtgaaatcgatgtcgacgaagaagatcttcctgaagcggatgatgatgatatggacgatgatggtgaacaatttgatgaaaacgatgactctgttcacacattcactggtcacaaaggtgagctttatgcattggcttgtagtccaacaggtggaatggacaagaagcttataatctgggatctgcagcattccactcccaggttcatctgcgagcacgaggaaggtgtgacatctctgacttggataggaacctccaagtacttagccactggctgtgccaatggtacagtgagcatttggg

SEQ ID NO: 170834 - DNA, 407 bp, Arabidopsis thaliana
gacccatttcttggcttacaacaacaaatcttaaacgttttactttgtgctgcactactcaacctcaatggccgcctcaacaatggctctctcctcccctgccttcgccggtaaggccgtcaagctttcccccgcggcatctgaagtccttggaggcggccgtgtgacaatgaggaagactgttgccaagccaaagggcccatcaggcagcccatggtacggatctgaccgtgtcaagtacttgggtccattctctggcgaatcaccgagctaccttaccggagagttccccggagactacggatgggacaccgccggactttcagctgaccccgagacattcacaaggaaccgtgaactagaagttatccacagcaggtgggccatgctcggagccctaagctgcg

SEQ ID NO: 170835 - DNA, 341 bp, Arabidopsis thaliana
ataagggggataacacatcgatagaacaacaatttgatcatcttgtgataaaactactggctgcttcaataatgctatcgtcggtaaaattcacaacaactggtttcgccgtggagaatacagccgctatcggattagcgtcgctcacaaaagtccgtccctccttcatgattctcaccattggcgtcaaatatatcaagatccactaccccttccgacttagagtcatcatcgacctgatggcacggatcaacccctccgacacaaagggctagggatactctttctacccctaccttcataagtatctagccaacgtcgactgatacagttcgatttag

SEQ ID NO: 170836 - DNA, 381 bp, Arabidopsis thaliana
cataaaaaaaaacacacaaaaaagtttcaatggacgcctcaacaatggctctcacctcacctgctttcaccggaaaggctgtgaacctttcccatgcgggatcaaaagtccttggaaccagtcgtgtgacaatgaggaacactgttgccaagccaaagggtccatcacgcagcccatggtacggatccgaccgaatcaactaattgggtccattctctggcgactcacacagctaacatagcggaaatttccctggagactacggatgggacacagctggtctatccgctgagcccgatacattcgcaaagaaccgtgagcaataacttatccacagcaagtaggacatgctcggagacctatgctgagtcttcactgatc

SEQ ID NO: 170837 - DNA, 347 bp, Arabidopsis thaliana
gtcgcaagaaaacacgagctatccgtagacgtctcaccaagcatcaggcttcgttgaagacagagcgtgagaagaagaaggagatgtatttcccagtgaggaagtacgctatcaaagtgtagtttcattctcccagctctagcttctagaaatgaatgattcagcctttgattatcggcgtatgttatctcctctctttttgtccaaccttagtaagtttagttgtactgaagttttgttatcacacaacctctctagaatcattagtagttcataaatattgaatttaagcgagatgggaggtgggaagggcaaaaagcggccgctctagaggatccaagcttagg

SEQ ID NO: 170838 - DNA, 423 bp, Arabidopsis thaliana
gaaaacgacagaaggggtggagacgcagcgaagtacgggcatgagattgtgccgttgaaaacgtcgaattcgcagctgacgctggaggatatcgccgacgcggctcagccaagtggagcatttaagtgggactctgaaaccgatttgaaggtcgacggttagttatattttatatgatcgatcgtctaatcacaaagaaagtaagggaaagaatcaaggaagtaagaataagaagataataaataaagagaataagaagaggcatttgcaactttaagaggttaaaatttcttaaatgagtctgagtttcgttgtgtgttttgggtgtaccataagaaataaaacgtacggcgttgctatgtattttgtgaagtgtgtatttctggttgaatattagtctgcgtaataaaaaaaagtatgtgt

SEQ ID NO: 170839 - DNA, 396 bp, Arabidopsis thaliana
gaaagcagatatcacacagatggctcaagcagtgacttcgatgactggcttacgttgatcatctgaggctgtccttataggagctttactgatcaacggttcagaccgtttgaagagctccacagtatccggaggctctcacctcattagactttgcatgagggtgcaacaaacagtgtcaatggcagaacctactctccggtcagtaactgtccacgtggaagctggctcacccgctggatcattcgtcaaagctgttttcgccgaagccattcgtataaaaattggtcgtccttcacttcgttacggtgaccgacctggaacagataactcagaccaagcaagagacatttcattggcattgacagatatattttacatacaaccattgttacc

SEQ ID NO: 170840 - DNA, 273 bp, Arabidopsis thaliana
ggattacgcgaaaaatcaaaggtttttggatatggcgtcgaagcggatcttgaaggaattgaaagatttccaaaaggattcaactaaaacaagttacccaaggcctggtgccgaaaacaagtttcaacggcaagcaaccaataagggtccctcaaaaaatccctaagctggaagtggtttccctggaaacaaccaattccctccggattaaccaatcaaacctcctaaagtgggccttaagaccaaagtgttccaacccaacattaacaacaa

SEQ ID NO: 170841 - DNA, 384 bp, Arabidopsis thaliana
tgatatcaaaaaaaaacaacaaaaagggaacaaaaccggcggtccaaaaggttcaaacctaccttccccgggaatgcaacgtcatgcccctccaatatggcaaccaaattccaattcacgggcctccgtttaacacctccctgacgggaaaacccctgcggtaaccaaattaaaccgcctggaacaacacccccctttcgcaaactggcgtaaaaccaataaggcccgaacgaattgccctcccaaaaatttccccatcctaaagtgccaaagggaaccgccccgttaccggaccattaacccgggtgggtttgtgggtaagccgaaccttgaccccaaaacttgcaagggccctacgatcggtcctttcggcttcctaccgtc

SEQ ID NO: 170842 - DNA, 327 bp, Arabidopsis thaliana
tggggtggcagagaggttacacatcgatggtaacatctttgcttctcagacattcctcagctgtcatcttctcacagtcttccctcctcaacattaggaaatcttttcgctcatttacatccaacacaatgggcgaaggtgaagcagagaatgcagtgaagaccaataagggggttgtctcaggagtaactgaataaatggcgatcaggattgtggagcacttgatgtctccatggctttgtcgtcatagctggggttcgtgatgtacacaaagcatgtacatctttcacaaatcacgggtcgccgcagaacattatagcaaacgtg

SEQ ID NO: 170843 - DNA, 400 bp, Arabidopsis thaliana
gcatccaaaaaaaacagaacaaaaaattatattcaagagaagaaggaaaaaatgaattgcatctccgatcaggtaaagaaactctcaagctcaacaccagaggagccagaccacaacaagccagtccaaaggaaccgaaacagcttacagaacaaccaacaacgcccaacccaaggcaaattccaagggtgtaaccgaagttgcccaaaccgcaactcctaacgaatcaaaccaactccaaaagggtaaaatccccggaacctctgctgaaaacctaaacgctgcccaaaaatacgggaagttccaataaaagaataacactggtcagtaactcgaaaagggtgagaaatatctcaacgactacgaatcctcaaaatccaacggtgctggttggcctcct

SEQ ID NO: 170844 - DNA, 389 bp, Arabidopsis thaliana
atgcgagatctgcatcaaacgccgaagaagtcaattggggtagctattgccctgcataggaacccagtcctccaccggagtatgcaacctgtataggtgacatgtacagtgttgcgtggatggaagataatgggaggcacaatttacagactgatactctgcagcagcagcatgaacttgtgaaaaggatgacagcacatggtgggtacccgtaaggctcccatgtcatgcaatatagcgatgtaagaattaccagtgacaacactcgtatggttatatgggaacaaaccctgccaatgactattttaccattgcggctgcgacttcactagatccaccttcaagagttatcaaccatcatgatgcagatcatgtacaatcttgggaac

SEQ ID NO: 170845 - DNA, 385 bp, Arabidopsis thaliana
gagacaaacaaatcgacacagacggtcacttacaaccacagatcgctatgtgagcttgagcgatcgtggcattggcaaattacgtgattcttcgtgatttctggacgagtatgtacgggatgaagacaacgatcgcaatgagggatagaagtgttgaccttgagtacatggctcaagatcgaacgaagaagagtcctttgcatctccacgttaatctgattcatacgaagattcctgttctcatccacattggatgtaccggttaacgacatctatcatccaggttcagtacattgacgatgtctggactcacaaggatcctatccttcgttctattccttacgtgaaagctcacactaggttatgggctcatttcattgacaag

SEQ ID NO: 170846 - DNA, 375 bp, Arabidopsis thaliana
gtatgcagaaggaagagaatgtagttgtaaaccatgagggtgttcgaagagatacctgttcaacgccactgaggctaaggaactcgcaaacgcagcaacaggtgagacagactcaacaaatcaaatctcaggaaccgggctatctacctcaccagatacgaacacagcgtttcagacggttaacattgatgaaactgtgtctactgagactacaacttcttacgattcaaacggtctcgataaggttggctacggccgtacctctgatgatgttctcggccatgtgaaaagatatagtacctacgatttccggcatgacactgctcagtacctccacagagcctacagatgacgaatgatcgattaatcgtcaca

SEQ ID NO: 170847 - DNA, 370 bp, Arabidopsis thaliana
atacagctgcaataagacaacaaattggtaacgttgcgaaaatccgacagttggggaatacacacagagtccattacaattaaacaagtttcagtatatatcgtataacacgagttgcacaatggctacctcaatcatgaagaacattccaatggcgatcccaactttctccatgtgtcacaagctccagctccttaaagaatgcaaaactcgctacctccccaacaccgattaaaattaaaggctaatctgcgaattcacaaagagtttcgattctcttcctaaagatataggatcgaaaactcgttaacattacctattccaagggttttggcgccatgccaatgatattcaaaccatcatgtctttc

SEQ ID NO: 170848 - DNA, 443 bp, Arabidopsis thaliana
agatgagttatcttctgaagacgttaacgacgaaggaagagattgatcgggttatcagagacaccattgatgaagttcttgttttacgatttggtcgttcctccgacgccgtttgtcttcagcatgatgaaatccttgcgaaatcggtgagagatgtttcgaaatttgctaaggtagctttggttgatgttgattcagaggatgttcaagtgtatgtgaagtattttgatatcacgttgtttccttcgacgatcttcttcttcaatgcgcatcatatgaaattggattctggaactgcggatcatactaaatgggttggtgcatttcatataaaacaagactttattgatgttgttgaggctatatatcgaggagcaatgaaagggaagatgattgttcaatgtccaataccgccagagaggataccaaagtaccagctcgtg

SEQ ID NO: 170849 - DNA, 351 bp, Arabidopsis thaliana
cggacgcgtgggtgacattgaaaccagctggtttcacggtggagaagacggcggctagaggattaccgtcgctcacaagagctcgtccctccttcaaaattgtcgccagtggcgtcaagaagatcaagaccgacaggcccttcggaattaacggcagcatggacttgagggacggcgtcgacgcctccggcagaaagggcaacggatacggtgtttacaagtacgtcgacaggtatggagctaacgtcgatggatacagtcctatttacaacgagaacgagtggtcagcgagtggtgacgtgtacaagggaagagtcaccggattggcaatttgggcggtaactctcgccg

SEQ ID NO: 170850 - DNA, 243 bp, Arabidopsis thaliana
caccagtgacactaatctcacttcttgtcctttccagtagcttcctctcgtcgctcttcgtcatcctctcgaactctctcgctgatctcggttatctcgcggagaatccatatgagcactgctaggttagttactcgttcgccctttacgaaaccacatgtgtccgccgtcacttaggaggtcctggacagtatcagatctcatgatcacgatgggatcgttgttcatgcttgagcatactgt

SEQ ID NO: 170851 - DNA, 287 bp, Arabidopsis thaliana
ggaagacatcgagagaagtatagtttgatcatcttgcgcgaaacataatggtcgcttcagtgatgctgtcttcggtgacattgaagccaactggtttcacggtggagaagaatgccgctcgagggatacagtcgctcacatgagcgcgtatctccttcaaaaatgtcgccagtggcgtcaacacgatcaagatcgaccagcccttcggtcttagcggcaccacggccttgatggacggagtcgacgcctcaggcagtctaggcacaggataccgtcttcacaactat

SEQ ID NO: 170852 - DNA, 343 bp, Arabidopsis thaliana
ggatcttttgatccattcacaaggcagtgatccactggacaatcacaacggcaacatccagcatccagcactcaagtccgtctatcgacctgggtccaccgtcagaagcgtaatcgctcctccatgatctggatctgcatcaatattcaccggatgaggaccgacatagtaccacctcctccagcagcaacatcagcagcttcatctgttctggacagaccacagacaagagatcgaacaggtaaacgatttcaagaaccatcagctctctctaggtcgtatcaggaaaatcatgacagctgatgaagatgtgcgtacgatctccgctgaagcaccggttctc

SEQ ID NO: 170853 - DNA, 281 bp, Arabidopsis thaliana
gacagaagggggagaagagatcgagagaagaatagtttgatcatcttgtgagagaaataatggctgcttcagtgatgctatcttcagtgacattgaaaccagctggtttcacggtggagaacacggcggctataggattaccgtcgctcacaaaagctcgtccctccttcaatattgtcgccagtggcgtcaataaaatcaagaccgacaagcgcttcggcattaactgcagcctggacttcagggaccgtgtctacgcctccggcagaaaaggcatcgga

SEQ ID NO: 170854 - DNA, 445 bp, Arabidopsis thaliana
gaagacgacagaagggtccagaataagtacagaaattgtaatctttgtcaaattttgtttattttgagtttcttagtgaactcagttggataacagtgacacatatgagatttgagatgaatttattttctggtaaatgcatagagattattaatgtttcttactgatttgagaattgcaaggcattgtcctttgagtttggtgttaaagttagcaaattggtgactatctctattgagtttacatgttttcttggttgttattgtgaggatttaagatttgcctgcttttgtatttctctttggtcttgtaatgtcagaattgtttctttcttaaagttgatttctttgtcaatctttaaacagagatcgaggtgtttttgacgcaatagaagatcgttctgcgtgttattatccaagaactgctttagtgttataaacatttg

SEQ ID NO: 170855 - DNA, 374 bp, Arabidopsis thaliana
gaaacgatcaacgaagtagacgaagacgatgcataaatgtggattcagcaatattctcaaacacgcaattccggttgcaggcgaccaatccaacaacatattcctgactcatcgcggtaagtttaaagatggagatctacgtgttaacaaggacagacttcgaatgatttctcaattggagcttgaattcctgtctcaaattaatccatctgatgatcagcttaacttgtcggatttggataaggttactgtcaatcgcagatgaaatactagtgttgttcatctggttcatcacaaatggagtgcgcaatttttcgccttgaacgtcattcagcttaatattgatcaagcaattcgcaaggcaatttcacatc

SEQ ID NO: 170856 - DNA, 310 bp, Arabidopsis thaliana
agcgtcggactccaggtcgaccacgcgtccggaagacgacagaaggggagacgtcgaagatgaagttcaacgttgcgaatccaactactggatgccagaagaagctcgagatcgacgatggccagaaactacgtgcgttttacgaccagagaatctctcaagaagtcagtggagatgctttgggcgaggagttcagaggatacgttttcaagatcaagggtggttgcgataagcaaggtttcccaatgaagcagggagttttgactccaggccgtgttcgctttctgcttcatcgaggaactccttgcct

SEQ ID NO: 170857 - DNA, 420 bp, Arabidopsis thaliana
gatccgaggttgatggctcgggttcaagagctattgagtgagctaaagccacaggaagaagaagcagcggcttctgtgtctgtggaatgtgaagttggtatagatgagatagcggttgtcgaaggacttgatgagtttgtgaaggaatggaggaggccttataggacaagaagacttccgattttcgaagagatcttaccactgagagatcaattggcttgttgatgattctctgtgtgtttggattgatgtttgaatactgaataggaacctttttgggtagaagaatgtagtgagtgaatagagtttacctcttgtaagctttttcgggtgtcgttgtctgttattactgtaatgtcaaatgatctcattccaaaaaaaaaaaaaaaaaaaaaaaaaaaaagcggccgctctagagga

SEQ ID NO: 170858 - DNA, 123 bp, Arabidopsis thaliana
gctcaacgtggagagatacatgggccgttggtacgagattgcttctttcccatcaaggtttcagccatagaacggcgtcgacactcgcgccatctacacccttaaccccgacggtaccataca

SEQ ID NO: 170859 - DNA, 422 bp, Arabidopsis thaliana
actcctacatgcagatgtaagggggaggctaaggaatagagagttactgtctgagcatcatagcttcaacgacgtttcaactgtcgtcaaatggccgtctatttcgctcccttaacttaactcaactcaatggcaagctacctctcaccatcaactcgttttcctccaagattcaatctcatgctcgctgaggagttggtatacactagtcagatactacaaatccactgtcgctaggagccagacaacgactcatagaaaattctaagagtcacctgcttcatgtagttctggtcactcttcagactcctgcgaatacaagttgcaatgcacgatcatgtgatgcatcacctgttgatctgcacatagtcaggcaattaggtattcacgtcgatgacgccacagttaacctagctggtttg

SEQ ID NO: 170860 - DNA, 408 bp, Arabidopsis thaliana
ggcagccatgactacagatgggggagaacaaatcgagggaagatgagttatatcaccatgtgacaaaaacatgggctgcatcagtgatactaccttcggtgatattgacaccatctggcttcacggtggagaataccgcagctaaacgattaccgtctctcagaagagctcgaccatccttcaaaattgtcgccagtggcatcaagaacatcaagaccgacaagcccttcgggattgaaggcatcaaggacttgaggggacgactcggaccctccggcatacacggcaaaggatacagtgttcaccagttcgtatacaagtattgatctaaactcaacagacacagtcctacttacaacgacttacgagtggtcagctactggtcacctgtacaagggacgagtcacc

SEQ ID NO: 170861 - DNA, 387 bp, Arabidopsis thaliana
  unsure (1)..(387): unsure at all n locations
cgacagatcggggaagagatcgggagaagaatagtttgatcatcttgtgagaaaaataatggctgcttcagtgatgctatcttcggtgacattgaaaccagctggtttcacggtggagaagacggcggctagaggattaccgtcgctcacaagagctcgtcnctccttcaaaattgtcgccagtggcgtcaagaagatcaagnacgacaagcccttccggaattaacggcagcaatgacttaagggacggcgtcaacccttccggaaaaaagggcaaggaatacgttttcaaaaattacttcaacaattatgaacctaccttcaatgaaacaattctaatttccaccaaaaccaattgtccaccggttgttacctgttcaagggaag

SEQ ID NO: 170862 - DNA, 399 bp, Arabidopsis thaliana
tcggaattcagggtcgaccacgcgtccgcccacgcgtcggcccacgcgtccgccaacgccttccgttacggcttgcgagaaagacgaacaagaaggggtttcacacgagaatttgaaaaccggaaaaacattcttatggccacaatgtcttcttcgtctcctatcaaattggctgattttggactggcaacctatataaagcctggcgaaaagctgagcggaacagttggtagtccgttttatatagccccggaagtgttagcagggggatataaccaagctgctgatggctgccgatttgagattttctgcagagccatgggacaatataacttcatacgccaaggatttgattcgcgggatgctttgtgtggatccttccaaaggttatcagctgac

SEQ ID NO: 170863 - DNA, 424 bp, Arabidopsis thaliana
cgaaagcatgggaaccaaacacatcgagaaagacgaacacttacacagtaaatctctttgtgagctttagcgatcatgacaatgggaaacgaagtgattcatcttgatttctggcggagtatgttcgggatgaggacaaggatcacattgagggagaaaggtgttgagtttgactacacagaagaagatctaacgaacaagaggcctttgcttctccagatgaatccgattcacaagaagattcctgttctcatccacaatggtaaaccggttaacgaatctatcatccaggttcagtacattgacgacgtctggtctcagattaaccctatccttccttctgatccgtacctgagagctcaagctatgttccgggccgagttcagtgacaataccctgtaagatgctcacaagaaggtgtggg

SEQ ID NO: 170864 - DNA, 191 bp, Arabidopsis thaliana
gacaacaacgataacgatatttatcattagagtctgatttgagctaagttctctcatcataaggtctcgttggaaaatcatggcaatttgatatagctcttatagcatcacatctcggaactgttcctattctacgacacgtcgatacggatgctcaaagactcccgaaagatacagctgtaagcagacaa

SEQ ID NO: 170865 - DNA, 397 bp, Arabidopsis thaliana
acaacacatcagtagggctatcaaaggattaaattgtggtacggctacgaaaagaccaaacagggctacggctgcgagaaaacaacagggagttagtgctcgaagaatacaagagagagggtttagcatgccacactaccacataacggataagcttcaaggtcagcaattacgtcgatgtcaaagtgaatggtgcgatccacaagggtatgccgcagaacttctagatccgtcctaatgtacgctatcagtaaatctctaaactcttcgtcggtgttgatatcttcaattaacttgccatcatgataaaacggaataagagtcatatgcctgtcgtgcatctgcatcatccactatctgcagatgactttatcctcagcaagcataataacgatga

SEQ ID NO: 170866 - DNA, 245 bp, Arabidopsis thaliana
tgaaaacgtatttgaggaagaacccgatggcgaagacgatatgggaactagttaagtccgtggacaacgaacagatctcttaccaccacctctttttcaggacatttaacgtcgatggttatggaattgaatccctggcgagttttttcatggattatggatataaagttggctgcagacttgattttccaaagaagaaagtacaagttctctggctttctcctccggatgttcacttccccgat

SEQ ID NO: 170867 - DNA, 282 bp, Arabidopsis thaliana
gacagctgatatctttagattagtgccatttgcaatgttcatccttgtgccgtttatggagtttttgctcccagttttcttgaagctcatccctaatatgttagcatcaactttccaggacaagatgaaagaagaggaagctttgagaatgaaattacttgccaagataaaatatgctaagtttcgtcaggaaagcgccgcgccttgggcgttttggcatccgcatcttcggtgtgtaaagagcgcgaagaattcctgagaatggtcaagaaagaggtggag

SEQ ID NO: 170868 - DNA, 281 bp, Arabidopsis thaliana
taaattcagatgtcgttatgattactactgggcttctgtcttcaaggtagagtagatagataacttaatgggtcaaacacggttagcgttttcagaaggctcaaatgaagctctttctcctgagtgcagacctaactttggtgctgcattacctaccacagatcacttcaaggttaattagacgtacgattgctggtacagattagggattccaaagacgaagctttatcgggacagcattttcggtctccaagcagatgatccttccttcactgacagtg

SEQ ID NO: 170869 - DNA, 418 bp, Arabidopsis thaliana
acatcagtacggctacgagaaatcgacagaagggtacattggtcatcatgtgacaaaaaggtgggtgcttcaatgatgatatcttcggtgggattggagccagctggtttccggttcgaggggaccgctgctagaggattaccgtcgctcacaccagctcatccatccttaaatattgtcgcaagtgacgtcaagaatcttatgacctacaagcccttctgaattaactgcagcatggtcttgagggacggcttcgacacctccggcagaaagggcaagggatacggtgtttacaagtacgtcgacaagtatggagctaacgtcgatggatacactcctatttataacgatcaacgagtagtcagcgagtggtgacgtgtacaacggatgagtcaccggattggcaatttgggcggta

SEQ ID NO: 170870 - DNA, 298 bp, Arabidopsis thaliana
ggaagatatcgacgagaagatatatgtttgatccatcgttgtgacgaaatgataatcggctgccatctagtgactgctattcttcggtgacattgacaccagctggtttcacggtggatacgactgctgctaaaggattatcgttcctcacatgacctcgtccctccatcaatgtcgtcactagtgtcatcatgatgatcaccaacgaccagttcttcagtaacggcagcatcgtctagctgaacgacgtcgtcgcctccggcataaaaggcaagggatacagtgtttacaactacgt

SEQ ID NO: 170871 - DNA, 252 bp, Arabidopsis thaliana
cccgggtcgacacacgtatctgaagggctgacgagacgacgaaaggcggccaagaaagggccatttgtccgaccatttttaaccgccgacttggtatcatcaaatcgaggagattccaagaagcatggtgggatttaagaacagatacatgttaatggaagtttttctggatccggacaaggatcttctcggagaaggagcaccgatcattcttacacaattcaatctctcgaaagcattcaaagacagtat

SEQ ID NO: 170872 - DNA, 364 bp, Arabidopsis thaliana
cccacgcgtccgaaacatgatcacacggcgcataaccagtcggcgaaagcccacaagaacggaatcaagaagccaaggagacaccgtcacaccccaaccagaggaatggaccctaagttcctgaggaaccagaggtacgcaaggaagcacaacgtcaaggccggcgagaatgctagcgctgaagaataagtgttttgattatctgtgagacattttgaagtttttttttaatgaatttaagactttcttagacaaaggaaccaatttactttgcgcttttgatcatgtttacgcaattgtggtttgtgtactctcttatcctggccttaatttaatatcagcagttttctatgcatcttctctt

SEQ ID NO: 170873 - DNA, 384 bp, Arabidopsis thaliana
gcgtccgtccaagagtcagtaaggctgcgaaaggtagagcggctggggcaatagtcccagatacgggagcgacattatcatggttaggaacagctcacatggcgggacaccaaggcgatctcagtgaatggctacttgtaatacatacttcacccactgccgcaagtgctgacacatctacacctcaaaacacaccggtcttacaacctatccacggccgtgaaaatccagtcactcaagtcgacgatgaagattctgtcgtcccctctaccgtgaatctttgcgcttccgtggctagtgattgaaactagcatgagacggatggatcttgatgacaatgtggatccttaatgtccttattggggtggatacattccaatttac

SEQ ID NO: 170874 - DNA, 290 bp, Arabidopsis thaliana
gagagagaaaaaactctctctccctcctccgttcaccgtcgcgactcggctcgatagtacattttgttgaccaatctcgtatttagaagatcccaatgtctggcacataggataatatatcttcccatgctcatctttcgtcccaaatttttcatgatcttgttgattcagtgatacctgatgtagcatatgagtgtcatccgatatcacgactaagacatgatcgtgatttggatatactatcagaacagttgagattgtcaatgggagcgcgtgagtagatcgctgat

SEQ ID NO: 170875 - DNA, 368 bp, Arabidopsis thaliana
cgtacagatgcaagacgacagacaaggggagagagagatcgtgataagattagcttgatcatcttgtgagagagatatcggctgcgtcagtgatgctatcatcggtgacattgagaccaactggtttcacggtggacaagacaggggctacatgattaacgtcacccagaagagctcgtcccaccttcacaattgtcgtcagtggcgtcaagaccatcaagaccgtcaagcccatcggtattaacggcatcatggacttgatggacggcgtcgacacctccggcagaaaaggcaatggatactgtgtttacaagtacgtcgacacgtatggagctaacttccatggatacagtcctaattacaactag

SEQ ID NO: 170876 - DNA, 224 bp, Arabidopsis thaliana
gacacaacacatacatctatacattgtaaacattatagtactaatcatcaatcgtctgtgctaattcctcctcctcttccatcaaaatcctgatggactcaagaaaaaacttgggcatagcagcgtttcgacagccacaagagatatgtgggatcgtcttttcaatgacggatacagagctgatgtagtcatctatacagataatggcagtatcatctatgctc

SEQ ID NO: 170877 - DNA, 172 bp, Arabidopsis thaliana
atttgaagtttggttatggaagtttatctctttgtctcaaaaaggtgcaacaaacggaatcggttatgcaatagtaaaaaaaattaaataagtgggcgctctagaggatcaaagcttacgtaagcatgcatgcgacgtaataactcttcaatagtgtcacctaatttcaatt

SEQ ID NO: 170878 - DNA, 406 bp, Arabidopsis thaliana
acaaaaaaaaaaaaaaaaaaaaaaaaaaaaaaaaaaaaaaaaaaaaaaaaaaaaaaaaaaaaaaaaaaaaaaaaaaaaaaaaaaataaaaaagataaaataaaaaaaaaaaaaaaaaaaggggccgctcaaagggtttcaattttaattgctcttttcatgcgacttcatacctcttcaaaattgtcacctaatttcatttcactggccttctttttaaaacttcttaattggaaaaaccttggctttacccaatttatcccccttgaagaatatccccttttcgccatttgggttaataccaaggaggcccgcaccgtttcccctttccaacttttcccaacctgaatgggaaatggaaccccccctgtaccggccaataaagcccgggggttttgggggttacc

SEQ ID NO: 170879 - DNA, 205 bp, Arabidopsis thaliana
ggactccgtagctagtgttttagtttccgtctctgtttggagattgtgtagaatgttttagtgttattattaaacaagtcatttgaaagatttttggattcatactgagaagacccaaactatgttgcaagctctacttaccagaatgtttaagaatattgagtttgacaaaaaaagataaggaaacgaacaaaaaaagcgggcg

SEQ ID NO: 170880 - DNA, 363 bp, Arabidopsis thaliana
cagcgcggaaacgagatccaaataatgtagtttgatcaacgtgatgatgactgatactggctgcgtcagtgatgctatcttccatgacattgcgaccaacgggatgcacagtatataagacggcagtgagacgactaccgtcactcaaaatatcacttcacgccttcagaattgtcgccagtggcttccaggttatgaacatcgagtagcccttcggtattaaccgcaacctggacttataggacggcttccacaccacctgtacacaagtcatgggatacatcgtctaaacgtagttccacttgtacgaaactaagctcgattgacagagtcctatttagatcgaaaacgactgttcaccga

SEQ ID NO: 170881 - DNA, 263 bp, Arabidopsis thaliana
gatgagaacgtcagtgcagttggacacgactggggaactcgcatggccttttcatggtgcctattcagaacagactgattccgagtccacgcggtgttccatggttggttcatcaagctgtaacagaatgcatcagtgtagccgtttgcagtacttcatatgagaacgcggtatcagcgatactttcatgcgtgcttggaacagagctagcatagagaatcaagatattcgcaggagacgtagtccccaagagctgccggaat

SEQ ID NO: 170882 - DNA, 409 bp, Arabidopsis thaliana
gttcctgaacaggaggtgccaaaggtagcaacagaggaatcatcggcagaggttacagatcgtggattgttcgatttcttgggaaagaagaaagacgaaacaaaaccagaggagactccgagcgcttcagagtttgagcagaaggttcatatttcagagccggagccagaggttaaacacgaaagtcttctcttttctctccgctctaatcatttctaaatctcagatctctgattccgttaacggggtcgttttccctgttgttaaagaccttccaaccggtcaatacctcgcacagattcgactcggtgactcaccggatccagtcaagctcgtagtcgatctggccggctcaattctctggtgtgattgttcctcaacgcaagttccctcgtcaaggaaactaata

SEQ ID NO: 170883 - DNA, 406 bp, Arabidopsis thaliana
ggatgaaagatcaatttttggcaattagtggtgaagatttgaatcagagatgggtttttcttctttcatttctcagcctttgtcttcatctctctcggtgatgaaacgcaacgtttctgctaaaagatcggaactttgtcttgattcttcaaagattagattagatcatcgttggagcttcattggaggatcaagaatctctgttcagtccaattcttacaccgtagttcacaagaaattctccggtgtacgagcttcataatctcttatatgttcatgttgtagggttaactactactcagattgcaagcagtgtatttgcggttggaactaccgcggttttacccttctatactctaatggttgtagcaccaaaagctgaaattaccaagaagtgtatggagag

SEQ ID NO: 170884 - DNA, 426 bp, Arabidopsis thaliana
cggtccggtgatccggggagcgaccgaacggaatcttagagaagaagagaagaaaaagaggagaaatgacagagaagaaagagatggaagtggtgaaacggctcaacgtggagagatacatgggccgttggtacgagattgcgtccttcccatcaaggtttcagccaaagaacggcgtcgacgctcgcgccaccgatacacttatccccgaccgtaccagacacgtcatgaatcatccgtggagcaccgggaataggggttttatccatcgcagcacctagtcggccgatgctaaacgctaccattccccactcaaagtcccgttctacatctctcccttcctccaactcattcacgtcaccggagactcccgggtgttccccatccatccagatgaccagcatgctctcataggccaaccctccc

SEQ ID NO: 170885 - DNA, 410 bp, Arabidopsis thaliana
ggagaagagatcgatagaagaacagtttgatcaacctgtcagaaacatactggatgcctcactgacgctatcttctgtgacattgaacccagctggtttcacagtggaatacatcgcagccacaggattagcttcgctcacaagagcgcgtccctccttcgggattgtcaccactgagcatcaagagcatcaagaccgacagagcctttcggtaaaaacggcaccaatgacttcatggacggcgtcaactcctccggcagaaagggcaagggtatccgttgtgtaccttacgtcgaccagtatggtcctgacctcgatggaaacaatcctatttactccgagaactagtggtcagctgagtggtcacgtgtacaatggacgagtcaccgtattggcaatgtgagccgtaa

SEQ ID NO: 170886 - DNA, 413 bp, Arabidopsis thaliana
gaacagaacaagaaaactaacatttaggattgttgttcagctcgctcttgatctcgctagagggttgagttaccttcattcgcagaagattgttcaccgagatgtaaagacagagaatatgttgttagacaaaacccggattgttaaaatcgcagattttggagttgcgagagttgaagcatctaaccctaatgacatgacaggagagactggcacacttggctacatggcgcctgaggttctcaatggaaacccgtataatcgaaaatgcgatgtatacagtttcgggatctgcttatgggagatatattgctgtgacatgccataccctgaccttactttctctgaggtcacttcagccgtcgtccgccataacctgagacccgatataccgacgtgttgctcgagcgcac

SEQ ID NO: 170887 - DNA, 362 bp, Arabidopsis thaliana
ggaacaaaaacaacatctgaaaaaaatcatgaatccagcagattccgatcatccacagcttccaaacatcaagatccatcaccctccatctccacgtcactctcaccatcaccactcctcttcggtgccgattggggacctctccctctgaaaactcaaattgaagatccaaacgctcaacctcaacctagtcaagaggattttgatgcttttacttcaacaaaagttgcggatctagctaaaccgttgaaggagttagggtttccttataagatccatatagtgaaagatcatgatatgagagagagattatgtcctgagattgagaaggttggtcgtagtgctgtgattatgggaagtag

SEQ ID NO: 170888 - DNA, 354 bp, Arabidopsis thaliana
gttctataaaaaaaaaaaaaaaaaaaaaaaaaaaaaaaaaaaaaaaaaaaaaaaaaaaaaaaaaaaaaaaccagaaaaaaaaaaaaaaaccaaaaaaaaaaaaaaaaaaaaaaatacaaaaaaaaaacaaaaaaaaaaaaaggggccgcccaaaaggttccacgcttacttacccgtgcatgcaacttcaaaactcttcaaaagtgtcaccaaatttcatttcaggggccttcttttaaaaccttcttacttggaaaaaccctgggtttacccaatttaacccctttgcaaaaaaaccccctttcccaagcgggggtaataccaaaaaggccccacactttccccttccaaaaa

SEQ ID NO: 170889 - DNA, 392 bp, Arabidopsis thaliana
atatcacttgaaatgtctacatgctcacaatataaaaggtgttccgaaatctgaatggcattgctcaagatgtgtgcaattatacaatggcaagtcttttcctcctaaatacggccgtgtcatgagaagcgccactacagcaaaaatgtcttctagtacagccgaagttcaattacccgcagagaagggggttggtaaaatggatcaaaaggttagtcaagagggaatgccacatctcgagacagcaaaaccaactaaggattcagctatggaacaaacagttgaagctgaagatgtagctatgaatccaatagttgaaaaagctatgagtgaaatggtggaagctgaaggtgcagctattaatccaatagttgaaactgaaaatggggctc

SEQ ID NO: 170890 - DNA, 218 bp, Arabidopsis thaliana
agctctgcatccgccatgaaagctgttggatttttgcttctgcttaccattctaacattagcttatgcgaagaagtcaggtgatgtgacagagttgcagattggtgttaagtacaagcctcagaaatgtgatctccaggctcacaaaggggataagatcacggttcactatcggggaaagttaactgatggaactgtctttgattcaagttttgagag

SEQ ID NO: 170891 - DNA, 427 bp, Arabidopsis thaliana
cccacgcgtccgcggacgcgtgggcggacgcgtgggaagacgagagaagggggaagaagcagagattcaaacattcctctgcagattagtgaaagcaaatcggaagaagcagcgaatcagcttcagatgggagattcaacatttctcgatagaatgcttctccagcttcgctccacttgcaagtattacagcggttaccctaaggatctcgggccatcgcgggttctccattttacatcagaaagagagtttgtccaactccttcaccagggctatcctgtggttgtcgcattcaccataaggagtaactacacacaacatcttgaccggatgcttgaggaagctgctgctgagttctatcccaacataaaatttatgcgtgttgagtgttcaagttatccggattctgcatgactcgccagaaaaa

SEQ ID NO: 170892 - DNA, 250 bp, Arabidopsis thaliana
ctcgcgggtccacgcaagcgtctatactgagtcgaaataacgacagaagggggagaagagatcgagagatgaatagtttgatcatcttgtgagaagaatagtggccgcttcagtgatgctagcctcggtgacattgaaaccagctcgtttcacggtggacactatcgcggctagaggactacacgtcgctcacaagacctcgtcgctccttcaagactctcgtcactggcgtctggaagattgacaccca

SEQ ID NO: 170893 - DNA, 386 bp, Arabidopsis thaliana
ccttcgaaagcgcctttctgatttctccgacagcgtactccatgattgattggttgttttcaggtatctgatctctcttttatttcctccttcagcttctcatccattacaaaagaccagcatgtcgaagatcacttaagaaagaaaacgaagactaatggctttgagaaaagtcttgatcaaggtccagttttggatgagaagctgaaggaggaaataaaagagagatcagatgcaaacaaagatcacgcagccaatcacgccgagccggaagcaaagtcagatgataaaaccactgtttgtcaagagaaggcagtaggaaccctggagagcgaagaacaaaaacccaagacagagcctgcccaaagctaagcattcagtgttgt

SEQ ID NO: 170894 - DNA, 451 bp, Arabidopsis thaliana
gtacggtcgaaaaatccgggtcgaccacggcgcgagaagacgacaggaggggaaagcagataagaaaaaaatggatcaagcaatgactcgatggctggcttacgtggagcatctcaggctgtccttgaaggaagtttacagatcaacggctcaaaccgtttgaacatctcaagagtctcggttgggtctcagagaaccggacttgtgatcagggctcagcagaacgtgtcagtaccagaaagtagtcgccggtcagtgattggactcgtggcggctggtttagccggtggttcattcgttaaagctgttttcgccgaagctattccgatcaaagttggtggtcctccacttccttccggtggcctacctggaacagataactcagaccaagcaagagacttttcattggcattgacagatagattttacatacaaccattgtcaccaacag

SEQ ID NO: 170895 - DNA, 184 bp, Arabidopsis thaliana
cgggagactggaatcactcgagtaaagtgttcgtagctgagaaaaaccctaagctctcgtttttcgtcctctccgattcagcaactctcagtcgatcaggtcagcctccagatctcaagaagtacatggactagaaactcgatattaagcttaatgccaacagaatggttgttggaacgctccg

SEQ ID NO: 170896 - DNA, 296 bp, Arabidopsis thaliana
ggagacaaaaacacacacgacgaagaaatctccgggcggtcgaagaagatgaaatcgttcaaggaacaatacacgttggatgaaaggctcgcggagtcgcgggagataatcgctaagtaccctactcggattccagtaattgctgagaagtattgcaaaatggatctgcctgccgtcgagaaaaagaatattaaatgtaccttttggacctgaatgacaatttgagaataaaaaaaacaaaaaaaaaaaaaaaaaaaaaaaaaagaaaaaaaacaaaaggataaaaacgaaaagaa

SEQ ID NO: 170897 - DNA, 377 bp, Arabidopsis thaliana
ggagaagaaaaaggcgaaaacctcgccaatccgattacgcgaaaaatcaaagaatctttgtttgatttttgatttttaggtttttggatatggcgtcgaagcggatcttgaaggaattgaaggatctccagaaggatccacctacatcatgtagcgcaggtcctgttgctgaagacatgtttcactggcaggcaacgataatgggtccttcagagagtccttatgctggaggtgttttccttgtaaccatccatttccctccggattacccattcaagcctcctaaggtggcctttaggaccaaggtgttccatcccaacattaacagcaacggtagcatttgcctcgacatcttgaaggaccaatggggtcctgcg

SEQ ID NO: 170898 - DNA, 247 bp, Arabidopsis thaliana
caggcgtcagaccacgcgtccgtgggcaagaacaagactgaaagggcactcatcaagtcatcacatatcactcacacacacactttctcgtctcgtattttctcacttcttttagctcttttctctacatatattcacatggttaccatctaggttcaacaagtgtctccagtaacagtcgagaacatcgaggtgccaccaccaaatgctgtgtagtcggaggaagtcacgaacgtctccgagtctc

SEQ ID NO: 170899 - DNA, 264 bp, Arabidopsis thaliana
ggcctgagaaaattttgcacccttttgcttcaatttgttgtttccttaaaaccttcaaagcaaaattagggtctctcatggttttcgcacattagggactttttctctcgttctcatgaaaagatgagtttgatgtccaaatccttggtaaaaattgaatgttcaccatttttgtatccaagagcttcagaatgcactaccggaaaacggataacctctccgcatatccgtttatacagggcggaggccgtcagcgggaaaact

SEQ ID NO: 170900 - DNA, 283 bp, Arabidopsis thaliana
gacccatttcttggcttacaacaacaaatcttaaacgctttactttgtgctgcactactcaacctcaatggccgcctcaacaatggctctctcctcccctgccttcgccggtaaggccgtcaagctttcccccgcggcatctgaagtccttggaagcggccgtgtgacaatgaggaagactgttgccaagccaaagggcccatcaggcagcccatggtacggatctgaccgtgtcaagtacttgggtccattctctggcgaatcaccgaactaccttaccgga

SEQ ID NO: 170901 - DNA, 304 bp, Arabidopsis thaliana
agggatgcactgaaagagtgtacagcagttgtctctactgtatgcttatggttaggtgcaactatggatgcgtttcttcttgcttctggttcatcagggaaacggtattgtatgcctaactctagaattataatacatcagccaattggtactgctggatgcagagcagcgtaaatgagcatacgtataacagaaattgtgtaccacacgattaaacttatcatcatcgtcgctataatcactgtgaagcctgaatcagacatcgatagtgacacagaccgtgataacttcatggatccatggg

SEQ ID NO: 170902 - DNA, 300 bp, Arabidopsis thaliana
gacacatttcgtggcatacaacaggatatcttaaacattttactttgtgctgcactactcaacctcacaggccgcctcagcatggggtctctccacccctgcattcgccggtaaagccgtcaagctttcccacgcgggatctgaagtccctggaagctgtcgtgtgacaatgtagaagacagttgacaggccagatggccgatcatgcaacccatggtacggatctgaacgtgtcaagtacttggatccaatctcaggcgaaacatcgagctaccttaccggccagttcccccgtcacta

SEQ ID NO: 170903 - DNA, 269 bp, Arabidopsis thaliana
gtgtgtgtgtagtcacgttgtgtattgcatgatatgttgatgcgtgtaaccaaacaattagttgctctacgaatccaaaattgaggaaaaaaaaggagacaaaaaagatcaaaaaagaggtagtcctaaaggatacaagcttacataagtatgcaggcaacgaaatacaactccgagggggtcacctaagatcattgcacggggggtcattttgcaatgacgtgactgagaaaacctggaagagacccaccttaatcgcgctggagaaa

SEQ ID NO: 170904 - DNA, 328 bp, Arabidopsis thaliana
cggtcacgtgggcggacgcgtggggacaacagaacggggacagaatgagacagatggctgacgcagcgataagacaaggtggtgggagaccattaccgccacttccgagaggcgttaagcaacaacctcctcgccctaaacctgaacctgtcaatcgtgaaaagacgtgtccccttcttcgtcgtgttttcaccaggagtggtggtcatcatactactgaacattatgctgtgagaggcatcgaaccacacgatgaagttcacatctacacttggcaagatgccagtcttcgcgagctaacagctttgggtaaagaagtttctgtagc

SEQ ID NO: 170905 - DNA, 198 bp, Arabidopsis thaliana
cccacacgtccgaagatgacagaactaaaacaaaccattgcgattatcgagaagctcagcaattttccagatttctctaattgaccagggcactttgtgctactactcacaggagtatccgtatggcggagacgctccggcgtgttgctcgaacgttcactactgacgccgtggttgagtctgagtaaaagcgtggtg

SEQ ID NO: 170906 - DNA, 267 bp, Arabidopsis thaliana
ccgagacgacagaacggggctgtgataaagttctctcctttcctttctaatcgaagaataaacgctttatctctcaaaaccctcatccacaaaatcccctttaaaccgctaatcatagggttttcctgtttatgtgttgcttcgctactatggttacatttttctcttcccattttgatttcacttaaccctcgtgataccttaagaagaggcaatttgtcgtttactacagaaatacgtctaagctcttgttatacaatagtggat

SEQ ID NO: 170907 - DNA, 369 bp, Arabidopsis thaliana
ggacgtgagagaagacgaaacacaaaagatgcagatcttcgtgaaaaccttgaccggcaagaccatcactctcgaggtcgagagcagcgacaccatcgacaatgtcaaggccaagatccaagacaaagaaggaatccctccggatcagcagagattgatcttcgccggaaagcagctcgaagatggccgtactttggctgactacaacatccagaaagatgatttgccgcaagtgctatgctcgtcttcacccaagagctgtcaactgcaggaagaagaagtgtggtcacagcaaccagttgaggcctaagaagaagatcaagtagagagactcttatcaagaatcccatctcttgcctgcgttttttt

SEQ ID NO: 170908 - DNA, 419 bp, Arabidopsis thaliana
agtcggtagataagatgagggggatcaacagaaggcgagtgaattgtagccactatggcagtctcctcactctcaatccgctgtggtggtttctcaccaacaatctcccacaagacagaaattctctgtccaaatccatcactcaaagcttgttgtttactttcatccggtggtaaggccgactcctcggagagtacttaccaaaaaggcagcggaaacaattggaagagaaggcaagctcttgtgggagtaggaactttagtggcaacttcaattccagcaactttgcttcttgctgaagagataccaaaaagctactcgccttttgtggatcgagaagacgggtattcttactattacccatcagactggaaggaatttgacttcatggcacatgattcagccttcagagatagata

SEQ ID NO: 170909 - DNA, 356 bp, Arabidopsis thaliana
ctcaccaaaaaaaaacaaaaaaaaattagaattcagtacttttattttaaacaaaaaccaaaaaaaaaaaaccaaaaaaaaaaacgttggaaatggctccaccggaggctgaggtgggtgcggtaatggtgatggctcctccaacgccggggacaccgggaacaccgggaggaccgttgatcacggggatgagagtggattcaatgtcgtttgatcatcggaaaccaacgcctcgatgcaaatgcttgccggtgatgggatcaacttggggtcaacatgacacatgcttcaccgattttccctctcctgatgtctccctcactcgcaagcttggagccgagttcgtgggaacattc

SEQ ID NO: 170910 - DNA, 241 bp, Arabidopsis thaliana
ggaaatcaagaagccattttcacaacgaaaatcattaatggccctcgaggcatggtttatggatgataccattgaggaccataaacttcctcatcatcgtaacccgaaaaaattcttccacgttggattacttggcaaatttggaattgttgtactggaatttgaaccctgaaaattacaaaaatgattctgaacttatcaggattaaaaaacacaggggttacaattacatgaatttcct

SEQ ID NO: 170911 - DNA, 373 bp, Arabidopsis thaliana
aagggtgcttcagtgatgctatcttcggtgacattgaaaccagctggtttcacagtggagaagacggcggctagaggattaccgtcgctcacaagagctcgtccctccttcaaaattgtcgccagtggcgtcaagaagatcaagaccgacaagcccttcggaattaacggcagcatggacttgagggacggcgtcgacgcctccggcagaaagggcaagggatacggtgtttacaagtacgtcgacaagtatggagctaacgtcgatggatacagtcctatttacaacgagaacgagtggtcagcgagtggtgacgtgtacaagggaggagtcaccggattggcaatttgggcggtaactctcgccggaattc

SEQ ID NO: 170912 - DNA, 354 bp, Arabidopsis thaliana
ggaaacacattgagagggagcagcatccagacacccagttcacgacatcgtgagagaaaactttagagcaggtctctgagacatcccatggcgatggcggtctccggagctgtcctcagtgggcttggttcttcgttcctcaacggacgcaagataggtgccgccgcattggcaagcggcgtgcgcactggagctcacagagttggcaggaaagctcttattgtcgctgctgccgctgctcagcctaagagatcttggatccctgccgtctaatgtggtggcaaattccatgaccctgcatggatcgattggtcgctagcaacagatttcaggttcgacccaatgggtttgggg

SEQ ID NO: 170913 - DNA, 379 bp, Arabidopsis thaliana
  unsure (1)..(379): unsure at all n locations
gaaccctagtcgtaccanaatctaaggtttaccttgaccggatctagacacataagctactcagatatggaagtggttgctgttgggtcaatgaagacgcggagacaagagacatgggcttgctctgtcactgagtcctttctcctcctcgtcggaaagaatctggcttgtcttctccttgtggcagaatcattactgataagtttggttgctgttgaccaaaagttgtctgtcaagganggttacaaaagaggaaaccgtattgaggaaaacaaagatgctaatgacagtgacgatgacgacgatgattaagacgctgattaagacaacgatgattaagatgatgctaatgatgaagatttctcaaggggttaaaggg

SEQ ID NO: 170914 - DNA, 405 bp, Arabidopsis thaliana
cccacgcgtccgcccacgcgtccggcgaagacgacagaagggaggagctgtggaagaaaggccaaaccccatgtttcattgcttgtactacactcgtcgaagggttgaggaaatcaggaagaacagagaaagcgtcagggtttatggagaagatgatgaatgcaggaattcttcccgatagtgtgacatttaacttgcttcttcgggatctctgcagttctgatcattctactgatgcaaacagattgagacttttggtatcaagcaaaggatatgaacccgatgagacaacgtaccatgttttggtttcggggttcacgaaagaagggagaagaaaggaaggagaagttctagtgaacgagatgttggataaagatatgttgcctgatatctttacatataata

SEQ ID NO: 170915 - DNA, 409 bp, Arabidopsis thaliana
  unsure (1)..(409): unsure at all n locations
ccaacccttcgtaacggctgcaaaaaacaacagaaggaaaaaacccaaaattccaattgatggaaaaattaccaacaaatttgaggtccttgttattccatcacaaaagggtcacgccctgatgttcccaaagggtggntgggagcttgatgaatctgtagaagaagctgcgtcaagagaatctctagaagaagctggagttgttggaaacgttgagagacaacttggaaaatgggatttcttaagcaaaagcaaaggaacattctatgaaggattcatgttcccaatgcttgtgaaagaagagcttgagctttgacctgaacaacatcttcgtcaaagaatttggatgaaagttgatgaagcaagagacgcttgtagagattggtggatgaaggaagcgttagatgtt

SEQ ID NO: 170916 - DNA, 371 bp, Arabidopsis thaliana
caaccaaaaaaaaaaaaaaaaaaaaaaaaaaaaaaaaaaaaaaaaaaaaaaaaaaaaaaaaaaaaaaaaaaaaaaaaaaaaaaaaaaaaaaaaaaaaaaaaaaaaaaaaaggggccgcccaaaaggttcaaacctaaggtacccgtgaatgcaaggtaaaacccctccaaaagggccaccaaattcaaattcacgggccttcgtttaaaaagtccgtaacgggaaaaacccggggtttaccaaatttaaccgctttgaaaaaaatcccccttccgcaaccgggggtaaaaccaaaaaggcccaaaccgttggcctttccaaaaatttgcccacccgaaagggcaaatggaaccccccctgtaccggggaat

SEQ ID NO: 170917 - DNA, 421 bp, Arabidopsis thaliana
agaagacgacagaagggggcagcgagtgcatctccaatggcgagccagctaaggagcagcttcttctccgcttctctttctcagcgtctcgccgtcccgaagggcatctccggtgctcctttcggtgtttctccgaccaaaagagtctcttccttcattgtccgagctgttaaatccgacaagacaacattccaagtagttcaaccaatcaacggtgatccattcatcggaagtttggaaactccggtgacatcaagcccattgatcgcgtggtacctttccaacctccctggataccgtaccgccgtcaaccctctcctccgcggtgtggaagtgggcctggcccatggtttcttcttagtgggcccattcgtcaaagctggcccattaaggaacactgcttacgccgggtcagccgggt

SEQ ID NO: 170918 - DNA, 443 bp, Arabidopsis thaliana
  unsure (1)..(443): unsure at all n locations
gggtaganncacgcgtccgaatcgacagaaggggggagagtgaaattgaggagatgatcagagagatggaaacaacagaagagagattagtggtgtacgatgtagatgtgttggattatcaaagcatacttgtctctctcaagacatgtaacgttgtcttctgttgcttagacagccctgaagggtacgatgagaaggaggtggatttggaagtgagaggagcgatcaatgtggtggaagcgtgtggaagaacagagagtatagagaagattgtgttttcttcttcattaacagcttcaatttggagagacaacattggaactcaaaaggatgttgatgagaagtgttggagtgaccaagacttctgtcgcagcaagaagttgtggcatgcactggcaaagatgttgtcggagaaagcagcttgggcattagccatggaccgt

SEQ ID NO: 170919 - DNA, 399 bp, Arabidopsis thaliana
gaattcagacacctgactcgtcatctcatcgtacaccgaattcactattcgtcgccaatatgccgcagagacactcgaggtacatcaatgatcttgcgtaattcacttaggacgacaagaataagttaggttacggaactcagagagagagattggggacagactcgatcaaacccattgatgcttgttctctcagcgtgaagccttacactgatccgatgtgttgccatgagggtcatgtcatttgcagagagtgtatgcttgaatgtttccttgctcagaagagagatatccacaggaggcatgcagcacattcgtcgcagaagaagccagataacgatgaagaagacgagaggctaatgttacatcacgcgagagagctcgacgaatttgatcagc

SEQ ID NO: 170920 - DNA, 378 bp, Arabidopsis thaliana
ggtttaagagttggtatagtatactcttacaatgacagggtggttcagatcgcaaggaaaatgtcgagtttcggtcttgtttcgtcacaaacgcagcatttgatcgctaaaatgttatccgatgaagagtttgtagacgagtttatccgcgagagcaaattgcggttagctgcaaggcacgctgagataaccaccggtttagatggtttagggattggttggttaaaggccaaagccggtttgttcttgtggatggatttaagaaatcttttgaagacagcaacgtttgattcggaaaccgaactatggcgtgtgattgttcaccaagtgaagctcaacgtgtctccaggcggttcgttccattgccatgaacccgga

SEQ ID NO: 170921 - DNA, 382 bp, Arabidopsis thaliana
agaagactacagaagggggagaagagatcgagagaagaatagtttgatcatcttgtgagaaaaataatggctgcttcagtgatgctatcttcggtgacattgaaaccagctggtttcacggtggagaagacggcggctagaggattaccgtcgctcacaagagctcgtccctccttcaaaattgtcgccagtggcgtcaagaagatcaagaccgacaagcccttcggaattaacggcagcatggacttgagggacggcgtcgacgcctccggcagaaagggcaagggatacggtgtttacaagtacgtcgacaagtatggagctaacgtcgatggatacagtcctatttacaacgagaacgagtggtcagcgagtggtgacg

SEQ ID NO: 170922 - DNA, 390 bp, Arabidopsis thaliana
gacccatttcttggcttacaacaacaaatcttaaacgttttactttgtgctgcactactcaacctcaatggccgcctcaacaatggctctctcctcccctgccttcgccggtaaggccgtcaagctttcccccgcggcatctgaggtccttggaagcggccgtgtgacaatgaggaagactgttgccaagccaaggggcccatcaggcagcccatggtacggatctgaccgtgtcaagtacttgggtccattctctggcgaatcaccgagctaccttaccggagagttccccggagactacggatgggacaccgccggactttcagctgaccccgagacattcgcaaggaaccgtgaactagaagttatccacagcaagtgggtcatgct

SEQ ID NO: 170923 - DNA, 411 bp, Arabidopsis thaliana
cggggccacccacgcgtccgaggacgcgtgggcggacgcgtgggcggacgcgtgggcggacgcgtgggtgaagtacagctcttgttacttctcaaacgattcaagtagcttagaggatgcagaggaagcaattttggctctttattgtgaaagagctaaagtggaagatggtcaaagtgttcttgatatcggatgtggctggggatccttgtctttgtacattgcacgcaagtacagcaaatgcaagttaaccggtatctgcaactccaaaacgcagaaagcatttatcgatgagaaatgccggtaactaagtttctcatacatcttaagcttcgagttctagctgctacaaatggaacttaatataatctcaaatggtttgaaggaaactcgggcttcagaatatcgaaa

SEQ ID NO: 170924 - DNA, 373 bp, Arabidopsis thaliana
cataaaaaaaaaaaaacacaaaaaagtttcaatggccgcctcaacaatggctctctcctcccctgctttcgccggaaaggctgtgaacctttcccctgcggcatcagaagtccttggaagcggccgtgtgacaatgaggaagactgttgccaagccaaagggtccatcaggcagcccatggtacggatccgaccgagtcaagtacttgggtccattctctggcgagtcacccagctaccttaccggagagttccctggagactacggatgggacacagctggtctatccgctgaccccgagacattcgcaaggaaccgtgagctagaagttatccacagcaggtgggccatgctcggagccctaagctgcgtc

SEQ ID NO: 170925 - DNA, 434 bp, Arabidopsis thaliana
gcgtccgtacaagacgacagaagggggagaagagatcgagagaagaatagtttgatcatcttgtgagaaaaataatggctgcttcagtgatgctatcttcggtgacattgaaaccagctggtttcacggtggagaagacggcggctagaggattaccgtcgctcacaagagctcgtccctccttcaaaattgtcgtcagtggcgtcaagaagatcaagaccgacaagcccttcggaattaacggcagcatggacttgagggacggcgtcgacgcctccggcagaaagggcaaaggatacggtgtttacaagtacgtcgacaagtatggagctaacgtcgatggatacagtcctatttacaacgagaacgagtggtcagcgagtggtgacgtgtacaagggaagagtcaccggattggcaatttgggcggtaact

SEQ ID NO: 170926 - DNA, 319 bp, Arabidopsis thaliana
acgacagaaggggatgacttggaaaacttccaagccaaatggatcaataagtcttggaagaaggcagtgatttttgttgataattctggtgcagacataattttgggtaatttgccgtttgcaagagaattgctccgtccaagaactcaagtggtgctggctgctaatgaactgccatctaacaatgacataacatgtaccgagcttacagaaatcctgtcacaattgaaggatgaaaatggccaattgcgaagtgtttgataattcgaagcttccgaatgcaaattccgggaatgacttaccaattatcgatctctca

SEQ ID NO: 170927 - DNA, 361 bp, Arabidopsis thaliana
cccgaattcccgggtagacccacgcgtccggaagacgacagaagggggaccgtcaagattacttgagacggcggcgccaccaccacaaccgttggaggagatgatcgcagcggaatccgacatggtggtgatcttgtcggctcttctttgcgctcttatctgcgttgctggtctcgccgccgtcgtacgatgcgcttggctccggcggtttacagccggaggagattcgccgtcaccgaacaaaggtttgaaaaagaaagctcttcagtctcttccaagacccactttcaccgccgcggaatcaacctccggcgccgccgctgaagacggagactcgacggaatgtgctatttgcctcacg

SEQ ID NO: 170928 - DNA, 307 bp, Arabidopsis thaliana
  unsure (1)..(307): unsure at all n locations
tacggtgtcaattccaaaactaaaacccaaaaaaaaaagaaaaggaagaagcaaaaacctcttagaagttctctaatttaaaaaatttattcatttttcttggggaggtttgagtttttgttcggtggtgatgttaggtagggaaccaaaagaaaatgggagaagtaaagagtcgttagacacacagcaatagcgagcgaacgtacgttcatatgctggccttgtgtgtagtttgtgttgttattagtgtgagagcatgaatcagtatgatgaatttatgattaanaaaaaaaaaatataaataaaa

SEQ ID NO: 170929 - DNA, 331 bp, Arabidopsis thaliana
cgagagacgacagaaggggaacaccacaaacacaaacaaacatatagaaaaagagagaggaggataataatatggcgagcaagaaagcagctatggttatgatggcgatgatcgtgataatggctatgttggtcgatacatcagtagcgatagatctctgcggcatgagccaggatgagttgaatgagtgcaaaccagcggttagcaaggagaatccgacgagcccatcacagccttgctgcaccgctctgcaacacgctgattttgcatgtctttgtggttacaagaactctccatggctcggttctttcggtgttgatcctgaactcgc

SEQ ID NO: 170930 - DNA, 306 bp, Arabidopsis thaliana
ggtcactcactcaatttggtttcttgttttgctctctagatctctcttttctctcttctttccatctccagcaatgggagcttgtttaacactctcgttctcttgtgatgaagttgtgaatcaaatctctcaaggtttatgcatcaacgtgggttatgtttgcgagctctccaagaatgtagtggctatgaagaaagacatggaagtgctgaagaaaaagcgagatgatgtgaaaagaaagggtagatatagaagagttcacaaggcgtcgtgaaaggctttctcaagtccaaggatggcttacga

SEQ ID NO: 170931 - DNA, 293 bp, Arabidopsis thaliana
gaaagccattcatattaaactcatagcacaacaccattctttggttgtgcgcacatcgcacccttctctcacatgtcgtggttttgtgaccggaaggctatcattacatgaggtctgcagaacaaaaagaagacaccaagacacgggagagctgagctcacaccaatctcaaagggacaggataggatggaagctatgtttacgttaagatcaggcaatccactcagctcactaatctgagcatagcgtactgtgaaagctattctgttgacatcaactccattgctgtcttg

SEQ ID NO: 170932 - DNA, 303 bp, Arabidopsis thaliana
gttagccagaaatcacttcttaacaaactggattcgcataaccgatctatggaaatggctccagtgatcatgtggcgagaagacaacaagcctgaatcttatcgggaatactggagacgcccgtcaaggagtcctaagaaaagtaacgactttgaaagtgctactccatgggacttgctctcagatgaaagagaaggtccagatgcatcctcatcaatccctcgagatgatatcgcacgagttgattttggagcggtcgatgttgtccagtgcctaattgagtcaccacagtgcgattttcac

SEQ ID NO: 170933 - DNA, 246 bp, Arabidopsis thaliana
  unsure (1)..(246): unsure at all n locations
cggaattcaacaccacatgggactggattttttcgcgattggcgcgagtacgaaagcgatcagggtagattccttcataattggtactcaagagttctgattgaacagggggatcatgttcctgccacggcaaaattggctttcgaatgaacgtgcattgctgcaaagctctcatgtagacactggtggtatangacagcgtagtcatgctgctgaactcactgctggcttctacaactcctcaaa

SEQ ID NO: 170934 - DNA, 355 bp, Arabidopsis thaliana
tcccgggtcgaggcacgcgtcagtcctcgggacagaagagaaaaggaaggagttgggctccaaggagaatcctcagacgagcgtgggtgaattccggttggcgattgttctcatctgatctgctttcgcgctcatcaaatttaatgaaagcattaagtacttgaagggttgtgacaattcatggctactgcagcaagctctcttcacttgtcgcgaatttgtcctgccttgagttaaggagatatccttgtacatgtcttgtctccattatcaatcatcacatattgcatcgtccagtgactgcttcagtgcagcctcactagttgtcgacattggggcatgaatgcaacattgt

SEQ ID NO: 170935 - DNA, 311 bp, Arabidopsis thaliana
tctgttatacattttggatttctgacttataataaatatactttaagttaaaaaaaaaaaaaagaaaagaaagaaaaaaaaaagaaaaaagaaaaaagaaaaaaaaaagaaaaaaccaacaaaacaaaaaagaaaaaaaaaaaaacgggggccccccaaaaggtcccagcctaacgtaccctcgaagccaacaccaaacccctccaaaagggccaccaaaagccattccccgggccgccctttaaaacggccaccgccgggaaaaccccgggggtacccaacctaaaccccctggaaaaaaaccccccttc

SEQ ID NO: 170936 - DNA, 237 bp, Arabidopsis thaliana
tggtacggctgcgtagatcgacgacaggatgcggagaagagatccagagagcaatagatcgatcagcctgtgatcacactcatggctccgtcagtgatgctatcatcagtgacattttgaccctctggtttcacagtctccatgacggcagctcacagattaccgtcgctcacatgagctcgtcactccttcaagattgtcgccagtggcgtcaataagatcaagaccgacaagccc

SEQ ID NO: 170937 - DNA, 372 bp, Arabidopsis thaliana
gaaaaagaaaaacaaaatcaaacaaaaaaatcaacacaaaaaacaaaaaataaaaaccataaaaataaaacattaaaaaaaaatcacaaggcgaatgaagaaaaaataaagttcaaaaaaaaaagcggccgcccaaaaggttccaaccttacttacccttgaatgcaagttaaaaccccttcaaaagggtccccaaatttaaattcatgggccctctttttaaaacttcatgatggggaaaacccggggtttacccaatttaacccctttgaataaaatccccctttcacaagtgggggtaatgccaaataggcccacaccgttttcccttccaaaaattttcccacccttaagggcaatcggaacccccct

SEQ ID NO: 170938 - DNA, 248 bp, Arabidopsis thaliana
acctggtttccaaaccagggttacttaccagtacaggctttggttccacatattggcccatcgcggttaagtgttgacaacgctcgggtcaagattatcaagaccgacaaccccttcgcaattaactgcagcatgaacttgacggacggcgtcgacacctcaggcagaaatgccattggatactgtgtttacacctacgtctaacagtatggatctaacgtcaatcgatacagtccaatttacaacca

SEQ ID NO: 170939 - DNA, 383 bp, Arabidopsis thaliana
aggcgtcagtacagcagagagaggacaactgaagggggggactgtttctaattcaagccctcaaagtcaccatgtcgtcatccccgagatcccaatcgatatagtcagtggtgaacatatgggtaatctcaaagcagctctagcagcctcccgctccatactccattccgtgatccgttctgtttctccgtcagggaaaaccgtcgggggaagtcccataataatccgctcaattactctcctctcgaaaaggagattatcagcttgttcagatatccaaatgtcttatctaaatcgatttacgacatgtcaagctttaggtatcacagatgtcaccgggaatgaatggcgtgagaaataaatggtgaacgttccttgatttg

SEQ ID NO: 170940 - DNA, 326 bp, Arabidopsis thaliana
aggtggctggtccataaacgccttttgtgagctcgtggctcagtctcaaagggagagatggtcttttgataatgagcacttaggttccggacgacgaagactaagtgggtgtagtagtagcagattctcatgctccccttctgttgatcagcagacttgtgggcgttgctcaaagcttttaactgaaaggtctccagttgccaggtttgaccttccaattcctgctgttctagcgtgcggccatgtttaccatgcggcatgcttagagacaatgacaaatgaaacagagaagtatgatcctacgtgtcccatatgcacagagacac

SEQ ID NO: 170941 - DNA, 343 bp, Arabidopsis thaliana
gaagacgacagaagggagaccgtaattcacgataactatgagctcaaggccagagaggcttctgcacttaagaagatcgaagagttatctaagttgctagaagaagcttcttccacacatgagaaaggggaagagattactaataccaatccttttgataacagtaccggagaacagaaagtacaagaaagtcctttggaagctattgatagacatttgaaagatgacacaacaattcattggtcagctcacaacgttcaagtaataggaaaaggagagaaaggtaaagataaagacaccgtggaaagcgaagtgtatcatttagaaaagagagaagcttctt

SEQ ID NO: 170942 - DNA, 427 bp, Arabidopsis thaliana
tcccgggtcgacgaagacgacagaagggggaacaagcaatttgctgtggttgagaatcctggattttggaactggacctttacccttattgatgaagatgaaaatgtgttggcccagattgaccgtaattggaggggaattggttttgagctctttacggatgctggccaatatgcaattcggtttggtgatgatggacaaagcagtagacttggtctcggttcagatatcgaagaactaaacgttgttcgcccgctgagtttacctgaaagggctgtagctcttgctctggcagtgtccctggactcagattacttctctatgagagggggctggggactgccttttctcatcgccacagagtagaccgcgcatacgaatgccatcctctcagttcacagcggaacttaaattgccagttctttcg

SEQ ID NO: 170943 - DNA, 432 bp, Arabidopsis thaliana
aagtcttctacaatgggctctgctcagtcaagctgcacaaacgcgttgattagcatgtcgccgtgtctcaactacataactggaaactctacctctcctaatcagcaatgctgtaatcagttgagtagagtagtccagtcttctcctgactgtttgtgtcaagtccttaacggtggaggctctcagcttgggatcaatgttaaccaaacacaagctcttggtctgcctagggcttgtaatgttcagactcctcctgtcagtcgctgtaataccggtggtggtggtggtggttctacttctgactctcctgcagaatcaccaaactcttcaggaccaggtaatggatcgaaaaccgtaccagtaggagaaggagacggacccccatcgtctgatggaagctctaacaagttctcatttcctcttattgccttc

SEQ ID NO: 170944 - DNA, 462 bp, Arabidopsis thaliana
ggtccaaaattcccggggccacgccatcgctgaagtagacctctacaaggtcgagccatgggacctcccggcaaggtcgcgcctccgcagccgcgactcccagtggtacttcttcagccgcctcgaccgcaagcacgccaaccgcgcgcgcaccaaccgcgccactgcaggaggctactggaagaccaccggcaaggacagggaggtccgccatggagctagggttgtcgggatgaagaagacgctcgtcttccacgctggccgcgcgcctaagggcgagcgcaccaactgggtcatgcacgagtatcgccttgagggcgatggtgcagccgggatcccacaggattcatttgtagtgtgccgaatcttccagaaggctgggcctggtcctcaaaacggggcacagtatggagctcccttcgtcgaggatgagtgggaggcggatgaagatgatgattttgg

SEQ ID NO: 170945 - DNA, 467 bp, Arabidopsis thaliana
taccggtccgaaattcccgggtcgacttcttctccccaagctgcggtggctgccgcgctctccaccccaaggtagaaattcttggccaaaagccccggttcgatccaacaattctgattccaaacactgcaaagtatactcaagcgaattcggttcttctgatgtgcagattgcgcagttcgctgagcggaatccggacgtgctgttcctgcaagtcaactacgagaagcacaagtccatgtgctacagcctccatgtccatgtcctccctttcttcaggttctacaggggagctcagggcagggtcagcagcttcagctgcaccaatgcaaccgtaagtctcacttgtatactgtaaaacgtttctgcttactacaaaaatgttcttcatacacgtttaagatgagatgaatgctgacatgcttgctgcaattcgatccgattacagatcaagaagttcaaggacg

SEQ ID NO: 170946 - DNA, 388 bp, Arabidopsis thaliana
gaagacgacagaagggagaccgtaattcacgataactatgagctcaaggccagagaggcttctgcacttaagaagatcgaagagttatctaagttgctagaagaagcttcttccacacatgagaaaggggaagagattactaataccaatccttttgataacagtaccggagaacaaaaagtacaagaaagtcctttggaagctattgatagacatttgaaagatgacacaacaattcattggtcagctcacaacgttcaagtaataggaaaaggagagaaaggtaaagataaagacaccgtggaaagcgaagtgtatcatttagaaaagagagaagcttcttcagagagagacacagagcatgactttgctgaagaagaagtcgact

SEQ ID NO: 170947 - DNA, 161 bp, Arabidopsis thaliana
attcacgggtcgacgcacgcgtccgaacaggcgtcagcccacgcgtccgcggacgcgtccgcccacgcgtccgaattcgagcgggcgctctataggatcgaagcttacgtgcgcgtgcatgcgaagtcatagctcctctagagtgtcacgtaaattcaatt

SEQ ID NO: 170948 - DNA, 464 bp, Arabidopsis thaliana
taccggtccgaaattcccgggtcgacatcggtctttcacgttagggtaacatgggtgcttcggcggcagtttgtcgggaaaaagatggccagtaactcggagcatttgcggtgattttcgacggtctagtagatgcgccaagtcttgaagcgtacgcatgcaatgaagcactcgctctcgccatagatttctacatatcacatgtgataatagcctcagattgtatgcaggtcatctcagacatcaaccagggcacacaatcctcttattcaatggtcctcgatgagattaaatatactccctccgttcctaaatataagtctttttagacatttcaaatggactacaacatacagatgtatgtagacacattttagagtgtagattcacttatttcgctccgtatgtagtcacttgttggaatctctagaaagacttatatttgggaacggagggagtagaat

SEQ ID NO: 170949 - DNA, 422 bp, Arabidopsis thaliana
acgacagaaggggaccgcaaacgcgacagaactaactaacgacgccggagatggccgccacttcaaccgccgctgctgcttcttcaatcatgggtacccgggtggtttccgacattagctccaattcaagccggttcacagcccggttcggattcggaaccaagaaagcatctcccaaaaaggctaagacggttatctcagaccggcctctatggttcccaggcgcaaaatcacccgaatatctcgacggttcacttgtcggggactacgggttcgatccttttggtttaggcaaaccggcggagtatctccaattcgatttggattccttggaccagaacttagccaagaacttatacggagaagtgatcgggactcgtaccgaggcggtgggacccaaatcgacgccgtttcagccatat

SEQ ID NO: 170950 - DNA, 467 bp, Arabidopsis thaliana
taacggtccgaaaattcccgggtccacgagattgtcgttctagggcccgtattgctacacaatatgttcccctttgagaggttcatgggagtcctaaagaaatatgtccgtaaccgcgctaggccagaaggaagcatctccatgggccatcaaacagaggatgttatcgggtttcgtgttgacttcattcctggccttaagaagataggtctccctaaatcgcggtatgaggggagactgactggaaaaggcactcttggaagtgactcaataatatgcagggatggatattcttggtctcaagcacactacacagttctacagaactctaccttggtgaccccgtatgtcgatgaacacaagaacagtctgcgctccaaacacccggagtagtgcgatgactggattacatgtgaacacattaggactttcagcagttggttggaaacatgtctcagaggtgacaa

SEQ ID NO: 170951 - DNA, 375 bp, Arabidopsis thaliana
  unsure (1)..(375): unsure at all n locations
tttatttttttttaantttttttccccccccccaaagggaattctctcattttataaaaatggatagcaaatatcaactactaatattggagagtttgcaactatttttaacaaaatctaaggaaatagagagaaagcctaaaaaaaaaacaatggactaatatactaacataatatatggacagacaaaaatagccacttgcgttttctatttcttgctcttaatcaaaagcttttgcttcttgttaagctttgttcaagcaaacccaaaaccttcattggcttcgtgaattgcaagaagcaggcgttcctgaacttgttccttagattgatactcagggaggtctagttggttaaaacatgtatgagctgatg

SEQ ID NO: 170952 - DNA, 322 bp, Arabidopsis thaliana
cttctcgggaccacaaacaaaagaatgagactactaattacatgctttcttgctcttgttcactttaaacaagccacagtgtcaatcttttcttgcacttaactccaaaaaacgccaacaagaaagagctcatttatcactggaacatatcagcaattgtatttcctgaatctgaagaatctccattcccaaaatccatcatcatcatcatattcatccactcctccatattgcaatcccctccttctccgttccattgctctgcttaaactgaatctgtggcgctcacactggcgcttgcacttgcctttgcttctatatc

SEQ ID NO: 170953 - DNA, 171 bp, Arabidopsis thaliana
  unsure (1)..(171): unsure at all n locations
gcagcactatggancgggggaaaaatttagagattgctaaccctaatccggcggaaatacattgggggtgttgtggatagactaaaaggccaaagcagagtaagctgtgtgcctgtgtcacactcacacactctacatatataataatacaagcacggctcgttaaagaac

SEQ ID NO: 170954 - DNA, 200 bp, Arabidopsis thaliana
tcctttttttttttccctccttaaaaggaccgaaccaaatttcaaaacaaagcactttatcatcatccagatcagtcaaatacaagcatagaaataaacctgcacctggcagttgcggttctcattttttgttctaagaaaaaaaagggcaaacaactaaagcgattttgtcaagcggggtttataactaaattactctc

SEQ ID NO: 170955 - DNA, 254 bp, Arabidopsis thaliana
  unsure (1)..(254): unsure at all n locations
tccttnctttttttttttccccncncncnncccccccnnggggggtttatttttggttttcttaaacattaagaaactttttaaatacaatcagccgaaaaaaatccaagaaaaacaattttttatttaaatccttgaagagaattacaaaatccttttagcagacaacagtagctgctccggaagacacagggcttgcaacatcaagcattatgggattccacttcatcaccactttatcaccgcattttcca

SEQ ID NO: 170956 - DNA, 406 bp, Arabidopsis thaliana
  unsure (1)..(406): unsure at all n locations
ngtttttctccgaccccaaatccagaaatacaagcgaggaatagaatgtgccactagagaaaagcaatcccagaaaccctacgtactgcacgtttcgaggtctaggttggtgatcaagcaggaaatcttctagagatgagagtgtatagctacttcgttctggagaacgatgcagggttggatgtgacaagaatagtgagagaggaagatagagtcgggggggatatacagagccaacatgacgaactagaggcaaaattccgggaggagagagctattcttgaagccaagtatcaaacgctgtatcagcctttgtatgtcaagcgttatgagattgagaatggcactactgaaggtgaactggctccagaggatgataccatggtggaccaaggagaggagaaaa

SEQ ID NO: 170957 - DNA, 290 bp, Arabidopsis thaliana
ttttgtatactagaataaaaaaaatgcagtttttgtatacacgaagactttcttgagttcttcagggtccaacaaatttacaaagtcaaattcggttgctttggggaaacccaaactaaaccggaaggaatggatacaaaagaatggtttctttaaccgtttaaagaatcacaaatgtgaaccggatgatgagccgtcatggctgctcaaatcccaattatgtttcttcttgtgctcgaaattctgaaagcatgtcaatggcctcatcctccattggcgcttgtgaccca

SEQ ID NO: 170958 - DNA, 481 bp, Arabidopsis thaliana
tccttttttttttatatttttttttttttggaatcaactcgagaaattcatgttcaagtgtaaccacaaaacaagtattgtttatgtttttatcacactatcaaaaccatctaatcaacaacttcactgctaaacaacttgaacttattagcatcaagaacaagtttcctaatggaggagaaagctcccatgagtcctgcacaagtgaacacaaccattatcgtcatgtttatccaatacgtgaagctccgtctggttggcttataggtcatgttgtatagaagcattggcagcacgaaatcgagtgggataaacccaaacgctcctaccaccgtgtttatatccccaaagaacggtagcatcgctgccatgaacccgcaaaacgccatatatagtgttcttagtatcaaacgcggcacaaggttgcgttttgagaatatcccttttgttgtatccgctgatttcttctccattatttcat

SEQ ID NO: 170959 - DNA, 317 bp, Arabidopsis thaliana
ggggactttttataaggggttttgtcgtttaggcccagggaagaataaagaagaaacaaacatgagagaaagctccaaaattcttgggcagacaatatattcttaatatccataatttcatccaatgcgaatagtgatgatgatgatctgtcttttcttttgtacaaaacgcagagaaacaccttcacacggtcaatcaaattcagcaactaagcgcttcgtatttaaccggaatcggttggttaaacccggtccgcgcaatcaaactcccaaccaccgtgaaatctttacaaaacactcctttcaccacattcgta

SEQ ID NO: 170960 - DNA, 312 bp, Arabidopsis thaliana
gggcatcatgggatcaaaataaggagacacatgacaacactatatttgttaaaaatgtagcaaaatgctttcaactggcttgagttaagcacttaagcttaatgttaccggagttcatacaccattatctccgatagctcggccccaacaactttcctgtaactaaccaacattgattcgagttgtttctgaaccactggattcttgaaccgcggtatatccttgtatcgaagtcgaagtccattaagactgataaggatattggtaatgtcactccggtttctgctactgctagagtctgagtctgagtct

SEQ ID NO: 170961 - DNA, 390 bp, Arabidopsis thaliana
tcctttttttttttgctccataaaagggtactctattatacaaaaaaggaatcatttatctggaaaaacgtaaacataagtaacaaaacaatttctctaaataggatatattgtaataaaaatgataagtactatgctttaaggatggtaaaaatttgaggtagagaaaaaaaaaaaaaatagctttggcagaaatcaaaagaataaggttctatgtaattcccaaaatgccccctcacggtgaggatacggcctcgatggcgctacccaatggccacgcagcttccacggcttggtctccgtatttgaccttcttcactaacgttattgtctgtgatggctccaatccgaatccatcaatgagcagagtatattggtaaacgagatcca

SEQ ID NO: 170962 - DNA, 428 bp, Arabidopsis thaliana
  unsure (1)..(428): unsure at all n locations
tccttttttttttcctccttttattnggnggcgttaatttataaattaatacttttttagattacaaatgaatcaaaagaaaaagatatacaatattcttcttcttccaattattattgttattatttgattcagaaaaagaaaacaaaaaccagaagaatttgatgattcctcaggtaactcatgatttttctcctcctttaattttgttattcaactatggaaaaaagggaatgacggattggccaaatcttctttgattgtctcgtttttattttacctattggagcaagaaaaagacattggagtgtgcttcaagcctgatacatcgaatgactccaagaacctttgatccgaaactctagctttagccgctgcaaatcgcttatactcatcgagtatcgatgttatgcaccatttctggagtt

SEQ ID NO: 170963 - DNA, 481 bp, Arabidopsis thaliana
ttgccttccttttttttctgtactaaacaagaagattagtagtattaagtatcaataattcaaccatgttttaagattacacgagattaaacgttacaagttgtaacttacaaccaaaccatgtaaaatactttaatagctgcgggctgttacaaaatgttctcacagccacttcagctactcactttctctttctccctcatttccccctttattactcacaattaaaacaccaaacccaaaaaaaaaaacctttaaaaaggggaaaccccccccaaaagtcaaagatcctttcccctgatttttttctcctttccatatataaaatttagtaaaaaaaaaggaggaggaatagcgaaattagcggagagttttcttttgtctcgaaccactttaatttctcgaatttcctccaaattttagtttctcgaaactcgccttaaaccctgaaattcttcccgacaaaggtttgaccaaactg

SEQ ID NO: 170964 - DNA, 284 bp, Arabidopsis thaliana
aagcaaagggatcattcaaatataaaaggggctttctcatggaatacaacaaaaaaatgcccatgccaaaaaaaggtaatttaactctaaaagttcagaagcaaatttatgaattttactacaccggcaagtgtttcattttggctcagggcattaagccaagctatactctttgtcgattcactagttccggcaaagtagtctaaaccactatgcttataacaatgattgttgcttacgggcatacataacacaaccaataacgatgaatcaaaagcagacct

SEQ ID NO: 170965 - DNA, 251 bp, Arabidopsis thaliana
ctgaatgaaagacgtccaaaacaggatattatagaaggacctttgctactgaatgtgagttacctattggctctgaaccctggatacaaatgtatcaatgttagtatccgtagaacctccttcattgagggactggacagccaagtctttccattttttcacgttcttcttcatcttttggctcctttctccttccatcacttccttaatgctaaactaaatctcctttttctgggcaatcccactttcct

SEQ ID NO: 170966 - DNA, 409 bp, Arabidopsis thaliana
  unsure (1)..(409): unsure at all n locations
tcctttttttttttnntttatgacaaaccttatgataaattacttagaatactataatcacatgactttaaaacaaatccaaaattttgaacacaagcatacatgcatgcagcaatttattacaaaagaataaacacaacttgatgcaaaagcccccaaacatccactttgtatttgaagcttttggctccattataaagtacttaatcagatggaccaatcatcttctcgggaacaacaagagtatcaaactcttccgaagtaagaacacctaacttcatagctgcgtgctttaatgtgcatccttctttgtgagctcttttggctactgctgcagcattgtcatagccaattttaggattcaatgatgtcacaagcataagagacttgtgcaatagctttgagatcc

SEQ ID NO: 170967 - DNA, 454 bp, Arabidopsis thaliana
  unsure (1)..(454): unsure at all n locations
tcgtccttttttttttttcntaggttaaagttttcaacttttcaccaaaggtaattaagcatttaactacataaatcaaacccagtagtatactaaaagacattagacaaatgagagagacagcttcgattttcagacagctttaggttggatttgttcgaagtcgaaaaccttaaacatgagccgccgaacatcgggtttcccgtagatggtgtaggcgaggccgtgaatggcttgttggacagcggttgtcgccggattcctaagtctccggttatgttcataccgatcatgaacctcctctgagtatattataaagttgtgaagacgtttttctctaagataccggccgcagaatttgttcattaatagacgtctatgcttctcttgcaaccactttcctggtgcgtccaagtgcttcattaacaaacgttcagccattgctatgtcctgt

SEQ ID NO: 170968 - DNA, 378 bp, Arabidopsis thaliana
aatggcacataaatggtgcagattttttttaagaatcaaatctaaaaacagagaggttaatcgcaatggaacatttagaaatcgaaccaacagttaaacccaaaccgaaccggtttatcccaagcttgaccttgtcatctcataagccaagaagcaagcagcattagcaggaacactcctagccatagctggaccaaatcctttatacaaacctttaactccttcagatttcaaaatcttccgaaaagcatccatcgaccccgtgtatctcgggtttttgtaatcgtcgacttgaagaacactttttacaacatctgtcggatatactattccccaaaaagaagcaccagcgactccacccgccatgatcaatgaccc

SEQ ID NO: 170969 - DNA, 351 bp, Arabidopsis thaliana
tccttttccttttatttttttttcaccacgcgcccccaacgagaaaggggacatttaaacggaaaattggtcttttgagaccattacaaatctcaagaaaaataaaagtttgactctcaaaaaaagagctgaagactaacccgaataggttagcaagcaatcctctgtgactgtgaaactctgacaaataaaaaaaaaaaaactttatatattgtaaaagaacaaattgtgacgatcgatttgattgaacgccaagcaattgatatgtgaaaagaaagaccaggggtggcttaatggttgagatgaccactctgctctcttttgtgacagagcacgagaagaccacaggct

SEQ ID NO: 170970 - DNA, 234 bp, Arabidopsis thaliana
gaatgattaatggataaccaggggtgttttcaacttgagttgggtgacgtacaccactgaaatattaaacatacatttcatgaaaacgagagaacctttggtgtgtctacagaaccaaaaattacaaatacgaatggcttgcggcacaaaatcaccggcggaaaaagaatggttcccttccccaaaactgaatatgagatcccatggagacaagacaacatgttgcttttggaa

SEQ ID NO: 170971 - DNA, 436 bp, Arabidopsis thaliana
aattgtgaattaaacaagagttcaaataataagggtaacggatttaatgtaaaaatatagttttttaaaaaacattacagagatttctatgcacataaattaagttttgactggtatatcgtgtatatgtaaaaatcaaattttctggtaagaagagaaacgccgagacagaggtggctaatgtactccttcccctggagctacggctcgagcattcaacaaaggttgaagagctttgacaacgatactcatattcggcctaaaatctgcttcatattgcacacacaacgcagcaaccgcggctaacttagcaacagcttttggagggtaatcgccaccgagtcttgcatcaacgcattgtttaaccttgtcttcactcagtttaggtgtagcctgatgtatcataagtaacagtttacatggttgatgatcatgc

SEQ ID NO: 170972 - DNA, 439 bp, Arabidopsis thaliana
  unsure (1)..(439): unsure at all n locations
aaattgatatttatcaaccaaaaggtatcattttaacaaggtctgtgatatacagaagattacactttctctctgattctgagatgggtgtcagaggttttggttaggaggatcaatctctgattagagtgttgttgtttccatttcaaagctctgatcatgaaaatttcctccatgaatgttcttctcgcttctaatctctgagaaccaaaaccatggtcgtgggaagatccatgaatgatgtatcacaatcatgtgagatgcagattcaaatcagggaggtgtttattaatctgaatcttcttcactctcttcttcagactcggagctaaggaaacgagctgagcttctgagggaaaatgatttgttactctttggaatcttcgttctcttttgttntgttgcaaaacctttcgccactagtgtatcaaacaaatct

SEQ ID NO: 170973 - DNA, 138 bp, Arabidopsis thaliana
atccagctgtgaaatcatgttttcgagcccacctaaaacactattgacagctacctgggttgaattatccatccctggaaagccacaaatgcttggggcacattaaaatcgggctgatttggtccctgaatcgctggc

SEQ ID NO: 170974 - DNA, 420 bp, Arabidopsis thaliana
ctaaattggccaaggtttttctgattatctgcgattgcacgttgttctattctggccaagttgtcattttagaactgccaacataactaatgttatgaccaaaatataattattgttttcaactagcaaaggaaatgattgtaggctgtttaagattcaaatgccaacatggatgactactcaaggtttccttttaaatgaaaaacaattatggtgtaatcaaagctgattctttgatttcgcttcgctggatggttctccgttcacaggaacaagctcggtgtcgaatatcagtgtcgccccacccgggatttttggtggtgagccgttatcaccataaccaagcttggatgggattttcaactgtgtgttcttacctacacaagctaccaataaaccctggtcccatcctgggatgac

SEQ ID NO: 170975 - DNA, 137 bp, Arabidopsis thaliana
gtggggagtacaaaaacagttgtatagacctgtccagcccatttcaaatttgacataaaatgaattcttccttaattatggcgtaaacatatagtgattattttatttaaaacatatgacagggttaaagttttgcg

SEQ ID NO: 170976 - DNA, 271 bp, Arabidopsis thaliana
atgggaaacttatgaacagatttgtttcataaattcataattaaacccttcagatacaatcataagccaaaaaagaaaaccaaaagtccaatttagttctacaagaagtttttgaaaggaaaaaaaaaatcttttttttttctatataatcaaatcattcactttgactcatacgattttggggcttttttttcaaaattttagaaatccagagatccacattggttgctctctatagattttgctacagatccaggcttttttgtttcct

SEQ ID NO: 170977 - DNA, 319 bp, Arabidopsis thaliana
atacatataataataacattctgttaatgactgatctgtttttttaagttgctttgttgcaaaagagagattaaaatgaacaatgggggccaagaataaaagaacacaaatggagaagttgtgagtaattatagcaaatggcttcagggtgaaaaactgatatcaaaatttttaccgctcttgttttacttggtgacttttgatcagaagcacttcctgtggacgatcgacggtccaaattcatcatactgggctttcgcaatccacatctgctggaaagttctgagagaagccaagatagagccaccgatccaaacac

SEQ ID NO: 170978 - DNA, 267 bp, Arabidopsis thaliana
gacctgacccattgggttttttaataaaaaatttttagtttttaattatttacggggagatcaaattaaattttctgacaacaaattaaatgacgatgggaatgatgatttggtcgggtaaaaagggtttattgttttaccacatttcccaaatggatcattgttgttacgttggggcttaacgtaaccggtatttccccaatttaacccccatgaattgggaatgaaccaataatttttaccacttgggggtccatattcaacccc

SEQ ID NO: 170979 - DNA, 308 bp, Arabidopsis thaliana
caatcccttgattccacttcaagatggtgaagaataaagacattccattagagaaaggtcctggggacaaaaagaaaatcacaaactttgtatccaattcaacggatgctatagcctttctttctttcaacaagaaagacaccatttgcatcaaatctaccttcgactcaaaatttttttaagccagtgattgaaccaaataaaacacatccattttagagaaaaaaaaaacgtttccttgctcaaatcaagctttgcttcactcggcactggcgagctgggagcggatgaccttatccgtatcaacc

SEQ ID NO: 170980 - DNA, 353 bp, Arabidopsis thaliana
attatacaaatccaaaattttcttcaaaacaaaaacttgtttgaaaaagacttccggtacaaattgaaagctctcctgaagatgatacgaagcattttttttttcgagaagagttagaattttaaattctacaacaacaactgatatgagattggatgtacacaaacaatgtataaggagcttaattcttaatcatgaagcagagctttattctttatcactttggtcttgaaggagctttgttcttgatcatgtggcttaaacccctcgctttttctggtccatagccgcctgtagcagtctttgcatgacggcatcttcataagcttgaagaccggcacctactatgttac

SEQ ID NO: 170981 - DNA, 323 bp, Arabidopsis thaliana
agccacacaatgtttatttatttacatataaaacataatagttttacattaaggtctatgaagaattttatatacaaagaatcaaaccaaacaaacaatctaaaagaaaaaccaacatttcatcaactttcatcaccagcccaattactcttgagtttaggcccagtaggcccatcttcaccataaacttcatcaggaattttcttcacaaatttaacaaaagcctttttcaaaagcccaggcaatatcctttccacactcttaacttcatcatcaacattataatcaatcttcggcccccacttcctgaaatacttaaccca

SEQ ID NO: 170982 - DNA, 171 bp, Arabidopsis thaliana
ctttacaaagcaaacaccaaaaaaaacagtgatgggtttggttacagatgaagtgagagctagggcggagcaatacacatgagatgagatatgccgtgggaagacaaaggagattcttaaggaagtttctatgcctcatggtttattgacattgaaggacattgtataagt

SEQ ID NO: 170983 - DNA, 263 bp, Arabidopsis thaliana
ttccttttttttttattttttttttttgaaggaataagcgattgagcgaatggatggtccaaagttgtgagacaaagtaataacataacctaaaagagtaaacgcttgaaatagagaaaccgatggtggaataaatcagagccctccaaaacatacattgatgaaccctaataaaaaccatttaacaattacatacagccaaatctatttggtgaaaaaagattcacgttttttttaacgcacttagagaagaacaaaacgaa

SEQ ID NO: 170984 - DNA, 264 bp, Arabidopsis thaliana
gcgtgcaaaaatatttggatttgtgattgcgagatatatgtgatgggaaccattctattatacatgaaagaaaatttaaaaaagttaacttttgagattccgaggaagatgttacctgatatgtccttggaaccggcacgggaaactcatgaatgtcatcaattcaaggattaatctagttcttctagtgcttggacggatcgatagtttttaaagctcttcaaaccgcactatttcacttaaaaccggatccaaaagcaattt

SEQ ID NO: 170985 - DNA, 237 bp, Arabidopsis thaliana
aaaaggggttgaaaaatacgtattccaaatccggggtcatacatttttgaattaggaacagacagcgccattaataaaaatagaaagagagtgataagtgatcatcatcgtcttaagcagcatcgacttttttgcccttcttcttcctccgccgcaagagactgggcttgaagccgaccttgagcaacttttcgacctcctaaaactgaagccctttggtctcaggaacgagcaacc

SEQ ID NO: 170986 - DNA, 227 bp, Arabidopsis thaliana
cttttcgatagagatggcatttgctccggctccttgggttatcatcgctggaagaatctttgacgggttgggtgttggtatggcttcgatgacgtctccgttggatatctctgaagctcctccggcgaggattacaggtgcactagttagtaccaatggtcttctcatcactggtggacaactcttttcgttcctcatcaatcttgcttttgttcatactccgggaa

SEQ ID NO: 170987 - DNA, 146 bp, Arabidopsis thaliana
gaaatattggctgtttcattacaacgacgattgatacttaaacacacaagtaacttgcatatttcatgatattacacaattgagatacagaacaagaatcaagagatcttcttgttttaacggaaaaaaaacaaaacaaaagatga

SEQ ID NO: 170988 - DNA, 367 bp, Arabidopsis thaliana
  unsure (1)..(367): unsure at all n locations
aatgaaccgagtcgtttcatttctcagctttgagatggtttttctacaacaacaatggaacaaacactctcaaagtcacaggttacaatgtaaaagtggaactttctctaaagatacagaagcataaagtcccgttattttcttggtgtcttggacaactatttactctattgaaagtgcggtgaggatcatccgatcattcaggtacgcattggtgcaatctgaaccaatcgtttgatagtgacttaacaattcgtctatcgagcctatcggaaccagaaccgggccgaaggatacccgagtcaccccagacggaacacgagctacggtttttactagaatntgctaaacaccaaccaccaggcac

SEQ ID NO: 170989 - DNA, 245 bp, Arabidopsis thaliana
atggggttccctttcatatcaaggaaccaaattataacaacaaccaacaattttggccaaacttaatcaaagaaacaacaaatccttggattacacaccttcccacatctttttccttatttaaatcttcctccctttaacaaaagatctaacataaattcattttttttttatacattctcacaatttcatcccctaattttttttattggtcccccatgccccaaaatgttccttaaaacgga

SEQ ID NO: 170990 - DNA, 430 bp, Arabidopsis thaliana
gaatatatctataaagtaattgaagaaatgagatatcgacatagtaaggttaagtttctgaacattacatatctgacagagtttaggaaagatggtcatatttctcggtatcgagagcaaggcacttctgttgatgttcctcaagactgtagccactggtgcctacccggtgtaccagatacatggaatgagatcctctatgcgcaactcttgtcaatgaactatagaacaaagtgattccttgaggtaaatactgattttatgtttcttgatctagtcatgattctggttcatcaatgccttcttcaggctcagtttcatttgtttgcatttgcttgaccttctcgagctgtctcaacaggttcaacctttcggctccgtaggtcgaaggtatcaagcctggcacatatctctgaattgcagcaagcat

SEQ ID NO: 170991 - DNA, 251 bp, Arabidopsis thaliana
ccccctggagggggaaggttttctttccctccaaagaccaatgttttctttttttgcccagttggagagttgttccttgttccccccaaacatgaactaaagccggtttttttaaccataaaaaattgcccaaaacccccctcccatgaagagaccaagccgccccctcttcaaataatggcccaagatagtccccttccaagctagccaacccctgaaacccccttttttcttccatccactttttccca

SEQ ID NO: 170992 - DNA, 382 bp, Arabidopsis thaliana
  unsure (1)..(382): unsure at all n locations
ataagnaatattaattggtattcggaataatctttagacgttgggatcatgtccaaaaaaaaacaggaaaagttcaggttgccctagaactaaccctgttcttgatcttaagccctatttttggcattgaatcactaaaaacatatcagattttgaagaaaaaatgacttttttttagatggcaaatggattagggaccttcttgctcttacctttcttatttctccccaacagctttctccagaggctcttaactccgccggtctttttctgaggaacaatggcaaagcagtttgagtcggagcctttgcttttgtctgagagaagaatctgttctagtgcctcaatggtttcattgtaaacagagctgtttcctcccttt

SEQ ID NO: 170993 - DNA, 106 bp, Arabidopsis thaliana
catttcgtgcgttatacgaacttgtacatcatggctgttttctatcatcgatcggtgaattcgcggatcctcgagcttttcgatcggagactttttctctcatcgt

SEQ ID NO: 170994 - DNA, 211 bp, Arabidopsis thaliana
  unsure (1)..(211): unsure at all n locations
tcctttttttttttttttctgaaaacangaaacaatagacaacggccaatgtagatctttgaacatatttttcatggtcagtctcagcccaaggaattcaaatcgtacaaagccgtaaaatcaaagggaaaaacgacttaacagaaacaacaaacacgttacgaatacaagaacgcactgtaaattttaaattattttcaacgtatatatg

SEQ ID NO: 170995 - DNA, 440 bp, Arabidopsis thaliana
gtatacaaaattatacgttagtatataacggggttcatacattactgttaacatgtgacaatgtactagcagtagtgactacttctccattttgcttctgtaactgatacaaatgaaaacaataaataaacttacacacatatgactaggtttcagaatctggttccttctcattgctctgttcaggtaccgacggatcagacggtggttgtggagcaacaggtgagtcggaagcccgtggattcgatgatgatgatgatgatgatgaatttgaactataacacttaagcaacctatctttgtttttggtccaccaatcttctgcttgatgctcatcaaatctttttttactaaatctaactcgtcgaaagatcttgttaccattcatgtctacctcataagtcacataaacaccaggctcaaattgttctttactttct

SEQ ID NO: 170996 - DNA, 373 bp, Arabidopsis thaliana
atcagaatctttattattaattacttgatactcaaaatttcatcttttcttcgttagaactacagcttattcagcttaaaaaaaacactaattcccaagaaaacaaaagatactcgtaaccctagaacaagggcaaaaagagcttcataggcatagcaaaaacaagaaaaaaaaaactttgaaaaaaaagaaaagggaagatcaacgctggagatccatcattcgtgagaactcagtgaagcacacaaaaccatcaccgtcctcatcaacatctgctatcatacgcttacaatcatctaacgtgcaccgttcatctccgatggtcgagaaaactcgtagaagctcatcagccgagatcaaaccgtcacgatcc

SEQ ID NO: 170997 - DNA, 327 bp, Arabidopsis thaliana
aacatgttaaaggcctagaatggcctgaactcaaagaacatgtttttatacatatgttgggggaagaagaaacgcttgctcatactaaaagaaagagacgactgacaagatgtgtaaaaatgctaaccccaaaggataaactgaatgtagacaacttaatagatcccaaatagagacactggggatccagaaaaccagccaacgccactctcctttgaatggactgcaaggaagatgccattataagaggtgaaataaacccatttcatataccagatgcacgagacaaacccgttgcatttcaccctccaaatgtttgcacacaaa

SEQ ID NO: 170998 - DNA, 318 bp, Arabidopsis thaliana
gggccccccaatctaataaataaaactcaagcataaaatggtgggggtccaaattttgattcaagacctaagttaaagataaaaagtaaaaaagttttgggttggtttaaaacatgccaagacaaactacttctggcaaggtctttaccaaaaaaaaaaaaaacttctactggcaagctcagttcttaactggggcaagaatatcgagctgggctccgagcttttttttagggacctttttgggcttaactttaaggttggtaaggggttttttttgctcgtaaaccacgggggctttttccttcctttttggctcca

SEQ ID NO: 170999 - DNA, 315 bp, Arabidopsis thaliana
gaccaaatcagaaccgattttcatttgttaaccgtccatgtaagaccaactactacacggcttaaccggactaatcaggaaaacaaaaaaagtaggaaatatattaaaccggtttagcccatcacaccatctcaacatcccagtccatatatatacagccaaagttagctagggagcgagcttctgggcctcttgactgctcctacatagaaatgcaatctccataacatgaccttgtccgcctgatcaaggttgacgataaccttatcgttgaaatctctgccagatgctatgcaatgatttcctactatttca

SEQ ID NO: 171000 - DNA, 350 bp, Arabidopsis thaliana
aatccaaaaactgaaatccattatattaaaaccggttctcaactggtctctttgtatctcattatctaaaaagctttataaaacaataagattttggcacagcctaatcgctttctcagggcacagagccactcatattattaccctatctactaggttcctgctttcgtatacttctcaaaatgctctctttgttcccctgcaatatgttggattcttacgtcttgccatttctgattgtggtttttatggaacaacttcatcagagataacagccttgcccagataaacctgttgcatctactctttccagatcgtgtcacggaactccacccttatgtgtggcacgt

SEQ ID NO: 171001 - DNA, 393 bp, Arabidopsis thaliana
agcacgctaatgttttgttaaccataaaccaaaaaaacaccagagcagttcttgttcttgtctgtgccaggctcaaacccaactttgaatcacagcaatatgaatggtcctaataattatcacacaaggtgtatgctttggtaagagcttaacaaagaacaaaccggacaatcgagaatccgataagcctttcaaaccagcgaggtgtagttagggaagagatacatcaatcggtctagagtttcaggattaaacttccgagcaaataggtaacatggacgttgctctcctttccatagacacggctttactgtcgtcactttctttaaatcgcttgtgacatggtaagcaagttggatggacttgattttcctgatgaggtaaggagtgatg

SEQ ID NO: 171002 - DNA, 396 bp, Arabidopsis thaliana
  unsure (1)..(396): unsure at all n locations
ctataaaancaagacagttagagtattactgttgatatcgaagtgagaatttgtgataaaaactattgatgtaagttctcaatgaactcaaacttggtcataaacaaatcatttcgatattatcagccgccttagagaatctttcagctgatactgtcaaaagcttgttaagagacatgttctcacctctgctcttcaacttttcttcataccgatgcttgatcctgctatcaagcttgtatccaagaaatgcagggaatgcaagaagttcttcgacttcacgacccatgtactcgatcaaatactccagtttttcctctaaagaagtataattatactgcaggacttgaggatgttttgtgctcattgctagaatgtcttcgaatgaaagaccat

SEQ ID NO: 171003 - DNA, 303 bp, Arabidopsis thaliana
  unsure (1)..(303): unsure at all n locations
ttatcttnnttanttttctgccttttttttttttttttttgtggttttttttttttttaaacaacattacaaatttatttcaacagacaggtgagaattcggtagaatttggctcgcaacaccgaaaacaaacgttaaggccggaaattaaaacccaagaaagaagaaaaaagccgaaaaacgggggataaaatcaaaggggggggataaagttctgggggccacacaaaagcaaagggaaattaaccggggaaggttgggggcttggaggcaatgaaactgatgccccggacttgacggggg

SEQ ID NO: 171004 - DNA, 420 bp, Arabidopsis thaliana
gcaagcaatcgaaacttgttaacaacaatttacacatccagtgttaatacttatctcttctggaaaattaccaaactcaaaccaaaaaaaagaagagaaagagaatcacaatctaaacaagaaacgaagaatgcatcctcgatttcgcactttggttccgattcaatcgatcagaatcgcctcctcctcctccgtagtaaccagcgcttccaacatccaaactctcttcttctaccgctgtgtagtagtaatactgtccctgaacagatctcttgtagccactggtctcattagagacctcaactctctgtttcggcgcactttgtgaccgaactttagctttataagactcagtgttagccatgtaattcgggtgataacccgagtagtaatagttattacatgcccaagaatactcgc

SEQ ID NO: 171005 - DNA, 403 bp, Arabidopsis thaliana
acgaagaatgaaattaatgggatcattagcagaattttaatcccgaattacatcaattttctactatgtgtgagtactgctaaaagttacaggttgttcttattccctccggcgaatcttcagtctgggagatttgacagctactctctcaaagctagaacagaggccaatggtaagatcggaccaaaagcatcatccccacaatgaaggttgaagaaagaatgcagagtccgaacaaacagtgaataggaagagtttgtcaaaatccgcagaggatgaactttgagaccgggaagaacaaccctgcagagcaaagaagaacaatagttttcaaatactgagagaaccaagtaacaggtttccacttgatctcaacgcttgaactcttcatcctcttcccact

SEQ ID NO: 171006 - DNA, 261 bp, Arabidopsis thaliana
aaaaggtgaatcatataattggcaaaagccaagaatgattcggattctgatttaagagtgttacaaaaataaaaacaacggtcataagagttttggtacttgggaaactctgatgccgagtcttgttctaaaaagatcaagaaacatttttaactgtgtgtcaccaaaacggtagatattttgctttatcccattcatgaaatttttaaagatatgaaaatgtgcaaataaaaaaagaaaaatttgcggcaagggagaggc

SEQ ID NO: 171007 - DNA, 374 bp, Arabidopsis thaliana
cttatccttcttcttggctggtgtctccgttgtttcttcttcctcatgctttctcttcttcttattcttcttcttctcctcctttgcaacctctactacggcttcagtttctgcttcagctttcttcttcttctttttctctgatggctcttcctcttcgggtttctcttcttctaccttcttcttctttttcttatctttcttctttgatggctcctcagatttagctgaggtttccccaagaagagaatctgcagcagtgttgtaagtcttagcaggagtgataagaccgcctgatcccatctttttatccttgttatagacttcaatcttaggtttgcctttagatgaaccagacagacgacctaaatctt

SEQ ID NO: 171008 - DNA, 276 bp, Arabidopsis thaliana
atcataaaactgtattttattttcataaatgggaagaatttcaaaacaaacttgaccattaccgtggctaaaaaagctaagctcacaacacctaaaaattaatcattcaattgcaaaggttattacaatctaaccagaattgatcctttgtttctgttttattacaaaaccacacaagaaactttcacatgcatttctctctagaaagcattatagattgattacttaccaacagaacatagtaagaacacaggatcatatcatcgttcatactca

SEQ ID NO: 171009 - DNA, 304 bp, Arabidopsis thaliana
  unsure (1)..(304): unsure at all n locations
ttnntttttttcatttatttccttacacactttttttttttttttgggtttttttttttttttcccggaacaaccagaccaaacttttgataaaacaaccttaattgtttgaggggatttgtttctttgctgtccctatcaaaaaaaacaaaagggcgcaaaaaaaaacaaaaatttttttcacctcctatggtggcgccacaaaacaaaaaaattgttattggcttagggtttggacaaggggggtcctaaaccttttttccgatcttaacccttttggaaccaaaacaacaacattttgaac

SEQ ID NO: 171010 - DNA, 199 bp, Arabidopsis thaliana
ggaaaaaaaattgacttttttttaccgctgaggttcttggattaaagggatctaacaaagaacaattttcctgccacttaaaaacatcatgccccttttctggttccttcttcttcattgcggaagcataccaatcctagaaattcatcactacaaaacgtgtcaacgggaaaacccaactttttttcattcttttttt

SEQ ID NO: 171011 - DNA, 257 bp, Arabidopsis thaliana
ggacacaaaaataatgacgtcgtttggagaaccgttgaaacatcgtgggaacaccaatattgaaaagaccacaggcttaaaaaagaagcctacgcaacaattactacaacatcaatttccattttgaattggcttttgatatacaataccattccatgccaagcagactgggactttataagtatgggaagcatttcacgagagtttttagtcaaatgcaacttaacaaagaattttttagaaagctttgggaagca

SEQ ID NO: 171012 - DNA, 268 bp, Arabidopsis thaliana
aggccacccgtataagggcttatcaaaagaaatcttgttcagattcagataattaggaaaagggttagacacacatgtcttaaccgaaagaaaaacattttttaacctcataactaaaattttttacctccccaaaacaaacaccattcgagtttaagataattgacattgattgatccccgggttaatggggaaaccttgaaaaccataaattttcgattgccggaaaaggggggtccacactctccatctgattgggcaggtctgg

SEQ ID NO: 171013 - DNA, 366 bp, Arabidopsis thaliana
aataaatatactttaattttgtgtctggcacaatctggttttttttctaatctaataaagatacagtttgtcaaaaccatgaaacaaatatacgtgatgaaacttgagacgcaatcttcgtcctttgatgaatattggcgaagtacaaatgtcttttccacaaaacttttgttacaggctgctcttaaattcttcatgtttacacagtaactttcacactttgtgctgttactgaagctggactatcgaccttggctgctttaaacagttcgtctacaacttcagacagtgttggatgtgcatgaacagcaagttttatgtcctgaatacgtgttcctaaagcaatcgcgtttgatgcttcatgga

SEQ ID NO: 171014 - DNA, 171 bp, Arabidopsis thaliana
aaggggcttggaattatctactggaggggaaactagacaacactgaaccattaactactaatgggacgtctttctgagggttatgcagttcaaatgaatccactcacatgagcatatgaatatatctatcgttggggatatttgaagaagaaacttgttactaatgattgt

SEQ ID NO: 171015 - DNA, 439 bp, Arabidopsis thaliana
caaaacgaaacaatgtctcacgtttcatgagctcaagaattctccataaaaagctggaaaaaatggtatttgaaaagaaaaaacaagtgtactcaaaacgtgataaaatcataaaaaggacagttgggccattagcggcaaaaccctgcaagtgaccaccaatttcacatgatcaaaaatgcaaaaagaaaaccatagacgtctgtctctctttttaacccaattttgcctttgccttgagagaagcaatgggaatcttagagagaaccttttcatcgaaaaccacatactgtttctgcaactccttcattgctttctctgccaatggatcaaccttgtcctcgtgtttctcatacaacattgggactgtgtgcaatatcacgaagcaaatgtacaccaaagtcaggaaattgaaccaattgcccaccaccgagatgat

SEQ ID NO: 171016 - DNA, 181 bp, Arabidopsis thaliana
ggtaacaaacacctcagtggcacagtacagaagccggtttaccaaagagttgttacacgcatgtgatctcgtctatatttacaaacagaagcaacgaaaatgtttccccgggaacaacaagtcgtgtgaagcatagactgctgtggcctggttcagcggtggagactatccgtcctcagat

SEQ ID NO: 171017 - DNA, 136 bp, Arabidopsis thaliana
ataggcaaatatcaaatcaactggggggggcatgttatggctacactggtatacataacttccacattggatccaggagctcatgaacagctaaagagtttcttgcacatattttttaagagacaccaacgtcttt

SEQ ID NO: 171018 - DNA, 377 bp, Arabidopsis thaliana
  unsure (1)..(377): unsure at all n locations
ccatgcacctttctagacaaaggaaacagcacccattttgttacataacaaaaataaaaaccagaagaagaaacacaaatcatacaatacaatctatatattatggtttgncatttattactttttattcttcgtccacatagactaggcgctcttagtcatccacttactgaacttcgtatgctcaaacttgatgaattgctcagcttctttgtcaacatcctctgcttttgcaacctctctagtgcccatattctcgctctttgacctcctcatatctgcatactcgaagccctggattggttctttggctgcaaagacagctcggaactccttcatcgagtcccggtgatgatgattatgatgttgatggtgat

SEQ ID NO: 171019 - DNA, 130 bp, Arabidopsis thaliana
gtaaacgatcaaacacaatgttgtttcaaaagtaaacacatcactgtcacaaattcaaaaagagaaaaattgatgcaatgaacataaacatcaaagtttattaagccaaacattttttcccacgcgtccg

SEQ ID NO: 171020 - DNA, 215 bp, Arabidopsis thaliana
ataaagcttaaacatacaagaacagacaataatgaaattacacgagatagaactgatataatacacaagtgttgttgtttgctagagacaacaactaaggtgttgttgaagcagaaactggcttctcgaggactccttcagtggcttttttgaataggttatgtacctgtcttgaggtgaaaccgatcttttctaagtcggtaagcgattttaaa

SEQ ID NO: 171021 - DNA, 293 bp, Arabidopsis thaliana
agggagcacttatgggtcctttttttggactcataataaaatcaggaaagaatggttctttcaacataagccatgcctaaattttagaattcctactaggaattattaaagtaaagactatgttacattctcaatatggagtttcattttatgatgtctgattagtttttatctttttgcaccatcaaaacttcgcagagatcgatcattagaccttgacatatcaaatgatgaccttaagcggcctctttatcatattgacctcatggtccaatatgtgacaatggtagaca

SEQ ID NO: 171022 - DNA, 297 bp, Arabidopsis thaliana
cggtttgccctatgaagctcccgttacagaatctccaaaatcagggactacagaggtatgggaagtgataaatttgacggaagataaccattcgttacacattcatctaggattgttcaaagaggtagagcaaacggcattactggcggcaggattggaggagttcaaggagtgtatgacgaaacaaaacgacgcggtcaagtgtcaaattagcaaatacgctcgtgggaaaaagacagcggtgacggcacacgataggggttggaagaacgtattcaagatgatgccgggacatgt

SEQ ID NO: 171023 - DNA, 136 bp, Arabidopsis thaliana
ttttcttcagtgcgacgcttcggctttactatgcgacacataagaaagatgtctcactactcgcaaccactaacgcctttggttgctccatagaaaccatctacatctctatgttccttgcctacactcccaagcc

SEQ ID NO: 171024 - DNA, 382 bp, Arabidopsis thaliana
ggtgaaaacgtgaatctaaaattaacacatttgagccaagatagaatgttgaaatatagtggtaataagactccaactggctctctttcattaagactcttgttctcaaaagaaaatataagaaaatccgaaggtttcataaagactacaggcaaaattccatagaaatcacaagctctaataagaaaccacttcacttggcagcagcgtgcttggccttgttgtgagactcaagtgcattccctgagttgaaagccttcttgcatgaaccacatgagacttgactggccgactttgggctctggtttgcagcctttccccctttcttcttctcatctgttttctgaggagtaactgctactttcgccttctttgctgacac

SEQ ID NO: 171025 - DNA, 236 bp, Arabidopsis thaliana
tttttttttttttttttttttttttttttttttttttttttttttttttttttaagagacaacaaccggtttcatttcattcgtcaaggaaagtgttcttgcagtgacttttggtgattacagaaaacacaagtaaaagatggaaaggaagattcacattttattgaataagaccctgcaattatacatataagcttcaatgcttgaacaaggtttctaaaagcaaaagttgatac

SEQ ID NO: 171026 - DNA, 315 bp, Arabidopsis thaliana
gggaaaaaacatttggggacaaatagagatccggggatacatgcagatactaaaccattgggacaaagggagacttgcttgacacatttaagaaaatggccgggaaatcaaacttaatgaaaacaaactcaaccccctgtttttttttggcgtttttttttttagtttatttaagggctttttataaaaaaaaactaaaatttctttttttcgttgatgagcttttcaatgagttcagcagcttgctcaactgggggaattttttgggctttttttttggccatttggatgttaaaattttcctttaaacccatt

SEQ ID NO: 171027 - DNA, 234 bp, Arabidopsis thaliana
atcagaccaattttttgttttttttggtgtttttgggaactaaagagggcaagaatccttgatctgatgttttcctactaagcggctttgttttatgaaatatgttttagatttctgaatcatctcgatggatataataaactcaaatctttatttcaggagatttctcaatgggattagataatgcaggtccttcccacagctccgcaagatcctttctccgccatgacatga

SEQ ID NO: 171028 - DNA, 229 bp, Arabidopsis thaliana
tttatttttttttctcctttttaataacaaggttttttttttttttgggaacacgttaattacaagacctggatcacaaattttatatacacccaggtttaggcataacattcgaagacatatttaagagggcaatattcagactgaagttgtatggggagagaaaaaatggggggatcgaataagtagaaatacaaagggttgacaatttgttggttaaccaaaagag

SEQ ID NO: 171029 - DNA, 167 bp, Arabidopsis thaliana
tagcaaaccctaaaattgagaaggagatagagagagaaagatgggtagaggaaagatcgagagaaagaggatagagaacgcatacaacagagtggtgacgttctcaaagaggaggaatggattggtgaataaggctaaagagatcacagcactttgtgatgcaaaag

SEQ ID NO: 171030 - DNA, 242 bp, Arabidopsis thaliana
cactgataataaaactcactccctagaaaagctcgaaagtggtctttgcagataagaaaccagtggtgaagaaaccggcagagaaaactccggcagccgaaccagcagcagcggctgagaagaaaccaaaagccggaaagaaactcccgaaggaaccagccggcgccggagacaagaagaagaagagatcaaagaagaacgttgagacatacaagatctacatctttaaggcgttgaagcaa

SEQ ID NO: 171031 - DNA, 277 bp, Arabidopsis thaliana
ttaatacaaacacagagaagcttcttcttaaacgatgccgtactataccagagatgacaacgacgtcgacgatttcgatgagtttgatccaacgccgtacagtggtggttacgacatcacggtgatctacggccgtccgattccaccttccgatgagacttgttatcctctctcatctggtgtcgatgatgatttcgaatacgagagacctgaatttactcagatccatgagccttctgcttacggtgatgaagctcttaacacagagtacagtagc

SEQ ID NO: 171032 - DNA, 328 bp, Arabidopsis thaliana
ggggggaaagccaaattcagagagaaaagattccagagctgttacatccccaaattaatgagggattgatagaggaaaacaaaaaaaaagggttttggagttacatctccaaatgtttgggtttgaacaatgtcatattgtttacaccaaagagttgttaaagagcaatattaatttaggaagggtcttaagagccactgtgaagaggccaccaagaataaacattaaaacaaatgcaaaaaatatcctcccaatggatttcagactttgctttccgatttctggggttgaattatttgcaaaacccgtcgaaaatacagaagaaaac

SEQ ID NO: 171033 - DNA, 372 bp, Arabidopsis thaliana
aatctttcatatttgggatgtttagctagtggaagaagtatacattgaacagaaaagtaaaacaaaacccaagaaagagagcaacaagaagaaactgttgttgcattgtctagctattgtctttgtctgtgttatgtatataaaagctcgcacaaccaaacgagagaagaagaaacaataaaaaccaatggatgaaaaataaacaaatcaaaaccaataagaagccatgtgagtgtgtatgtatgtatccgtgtgagtgagtggccttcaatgtctggcgttagtagctttccgcttcatatcagcaggaccgaactgtttcatgccacgaggaccattccctaccttctgtgaagccaaaggacgtgaaac

SEQ ID NO: 171034 - DNA, 359 bp, Arabidopsis thaliana
tacgtcgtcagatctgctcgtgttttcgctccatttttgggtggccattactcagcttccgttttaaatatcacattagatggacgaaagcggaggtgatcggggttcagtggccacacctgttcaacagcgagcacatgaggcatggaggatttaccaacactatcttgacaagactacacctcatgcaaattacagatggattggaactcttgacgtcgctcttatctactgtttgagggtttactatattcagggtttctacatcatcgcctatggtcttggaatctaccttctcaatctgcttatcgggttcttgtcccctcttgttgatcctgaagctggtggggtctctgatg

SEQ ID NO: 171035 - DNA, 461 bp, Arabidopsis thaliana
agcagcttataacagaatcttattattccacttaaatatcggcatttggtataacaatgtcgaaatcagttacagtccattcagcaatttgattcttactcatatatatttcagttcctaaatctatcgacgaccaatgtctctccaccggtttcgtccctggatcctggtaaaagaagagtgactgagagagttttccgacatcaagttcccaagttcttggatctccaatccaaccttgtcctttctttgtcggatacccaaactgttcccacactggatgaggcaagatctgcagaatctcctgcggttgtggattactgtacggatcacaaacctcgtacggagattccgcaaaacgcgcgtttcccggaacgcagtaatagtgatacgcttcgaaagggaacttctccttgtccgtcctgtgaactttagtcccgtttggaaaagtatgctctggc

SEQ ID NO: 171036 - DNA, 368 bp, Arabidopsis thaliana
gtgggggaaaaaattaccatcttactataacaataataatattcctttcttcaagttttttaacgccatttcaagaatcttaagcaaaggacttcaaaaaagatttgaaaaagaaacaaaaggctctactagagagagagaacaattgctttgtatcttcctcagtcgatatagatttatagatatagatagttctctattgcatatagaagaatcaagaaacgacttcaaggacttgacaggtttttcagatccttttcctttgcataccaacttggtgctatctttgacagatgtggatacaagtctttgtatgaattccttattggcccttctgctactcctgtcgcatgcgatatatctttgag

SEQ ID NO: 171037 - DNA, 286 bp, Arabidopsis thaliana
catatgaaatgataataatcttcttgtaataaaattagacttatgatgtcatttttgtgacaacagagtaaatttcggttacagacatgtggtactaaaactatacatgaaacctgtgtcgggttactacaaacaaaaccgacttcttttgtttagagtgaaaacttttaaattttctttttaacactctcttcgctatataatgaaaaaactgccgcagcctaacgtgtttacaagatcaagaaaggaccaaaagaagcataccggtgttgccttatcctcagat

SEQ ID NO: 171038 - DNA, 355 bp, Arabidopsis thaliana
acgcgtccgcccacgcgtacgatggtggattctgaacctgtgatagagggcgctcgagattcttctgcacataactttgagtttggagaagctacagctgatgtgaacgtttgaaagatccataagaagcgaatctggtacaagaaatagcgcattacgcataaggttgagctctgcatctgtagacaaaacaaagaaacatgggattccttccacaagcgtgtatgatgatgcatcactagaagaatggccttctacctcaaaagctgagtccaggactagatctgcaagcgtgaggaaaccaattcttaatactgggataaggcagaatagtgtctaacgaaagccctcatgg

SEQ ID NO: 171039 - DNA, 349 bp, Arabidopsis thaliana
cataagggtttacattctgtccttgtccaatgaagacacttacataaatgtataagttttaaaacaaaagcaaatcattgagacataaatggagatagtctatatgaagaacaaaaagaaaagagagggaaaaactgttagtgtaggccttcttcgcatttgacaataatttgatcgacattaggtgaaatgacgttcttgcccaccaagtcatgagccttcaaggactctttgttccaatctgggttataaacaacggtcaaaatggagattgcacaagctagctgtgccccaagcaagccatagcataggcccatgaagcctaaaccccacacaaacgctaaaacaa

SEQ ID NO: 171040 - DNA, 331 bp, Arabidopsis thaliana
attaatgtagaattcgtgtatctttcttaaagggttcatatcattccataccaaagagagcaaaacattcaccatcaataaaatcaaaatataaaatctctctttaggtcagtctgaaaggtctctgcactataacagttctctacactaaccaacatttgcataaaccaatgttagatcgcttggggaatttgcttgacgctgatttcttccaagtctatcctggaatattttttaactggtacaagtgaaaacccctgagtcttggactgttggttaacgcttagcggctagcgggttacatgctagtgagtgaaggcactccttggct

SEQ ID NO: 171041 - DNA, 271 bp, Arabidopsis thaliana
gcatcacctcataccataattgtggtaaatatatataagacaaaatgtccattaggtacttttcatcgcatgataaagaaaagaaagacactctgtgaacatatacgtatgaactcgtctctctcatgtgcccgaaactccttacaacctttatttgacagttaaaaaacacggtcacagaagtttcagcattttcagtcttccttcgtgctctgcatccagcttcgggggagtgtaacttccgtgaagatcctccacaatgtactccttt

SEQ ID NO: 171042 - DNA, 332 bp, Arabidopsis thaliana
aactaatataaacataaaagatatgtgaccatcattattaagcataccacaaaaaggaacaaaaggactagagaacaatgcaagctctattactgattctgctttggtatcaaaaagagacttaacaagacattatgggttaagacagataacgctttataggagaatgataagacataacataagactccacgaaattggaaccgggagagcatgtgggacgaacagaaacgggcattcagatactaacatctaacattaggacaacctttttgggaccatcttatggttgtggctttggagaaaaaacaattaaaacatcaacatcccct

SEQ ID NO: 171043 - DNA, 360 bp, Arabidopsis thaliana
ataaaaacaattaaggggggcctttaaaaactgggtggggggttccaacacaaacatattcatttctaaacaaatttgagcaaatacacattaacattgaaaggaagagataagttagtgggtaataatgaaaaatgaagatcatttcttatttacagctttttctttctttctccgaactatttcatcggaatacttgactcctttccccttgtatggctttggtgggcttcaatttctaaccggtgcaacaaactggccgatttcgctcttgtcgcattcactcacagtgattcttgggttctattgcactttcactttcagactattcggaatctgcatctttaccgggtgtgaaaa

SEQ ID NO: 171044 - DNA, 237 bp, Arabidopsis thaliana
cataaacttaatccccttttcccaggctccaatggaattcaataaaccaaaacattttttcaatgggcacttatttgatttttgaaattcaaatgatctacagcttggtgggtgggagaccaacagggttggccctagacctttttttcaccgcacgagagaggtgctttaccgcttttttaggcaaggggcgaggtttgttaaaccacaatccttcatttaccaccattggttggc

SEQ ID NO: 171045 - DNA, 256 bp, Arabidopsis thaliana
aaccaaaaaaaacgccccgaacaaagaaaatgacagattggtccaacgttcatgaaacgcgatattaactttttatttacaagagttcaacatgaaactccggcgaaccatgaggaacgatttttagagagaatcccaaagggaactttaaacaacaaatccaaaatttttttattttttgcaaaagatcttcattagctatatatttctggattttgattttttctttaacactcccatcgaccaaatttttttt

SEQ ID NO: 171046 - DNA, 147 bp, Arabidopsis thaliana
acaaggagcgtaaaacccatttctcaggccccaatgggattcaataaaccaaaacattttttcaatgggcacttatttggtatctgaaattcaaaagacctacagcttggtgggggggagaccaacagggttgggcctagacctttt

SEQ ID NO: 171047 - DNA, 392 bp, Arabidopsis thaliana
tattgaaagataagctgttacgatgatggaatgattcgcataaacaaattcgttccctaaaatcaaaatctcatagcaagttgtaacccatcaaaactagcgaaaacagatacataggttcaaaagaagaagagctttgagttgcaatgcagacaatgaaatggtccttcttgaaggacatgatcaactctattcttctcaagccacaagagtgcttgcagttgtagactcgtacttccagacgggtgggagcttcttggtcttcttgtagtaacgagcaagacgatggattctgctctctacaagaatcagcctgaatttggaatccttatctttcctgttcctctcaagatgcttgcggatagcaacagctttcttgatcaagtgataca

SEQ ID NO: 171048 - DNA, 257 bp, Arabidopsis thaliana
ggggcaaacttttttattattattattaaaaaaaaaacgggaaccgtttcctttgaaggggggaataaatttaaaaagatcccaatttcacaaaagggttttataatttgggtttttttacttaaaaccttaaacaacgatgggtcatgggtctcatcatgttcttatttaataacttttttttaaagaaatcgtccaaaggccatttttccattatttaatggaacaacaaaccccccgacgacccccttttttta

SEQ ID NO: 171049 - DNA, 203 bp, Arabidopsis thaliana
aaaaaaaaaccttttaatccagggaaaatcaactaaaccgaaattaaccaaaaattatttattttttccaacaaactccttaaaaggaactttaatattttaaaactgggcacaatcaccatacaaaaactcaccaggttttttaaactcaacattttccaaataataagaaaacgggttaatcggaaacgcattttccgggg

SEQ ID NO: 171050 - DNA, 239 bp, Arabidopsis thaliana
ccttcgcttccactttaaatataactttccaaaggaacttgggggagattttttttacacataaatttgtggcccccagacaggagaacgaacaggccggttcccccaacaaaagtaaaaaagtggaccattataaacaatgaaaaataatttaaattttgggttttttttaaccctcaaaacagggaaatttttggtcgctttttaacaggtgttttcacatttcaaaatgtccgggc

SEQ ID NO: 171051 - DNA, 387 bp, Arabidopsis thaliana
  unsure (1)..(387): unsure at all n locations
nnnnnatantntatatttaccgnnncaaaaacaaaggggggccttggaaatcagaactcttcaacatgttcaagacattgactaacaacattcagaagaacaacaacatattttgaaacagaaacaaacatttgacatgagagactaaacgtcaatattgatctctgtttggtaaagctcacaccatcttcttgttgtgtctcttatgcggagtggacaagttagatcctaaagccacaactgttgttatcaaagtaccaattttaggccaactaaactcatcatccatgaaatcaaatgccaacacaacaaacaaagccacaagtggcgaagtacacatatgaacaacatcgccaaacacacccgaaacataaagcaccaaaccca

SEQ ID NO: 171052 - DNA, 369 bp, Arabidopsis thaliana
  unsure (1)..(369): unsure at all n locations
tttnntnnnnnttttatatattatttncnnnnnnnnnnnnnnggggnnntttgaaatttcctttcgttttcccttggaaggccctcggcctaaaaaacccatttttcctataatattatattcaaaaacatattgcattttcactcgaaagacaaacaaagatactctaattcatttaacaggggggctaagggaagacccctaacttacgtctcctcataaaccctagaaaaattaccgattggaaaaaaaaactctgcctcactatttaccttggacacacaaaactttctttcgcccaaaagaaatggtcctaggtaacttggtactaaactactccacaaactggtaaaccatggggaactgatt

SEQ ID NO: 171053 - DNA, 250 bp, Arabidopsis thaliana
ttccaataaaatggagacacgattttacagcattttaagaagaagaaacaacttcaaagaagaagggatcattatcgtgatcctaaaggggggtgagctccaaatcatcttaggaaccttttttttttgagtgtgtggggaatttcaagaaagacgaccttaaaacatcaaaagaaccattgcttttagatgggtaagcactgtgactttatttttagcagcaagcaaatccatctttgtgactgtcaag

SEQ ID NO: 171054 - DNA, 149 bp, Arabidopsis thaliana
atttaatcaaaaagctgtctacactcaacctatggcgaatgaacaagaagacatcatcttacctcactatgggtctgaagacggagacgagtggtatgtggatgacggatgattgcatgaaatcgtgcatggagatgaaatggaagaaa

SEQ ID NO: 171055 - DNA, 344 bp, Arabidopsis thaliana
ttttttttttgggggtcaagattttatttttattctttttattcaaagggggccaaactcaaaggtttacaacagccattaacattaaaattcaaaaacattaacccggaaacattaaagaggaacaacccaaagcttccattgggtccttaagaacattattattattattaacaattttagacagatctaagaaatttggccacaattaggaatgacaacagggttagaagttttttcagaggcagatccaacctttttaatatttttaacaacatttaattccttaacaacttggccaaacacaacatgttttccattgagccacgaagtttttttagtac

SEQ ID NO: 171056 - DNA, 128 bp, Arabidopsis thaliana
gggaaatgaagaaaagcatctatggaacccctcatttgattcacaaagtctccacttttgttttctgaacatttggcgaccgaagaaacgggtttacatgctgtgcgattaattctagtttatttttt

SEQ ID NO: 171057 - DNA, 172 bp, Arabidopsis thaliana
cttatgtacaaggatccaccgacggtggcggtgcaacccacaacgactgggaatccactgttgcagcgacatcaatctgaacagagactaagagaagtaccggagattgtcgaaacagagactacaaggatggacattacgagcggtcaatcgaagcaccctaaattcttga

SEQ ID NO: 171058 - DNA, 178 bp, Arabidopsis thaliana
ttttattacattttttggtgaaagcaacccctaaagcaaaaatgtcttttctctaacctttttttttgtcaacattatacgctcttcaactttccatacattttatggggaaaagccagccaaaaaatgccgaagcattccacaagaagcatttgtcgggtatcaatggggaagaaca

SEQ ID NO: 171059 - DNA, 138 bp, Arabidopsis thaliana
ctttttcacgttttcgcgttgattcactgggcagctttatgtgaaactatctctgtgtcgtctcgatcgacctccctaatctaaaaatctgaattgatttcttttgatcataaacaatgcatacaaaacacatagttt

SEQ ID NO: 171060 - DNA, 302 bp, Arabidopsis thaliana
gatgacatatatatttaaatcaattgtattgaatatatttatacaacaccacccccatatttcttctcaaatcaaacaacctcattttcaagtgacacaaaagttctatgcatatttttactattttatcaataaataatgaaagatcaattgtacattggtacaagagcaaacacttctaagattaacattctactcatcctactccaagatggaggatggccaaagacgcttccacatttcaatatcttttttacaatttatttttcgaattcctccatagaacccgtttttctcgttac

SEQ ID NO: 171061 - DNA, 157 bp, Arabidopsis thaliana
cctttgcgtccgtttcaacttattgctttcttccttctggttgttccccaaaactcaaagaactcttgatctgtgtaaacaaaagaaaaatcaacggttcaatctcggctccattcattgtgtgtcatgggattagagatcaatgctccaatggtgg

SEQ ID NO: 171062 - DNA, 301 bp, Arabidopsis thaliana
aatacaaacaagccattgtcaaattaatatatagagactacaactttcaaggacggttaaaaaaaaagcttataacgacaagtcactgaggttcgatatgccacaaacgaacggaagcgtcttctccggaacttgctacggtgcaatcatcaatgaaggcgactgcgttcactccaccgagatgagcgtttcttgcggttatgcgacttgaagctggcttgtccacttcatatacaatgacgcaagtgtctatggaccctgtggctaccatcttgttgtttggtgaccatgccaagctgtt

SEQ ID NO: 171063 - DNA, 471 bp, Arabidopsis thaliana
  unsure (1)..(471): unsure at all n locations
ctttagagcagatattattgaaaccggaagcaggcattactcttcttgctgcagttcgcctcggacatctgatgggccttcaaaagagctgatggaggagcagtctgtgaatgggagcgatgaagatgatgaagaaggcgacgatgattttcatgagcctgattctgatgaagatctcagcgataacaatgacgagcgcaaccgcgacgagattggatcggtggatgaggaatcgacaaagtcagatgaagagtacgatgatctggcaatggaagacaagagttactggacagacaacgaagaagaagagtctcgagacacaatctccatggtatcgcaaaacaaccacaacgaggcttcaaagaccaacaaagatgacaaatactcccaaaacctcgatcttttcctcaagacaacgaaccagccattgactgaatccctngagctcacgagtgaatacagaaacagaat

SEQ ID NO: 171064 - DNA, 477 bp, Arabidopsis thaliana
agggaccaaaatctccggaagagatgcttgccatactccagagaattgtagaagatagctcacctactttggtaactgctagggttgaggcggaggaaagaagaaccaatctgcgtctgagagaggaacaagatgctgcttaccgtgctgctcttgaagccgatcaagcaagggagcaacagagacaggaggagaaagagcgtttagagagagaagctgctgaggcagagaggaaactcaaagaagaagaagaggctcgggagagagcagcgcgtgaagctgaagagagacaagctgctagagtgcgaatgagacaagagaaagctcttgctcttggagaagaacctgagaaaggccctgatgttacacaagtgttagttcggttcccgaatggagaaagaaaagggaggatgtttaagagcgaaaccaagatccagacattgtatgactacgtggattcacttggactcttagata

SEQ ID NO: 171065 - DNA, 331 bp, Arabidopsis thaliana
aaaacttacgcaactctccttgtgctcaaatctgacattataatgacaaaacttttataaagatgtactcactagtcaaagtttcaaaccaactaaaccggttaaggtaagagacaacttgctgccttagctgtatccagaaaataatgtaaagactaaagactgagagcatcatttgcaagaggcaggggattttattaactctctcttggccctgggtatagccttctaagagaactacatcgacgcttctgctttctacctgttgagagtcttccagatgcatgcaaagcctcttctgccatagccctccagtgttgagcgcaggagt

SEQ ID NO: 171066 - DNA, 374 bp, Arabidopsis thaliana
gcatactccactctgacgccatacataaacaattcttaactttatcctctcatccttatcactcttcctcaaaacttcgaaaatgcatgcgatcgatttcaaagagattcaggagaagctctctgatggattccggccttggcaacgatcgtttcagttctgggctcgtgccactgatatctacaccggatacaaggtttctctttgattgatgggtatttcaacttcgtatgaacttcgtcaaggatgttaataagcacgaggagatgtgggagagacaacatgaacttgctgctcataaagtttattctatgtgctctgaccttggtggtttcttccttaagattgcacaaattctagggaaacctgacttg

SEQ ID NO: 171067 - DNA, 220 bp, Arabidopsis thaliana
ggattaacttctatgtattccaccaatcaggtagccaattcagagggtgagggagaacaatttgacttcaaaaaaaccttttttttttgtttcttaacaaaaaaaaaacaggttaatttatttatgggcacattgtttgtgaaaaaggggaagaaaacttagaacgaggcgttcaagctgaagcagtgagttacgaaagatttttccattcaagcttaag

SEQ ID NO: 171068 - DNA, 187 bp, Arabidopsis thaliana
aatccaactgatataaaactttatggccaagggatataacaaataaaaggtttgaaaatccaaatgggagattaaatggtcctaaaattgaatttggggacaacccccaaaacgctgagttttcaaaaaaagattttccagtttttttttttctccaagaaatatccaaacccttacccaacggtaa

SEQ ID NO: 171069 - DNA, 387 bp, Arabidopsis thaliana
tgatgaaactctggaggcatttttcatcttgtcaaggtttacacaaaggtttaatattggctacaaataatctgcgttatatgattagagaagcaagctctggtcattatcaccttctctcttcaagaactggtactgctctttctcctcctgacaactttcttcacagtaaccgtgttgtcgctcttctctttgttgtctgtactattcacagcttttacagaatccggttggctcctcatgcgcagtatctcgccctttgcagagcccaagtcctcctcgagcttcttcactttcttctctagcacttccctttcttttcctagactcatcacgaggatatgtgcatcttccacattttccttagcttcttttgatgcattcttt

SEQ ID NO: 171070 - DNA, 314 bp, Arabidopsis thaliana
taaattacattgactcgtgaatcttatttcttacgttcattgtattgcatcattacatgatttccttattaccttgattacattagaaacatgggacgtacaaaagagttcttaaggtagacttgtctcaaggctcatggaagttccacttgcttaatattccatatgtctttggcgtattcgtggatcgtccggtcactgctaaacttgaatgaacctgctgtgttcattattgacattctcgtccatcttttctggtctcggtatgcctcgtcgactttttcttggcattcgatgtaactaggaaagtcttt

SEQ ID NO: 171071 - DNA, 278 bp, Arabidopsis thaliana
cttacccatagaacttctcttttctggcttttatatcttctactcttggcttatctctaaaagaacacaaatgggaggtagtaagaagcatgttgtcactagaacctcttctccttctcttgcaattgtccaggcgaatcctcatgacaacagagaagttgttcccatcgaagcaccgattatatcttcatataacgataggattaggccgttgcttgacacggttgaccgtctaaggaacctcaatgtgatgagagaaggcattcagcttcccacca

SEQ ID NO: 171072 - DNA, 244 bp, Arabidopsis thaliana
tttttttttttttgtttttttgatagttttggttgctgttttttctggggaaaaaaaataaataaaggccaaccttttcctggggatgggggggtcaaattttttcccattttccattacaaagggctcaaatttttaacttaaggtcattccccataatagcatacaaacttttttttcctcccaaatcccgatcaaaacccagacctttaaaagaaactggacaatggttttttttgtgggg

SEQ ID NO: 171073 - DNA, 263 bp, Arabidopsis thaliana
aaagctgaaagttaaatcctaagcatataaagaaagaatttgcatactagcaacaagacatgctaaacattgagggatcacaatacgtagttccttccttggaccggtatcgggatgtaacatctagtcatcataagctgttgctgatgctgctgctgctctagttgatattgctgatcatcagctcttcttccagtactctcctttctactattgaccaaatcgaaaatcaacttagtgaagacacgagccgtcaattcgct

SEQ ID NO: 171074 - DNA, 282 bp, Arabidopsis thaliana
  unsure (1)..(282): unsure at all n locations
tttntttttttttttttttttttnatantttttttttttttggtttgtttttttttctttaaaagaatatgggccactacccctggccataaaaagtaataacctctaaaagggaacataaagaggatcatagcactccaaaacgcttgggagaaactaaaagagaaacttaaatggaaacacaccacatttaacatttacaccaaccaaagaacttgatagaaaatgggggaagccaataagggaggaaaggaactctttctggaccacctttgggggctt

SEQ ID NO: 171075 - DNA, 267 bp, Arabidopsis thaliana
atcaacttacccttctttttttcaaaatcttcaggaaacagagaacaatttgggaagcccaatttggttccaccattttttaagctttcataactgaacttcaaaaggggaagaattcttttttccatacctggaaacttggggcccggcgaattcaaaacattaatcgcatggccccatttttggacaggctttttacataccatgggtttgccaatgacattgagggcaaggggcaagccatggtattttgcagcaacttttttt

SEQ ID NO: 171076 - DNA, 338 bp, Arabidopsis thaliana
  unsure (1)..(338): unsure at all n locations
ttttntttttttttttgtgtataatcttgttttatatagatgcatgccagttcttgtatttcttgcaatttgtgcagtcaaattttctgacttggttgttctgaataaattagctaggaaaaaaatgatcccaaggcagcctgggatttaaaactattttggtcatttgccaaagaaaaaaaaagcaagagaagatctccccactcttgctaccaaacctaactcgaggatggcttggtaggcaaggtaggtatactttgttcatctctgaaaaagttttctggatccacggctgttttgactttgaccaaccgatcaaaattctctccgaaatactt

SEQ ID NO: 171077 - DNA, 289 bp, Arabidopsis thaliana
aattcaactatttccaggtacatatagaaaactttgtgtgaacttttagatatcgcgaccatattttaaggttgtattcaatttttcttgctagcaacatcaaccaataatatttaagaataataggtgcttgagatccttataacatcttacaacaacaaagattctgcagaagaaggagagaggctctcaagtctcaaccacgacttccccgcttgccctttagctcagggtccctttggatgtgatcaagtatcagtagccttggtccaggcgggatgctcacgtc

SEQ ID NO: 171078 - DNA, 407 bp, Arabidopsis thaliana
aatgtcacaatcggacgtttctttatttcaaacatgaattaaacataatgaacattaaaataaacaaaaaacataatgaacatacaaatgtctactgataacaacaactcatgaacgtaacaaataacaatataataaaaatgaaaccgatcgcaagagaaaatcttgatcttattagattatttacacctcttcataacttcaccactgatgtggagttggaatcagctcaagagggactttcttggcgacgacgaaagctccagcttcttccatgtctatgtcttcaattttcattccatcaggcaaactccaatcaaagaagtaaagaacattaagtaaaccgagctcgacgatagttatccccgtagccattcctggacaaatcctgcgaccagcaccaaaag

SEQ ID NO: 171079 - DNA, 362 bp, Arabidopsis thaliana
agaaaagtaatatgttactcgtagttaattttctaacgaatgttatatacaatcacataccgatacttttttctttcttttcttaaaccgttattgtactaaatgtaaaacttgaagaaacattcaccgaagcagagaagataaaggtaacaacaaaaacaaacttatcaattctttgccccttaagtattgataattaaccatccaaatgaaaaagattccaatctttgtattatttctttgttttctccatcctccgatcaataatcacgtcttctccttcttcaccggaaccctaccgtcagtaccagcaagcattgcgtacttatcctttcttgtgaaattggtgcactcaaaaccta

SEQ ID NO: 171080 - DNA, 372 bp, Arabidopsis thaliana
  unsure (1)..(372): unsure at all n locations
ttttnttttttttttttttttttttttttttttttaataaaagattggttacaaaagaaatattatagagtttgtattatcatgttgaacggtaacaatttttattccagcaaaagctttagcggtatgttggagtctaatcgtacttaataaaggttcaaagctagaatttgttgacagggactacggctccatttttcgcaccagactcgagcattgcttcaagaactgcaacgtcacgagcaccttccacatatgatagacgaggctcttgctcctttgaagtttctgaaatatcattgaagaacgcttttaactcttcagtcactccgctgaatgggtaaaagatggtccttgatgtccctccttccc

SEQ ID NO: 171081 - DNA, 310 bp, Arabidopsis thaliana
cgatcaaaaccaaaataagctccatttcaagccgaaaattggacaacaaaaacaagggcccataatgaactttttccacttaaaattcaaaagctaaaaacaagaagttaacctttattgataccaaaaacattttttgataccaaaatcaataacaattccgattgaaatatggagcctttgagaaagacttgaaatcataacttgacgaacacgagaagataatttttgcgcactcataaattcataattcccataaagaaaaagacaagacttggaagggtctccacattaacaaacttttggaagc

SEQ ID NO: 171082 - DNA, 142 bp, Arabidopsis thaliana
gaatagagaaaaattcacgtgggggtcaattactggattggttttagacagatgtttcgaagtttttgagcgaataaaaaattaactgtgttgcttgctgcactaaaacaaccatgtcgtttttgaatctaaaacatgtgag

SEQ ID NO: 171083 - DNA, 462 bp, Arabidopsis thaliana
ctattaacgattaacgaaaaatgatatcacaaaatcgtcaaaccatgctacatagtaaaagggactgctctatagtgtcccgactccaaacaaaaaaaaaaaagtggataatgatattagtgagaagcggaagcaactttctcgcagttttctgattcagaatcatcttcagagaaacttggcggtttaggaatgaggcctaatgtcttgaacatgagctggtcagcgtcaaaatcattgtttggtgtggttaaaagcttctctccggtgaagatagagtttgcaccagcaaggaaacagagagcttgttcggacattgagaaccggactctaccagcagacagtctcaccatcgcttttggcattacaatacgtgcggttccaatcatcctgatcatctcccatatctcaactggctgcaaaaacacaaacggttctcaaagccatttcctactaagtagc

SEQ ID NO: 171084 - DNA, 296 bp, Arabidopsis thaliana
gagattgaacaataattcaaatttatgaaacaaaaactaaggttcaattcaatacttattcattcatctccaatattattacaaatgtaacaaataaatacacagcgagcaaaacagagttcgattttcgaacaccattttcgctcaccatcttcaatttcgattccacaaatggaattccaaaaaaaatcaaatcaattaaacaagaatattaacataatttaataaactcaataaaaatgagagcttgatgaaccttttttgtcagaagactagttattattggcatgctttac

SEQ ID NO: 171085 - DNA, 180 bp, Arabidopsis thaliana
aaccgggactcatgaaccgaaaataaaaggcggggtggttccaaacaatttaattcccccgcccaaaatttgggttacaaaaaagttttcacacccatttgaactcggtttttttttcaaacaaaagcaaccaaaatgtttccccgggaaaaacaagttgaatgaaacaaaaactgttgt

SEQ ID NO: 171086 - DNA, 397 bp, Arabidopsis thaliana
caacttacataaaataaggttcaaattggaaatgttccggccaatcacaaattcacaacattatatgttctcatcaaaaaaaacatcccaaaataaaaaatgcaaagtcaacattataatttataaaaaaaaaaaaatcctacaaatccaaaaacatcctctgtactcatttcttttcttattttcttctttaaaaaaaaaaaacaaagagcaaattcatcaccaaagatccacgtcatgactgcattttctcgacacaatcctcgacggcgccgtcaatttatccaccgttacatcacagtcaacattaacaatcatagtccacgtcttaacagaaccaaacttaatcttcaccggagctttaatcttcaacttaaacggcaaccgtttcttactc

SEQ ID NO: 171087 - DNA, 424 bp, Arabidopsis thaliana
actgctagcaatcattgaaaacaagaattataaaatacgtgtggttaaaaaccaaatctactacagtaaaaccataataatgacacgtctgagatcttgttctgatgctcacaaattgatctcgggggtgttaacctaacaatgaattacacaaagcaaagtatcagtcatcttcatgaagcttacacacacgacagcaaccaaatacacacatgtagcttgagaagtaaacagagtaaggcaacataaagacttgattcacctcacgatcctcttctctcgaggataaactgttttaagaaagcatcttgagaaagcttttgtccaatctcccatcatgcaacatattagtgaccaagccaatggttgaagcatctccaacaaacctgcaactcctcatttctctgatgagttcagctgatgc

SEQ ID NO: 171088 - DNA, 299 bp, Arabidopsis thaliana
gtccaaaaatcacaacataatcattgactttcttgttttttctcatatagatagacgaatcaacgtttataatttgggttcttctccagccaatcttttatgattatacgaagagtgtgatttggaacgagattgtgattctcaagcggcttgtttgtctttggagaggttcgacctcctgaccttagccactttctgaattcctctgcctcgtaggtgaaaccatcagcagccacatgaggatctcgcattatctccattgaaatgggacacttgaaatcttcgagacgtgggtcttc

SEQ ID NO: 171089 - DNA, 180 bp, Arabidopsis thaliana
atgaaagggtttttattttatgggtaatccatttattcaaatttcgttctcttcggaatctttttctatttccaattttgttggaaacctcctgccccgagagaagtaaagtccaaacagatttcaagtccaaaaaggatttcattctgtctgaataactgaaaaacaaacataagtgtt

SEQ ID NO: 171090 - DNA, 300 bp, Arabidopsis thaliana
agactgacgatatttattgttcatagtggaagatcacgcaaatcaatttttcagccatttacttaacattgatcaacattatttcagattaagaaatggctcccacagtaattaattcggaggatgacttaaagcgaaaaaaacgtttacgggaataaaaaccgaagaggttgaaggcggatatggaagagaggaggaccatgagagctgccgcaatgtagtttaagatgatggcacttcccatctgaaaacagaaccttgtgaacttgtagcaccatttcatccactgaagctcccttg

SEQ ID NO: 171091 - DNA, 318 bp, Arabidopsis thaliana
aagcataaactggatcccactctatttctctttgatatttgtatatcttcttacatacacgtgaaactatatatgtctgtataataatcacacaacacatagcaaatgctcttctaatacatacatatatacactcgtctcgttacacgattcgaaccactcgaactctgcgtcgtgatgataacaactcgttcaatctcccaatttcaaccataagttcctttattctctgatctttctctctgaggagaagaagcagaaatctcagtttctcttcatgtagccgtcttcaccatctcacgagcttcacataaacaa

SEQ ID NO: 171092 - DNA, 160 bp, Arabidopsis thaliana
ttctttgctacaagaccacagaagggtacgggtgggggaagacgactgaagggtgcggttgccataagacgacataagggtacgcggtgcagaagacgacagaagggtacggctgcaagaagactacagaaggatacggctgcgagaagatgacagaagg

SEQ ID NO: 171093 - DNA, 338 bp, Arabidopsis thaliana
aaataaacaaacttcattcctgacaacacaaaaatgtgcagaaccaacttttggcagaaattaaaaagagaaaaatggtcacaatctcagatttaaaagacaagaagactaaaaagcttaggctttatctatgactaactgaatgaaattcaaatacaaaacaattagctttgtacaaagaatccagctttgaatctcaatcattcattatttatcatcagagattgataaggaaccttcttgatctccacaaatgttgagtactcagtgctcattggttgacacaaggcgtgcaaaaccaaccctgactgcaaccaaaacttgaatatataatctta

SEQ ID NO: 171094 - DNA, 351 bp, Arabidopsis thaliana
atacaaaacgaggagggcttcttgctataaacatacaaaaatcaacaagctttctttgcaaaccagaaaaatttaatcagtattttgggacaattgtagtgtttttcaagtgtcccatatcataacaatggcaatgacaacaactccaaacaacacagccaaaaacttataacgaggctcatcaacatgaactttcttgtttgggcgatacccttttgccaacaaatggttcacagatacatacacaaataccccacacgccaagctcattgacaatgcgaatatccaatccgcgatggacccttgagtcgttgcatcgatgactatcccgatggcaacaccaattgggct

SEQ ID NO: 171095 - DNA, 380 bp, Arabidopsis thaliana
aagaagctccacaacgttcattttaagtcagaaaatgtcagccaaaacattctcttattcacagagagatgatgtcgtttggtagaatactgtaatacacaaaaataaagttttaagttcatttacaagaagaaaggcttatatcccattgtttatcgatcgatcccttcgatcttgtcttccacctgcgagtacaactccttgagcttctctatgttttcagcggaagtgtcccagtagccacgaccattggcctccaagaaagtctgaagcattttcctgaaggagttgggattggtgttcatgagacggttcagcatctcctcgtcttggatgaaagttgagttggccttctcgtagacccaattgtctacttgacc

SEQ ID NO: 171096 - DNA, 544 bp, Arabidopsis thaliana
agaagagcttgacggggcatgaccgcgtacgtaagcttggatcctctagagcggccgctcttttttttgttttttttctttttttttttttttttttttttttttttttttttcccaaaaaagctttttttttgggaaccaataataacaccagtttttggatggaaatttttttcccccaaaaaaaaacccaacggggtgggggggtttttcccaaaattttttttaatccaccacctttatttttttgggccgcggggggggcccgggaatttccggcccgggcctggagggggacccacttttccttatgggggggggattaaaagctgggggaaacaagggccaaagtggttcccgggggaaaatggttttccgttaaaattcccaccaaaaaaccaaccgggagccataaggggaaagcccggggggccctaaggaggggccaaccccccttaattggggtgggcccactggccggtttccaagcgggaaaaccggcgggcgccctggcttaaagaatcggcccaccgccggggggggg

SEQ ID NO: 171097 - DNA, 572 bp, Arabidopsis thaliana columbia; identical to SEQ ID NO: 125418

SEQ ID NO: 171098 - DNA, 535 bp, Arabidopsis thaliana
acgtcgcatgcacgcgtacgtaagcttggatcctctagagcggccgcccttttttttttttttttccttttttttttttttttttttttttttttttttttttttttttttttttttttttttttttttaaaaaaggaacccccaaaaactttattttttatacaaaacccccttttttgttttttacaaaaaaaaaaacaaaacgggttaaatttttcaacactggggacccccccaaagggaaacaaaaaaaaaagtttttcggggggggaaaaacccttttttcccttaaaagctaaaaacgggaaaaaaaaaagggaaacccaacccttaccccggttttttttgagctttgtttgcaggaatatgtccggcctaaaaaaaaacactatcgttatggggggcccctgccatactttaagcggccaaaaggccccttccgggtaatgtttaaaaaaaaatgcaaaaaaacccctgttttgagtttttaatatcccacccccaattccaaaaagggcccccattaaaaggggg

SEQ ID NO: 171099 - DNA, 511 bp, Arabidopsis thaliana
  unsure (1)..(511): unsure at all n locations
atgatactccagctctctacgactcactatttggaaagctggtcacgcctgcaggtaccggtccggaattcccgggtcgacccacgcgtccgcccacgcgtccggaaagcggctgcggctgcggctgctgcttctggatctaacaacgcctgattgaagaaatcacactccgatatcaaattcaatggagatcacagttttgaaattcatttgatggtaataaagattctatagaagacagaaaacattatgtaaacagttgttttttttttgtcaaacatttttgttgtcagttaaaaaaaaaaaaaaaaaaaaaaaaaaaaaaaaaaaaaaaaaaaaaaagggggagcgatataaaggatacaagcttacgtacgcgtgcatgcaacgncatagctcttctatgatgaacctggggggggtccattggaagcaactttactacggggagactgggaaaaccttgtttttttttatcttaggcgccttgaatcacatccccggttggcca

SEQ ID NO: 171100 - DNA, 544 bp, Arabidopsis thaliana
  unsure (1)..(544): unsure at all n locations
agctctctacgactcactattgggaaagctggtcacgcctgcaggtaccggtccggaattcccgggtcgacccacgcgtccgcccacgcgtccggacgaggaagacaagagatccatacatcattgtcaaagctagggatttgattaagcttctttccagaagtgtccctgctcctcaggcaattaagattctcgaagatgaggtgcaatgtgatatcatcaagatcggtaacttggttagaaataaggaaagatttgttaaaagaaggcagcggcttgtgggtcctaattcttctaccttgaaggcgctggaaatattaaccaactgttacattctagttcagggaagtactgtagccgctatgggtccatttaaaggtctcaaacagctcagaaggattgtggaagactgcgtacagaatataatgcatcctgtataccatataaagactctcatgatgaaaaaagaactggagaaggatccagctcttgcaaatganagctgggataggtttcttccacattcaggaagaaaaatgttaag

SEQ ID NO: 171101 - DNA, 565 bp, Arabidopsis thaliana columbia; identical to SEQ ID NO: 129105

SEQ ID NO: 171102 - DNA, 532 bp, Arabidopsis thaliana
acggcgcatgaccgcgtacgtaagcttggatcctctagagcggccgtccttttttttttttttttctttttttttggcataatagttgagaacttaaatactactttgagtactttcactaatacatattgttagaatgaagcttcttcataacataaaactactttatttgttgtaatctttttaatacaaattttatttggagctaaactttattggtcacggtaaatatccaactaccagttgtagctttcttgccgcttaagctttacaaggagaaagaggagagccgcaaagacagtcattacccacaaacgcactggccgggaactttgttactggaagctttccacaaagatggttgtgactcacgttcaatgtctttagtccagccaccattgccggcaccttcccaaataccaagttccttgatatatctaaagttgtcagcgtctttgcaaacgttagcttccccatatcgaatcgtagtttgttacccgctgccttgaactccactagatactctgtttgg

SEQ ID NO: 171103 - DNA, 568 bp, Arabidopsis thaliana columbia
  unsure (1)..(568): unsure at all n locations
atgatactccagctctctacgactcactatatggaaagctggcacgcctgcaggtaccggtccggaattcccgggtcgacccacgcgtccgcccacgcgtccgctcatctttttgtaccgctccgttgcgcctctctcttcttcccttcctctctctagcggcggagttacattgtcggccgccggggaaaccggcgacagtggattctctaaactcttaaactcgctacgtcgattcttaaaggattcatcgccgataacttttatacctccttcttttccgataggatcgggactcattttgtttccaacaccccggatccggtgatttagggcgctttttgatgcttatcgagtaaaggatttatcgatttagtgatcgtttatggaaggaggtggtggttctggtgagcgttcacggattgcttcgaatactcctcgaagcttgaaggagaagagcgatggggttggtaggactgtgtcttctactgaaactaggcagaattatcagaagagatccagaatggttgttagtgattcggaatcaagtgatgagtntatgaaacca

SEQ ID NO: 171104 - DNA, 569 bp, Arabidopsis thaliana columbia; identical to SEQ ID NO: 129120

SEQ ID NO: 171105 - DNA, 541 bp, Arabidopsis thaliana
atagaagagctttgacgtcgcatgcacgcgtacgtaagcttggatcctctagagcggccgcccttttttttttttttttttttttttttttttttttttttttttttttggaaaacggaaaaatcgaaaagactatcattccttctatacattgaaaacattctctacccatgagagtccatttggacccaaacctaacaattccttcacacataaattgttcttgtttaaacactactaaacaacaacacacaaaatctcacaataaaacaatcaaccaaaccgctacaaacgctttaaatcaatttcttaccacattcaatgatttcacaagattagtttacatcactcactcagagctattggagttctcctctctactatcatcatcatgatcactctgtggctgcttctcttgatgctccaccgcattgttcgcttgttccgcattcgcgtttgcgtttccgcctcttgaataagccgagttcaaagcggctaacatcccgagattcgagtccggcatacttagtcctaagttctg

SEQ ID NO: 171106 - DNA, 562 bp, Arabidopsis thaliana columbia
atgatactccagctctctacgactcactattgggaaagctggtcacgcctgcaggtaccggtccggaattcccgggtcgacccacgcgtccgagacaaagaagaagacaagagtcaaacttgaaggcgacaatcggagcttccatggccgtttcttcctctttcaccaaaccctaatttcaatttcatcttcttttcccttctttctcaccggaaaatggatctctccgacatccgaaacaacaacaacgacaccgccgccgtcgccaccggaggaggagcaagacagctagttgacgcatctctctcaatcgttcccagatctacacctcccgaagactcaacactcgcaacaacctcatctacggcaacggcgactacaacgaagcggtcgactaaagaccgtcacacgaaagtcgacggaagaggacgtcggattcgtatgccggcgctatgtgcagctagagtttttcagttaacgagagagttaggtcataaatccgatggtgaaactattgaatggcttcttcaacaagctgagccagctattgttgctgctacag

SEQ ID NO: 171107 - DNA, 550 bp, Arabidopsis thaliana columbia
atgatactccagctccatacgactcactatatggaaagctggcccgcctgcaggtaccggtccggaattcccgggtcgacccacgcgtgcgctttctcaccgctttcttctcttcattgaacaaaaaaaaaagctcttaacttttttttcttctttaggtaaaatttgacaaaagctctcaactttcaaactctgtttcttcatcatcatcatcatcaccatggacgccctgcttcaagtttcagttgatgggtttagatttgagaacggatctggatcttgctgcaaacccagaaacaatctcgaatctgggaacaatctcttccctgatttccacgagtctcagaatcagtcttcaccaaacgattcacctccaacggtgtgtttggataactctcctgttctgaagtacatcaatgatatgttgatggacgaagaagacttcgtaggtatatctcgtgacgatttagctttacaagccgctgagagatccttctacgagataattcaacagcaatctccagaatctgatcagaacactagctcctcc

SEQ ID NO: 171108 - DNA, 557 bp, Arabidopsis thaliana
atgatactccagctccctacgactcactattgggaaagctggcacgcctgcaggtaccggtccggaattcccgggtcgacccacgcgtccgttcagagaggcaatttgggtttatgaaaacagacatgatgcctgaaaaccaaggtggtcgtgatagactttcaagtatgccaaagagttcctggacatctgaaagttaccagctgaagccacaatctagtttttctgggtcgcacccctctggtagccctaacgcaagaaacactacaaatggtagtcagtgggaaagcagtttattttccagctcaatgtctgatttatttagtagaaagctgcggctacagggaagtgatatgctatccactatgtctgcaaacacagttgttacccaccgtgaagaagaaccgtctgaatctttggaagagattgaggcacaaactattggaaatcttctcccagatgaagatgatctttttgcagaagtgacaggtgaggttgggcgtaaatctcgtgctaatacaggagatgagttggatgagtttgacctcttcagcagt

SEQ ID NO: 171109 - DNA, 570 bp, Arabidopsis thaliana columbia
atgatacttcagctctctacgactcactatatggaaagctggtccgcctgcaggtaccggtccggaattcccgggtcgacccacgcgtgcgaaacgaacataaaacactacctaagagatcaatatggctggagtgatgaagttggcatgcttgctcttggcctgcatgattgtggccggtccaatcacatcgaacgctgcgctaagctgtggctcagttaacagcaacttggcagcgtgcattggctacgtgctccaaggtggtgtcattcccccagcgtgttgctccggcgttaaaaacctcaacagcatagccaagacgaccccagaccgtcagcaagcttgcaattgcattcaaggtgccgctagagccttaggctctggtctcaacgctggccgtgcagctggaattcctaaggcatgtggagtcaatattccttacaaaatcagcaccagcaccaactgcaaaaccgtgaggtgatgagctagcaacggtgagatgatgctactaccggaagtttcgaatccttattatataatggatgagattaatattaaataagatgttcg

SEQ ID NO: 171110 - DNA, 510 bp, Arabidopsis thaliana
ttgacgtcgcatgcacgcgtacgtaagcttggatcctctagagcggccgccctttttttttttttttttttttttttttttttttttttttttttttttttttttttttttttttttttttttttttaaaggaacccaaccttgggcccgaccattataaaaacccttatcccccccccccccaaaaattcctattaataaccaatggggggaagttaaacccaaaactccaaaaacccatttccttttaaaaaaattttggccaaaaaaaaaggccttttggtggggaaacggaaattaaaaaagggttcgtctttccggaaaaaaagcccaccgtttcaaatctcggtttttcggtttccaacctccttagggttatagggaataaaataaaaaagggggtctttttaacaagcctttttttttttttttttttggaaaacttggtttcttttttcggcggttttttttccaccactttttcccttttccggggtaaagccggcggtt

SEQ ID NO: 171111 - DNA, 565 bp, Arabidopsis thaliana columbia; identical to SEQ ID NO: 129132

SEQ ID NO: 171112 - DNA, 569 bp, Arabidopsis thaliana columbia
  unsure (1)..(569): unsure at all n locations
atgatactccagctctcctacgactcactattgggaaagctggtccgcctgcaggtaccggtccggaattcccgggtcgacccacgcgtgcggtgagacagagcctcacataaataaaaagtctcctaatctgaatacaactattactaacaataattcacttatctaaagaccatcatctgactgactctacgctgaatcatcacgaggaagacttgaatcgaccggagaagagatacgtgtagagatctgattggctcaccggagagaacaaaacaagaaatggggaggacgacgtggttcgacgttgacgggttgaggaaaggagagtggacggcggaggaagaccggaagctcgtggtttacatcaacgaacacggtctaggcgagtggggttcactgcctaagagagccggtctacaaagatgtggaaagagttgtagattaagatggctgaattatttgaggcctgngattaaaagaggcaagttcactcctcaggaataagaagaaatcatcaaataccatgctcttcttggaaacaggtgggcagcaatagctaagcaaat

SEQ ID NO: 171113 - DNA, 568 bp, Arabidopsis thaliana columbia
  unsure (1)..(568): unsure at all n locations
atgattctccaggtctctacgactcactattgggaaagctggtccgcctgcaggtaccggtccggaattcccgggtcgacccacgcgtccggagactctctgtagagaaaaaccctagacattttccggtgagaaatgagtatcactcgtagcgcgatcagatcgagtttgtgtctccggaaattggatccggaaatcagtcgtagctcgcttccgtttcttcaagagtggaggaaatgcctatctaccgccacggagcagcctcctcctgcctctccgttaccaccgcctccgggaggttctccgggagaagggaggttttatgggaagttttcaggcttttcaaaacatgctctgaagacagacataatgaacgtactcgagggctgcagtctgacatcagatgatctcaaattcaactatccgcgtggcgganacttaactcctgcggcagtctttgtgcagttcccatccctttccgcatatgataaagcactgcggaatatcgcanagaaaggaaagctatatagattagaaaaggctgctcgtgctcagtgggatcccattg

SEQ ID NO: 171114 - DNA, 572 bp, Arabidopsis thaliana columbia
  unsure (1)..(572): unsure at all n locations
atgattctccagctctctacgactcactatatggaaagctggtcacgcctgcaggtaccggtccggaattcccgggtcgacccacgcgtccggtcggaggataaaaagcctcaagatccaaatcccagatttgcttgcgaaggttgcagcgttctgctcgacatcaacgatggtgaccgtctcgtcttcgctcgtttatctagtggcgctatattaaaaattgggaataagaattattctttaaagccattgatcggagctccgtttggatctctgttccaagtcgaaaccggagaagatggttctttcctctctcgcattcttcccattaaacaagaaagtaacagtaataatgttatggacgattcgagagataatcgagaaatcgtcgacaataatgaagctcagaatcttactggtgaagaaattgaagctatgcggagagagggtgcanaaggggatgaaattattgaagctctaattgcaaacagcaaaacttttgataagaagtttcagttgtctcaggaaaaatataagcttaaaaagcagaagaaatatgcaccaaagctgct

SEQ ID NO: 171115 - DNA, 557 bp, Arabidopsis thaliana columbia
atgattctccagctccctacgactcactattgggaaagctggcacgcctgcaggtaccggtccggaattcccgggtcgacccacgcgtccgcaaagatgggtttcaaactcatctctctcctccttctttttcttccacttctaacagtcacaatcttgtcgggagtcgagcaggcctttgcttccgacaaggcactcctcgtgaccggccgcaacatcacggctgacggtggaaggtcgtcactgagagggaagaagcagaggagagcatcaggatgtaacttgttccaaggccgatgggtgttcgatgcttcttaccctttctatgactcgtccaagtgtcctttcatcgacggcgagtttgactgtctcaagttcggccgaccagacaaacagttcctcaagtactcttggcaacctgaatcttgcaccatcccaaggttcgacggtggggcatttctgaggaaatacagaggaaaacgagtcatgttcgtcggagactcactgagtttaaacatgtgggaatcgttggcctgtatgatccatgcgtcggtacc

SEQ ID NO: 171116 - DNA, 558 bp, Arabidopsis thaliana columbia; identical to SEQ ID NO: 123024
  unsure (1)..(558): unsure at all n locations

SEQ ID NO: 171117 - DNA, 566 bp, Arabidopsis thaliana columbia
atgatactccaggtctctacgactcactattgggaaagctggtccgcctgcaggtaccggtccggaattcccgggtcgacccacgccgtgcgaccataccataaaaaacatgaaaatcctctcactttcacttctcttgctcttggccgctacggtctcggcatccgttccagggctcatcgaactcgtcgattcgaaaaccatctttgggaacgtagccgaactcttagagaaagagaaactttccatcaactacgccaactgcagaagctggcaccttggtgttgagacctctaacatcatagacttcgacacggtgcccgcaaattgcaaagactatgttgaagactacttgatcacttccaaacagtaccaatacgactccaaaaccgtgtgcaaagaggcttatttctatgccaaaggacttgccctaaagaacgacaccgtcaatgtttggatctttgacctagatgataccctcctctctagtattccctactacgcaaaatatggatacggaacagagaagaccgacccgggggcgtactggttgtggttagggaccg

SEQ ID NO: 171118 - DNA, 575 bp, Arabidopsis thaliana columbia
atgatacttcaggtctctacgactcactatatggaaagctggtcacgcctgcaggtaccggtccggaattcccgggtcgacccacgcgtccgggtgataatgacaactttgttgtcataaatcagaagggtattgacccaccatcattggatcttcttgctagagaagggattattggtcttagaagagcaaagaggaggaacatggaacgtttagttttggcctgtggtggagaagctgtgaattctgttgacgacttgacccctgagtctcttggatgggctggacttgtctatgagcacgttcttggggaggaaaagtacacctttgtggagcaagtgaagaatcctaattcatgtaccatcctcataaaagggcctaatgatcacactattgcccaaattaaggacgctgttcgtgatggtctgagatcggtcaagaacaccatagaagacgagtgtgttgtgttaggagcaggagcttttgaagttgcagcaaggcaacacttactcaatgaagtcaagaaaaccgttcaagggcgtgcccaacttggcgttgaagcttttgctaatgcc

SEQ ID NO: 171119 - DNA, 484 bp, Arabidopsis thaliana
gattcgccagctcatactacgactcactatatggaaagctggcacgcctgcaggtaccggtccggaattcccgggtcgacccacgcgtccgcaacaatgtcacaaaaagtctgatcctttctctttagatttggcttcgagaaatggctcgcgatcggcgggaaggtctggagatcaaggtggtgaatccaccggcggcggcgacaaacaatgtggctgtagaaacgtctccggcgacggcgacgaggagacggagacaacaacaacgagcttcgttcgctgagtttagaccgtttaagctttggttaccatggcttgctccagctatcgtggtggctaacattgcccttttcgccatttcgatgtttattaacaatcgtcctaagaactcggcttattgcttagctaggtttcttgggagatttgctgttcagcctatgaaagagaatcctcttctgggtccttcttctttgacattggagac

SEQ ID NO: 171120 - DNA, 492 bp, Arabidopsis thaliana
catacacgcgtacgtaagcttggatcctctagagcggccgtcctttgggtggggtaaatccttttaaacatagaaaaaggcttaccaactgggattttcaggctgtgaacatacataaatcgctacggtaatcactctgaaggggatgccacgggtgggacacgactgacatacgcgatggcataagatggagaactactacttattttttgggacgacataaacacatgtgtcgtgaattcttacggggcataaagcgatggacattggatgatcgattcgtaccttggggctaggggatggaggaaaacggggcgtaatctaaagagaaaaagctgacatcaggcagtagatggtgtgagtgtgtgtagtgccattaacgcagccgagattttgcaacgctccgtttggtggtcctacgggtaatcggccagggggttcagtctgatggaaaggtacgtgtagtgattcctataagggtggggtaaagat

SEQ ID NO: 171121 - DNA, 530 bp, Arabidopsis thaliana
tacgactcacatattggagactgactgcctgcggtaccggtccggaattcccgggtctttccacgcgtgcgaaaatccctgatcattactctgctactgatcgggtgattgaatcgggttattgtgattcttttcgggttgattacgggtcggagtgtgtgattccgggggaggatagggttgattgtggattggatcagagcagtgtaagggaatcgttagtcgattgtgtgggatatgaatggggggtcgatgatggagaaactgggaggtcggcggatggagatgcaaggcttaaggataggagagtgaacagtggcgaaatatgcgggaagcgaaagtggtacaggagcagctacgcgtatcgcgtagtggggttaactgcgtagaagagccggacagcaaagatgctgaacagggcgtaaacgtccaatggttagttctttgaagggtgcgacaaaagaggcagggtgttagtgaaggataggagcagctagcagatccccagctgagttagaagcagggagatg

SEQ ID NO: 171122 - DNA, 573 bp, Arabidopsis thaliana columbia
  unsure (1)..(573): unsure at all n locations
atgatacttcagctctctacgactcactatatggaaagctggtcacgcctgcaggtaccggtccggaattcccgggtcgacccacgcgtccggtcgagaataatggcatcatctctttgtgcttcttctgccatcgctgccatttcttctccaagtttcttgggtggtaagaaactgaggctgaagaagaagttgactgttccagctgtgtccaggccagatgcgtcggtgcgcgccgtcgcagctgatccagatagaccaatctggttcccgggaagcactcctccagagtggctagacggtagcctccctggtgacttcggatttgatcctcttggtctttcatcggacccggacagtctaaaatggaacgtacaagccgagatagtccactgccgatgggctatgctaggagccgccgggatattcatcccagagttcctaacgaagatcggaatcctcaacactccgtcatggtacacggcgggagagcaagagtatttcacggacaaaaccacactctntgtcgttgagctcattntgatcggatgggcagaaggacgtagatgggcc

SEQ ID NO: 171123 - DNA, 568 bp, Arabidopsis thaliana columbia
  unsure (1)..(568): unsure at all n locations
atgattctccaggtctactacgactcactattgggaaagctggaccgcctgcaggtaccggtccggaattcccgggtcgatccacgcgtccgaagaaagcaagaagtcggttattcgacttgttgacatggaatctgcgtatctaaccgctgagttcttccggaaacttcctcaagaaatagaaagaccagtaaccaacagcaaaaaccaaaccgcttctccttcgtctgcaacattagaccagtatggagacggacatttcagaaggatagcatcaaatgtatctgcgtatgttaatatggtttcggacacacttcgtaacaccattccaaaagcttgtgtgtactgtcaggttagacaagccaagctcgcattgctcaattacttctactctcagatcagcaagagagaggggaaacagttgggacagttactagatgaagatccggcattgatggaccggagactagagtgcgcgaagaggctagagttatacaagaaagcaagagatgagattgatgctgttgcttgngtaagatgataaaacctaaaagtgtgtttctggtga

SEQ ID NO: 171124 - DNA, 560 bp, Arabidopsis thaliana columbia
atgattctccaggtctctacgactcactattgggaaagctggtccgcctgcaggtaccggtccggaattcccgggtcgacccacgcgtccgcggacgcgtgggaaaatacccatctggttatttattacgcatagatctctctcttctctctttctctatttagattacttaaagcagagaggtccgaacatcatcaatcaaacccattcacaactactacgacaatggactacgaatacggaggaggagagtactgtcggagaggacacgtgccagcttttggaagctgggattggaacgacgccgttccattcactcagtgtttcgagacagcaacaactcaacaaccagcttttcttcactatgcttcttaccctcaagatcgtgatctttacctcgccggtgatctctacgacaaccaccaccttgtagctccggccgttatcattgtccctcgtcgccgggctaaagtgggtcaagaaccagcggagaagaagagaaatgtgtcgaagcagcaacacaactataagacggaggcgcgtgagtttaacgcgccggt

SEQ ID NO: 171125 - DNA, 549 bp, Arabidopsis thaliana
gctctctacgactcactattgggaaagctggtccgcctgcaggtaccggtccggaattcccgggtcgacccacgcgtgcgcggagataaattccgtggtgctgcgtttggccttaccaaaatttgagatctcaattgaagaaagaaacatagcgaagaagaagacgatcaaggaattgaaattagattctgttatctctctatcatcttcaatttttttaatttgattgttttcaccaaaaaaacaaaaactatgaacacgacgttacgttacgatccgagacagatctcgaggcaaacgaaaccgtcagatacaccatcgtcttctccgtctcgtagtaaccggagacagcctttgcttcagagaagtctctcttctccgtcaccacgagcttcttgcggcggatctactcccgccgagttttgcggtggtacgacggcgagttgcgccgccgtgtggtgttgttgtccctgcggactcgttaacctactcgttctcgcgatctacaaagttcctaaaggaatctgccgtcgcgctatcagaagtcgc

SEQ ID NO: 171126 - DNA, 432 bp, Arabidopsis thaliana
  unsure (1)..(432): unsure at all n locations
actcgcttaccatcatttggaagctggccctgcggcgccggattccggcacactcgggccgtgggatttcaagctgactcgcggatttcgccatagcgactcaagctcgaccttcagaagaattggttggactacacggggactgagtctggcacatcgggctcagaagtgtttcagacgtccgatcggtgaacgacggttagaggatgagtgtatcgagtgggacgctatgtctatcgtggagaagtgtgcgtcttattcctgggtcggncgtttgctaggaagaaattcccggttctatcagggagcttagtagaagagggtgtattgagctttgtgtgaatgtttcaagtggatgaagattcagaagaactactgtgcaaggaatgatatatacaatatgatgattaggcttcatgctaggcataattg

SEQ ID NO: 171127 - DNA, 564 bp, Arabidopsis thaliana columbia
  unsure (1)..(564): unsure at all n locations
atgatactccagctctctacgactcactatatggaaagctggtcacgcctgcaggtaccggtccggaattcccgggtcgacccacgcgtccggcaacctattcgttggttggttaatagaagctctctttctctgtctgtctttctctctcagagaaatggctcttcttctagtttcttcttcctcctcctatgccctcagagtcaccattttcttgtctttcttcttctttctctgcaatggcttctcttaccctactacttcttctcttttcaacacccatcaccatcgtcaccacttggccaagcacaactacaaagatgctctcactaaatcaatcctcttctttgaaggccaaaggtcagggaaacttccttctaaccagagaatgagttggagaagagactctggtctctctgatggctctgctcttcatgtggatttggttggagggtactatgatgcaggagacaatatcaaatttggtttcccaatggcattcacaaccacaatgctttcatggagtgtaattgaattcggtggactcatganatctgaattaca

SEQ ID NO: 171128 - DNA, 564 bp, Arabidopsis thaliana
atgatactccagctctctacgactcactattgggaaagctggtccgcctgcaggtaccggtccggaattcccgggtcgacccacgcgtccgatccgatctgagaaatttcgccggagctaggttttgttgtttaccgatcaatcctttaatcaatggcaatggctgttttccgtcgcgaagggaggcgtctcctcccttcaatcgccgctcgcccaatcgctgctatccgatctcctctctcttctgaccaggaggaaggacttcttggagttcgatctatctcaactcaagtggtgcgtaaccgcatgaagagtgttaagaacatccaaaagatcacaaaggcaatgaagatggttgctgcttccaagcttagagcagttcaaggccgagctgagaactcccgtggactttggcagccatttactgcacttctaggagataatcccagcattgatgtaaagaagagtgtggtggtcactctctcttctgacaagggtctctgtggtggaatcaactccactgtcgttaaagtgagcagggctctgtacaaattgaatgctggt

SEQ ID NO: 171129 - DNA, 574 bp, Arabidopsis thaliana columbia
atgatacttcaggtctctacgactcactatatggaaagctggcacgcctgcaggtaccggtccggaattcccgggtcgacccacgcgtccgctgacgcgtgagtggcgtaaggactgtcgtatggtttattctatcgctcattcaagctcacatattgaacactcgatttatcattcttctcattactcttcactctactcatcagatcaatcacaagcttctttacagctctctgattatcaatccgattcttaatcacagcctcacttagcgaatcaggcgtattatcaactctatctacctctttcgataactcgttcataacatcacctttatgatcaccttactcatacctcaagtaattcctgactgaaaacttgaccgaggaactcgtgcggttacgcatgtgcatatgcatattcatactcacagtacgaagcagcgcatgatcgagattctcaatgagatcagaagtgatctcaatactactataagtcccacgtccagaccagagttcatccgtgactgtcagcagacctgagagcgcattagcgataccatcacctaaatcat

SEQ ID NO: 171130 - DNA, 569 bp, Arabidopsis thaliana columbia
atgatacttcagctctctacgactcactattgggaaagctggtcacgcctgcaggtaccggtccggaattcccgggtcgatccacgcgtccggaaggttcatgttattgatttaggacttaaccatggtttacaatggccggctttgattcaagctcttgctttacgtcctaatggtccaccggattttcggttaaccgggatcggttattcgttaaccgatattcaagaagttggttggaaacttggtcagcttgcgagtactattggtgtcaatttcgaattcaagagcattgctttaaacaatttgtctgatcttaaaccggaaatgctagacattagacccggtttagaatcagtggcggttaactcggtcttcgagcttcatcgcctcttagctcatcccggttccatcgataagtttttatcgacaatcaaatcaatccgaccggatataatgactgtggtcgagcaagaagcaaaccataacggtaccgtatttctcgatcggttcacggaatcgctacattactattcgagcttattcgactcgctcgagggcccgccaag

SEQ ID NO: 171131 - DNA, 548 bp, Arabidopsis thaliana
  unsure (1)..(548): unsure at all n locations
tttaggtgacttatangaagagcttgacgtcgcatgcacgcgtacgtaagcttggatcctctagagcggccgcccttttttttttttttttctttttttttttttttttttttccaaacttgaataatgtctgataattgaccacatactgatattgatagttccaaaaacactaatttccgaatccaaaatcaaaaaagagcggccgcccttttttttttttttttaaaaaaaaatgaaggtaaggcaggacaaagatacaaaaaatctttttatactctatacacatttttgagtaaatgatggacaatacatgaagtcctactagacacaatacatttcactggcggggaaaatcaatcaaattaccccaattttctcgatttgggtttctggaaaagaatcaactatataaacctcattatagaggcaccttcgtgttcagagaccagttgaaaccaaaccatgcaatgttacaattccaatcaatgtgttgtcttcattgaccactggtaaaaactgtacaggcgatggcggggattccatct

SEQ ID NO: 171132 - DNA, 569 bp, Arabidopsis thaliana columbia
atgatactccagctctctacgactcactattgggaaagctggtccgcctgcaggtaccggtccggaattcccgggtcgacccacgcgtccgcttttgtcggaatctgacgtcagcatacctgctaccacttccagagttcaatcgatcttcgcctcgttgaaacgttttccctcttcgattatcaacagtgtctccactcgtatcatcaccgcctccaactaattttgccatctctctcgttgttccaatttgattctactagtgagctccgatttaatttagggttttgaaagatgtcagctttgaaaaattacggcttgatctccattgattctgccctccattttcctcgatcaaatcaattgcagagctataagagaaggaatgcaaaatgggtctctccaatagcagctgttgtacctaacttccatcttcctatgcgcagtctcgaggataaaaacaggacaaacacagacgacataaggtcccttagagtgatcacagccattaagacaccgtatttacctgatggaagattcgacctccaagcatacgatgacttagtcaa

SEQ ID NO: 171133 - DNA, 557 bp, Arabidopsis thaliana columbia
atgattctccagctctctacgactcactatagggaaagctggcacgcctgcaggtaccggtccggaattcccgggtctacccacgcgtccgcttttgtcggaatctgacgtcagcatacctgctaccacttccagagttcaatcgatcttcgcctcgttgaaacgttgtccctcttcgattatcaacagtgtctccactcgtatcatcaccgcctccaactaattttgccatctctctcgttgttccaatttgattctactagtgagctccgatttaatttagggttttgaaagatgtcagctttgaaaaattacggcttgatctccattgattctgccctccattttcctcgatcaaatcaattgcagagctataagagaaggaatgcaaaatgggtctctccaatagcagctgttgtacctaacttccatcttcctatgcgcagtctcgaggataaaaacaggacaaacacagacgacataaggtcccttagagtgatcacagccattaagacaccgtatttacctgatggaagattcgacctccaagcatacga

SEQ ID NO: 171134 - DNA, 543 bp, Arabidopsis thaliana
atagaagagctttgacgtcgcatgcacgcgtacgtaagcttggatcctctagagcggccgtcctttttttttttttttttttagttggatcaacaagtattttgatatatacggtttgacctgattgatttggatctgtgttccaaaaggtcacaagacaacgaggaataacataaactcattcatacgtcccattttcaagttcctctgagaaatggaacaaattcggtgtgatatgttttgattgactccacagcagcaacagcattagcttcttcttcgggataataagcgatcggatcagatagatgcggttctggaatcttcagcaccccttcgagcatggcgtggaggcagtaagctgcatatgttacatgatacccgccttcttgcaccataagcaaccttccatggctgtgctcctctgcaactcccctcattatctgcccaatccttctgtatccattcattgtcaggctttgtctcccgtttggatcaaaagcgctagagtcttgaccaacaacgagaacaaccatatcgggt

SEQ ID NO: 171135 - DNA, 570 bp, Arabidopsis thaliana columbia; identical to SEQ ID NO: 125654

SEQ ID NO: 171136 - DNA, 512 bp, Arabidopsis thaliana
gcgtacgtaagcttggatcctctagagcggccgtcctttttttggtttttttttttttttttttttttttttttttttttttttttttttttttttattcttttttttggtccggcctttaaccccccagaaaaaaaccttatggcattctagttcacataaaccaaaaaaggggaaaaatatccccgcccgccctttttatctaaaaaaaagaataaaacggcggggcgaaccagcccaaaaataggggaaactttcaggaaaaatgaaggaaaaaacctagggggaaggggggcaaggggaaatgtaattgggaccggactcattgattgttcttggaagaaaaggggtttttgaaaatttgtttaaaacgatattccgtgaattggaaccaggaacggaccccgccccccccttatatgttaaagaaaaggggatgccccttccacgaaaaggccctccggcgagaggtttcctgtctaagtcagggggtggaggataaaccccccgga

SEQ ID NO: 171137 - DNA, 575 bp, Arabidopsis thaliana
actgactcaatatttggagagagctggaccgcctgcaggtaccgggcacggaatacacgggtcgatccacgcgtgcgatggcactaaaaacatatcaaaacagtgagttgttatatatactcttgtaatatctaacagataggaagagctatatatattcacataacgcaaagaaagctgagggaacatgtgtacagtgctgactatgcacatgctacacataggcgtatgtaagcaacagctcctattcttcttaaagccagtctcaacgcggaaagaatctcatgttccacaagcgtcgacgtgtcccaggctcggctgatgcgtacaatgcacagaacgactactaggttagctgttgcgacactcctaactacacgtacgccttcaacatgggtgccttgaagatgaggagccaccacaacagcctcttctcatgtggtcatgcgccaccgacccttgatgacgacactatcgtctacagagccgttctagagctgatcagcagcgggggagatcatgatcaggtaaggaacacgctgtctttttccattgaagccttgacggacgtatct

SEQ ID NO: 171138 - DNA, 565 bp, Arabidopsis thaliana columbia
atgatacttcaggtctctacgactcactatatggaaagctggtcacgcctgcaggtaccggtccggaattcccgggtcgacccacgcgtccgggggagagagctcaagttctaatggcgaacttggtcttatcagaatgtggtatacgacctctccccagaatctacacaacacccagatccaatttcctctccaacaacaacaaattcagaccatcactttcttcttcttcttacaaaacatcatcatctcctctgtcttttggtctgaattcacgagatgggttcacgaggaattgggcgttgaatgtgagcacaccattaacgacaccaatatttgaggagtctccattggaggaagataataaacagagattcgatccaggtgcgcctcctccgttcaatttagctgatattagagcagctatacctaagcattgttgggttaagaatccatggaagtctttgagttatgtcgtcagagacgtcgctatcgtctttgcattggctgctggagctgcttacctcaacaattggattgtttggcctctctattggctcgctca

SEQ ID NO: 171139 - DNA, 561 bp, Arabidopsis thaliana columbia
atgatactccagctctctacgactcactattgggaaagctggtccgcctgcaggtaccggtccggaattcccgggtcgacccacgcgtgcgctcatctgccaccaaaccaaagacataatttcttcggtgacttccatggctccgcctgtctctgatgattccctacagcctcgagatgtttgtgttgtgggagtggcgcgaacgcctataggggacttccttggctccctctcgtctttgactgctacaagacttgggtccatagccatccaagccgcacttaagagagcacatgttgatccggcccttgtggaagaggtcttctttggcaatgtcttaactgccaatcttgggcaagcaccagcaagacaggctgcacttggtgctgggattccctattctgtgatctgcaccactatcaacaaagtttgtgctgcaggaatgaaatctgtaatgctagcgtctcaaagtatccagctcggcttgaatgatattgttgttgctggtgggatggagagcatgtcaaacgtacctaagtacctcccggacgcaagaagggg

SEQ ID NO: 171140 - DNA, 551 bp, Arabidopsis thaliana
atagaagagcttgacgtcgcatgcacgcgtacgtaagcttggatcctctagagcggccgccctttttttttttttttttttttttttttttttttttttgggaacccaagccttaaagcagaactcatcaagatatgtagttccaagcagttgttgttacagatttacaatagaaaataaataatctcacagccaaaatacttcattaacagtcagtgacaggacaaatatcataatactttcaagagctggatttcaaagaccagaggctcgttcgcatgcgatagaaggctgcgtcgtggtccaaactcctcggggattggcttcaatgtctcgtttatgtaccctactgatggaggtatcagtgccctacgcttccctccagctttcatgcccaccaagacttctttcaagccctcaattacgtcgttttcatcgagaataagtttgacaggagagctttcaccactgaattgatccaccgtgctatgaacgaaatatccatttgcacgccgacacacatagtttagttcgaccaggtccccttcatg

SEQ ID NO: 171141 - DNA, 541 bp, Arabidopsis thaliana
  unsure (1)..(541): unsure at all n locations
acgactcactattgggaaagctggcacgcctgcaggtaccggtccggaattcccgggtcgacccacgcgtgcgatttttgatcagactcggtttatcgttatgggaaacttattctgctccgagtatagaatccagagacggtttgacctcaaagggtcttctcatgggcgtagcactgcaaagcctgaaggagaaattgatgagaccacgactctcaaggaccttgatctcaatttttctttccgtcttcagagaaactggtatcaagagcttatgaagcanataaaacgcgattgtgagttcttggaagcagagagaataatggattatagccttttagttggtgttcacttncgtgatgacaacacaggagaaaagatggngctntctccattcgttntgagatctggtaggatagattcatatcagaatgaaaaattcatgcgcggttgtcgcttcctagaggcagaacttcaagacantggaccggatttagctggcagganaccatcgatcagattaggcgcanacatgccagca

SEQ ID NO: 171142 - DNA, 570 bp, Arabidopsis thaliana columbia
atgattcttcaggtctctacgactcactatatggaaagctggtccgcctgcaggtaccggtccggaattcccgggtcgacccacgcgtgcggaaaaaaaaaaaacgagatggaggaattccaatctcctagaatacgatcttacaaatcgtatgaaggagataggaacctccaactggttaatcctgcagatttaaaactggtcagagggatatatgttgttagagaatcgaggcgcaatcgatctccgataaaaacagatatatggcgcaagatgtcttacaaagacatgcccgttagaccgagaagatcttcttctcattcgacattgttcaaaggatggtggaacgatccggagataaagagaaagagacgagtggcgaaatacaaactctattcagccgaagggaagatgaagataactttgagaaagagttacaaatggattaagatccaatgctcgaagatcattcatggaatataggtctctctatctctactctgttttatctgtttagaagtttgttttgaaaaaaggtattaaatcatgtatcaaatttaatttatttta

SEQ ID NO: 171143 - DNA, 564 bp, Arabidopsis thaliana columbia
atgattctccagctctctacgactcactattgggaaagctggtccgcctgcaggtaccggtccggaattcccgggtcgacccacgcgtccgcattgacacgatcattaccagcattggctccaactacgaagcttgggcggttgatttctcctcattcgtggtcgactcgagagactctctctcggtccaaaggttcgagaagtcccttaagaagatgaagcccgagacagctcttgccttagctaagatagtgtttggtagcgacgagagagagattttgggacaagtgtcagtgccttgccatgtcatacaaccaggaaacgacgtcgtagtgcctgtctccgtcgcatacttcatgcaggagaagattaaggggaaatcgacagtggagatcatcgaggacgcgatcgggcattttccacagatgacatcacatttggagctgcttggcgtcatgaggcgcctccttgagttttaaggcttatataagagctttgcgtcgtttgatcgagtttcttcttgtctataatatcgtattactaatataacgaagtgggtctatt

SEQ ID NO: 171144 - DNA, 516 bp, Arabidopsis thaliana
  unsure (1)..(516): unsure at all n locations
ttgacgtcgcatgcacgccgtacgtagcttggatcctctagagcggccgccctttttttgtttttttttttttttttttttttttttttttttttttttttttttttttttantttnaannnngtnaaggccaggaaaggaaagcccctaacaagcccaaccgggaagaaaaaagaaagggaaatagacggggaaacaccccaaaacctcgaaaaatttctcatggacacacatacaaaaagtgtcatgcacgaaactggaaagggggaaccccggggtccgcgcctttttaatcctttgtatccttttnggcctggtcccctgttcccccaccacccttttacacaaattttttgaaagggggacccgaaggacccagaaccttaaaaacctttgaaaaacccttccttttccctaatgcaaaagggacaaagggggataaaggggttttgggaattagaggaaaggccttttcaggggtaaccgtgaaaaacccttaggcttggtggggaaaac

SEQ ID NO: 171145 - DNA, 564 bp, Arabidopsis thaliana columbia
  unsure (1)..(564): unsure at all n locations
atgattctccaggtctctacgactcactattgggaaagctggtccgcctgcaggtaccggtccggaattcccgggtcgacccacgcgtccgcaacaaaacaaccttcttcctcgcgaaaacagagagaaagaggaagaagaagaagaagtctctgagaaattttcgaacatgagggagatcattagcattcatatcggacaagctggtattcaggtcggaaattcttgttgggagctttattgtctcgaacatggtatccaacccgatggcaccatgcccagtgatagtactgttggtgcatgtcatgatgcattcaacacattctttagcgagacaagctcaggccaacatgtgcctcgagctgtgtttcttgatctcgaaccaaccgtcattgacgaagtaagaaccggcacttacagacagctnttccatcccgagcaacttatctctggcanagaagatgcagccaataactttgctagaggccattacactgttggaagggaaattgttgacacctgccttgaaaggctgaggaaattggcagacaattgcacagggtt

SEQ ID NO: 171146 - DNA, 547 bp, Arabidopsis thaliana
  unsure (1)..(547): unsure at all n locations
aggtgacttatagnnagagcttgacgtcgcatgcacgcgtacgtaagcttggatcctctagagcggccgccctttttttgtgttttttttttttttttttttttttttttttttttttttttttttttttttttttttttttttttttttttttttttttgggggaaaaaaaaggggggttaaggaattttttactttgggggggtcggcccaaaaggcttttaaacaaggtccttttccccgggggacgggggggcccaaatttgcttaacccaagggacaaagttttcccttaagcctagagcccccaagaactggaaaaaacctttgaattccctcccaactgcagttgggggggggaaacccaaaaacggaaccccataaaggggcacccgggtttaaaggggggatccccccaatggaccggccattaatcctcctgggggaaaaggagggggtttccctaactggacttttttttggggcaaaaagaaaagggaacccccaaaggtggtagccaaaaaaagccggggcacaaaaaaaccaa

SEQ ID NO: 171147 - DNA, 462 bp, Arabidopsis thaliana
  unsure (1)..(462): unsure at all n locations
taggtgaccntatagaagagctttgacgtcgcatgcacgcgtacgtaagctcggatcctcgatagagctcgnctntntntggcgctccatnnntctcgcngcgggaaacatgtcgacttcngaggtcangtcacggatattangaaaacaaccaatttttgggcttaaattaccttccgacaaaggggagaaacctatacctcttttcaaaattggaaaggggttagggggtttttcccaaagaaagggggggggaacccggggttttttgggggggggggggtaaactttaaacaaacacccctaaaaaaggggggagggtgttaaaaaaaatttttttttgaaaaaaaaaattttcttttgaaaaaataggggccccctgggatgttttttttaggggagagaggttggaccccccgcgcggggaaaaaaaaataaattaaaggggggggggaggggggg

SEQ ID NO: 171148 - DNA, 564 bp, Arabidopsis thaliana columbia
atgatactccagctctctacgactcactatatggaaagctggtacgcctgcaggtaccggtccggaattaattgctggacccacgagcgcactaacccgtgggcaacctttttttatttttttaggtgtatagaattgctatgaattcccaaccataagaagattgctataaaacagagactaaaaaggctgttcaaacagtaataattcttgcacatgaacactaaaccagaacgataacaggaaacagggatgcagtcattactcatcaatttgagggcacctacggaaagcaagtaatactacagagggtagacgttccagtgcttaatgatgaaacatcatcagtacaagcaaacgtgtttatcatcatacaccgtatcactttcacaagtggctgcagtcattccgcatcataaggagattgacttcgagaagcaccatcaactttgcgcataggaacaaggctaccaggagatggggacctctgattgctacgcctttcaggagacatctccttagaaggagaggccttttgcaaagcagggcttcttgggctgaggc

SEQ ID NO: 171149 - DNA, 211 bp, Arabidopsis thaliana
  unsure (1)..(211): unsure at all n locations
ctctacgactcactattgggaaagctggtcacgcctgcaggtaccggtccggaattcccgggtcgacccacgcgtgcgcccatttctatgtggtcaatgcaaatttaagaaattatttgccgacttaacagttgaggaactattgtttgaaagtgaaaatgttattcctatcagtttctctataattagntagttatcatttcatttttca

SEQ ID NO: 171150 - DNA, 536 bp, Arabidopsis thaliana
  unsure (1)..(536): unsure at all n locations
atagaagagctttgacgtcgcatagcacgcgtacgtaagcttggatcctctagagcggccgcccttttttttttttttttgataaaagagagatcaaacattagaattgataattaaaatgaaaagagagcaagaacatatgttgcaacttatgtctaacacctatcgntcttattacactacatctatggacaatgcctcacgcaacaatagcaacaagcatgtggaagccaccacttgttcagacagaggagctcacatgtgcatgatcatgggaaaagaacaatatagttttcctcaagacacattactaactttctacaggaggataaaaattagacgatccagcggtattcatgtgctcaatcgggaacacacctgctgaatcctgcacagactatacgtacagagctcgaacataatctgttcttccattcgcaaaacatgacaagataatctgctgcccaagacgcgtcgactaaccatagacatgtttgagatttaacaggtgctaactgacgaaggaatacagcctg

SEQ ID NO: 171151 - DNA, 548 bp, Arabidopsis thaliana
  unsure (1)..(548): unsure at all n locations
caagctctctactgactcactatatggaaagctggtacgcctgcaggtaccggtactgaatacccgggtcgacccacgcgtnncgccacgcgtncgnacttactactacatagtagnnttgaagaaatctgggaggaaagctccaagtggcaaagactcaacattttaaaatgaaagaggggggaagctttttggggggttggggcaattaaaataccccggcgtttttgtctaaaattttaaaaaaaagggtgtttgttaaaggggggtctctttttcccctttaaaagaggggcccccaaaaaaaaaaaggttttttttaaaacttctcttgtttgccccacgggggggaaaaaaaagggccctttttgttgggggggggggttgtgcccccccctgtgacaaaaaaatttttttttttgctcccccccccttaatacccccgggaaaaaaagggagaatttttttttttttgtgccaaaaaaaaaaaaggggggccccccccaaagagaaaaaaaaaagttttttttttttttttttaaaaaaaa

SEQ ID NO: 171152 - DNA, 550 bp, Arabidopsis thaliana
  unsure (1)..(550): unsure at all n locations
atagnagagctatgacgtcgcatgccacgcgtacgtagcttggatcctctagagcggccgcccttttttttttttttttttttttttttttttttttttttttttttttttttttttttttttttttttttttttttttttttttttttggggaaaaaccgggggggtttttattaccgcaaacaaaaatgggttaaagggttccccccgtttttaaaaaaaaatccccaggggaatgttgggggcttaattttttggggctgggttttggacaaaaaccaaaggaaacttgacttgtggggggaaaaactcgttaacaccccctaaaaaagcccttttgaaaaacccaaaggcaggggggcccattaaaaaaaaaaaaactttaagtttcggaacgggggggaaaaaaaattccttaaaaattccttttcaaaacgggttttttaaataaaaaaaaaaccaaaaatctggggacccgggtggagacccacccatgaccgattcccggagcttggtttaatactttttaaaaggtgaaaccgggtttccg

SEQ ID NO: 171153 - DNA, 557 bp, Arabidopsis thaliana columbia
  unsure (1)..(557): unsure at all n locations
atgatactccaagctccctacgactcactattnggaaagctggtacgcctgcaggtaccggtccggaattcccgggtcgacccacgcgtgcgaacccactgcctctttcactgcaatttctctctttcgcttctaaaaaaaaacctaacaacctctcttctctcttcctcgttcaacaacaatggagttctggggagttgcggtgacaccaaaaaacgctactaaggtgactcctgaagaagacagccttgtccacatttctcaggcttcacttgactgcacagtgaaatctggagaatctgtggttttgagtgtgactgttggtggggctaaacttgttattggaacactttcacaagacaagttccctcagattagctttgatttggtttttgataaagagtttgagctttcacacagcggtaccaaagcaaatgttcatttcattggctacaaatcccccaacatcgagcaggatgacttcactagttcggatgatgaggatgttcctgaagctgttcctgctcctgcccctactgctgttactgccaacggaa

SEQ ID NO: 171154 - DNA, 558 bp, Arabidopsis thaliana columbia
atgattctccaggtctctacgactcactattgggaaagctggtccgcctgcaggtaccggtccggaattcccgggtcgacccacgcgtccgcaataagcagcatctctataatccctaagattcacaatggagcttggaggaaaatgcaatgcaattacaaccacaacaatgatctcaacagaagtaaagccacatacggatccggaaccagaagccaaacccgaatcagatccatccatggctttattcccgatcaagaaagaaaaccaaaaaccaaagacacgtgtcgaccaaggagctaagtaccgggaatgtcagaagaaccacgcggcctcaaccggaggacacgtggtggacggatgctgcgagttcatggccggcggagaagaaggtacactcggtgctttaaaatgcgccgcctgtaactgtcaccggagcttccaccggaaagaagtgtacggacacaggaacagtaaacaagatcatcagctgatgataactccggcgttttacagcagtaacagctcgtacaagccacgtgtaatgcatccaacggg

SEQ ID NO: 171155 - DNA, 560 bp, Arabidopsis thaliana columbia
atgatacttcaggtctctacgactcactattgggaaagctggtccgcctgcaggtaccggtccggaattcccgggtcgacccacgcgtccgattttgaaggatggattatcagcggttcatgtaccttatgcttatggatttgcgattatcttgcttacgattatcgtcaaagcagcgacgtatcctttgactaagcaacaggttgaatcaacactagcgatgcaaaatcttcaaccgaaaatcaaagcgattcaacaacgttacgcaggaaatcaggagaggatacaactagagacatcgcgattgtataaacaagctggtgttaatccgttggcaggttgcttaccaactttagcaaccataccagtttggattggtttataccaagctctctctaacgtggccaacgagggattgtttacagaaggtttcttttggattccatctctgggtggaccaacatctatagctgctcggcagagtggatccggcatttcgtggctttttccgtttgtggacgggcatccaccattgggatggtatgacactgtagcttatc

SEQ ID NO: 171156 - DNA, 496 bp, Arabidopsis thaliana
gcctgcaggtaccggtccggaattcccgggtcgtcccacgcgtcggcgaacgcctgaggaaatatgtaacatacactacaccaataaacgaaatcaaaagatctgatatacgttggatgctagctcaagaactagaacgagtgattcgatcatagatatcgcaggtaatgtcatcacggatataaaaaggaaccgacaacggttgttggcggtggacaaaaaccagacttacatctcgggttggggaaatgcatacctaacattgggaggacattacgcaagatgccttatcctgcatgccactacttcaaccatgactaaacatctgccttgactccattaaagctccttgcagcactaaccacttactcaaggggtgataaaatcaaaaagcccaattcctaaaagtcctatcaacacagtgggcatgatcgaatgcggaattggaacccacccatttccggcggcataaagcacatggagggtaggggtgtac

SEQ ID NO: 171157 - DNA, 517 bp, Arabidopsis thaliana
  unsure (1)..(517): unsure at all n locations
atagnagagctttgacgtcgcatgcacgcgtacgtaagcttggatcctctagagcggccgcccttttttttgttctttttttttttgcgacttagattgagcctttttattactttcggagggtcacagaccatctacactttagtgacacctacccactgctcgaccttaaatcgccatgaaatcgactgctgatgatatatatgctccatacgcgacctaaggaaaggcggtagatggcgcgattaacaaaacagcgaatgagtgcggagctggttggatttaagagagttcagtctaagagtaaagggacttgtctcatggcgaaggaattgttagaatgaggacttgtctacaggagagagaagatgttnatgatcgggtttatctggctaaatgctcggggcaatccatgctggagaccccaactgaaataccctcgcaggccacagagctagaccacactccagaggcggtgcaaggaatctaataggagcccatccacgactaggcgcac

SEQ ID NO: 171158 - DNA, 304 bp, Arabidopsis thaliana
tacgactcactattgggaaagctggtccgcctgcaggtaccggtccggaattcccgggtcgacccacgcgtgcgctaacccgagggcgaaaatgtgagaccagtaacagatctaaatcgcaaataaaagtgccacatcagcaggatgctacactgccgtggcatccggcgatgacgaagcggttgggctgatggcccagcccatctaacccgatggactattcagacacggcaggccggtgtttactactctacccttgggggcccacgaaggccacgtgatgcccctgcttacagaccatcga

SEQ ID NO: 171159 - DNA, 224 bp, Arabidopsis thaliana
ctatagtttagcggaggacaactgcatgcacgcgtacgtaagcttggatcctctagagcggccggcctaatctttttttttttttggagaatagaataatactttattagatggagctaaaccttgccattttgagctcgaacatacagataaacaaggtaaactcgtacactaggatactacgagacatggactgatggcggggggcaaatatatttttttat

SEQ ID NO: 171160 - DNA, 644 bp, Arabidopsis thaliana columbia
  unsure (1)..(644): unsure at all n locations
aggctacgccggacctatacgactctacttagggaaagctggtacgcctgcaggtaccggtccggaattcccgggtcgacccacgcgtccggcaaaagtcatttaactttcctaaaacaatggctttaaaacatatgcaaatctttctcttcgtcgctatattgtcatcattctgtttctccatcactctttctcgtccactcgacaatgaactcatcatgcanaagaggcacatcgagtggatgactaaacacggccgtgtctacgcggatgtgaaggaggaaaacaatcgctacgttgtgttcaaaaacaacgtcgaacgcattgaacatttaaatagcattcctgccggaagaactttcaaacttgcggtaaatcagtttgctgatttaaccaatgacgaatttcgttccatgtacactggtttcaaaggtgtctcggcattatctagccaaagccaaactaaaatgtcgccgtttaggtaccaaaacgtttcttctggtgctttgccggtttctgttgactggaggaagaaaggagctgtgacccctatcaagaatcaaggcagctgcggatgttgttgggcgttttcagcggttgcggctattgaaggagcaacacagataaagaaagggaaacttatt

SEQ ID NO: 171161 - DNA, 596 bp, Arabidopsis thaliana
  unsure (1)..(596): unsure at all n locations
gattgagctgaactatagaatgactatgacgtcgcatgcacgcgtacgtaagctaggatcctctagagcggncgccctttnntttttttttttttttttttttttgaccatccgaaacaagagacattggttttccatttacatgggggaaaccttcctggtgggaaactttgatttttttcttcttcacaaaacccccccagatgtttagggtgtggcaaaaaaaaatgcaaatacattttccccaaatttctctttttctttaggggccaaaagaggtattttgaggggttaaaaagaatttttttttgggggggaaaccttttttttttaaggcccttttaaaaaaaaaaaacccccccaaatttttttttttgggggggggttttcgccccccccccccctcttttatgaaaaaaaaaaaaaaaaatggttttttttgtgggggagaaaaaaaaaaaaaaaanaatgggggggagggagagagagaaccccttttttttttttttttttccaccccccctctttaaaaaacacaaaggagagaggggggcgcgctttttttttattatataaaaaaaaaaaaaaaaaaaaat

SEQ ID NO: 171162 - DNA, 583 bp, Arabidopsis thaliana
catgcacgcgtacgtaagcttggatcctctagagcggccgcccttttctttttttttttttttttgatggaaacaacaacacattatatggagtatgaccaaaaagctgatcggactatacaatatactccatttagggttgaaagcagatctattcatctgcaacaccaacacagagtttttattatggttacagactagagacacatatgtcctgttctaaatcgagccaacaggaagatcatctgacttagcagcaccctcaactaacctctagtgtaaaagaaaacaagttaaaacaccaagatccatgccacaattaacgaggtactaagctgatgctaaaaacacccctcataacccaaggatacggtagctatagattcgaaagccaccacctatctgtaaccgccttatatattttccccatccaataatgtttacattatggaccaacaaaaggcaaaaccctggtcaaggctcggacaccccatatatgtgaggaggaatgttcgtgaaaacccggaaaggcacactcaaccagatgcatatatacaagactttttcactaatgaaggaaagg

SEQ ID NO: 171163 - DNA, 615 bp, Arabidopsis thaliana
  unsure (1)..(615): unsure at all n locations
actatagnatagctatgacgtcgcatgcacgcgtaccgtagcttggatcctctagagcggccgccctttttttttttttttttttttttttttttttttttttttttttttttttttttttttttttttttttttttttttttttttggggggaaaaaaaaccccccctttatagaaaccccttttgaaaaaaaattaccccaattttaaaaaaaccccccctcccaaaatcaaaacccccccccaaaaacccgtgatccaaaaccgggttttttccccttttcttcaaactttgcgaaaaaaaaaaaaccccggggacccccaaagccaaactcttttgttttaaacaaaaaaggggggaaaggaacccccccaaccccccaaaagggaacaatgttggtttttttccccaacctgacacggccacgcctaaaactttcccacttttttaaacaacgggcccttaaacccttaaaaaaacaccccccccccccctttttaccccttcttgaacaaggaatttcccccttttctatcttaaagcgcgcagaaagggtcctaaagaaccctccgccccccctctttaaaaactccaaaaaaataaaaaaaaccccc

SEQ ID NO: 171164 - DNA, 462 bp, Arabidopsis thaliana
actatgacgtcgcatgcacgcgtacgtaagcttggatcctctagagcggccgcccttttttttttgtggtgaaccgagaggatgctggggagaaagaattggtatctgtgttccaaatcacggcgtgtatgggcgaggaacccaattatagggggcggacgtggggggcccaccacaatgtttgacggggtcctttaaaaggaggggtggatgttgaaggggccccgttaggcagggcaatgggagaggtggcggctcgagagtggggggcgatggagtattaaaattgtgctgccaaagaaggggatcatgaggggtgggggagtggagggagggtgaggataggggaagagaaaagcgacagtacgttggcgcctgggctgcggagaggtggagggaaacggcaaatacgggagaccagttgtgtttcgggggtgcgcgagacggggaacgtgtcagagg

SEQ ID NO: 171165 - DNA, 562 bp, Arabidopsis thaliana
cactatagaagagctatgacgtcgcatgcaccgcgtacgtagcttggatcctctagagcggccgccctttttttttttttttttttttttttttttttttttttttttttttttttttttttttttttttttttttttttttttttttttttttaacccaaaaaaaaaaataaatgggcaaaaataaaaaaaaaaaaagggcttttggggccccaaacgggagaataaccctaaaggggggcggggtgaaaaaagaacaaaaaaatcggggcccccccccccaaaaaaaaaaaaaggccccaaaaaaagggggggcctcaaaagggttttagccccaaagggggaaaaaatgcaagaacctaattatttttaaaaaccctccccaaaaaaaaaccgggaaggggaaaaaaaggggaaagggaccccccctaaaattttctaagaatacaggttttttgttttccccacccggaacggccccgggaacgagaagaaacccaaattcccctaccccccgaatccccaaaacaccccgaagccgaatcccccaggtccccggagc

SEQ ID NO: 171166 - DNA, 636 bp, Arabidopsis thaliana
aggatacgccgagctctatactgactctatcatagggaaagctggtacgcctgcaggtaccggtccggaatttacgggtggaccgacgagttcactaacccgtggccaaccttgttagagtagtatggagatcgaatgctgggaatgcccagccatgagatgagtgctatataaacagatgactaaaaacggctcgtcaaacagtaataatttgttgacgtgaactctaatccagaacgataacaggaaacgggggtgccgtctgtactcaccaaattgagggcacctacggaaagcaagtaatactactgagggtagacgacccagtgctataatgattgaaacatcattggtacaagctgacgtgtggattatcatacaccgtatcactttcacaagggggtgcaacattccgcatcttcgggagattgacttgaggaagagcctcaactttgcgcactggaccagggttaccaagagatggggacctatgattgctacgcttttcaggaaacatctgcttacaaggagaggcctttagcaaaacaggagtccttggcctgaggctgcgactaggagaaggaaacctgttattgcttcgctgttcaggagaaacttctctagcttgagaggttt

SEQ ID NO: 171167 - DNA, 615 bp, Arabidopsis thaliana
  unsure (1)..(615): unsure at all n locations
cactatagnatagctatgacgtcgcatgcacgcgtaccgtagcttggatcctctagagcggccgccctttttttttttttttttttttttttttttttttttttttttttttttttttttttttttttttttttttttttttttttttttnggggnggggaancggaaatggaaaaaaaattgggaaaaaatttcaccagcccctgttggggattccacaatgggccccccccccaaaggcgttaaaccccctcccgggaaacacaaaccaaaaccccttaacccacccggtttttttcccccccccgccccatttttccccgaaacccccaaaagaggaaaagacgctccttttttaaaaaaaaaaagggttttttaaaaaccccccagcgggtgttccccctttggggtaaaaccttccagggcccccccccaaaaagggcccggggggttcctcttaaccccctgggttcccccattttttttcccgaacccccgaaacaaatacacccgggggcgggggaatatcccctttcttaaaagaccccaagtatttcccgggaaaccccccgggggataaccttccctttggacccttccaagggggtttttttt

SEQ ID NO: 171168 - DNA, 615 bp, Arabidopsis thaliana
  unsure (1)..(615): unsure at all n locations
gacactantagattactatgacgtcgcatgcacgcgtacgtaagcttggatcctctagagcggccgccctttttttttttttttgtttataaaggatacagtctcataaatattataagagtatatgatacaacaacaaatgaatatctcaaatgaatccgagggaaagtcacactcaaagaataacctgttgttttttggacagaactagaatataagcagacgacatgcatagagaagtcgtcactgcaaataaacagaaggttgtcacgaagactcgctagcggaaaaattttatggttctggctgttaagatttgactgagtcacacacagggaaatcttacgagggtggaagacattatcaacagaggagatgagatcaagggttgatcacagaagtagaagagaggcaagaaccattgcgaaaacagaaagtagaagagatagagtgattcgggtttgtccactaggtgcttgtgcattggttgatggggttccaggggatgaggttggggcttttgcggtaaccggaggtagtggtggctcagtgacatcagcatctgtgaaaaccgggtttggagcttcggctggaggaaaggcagtaggactcaca

SEQ ID NO: 171169 - DNA, 609 bp, Arabidopsis thaliana
  unsure (1)..(609): unsure at all n locations
cactatagnagagctatgacgtcgcatggcacgcgtacgtagcttggatcctctagagcggccgcccttttttttttttttttttttttttttttttttttttttttcaagggacaaaaaggaatttgaactttggagtttagagccctttaaaaaaatccaaaagccataagaaagattttaagttttaaaactaaatattgcctttccttagggcctatgcaaaagacttttgaccttgaaaggaggatggatgtgggttgacttataacttatttttcatcaggcgtaagccgtcaattggaagcttgtctcgtccaaagtcaagtgtatgcaaccatcgtccgagagctgaaataacgcttactggtcttgaagcaggggaatccggagtccaggggcaatgttctaacagagaactgcgacttcagaccccgggatgtggatcgaaaattcacaacaccaaatcggacgcggggctcgaccctggaatggggaaccgggacctggggccggacagtttccactttgggggatcgttttagagctgggcggttgcagggaaaagggtgtttcctgggtgaagtgggaatccgctaacagttccaa

SEQ ID NO: 171170 - DNA, 617 bp, Arabidopsis thaliana
ctatagttgagctatgacgtcgcatgcacgcgtacgtaagcttggatcctctagagcggccgcccttttttttttttttttttttttttttttttttttttttttttttttgggggaaaatgataaaattaacatttcattattccattgatgatctgcatcggttggcaaaaacttcttcgtttccttcctagcctaaaccgaggaccgaagctgggcatcaatatggatactttggactttttcaagctctagccacctcaagagagagaaacaaacaaactctaaaaccgaaaacagatagtttttggtaataaacaaagctttggagattattcctctgtttattttaaattaaaaacccacgactatttaattttggcgcgtttcttgacgggtccggcatgtaacgggtgggtcttatgcaaagttagaccaaaggtcttgtccatgtccaaatcctccgaagggacacccttggggagcttccagccaaaggattaaagaagagaaccccgcctaaaaaacactggttttatagccaagggctttcccgggcaaattttacgtccgggtccaaagggtggaagcttataatctttacctctcacgtccat

SEQ ID NO: 171171 - DNA, 642 bp, Arabidopsis thaliana
  unsure (1)..(642): unsure at all n locations
acactatagnatgagctaggacgacgcatgcacgcgtacgtaagcttggatcctctttagcggccgccctttttcctttttttttttttagacttcgaaaagcttttattaaattaacaatacattgttggagtgtttggagtaatctcaaaagggagagatccagctttgttttttgaagaatgaatgagaagtgatgccaagaatatttgaaaatagtaagagaagccaaaggggtttttagattttgctgacccacttcaagataagcagctaccacacaaggacgacctggttaaagaatcgaaaaatccaccagggatggtattttagctcgaactgactttgccccatgctttttctaagcgagagggtggttctggcctgaagaagcagaatttaccctggttcccttaaaattggggacaatcaagagtatttctcttggcgcaaattttccatgtgccaaattattcaacagtaggccgtgtggaatattgcacaccgcaaggttttgtaaatttgttgaagggtctttgtttcgccactttcaccccacaaaagaaattttccaacaaaaacaaatatagggctttagtaggagaccccttattaatcacatctcctgtggctaactctttt

SEQ ID NO: 171172 - DNA, 605 bp, Arabidopsis thaliana
taatacgaccttctatagggagagctggcacgcctgcaggtaccggtccggaatttccgggtcgacccacgcgcccgcgaagaacatcatcgtcctcctccaaagaggagcttgcatttccaaagctataattctctcacagatcaggatcaaacatgggtttccttataacaaccctaatcttcagtcgtcgttgggataattgtttttttatgcgttaaaatctgctggaacagagggcccttcacgaatctgctacatcttaccgtgggcattactgcgacgggcctgctgtaggatgatggtggcaattggatatattgcacaaaaggaaactatggattgccccattctaagcgaaacagaagaaaatcctctacttagacaagaccaccccaaactggaaaagcctgcgcaaaggcaggccaatcaatacccaaccctggggatcttcaaacttaaacaatattcttggtggaacccttatcttgaagggggaacaaaactaaaaaccttaggccttgtccttgtgaaaatttcgggaagacgttttattatttttgaaaaaaaaggcggagcccgccgttgaaaaacgcaaaccctaa

SEQ ID NO: 171173 - DNA, 601 bp, Arabidopsis thaliana
cactatagaatgactatgacgacgcatgcacgcgtacgtaagcttggatcctctagagcggccgcccttttttttttttttttggagaatcttatgggagtcattgcactcttacaaactctacatatgtgtacatacatacataaatacaagggaagaaaaaataaaagattatttagttagagattcttgtgagtataatcatttttatgtgcggatgggggggcaaaagaagtcttttcttggagagatatgacagactggaaagcaccaactaaagccttaactttgctcttgcgagtctgtactaacttattagctgtttccttaataactttgaagaaaacaacactgtggattctctcttcttctctgggtctaggagtacagaacaactctgagttagcgtaggtggaccttgtcgatggttaggtgggttccttgggtcttaaagagctcctaacacaagattgcgaggtggggtaagataagaaatgattttcctctctggacttgagcttcttggacggttccttctgatccaaatctatatctttccggtttgatctaagttcatcgcattgcagtattagggttctgt

SEQ ID NO: 171174 - DNA, 620 bp, Arabidopsis thaliana
tacgcgcgagatctaatacgactttatatagggaaagctggtacgcctgcaggtaccggtccggaatttccgggtcgacccacgcgtccgcggacgcgtggggaaatatgtaagagtagtaaaattaataaattaaaaaaaaaaatcgtaatagttggatgctaaaaaaaaaaaaaaaaaaaaaaaaaaaaaaaaaaaaaaaaaaaaaaaaaataaaaatttaaacaaaaaaaaaacaaaaaacggggggcccgtttaaaagaaccaaatttaagtaaccttgcaataaaaagtaaaacttttttataaggagcacccaaattcaaattaatggcccgcgttttaaaaacgcggaaatgggaaaacccttgggttacccaatttaataggcttggaaaaaaatccccttttcccaagtggtttaaaaacaaaaaagccccgaactatgcccttttcaaaaaattttccaacctaaataggaaatggaacccccccttttacgggacattaaaccggggggggggaggggttacccacaaaggaaacgttaaaatttccaaggccataaggcccattctttttgttattttccctttcttttttgacaaatttcccggctt

SEQ ID NO: 171175 - DNA, 637 bp, Arabidopsis thaliana columbia
  unsure (1)..(637): unsure at all n locations
atgatacgccggctctaatacgacttacttagggaaagctggtacgcctgcaggtaccggtccggaattctccgggtcgacccacgcgtccgccaattctttcataacaaaacactgctcttccttctctccgccgccgcatcgttaaatctctccgtcatctgtaaccggttaaagtatttccctcaggtcgacctgaaaacgatgggcaaacgaggaccgaagaagcttacaaacactcaaggaggaggaggacctaatctcanatctgtactgagacatgagcacttgaagaatctcgctctctggtcttccaccggagatactcctatcccgtctcttgcttcattactcggtcgacgtctcgctgccgacactgaatccaccggaatcactactgatcccgatctcgtctcttgtcaaaggtgtgagaccattcttaagcctggattcaattgcaatgttagaatagagaaggtttctgctaatgtgaagaagaaacgtaataggtgcaagaagtctaacaacatctgtttccctcagaacaatgtagtttaccattgcaatttctgttctcaccggaaccttaagagaggtactgctaaaggtcagatgaaagagctttacccgttcaagc

SEQ ID NO: 171176 - DNA, 513 bp, Arabidopsis thaliana
  unsure (1)..(513): unsure at all n locations
cactatagactagctaggacgacgcatgcacgcgtacgtaagcttggatcctctatagcggccgcccttaaaacttttttttttttttaaaacgcaaagaacccaatccttatgtaaaaaatcaataaggcgatataggaaaaaaaaaaaaactggaaccgtggttgttaaacatatatgcccagaagcaagcaaaaccaacctttcttcttgggcggcggggggaaaacaaagaaaaaacgccccccccacttaaaacaaaaaaagaataaaggccccaaccaaaatcccaagctaagtaaaatggcccaaaaaaaaacatactataaaaaggactaggccaaagtgcggtaaaagtgggctccttcccctcgcctttatgtatcttaaagaacaccaagattntgcagaaaaggcagactggcctttcccagaagggaccaatggaagggaaatcgacctcaaaatagaagaccatcatccaatggcccaacatttccttatgcttcctag

SEQ ID NO: 171177 - DNA, 635 bp, Arabidopsis thaliana columbia
atgcctacgcgcgagctctaatacgactttatatagggaacgctggtacgcctgcaggtaccggtccggaatttccgggtcgacccacgcgtccggagaagatcattgtactcctcctcactgttgacgccatagagggagttgatgtgatggttcgaggagcgaagagatcaatggtggatgagctggaagcaatgttagatgtggtagacccgcaaccgctggggaaatcattgtcgatgagaagaagaacatttgatatgccagacagtttgatccgcatagaaatcgcagagggagtgactcagattgtgcagatgcttgaaacggaagaagaatgatggaatggagcactgtgtgtttgtgactcaggggctgtttttgttgttgtttgtgactgggaagaactgatcagcctctttagtttgattagtgttctgaatgtttctaattatgcagacaaaattaataatgagagtggcttgaagaagagattggtgtctcgctcgcatcagtctcatctctcaaatcttgtctcttcttagtctgtttctgtttggcaggttatgtaatccctttgtgttcccaaacttgtagactctgttttgtcaaattgcttatgtttttggttttgt

SEQ ID NO: 171178 - DNA, 578 bp, Arabidopsis thaliana
ctatagttgagctatgacgtcgcatgcacgcgtaccgtagcttggatcctctagagcggccgccctttttttttttttttttttttttttttttttttttttttttttttttttttttttttacttttgaaaaaaaactgtaatggcttttaattcaaaaggttacagatataaataaataaagaaaaacctctttcgcccttttgcccacacggggccaatccttttatttctttggggcccattcttgctccgtttaaaaaaaaataaaaaaaccgcgatatttgcattcccgttgatttttcctgtcaactactaaccaagtcagtggctaacacaaaaaaaggaagccagtttcactcatttcaaaaagaaagggctgcctgaaccacaaccttggggaggaagggggggcccttgaacgcgggggctttagaattttccaaatccccagggaccgggaaggaccctttccccccagaccttttagcctccgaaacctggaactacaaagaaccggccctgcggagccacataagttactctggcaggagcccacacggctcggaggtttaagg

SEQ ID NO: 171179 - DNA, 621 bp, Arabidopsis thaliana columbia
atgctacgcgagctctaatacgacttatatagggaacgctggtacgcctgcaggtaccggtccggaatttccgggtcgacccacgcctccgcttggtaatttcatccattacatggcgacttttgtttctggattcatcgtgggtttccctgcggtgtggcaactagctttagtgactctcgcggtggttccgttgattgctgtgatcggaggaattcacaccactactctctctaaactatctaataagagtcaagagtctctttcacaagctggtaatatcgtcgaacagacagtggtacaaatcagggtagtgatggctttcgttggagaatcaagagcttcacaagcttattcatcagctttgaagattgctcagaagcttggttacaaaacaggtttagctaaaggaatgggacttggtgctacatacttcgttgtcttttgttgtacgctctcttgctttggtacggtggttatctagttcgccaccatttgaccaacggtggtctcgctattgccacaatgttcgccgttatgattggtggattggcattgggacaatcagcaccgagcatggctgcatttgccaaagcaaaggttgctgctgcaaagatcttt

SEQ ID NO: 171180 - DNA, 577 bp, Arabidopsis thaliana
gaatgaatgagctgcactatagaatgactatgacgtcgcatgcacgcgtacgtaagcttggatcctctagagcggccgcccttttttttttttttttttttttttttttttttttttttttttttttttttttttttttttttttttttggggcccaatcatcaaacatggattgggttctctcaaaaaatcctgaacatacaatctcataaaaattttttaacacaaacaaaaaacaacttttgcaaattagtttaataaacctagccgaatcaaagacaggaacccaaacaaaacccccaagctttcatggaaaccatttatttgcttttaccaagaaaacctttaagaaaaaggggaacttgagggacccgggtttcttctagctggggagttttccttggaacaagtaaagattgaacggctcggccttactactttataaaccccatttgttggaaacaaataaatgtcttttttgttattccaaccaaagagaaaaacatcccctagggagagccctgaaattcccggggaatcactacattttatggggtgagcactgggcccagctgaa

SEQ ID NO: 171181 - DNA, 441 bp, Arabidopsis thaliana
  unsure (1)..(441): unsure at all n locations
gccgagacctaatacgactctattagggaaagctggtacgcctgcaggtaccggtccggaattcccgggtcgacccacgcgtccgaagacggagaagagctttggcaaaagccgaaaccgggtctggtaaacttttatctgaatgtatatgtatataatgttttagagtagtagtaagtaatatagtgtactatttcttggggaagccatttctacttgcttttctttttatctgcatttggcttttgggtccccaaaaactcttatttctgttgacattatgtctgatttaatacctcttcttcaagaaatggctttcactcacaaaaanaaaaaaaaaaaaaaaaaaaagggcgggccgttcttaaggatccaagcttacttacgcgtgcttgcgacgtcatagtttttttatagggtcacctaatttcatttaactgg

SEQ ID NO: 171182 - DNA, 583 bp, Arabidopsis thaliana
actatagctgagctaggacagccgcatgcacgcgtacgtaagcttggatcctctagagcggccggcctttcctttttttttttttttttttggttggtggtattactttgtttttctttgggatggttagtgttcatcggatttttgttgaagcaaccaacttttaggactttttttttaaaaaaaaaaaagtgacaaagattttttttttccccaggggaaggagggaacggggggtgacccggaaattccgagacagggacggaggggggaccaggttggcctagagggggggcgataagagctggggcgaaaaaggggaaaagagggtcaaggtgagaaagggggactcggcgaaaattcacaaaaaaatgcaaagcgggaaaaataaaggggcaaacgctggggggcctaaagggggaggaaacatacaaatatggggggagcccaaaggcccctattcaggaggaaaacctgggggccaaggaataaatagatgccccagcgcggggagggggggttggggatgggggcccctgggggttttttttccaaagagaaggaaaaacgaatggactcttaa

SEQ ID NO: 171183 - DNA, 537 bp, Arabidopsis thaliana
  unsure (1)..(537): unsure at all n locations
cctaatactgacatacattagggaaagctggtacgcctgcaggtaccggtccggaatttcacgggtcgacccacgcgtccgcggacgcgtggggaaatatgtaagagtagtaaaattaataaattaaaaaaaaaaatcgtaatagttggatgctaaaaaaaaaaaaaaaaaaaataaatttaaaaaagaaaaaaaaggggcggccgntcttttggatccaaggttacgtacagcggggggggacgttttaaaggtcccatgttgacacccaggtgcatgcaactgcatagctttttaataggtgaacctagggaaaatcctggggccgccgttttaaaacgcctggatgggaaaacccctggcgtcaccaaacttaatagcttggaggccaataccctttgccctggcggcagtatgagcaaaaagaccggaaaatgggcccttccctaaagggggccattatggaaggggaatggggaggccccttgaagcggaacttaaacccgggcgggggggtgggtacccccaattgggacc

SEQ ID NO: 171184 - DNA, 612 bp, Arabidopsis thaliana
ctaatacgaccctactatagggaacctggtacgcctgcaggtaccggtccggaattcccgggtcgacccacgcgcccgcggacgcgtggggaaatatgtaagagtagtaaaattaataaattaaaaaaaaaaatcgtaatagttggatgctaaaaaaacaaaaaaaatcatgtgatggctctttccaacgcctgctctctctacctttttctttctacggccgcgatcttgggggcggcccatttaaaggaccacaactcatcaccgcgttcatgccagcgaatacctctctaatggggtcaccaaaacccagtcctgtgcgccgcgggttaaacaacgtaggaaacgtggaatacccccgaaggatcccaattttattcgcttgccaggcactccgccttgtcccactgggggttaataccaaaaagcccgcccccaacccccttccaacctttgcccaccttattgggaatgggcccccccctgtaagcgctctttaccccggggggtggtggggatccccccagcgtacccttactttgccagccccttgcccctttctttgttttcctccttctttttccccagagccccggttcccccggaaccaaa

SEQ ID NO: 171185 - DNA, 583 bp, Arabidopsis thaliana
  unsure (1)..(583): unsure at all n locations
aattgaggcgacactantagatgactatgacgtcgcatgcacgcgtacgtaagcttggatcctctagagcggccgcccttttttttttttttttttttttttttttttttttttttttttttttttttttttttttttttttttttttttttttttttttttttggggaaggaaacctccaatgttttttttccaaaaaccttcaaagggaaataccctttgttttggtgcaaaacatttgtggccaaaaaatgtcttttttaaaaaaacccctttctccaaaaaaatgggatgaggggggggcaaaaaaaaaaaacaaagattttgaaaattttttttgccaacccaattatcccgattaacccttcccccggttttgttttgcaaaaacaaatttttttaatttttaaacgggtaaacaacccccccgacccttagaagttgaaacccacccttaaggggagttttcaaaggagttaataacccttttttggccctaagaaaggggtaaagggggggaccctttttttggttaacccgaagccctttaaaagggggggacgcctcttataattcctttcct

SEQ ID NO: 171186 - DNA, 627 bp, Arabidopsis thaliana columbia
  unsure (1)..(627): unsure at all n locations
atgctacgcgagctctaatacgacttacttagggaaacctggtacgcctgcaggtaccggtccggaatttccgggtcgacccacgcgtccggtaaaacaataacagatcaagcgaagaagaaaagtgaagaagctcagcaacaatgtcgtggatgaaaggtgatttactttccaaaaccaggaggcttgttggtggcttagctacacgagagcctgtttggcttaaagccatggaagcatcaccacctcctgtgtttcctcgctccaatggaaaaatccagaagattgttctccctgaggatccttacgttcgtaaattcgctaataagcatcctggaaccaaaattgatgaccctgccaagatatcagcatttattccagatcaagcacgtgtgtatggttgccgggtacttgaattgaaggagcatggcatcagtgagggtgacgccatgtctgtagctaatatggaatatctttcagagagaaagggaatgaagaaagcatccaaacgcttaaaggagcttgcggtaatgcaagataaggatccacctcctaaaccgtatcctagtgccaagaaagggttaatanctcaatcgaagacatccgctaaggatcgcttccagactc

SEQ ID NO: 171187 - DNA, 621 bp, Arabidopsis thaliana columbia
atgctacgccgagctctatacgacttacttagggaacgctggtacgcctgcaggtaccggtccggaattcccgggtcgacccacgcgtccgcggacgcgtgggcggacgcgtgggcgatcacagcgacgaggtcgaatacgatcttcttacccctgtcgacagttctgaattaatatcaattttcattgtcttcctatctctctttctctctttggcttcttccaatctaatttcagtgatttacttgttaagaattcaccttttgagaggcccagttttgaaatatggctggccaaaacgcgcgtttgaatgtggttcccactgttactatgctcggggttatgaaagctcgtcttgttggcgctacaagaggtcatgctctcctcaagaaaaagagtgatgctttaactgttcagtttagggcacttctcaagaaaatcgttacagctaaggagtctatgggagatatgatgaagacatcgtcttttgctcttaccgaagtaaagtatgttgctggtgacaatgtcaaacatgttgccctcgagaacgttaaaaagctactttgaaggttcgttctcggacagagaatatcgctggagtgaagctgcctaagtttgatc

SEQ ID NO: 171188 - DNA, 581 bp, Arabidopsis thaliana
ctatagttgagctatgacgccgcatgcacagcgtacgtagcttggatcctctagagcggccgcccttttttttttttttttttttttttttttttttttttttttttttttgttttttttttttttttttttttgggttgggggggggaaaaaaaaaaaaaaaaaaaattggaaaaaagaaaaaaaaaaaaaaaaaaaaattttaaagaaaaaaaaaaaaaaaaaaaaaagaaagggggggaaaaaggtgagagttcgttaacctagggggcctgggaaacacggctggaaaagaaccgaaccttcaagccaaagatgggacgcgggggagcgtcttgctagaggaaataagaaaaggggccgaggaggaaaatttttaaattaaacccgaactgaggcccggctatagtttccataaaaatagcccgagaaaccggtttttcagaagtactaacaggaagggcggcggctccattggcaataggggcggaaaaaaaagctacaaatccgggtggggaagaagcggccggaccacatatgaaaaagggggggttgtcaaaaggacccgctgtaaaaggggt

SEQ ID NO: 171189 - DNA, 635 bp, Arabidopsis thaliana columbia
  unsure (1)..(635): unsure at all n locations
atgatacgcgagctctatacgacttacttagggaaacctggtacgcctgcaggtaccggtccggaatttccgggtcgacccacgcgtccggggacacagttgcagactcagctcgtaacgctcttggtatgagatacaagatccttcctttcctctacactcttaactacgaagcgcatatgactggtgcacccatcgctagaccgctcttcttctcattccctgaatacaccgaatgttacggcaacagcagacagttcttgcttggaagcagcttcatgatatctccggttctcgagcaaggcanaaccgaagtagaagcattgttcccaccaggttcttggtaccacatgttcgacatgactcaagcagtagtgtccaagaacgggaaacgtgtaactctcccagctcctttgaactttgtgaacgttcatctttaccaaaacactatcttaccaacgcaacaaggcgggttgatttccaaggacgcaagaacaacaccgtttagcctcgtcattgctttccctgcaggagcttctgaaggttacgccaccgggaaactctatctagacgaagacgagcttccggaaatgaagctaggaaatggacagtccacgtacgttgacttctacgct

SEQ ID NO: 171190 - DNA, 646 bp, Arabidopsis thaliana columbia
atgatacgccggctctaatacgactttattagggaaagctggtacgcctgcaggtaccggtccggaattctccgggtcgacccacgcgtccgctctgcctcacactttaaaataacatcaaatctctatctatttatacaaacccttttcatctggcatcttcagttcagtaaaatagaagaaagcatctaacgaattttacaagtaagtgcgtttatgagtgatacaaagatatcagcagtagcagttgctgctgctgtagtggtggtaactacggttacggtatggatatggaaaggtctgaatgtagcttggcttagaccaaagaaaaatgaggcttatctaaagagacaaggtctctctggaactcctttcacctttcttgtcggagacattaaaagggaagccagtatggtggagcaagaaaagtccagacccatcaatctaactgatgattacacgcatcgtgtcatgcctctgatacaacagaccgttaaggatcatgggaagacatcttacatgtggatgggacctatagcgagtgtgattgtgacgaaaccagaacacatcaaagatgttctaaacagagtttacgatttcccgaagccgccagtgcacccaatcgttgagctcttcgcgactggag

SEQ ID NO: 171191 - DNA, 622 bp, Arabidopsis thaliana
gacacttatagatagctatgacgtcgcatgcacgcgtacgtaagcttggatcctctagagcggccgcccttttttttttttttttttttttttttttttttttttttttttttttttttttttcggaaaaagaatgtaatccgttctccagggtatgtatctctggttttttactcgttctccattattaatttatgacgtttaaaaaagactcccaaccaggatgaataattgttcccgggggattttatggcatatgcagattttgttttgaagtaataatgtaacaaatcgactttgaagtcccttccacaatgcgcactatgcacaagaaaagactcgtcaaaagcaaagcaaaagggggggatggctcttaaggtcaacagcttaaaattcttgaggagtctcgaatctagtcggggtatcgatccccgccttacagcaaagtccactgatcaagatgagaagaaaaacgattcccactagtttgccctccaaaagggatgacttaaatttgcagagttcatcccagccagtaccattttcaggagtcctgtttcctttagcagtttcagctagaaacctttggagagttttataagatggtgcccattagggttca

SEQ ID NO: 171192 - DNA, 574 bp, Arabidopsis thaliana
gacactatagtaagactatgacctcgcatgcacgcgtacgtaagctcggatcctctatagcgctcggcctttctctcgcgctcccaatttctccaccggcgggataaccatgtagcactacggatggtcatgtccagcggatataagagacaacctactcacttctcgtccctaacatcaccattcctaacgactagctgatgatctcttatactatattcgcaaagtactggaaaggacaaccgatgtgctgatgcccacagatcgaaggactggtgatacgagcggaactgcgtgcgtacgatctgagtctaaagactgagctcacaaagcactggaaaggctagatggaagagatggcgatggcagataaataactagttcagctgcgaaatctggtccaaatgctggataaatttgcgaaggacgagtagagcaacctccgacgaagtcacgaatatctataacccggtggcctaggcggagtcgtagttctaggaggagacgcatcccgcctagtcgtcttagtcccagaagatgccgcatacctattaggacgttccgagatgactat

SEQ ID NO: 171193 - DNA, 561 bp, Arabidopsis thaliana
ctaatacgactcactatagggacagctggtacgcctgcaggtaccggtccggatttaatgggtggacccacgcgttcactagaccgtggccgaccttatgtttttttttaggaggagaacctatgaattcaagccataagatcaatcaacaaatactataagctgccgaacaggtagaaatcttgctcatgatatacttaaccagaaggatgaccggaaacagacatgcgatcaatactcagtactttagagggcacctacggaaagcaagtaatactacagatgggagaccttccagcgcttaatgatgagacatcatcagtgcgagcaaacgtgtgtgtaatcatacactgtatcactttcacaagaggctggagtcattggacaccacactggagattggcttcaggaggcaccctcaactctgcgcagaggatctgggataccaggagatggggacctgaaagtgctacaccttccatgagacatacccttacaaggataggcctttatgaaagcaagacttcttggactgaggctacacgtaggggagggagacct

SEQ ID NO: 171194 - DNA, 612 bp, Arabidopsis thaliana
  unsure (1)..(612): unsure at all n locations
gcctaatacgacttacttagggaaagctggtacgcctgcaggtaccggtccggaattctccgggtcgacccacgcgtccgcccacgcgtccgcccacgcgtccgcccacgcgtccggaatgatggaaaatattgcaagctctgtctctctctgttagtcaccaaatgatgtaaccggttctctttctccctcttcttaaaagttgtctcaccaaatgttctgttaaaatactaaatcaaaccgatctcatcatgcgtacctattcccggttatcgcagtctgtttttttcttctcaaaaaactaaaatgttggatttcgtggtttttgtttggagtgtctaatatatcatcatgctcttccgtttgaacanannanaanaannnnnanananannanananaaaaaaaananaaanaaaaanaaanaaanaanaaaaaaaaaaaagggggcggccgctctaaaggacccaagtttacgtacccgtgctggcaacgtaatagttttttttatagggcccctaaatccattccacgggccggcgtttaccaacgccggaacgggaaaacccctgcggtatccaacctaattggcctgggagaaaaccccctttt

SEQ ID NO: 171195 - DNA, 586 bp, Arabidopsis thaliana
cactatagttgagctatgacgccgcatgcacgcgtacgtaagcttggatcctctagagcggccgccctttttttttttttttccaaaggcatttctacgtaatatcttaaagattctaggttatgttttacaaaagtcttttcttttttggggacaaatgttacagaagtcttaaaatgcctaaagctacagagaggctcccatcatttactactgctacactcggaaaactaaacacaaataaatgtatgaaaaacataaacataacagcttccaaaagtttaaagaccagaattgggattgtctcctgcaagaataagagagatctcgagaccgcggctgaaggcttggttaaacatcatacgtgtctggaaggtcgacacaaaagggaaccaggagcagagagcaacgggaagaaatatgagcattcccattaacgcatcatatagccttgctagggaacgaatcgatttccacatccccattcgctttaggactggcttccaagcacacgcaatagaaagaattccccatcctgtcggtataaaagccaatacgcatgcaaatatgtctgtcactgacaagg

SEQ ID NO: 171196 - DNA, 592 bp, Arabidopsis thaliana
actatagctagacggtgacaccgcatgcacgcgtacgtaagcttggatcctctagagcggccgccctatccttttttttttttaaaaactttcacagtgcggtatacactcccaaacttgcaacgagacaaaggcggtttcttaaatgtacaaaatatcgggaagaccgaactgtagctggatgagtccctaataaaacggatttttcatttacgcgggggaaaacctgggatagatatcctactgagccagttcccaaacaaagactgaccaaaacacggtgaatccatatcttcacccctggacacaaaattaccagcaccaacaccagtgtgtgcgagacactgaacgcaaagccatcttgagtacagaacagcaaaggaagctctatactaaacctgacgaggggggggacacctcaagcgaacgcgtaggatcaccactgcccagactgcccggacatcagaagaaaagaaagggatcaagcaaggcaactcaggagtgagaagcaggcacgagcgatgcaaccccggccaaggagcagaagtgctgaagaaagacggccaaaaaggacgtggcggaacgcgggccc

SEQ ID NO: 171197 - DNA, 593 bp, Arabidopsis thaliana
ctaatacgactcactatgagggacgctggtacgcctgcaggtaccggtccggaatacccgggtcgacccacagcgtccggaaatactcggagacaccgtcatgtcttccggcaggaaatccaacatggctacaacgcagcagcacgctgaggttgacaagaagttcatctagcagccagtgcaatcagacaggcacaatctgaacgttctgttccagtgaggcggggacgccaaatagtaaccaagggggtcttgaagaatatgaggacactaaccctaaccaagcccttcatcgcaaccctgactgcagctgaagcctttttgcccaagggcctgattctttctccacccgggctccgcgacataagcgaagtcgtccgatggccgccgcggacgggatggaccgagtgagctgagccgcgcccccgggcgcaacacagggtagtggccaccagcagaatcgccatactcgacgggatgagaccgttgaccgactcgcagaggcagcccccaccggggcggccaggcaggccgcataggggcggcagcggagaaacagtcccggagcaagagaacggacagcggggaaagct

SEQ ID NO: 171198 - DNA, 581 bp, Arabidopsis thaliana
  unsure (1)..(581): unsure at all n locations
gacactatagtanactatgacgccgcatgcacgcgtacgtaagcttggatcctctagagcggccgccctttttttttttttttttaaaaactttcacattcgttatataatcccaaaataacaacgaaaaaaataactttttttaaatgtacaaaatatggtaagacctcaatgtcacttttgtttccctaataaaactgttttttcattttttgttggagaacttgggatagatatccttctgatccagtttccaagcaatgactggccaacacattctcaatccaaatcttcacccctggtctcaagattacctccaccagtaccaggtgctcccgagcctgaaccagagccatcttgtctcctgaacggccaaggaagttgtatactaaacctcggcgtctgctgaccctcaaccgatccttgtccatcaccactcccctgacttccttgactcctgttctcataatcaggatcatccgtaggcaactcgaatcgacaaacaggacacgaattatgcaactccagccaagggagcaaacagtcctgatgaaagacgtgcttacaaggcatctgcttaa

SEQ ID NO: 171199 - DNA, 496 bp, Arabidopsis thaliana
gcccgcgtacgtaagcttggatcctttagagctgccgcccttttttaaatcttttgtataaagagaatttttgatataccataagaaacataggactggatcagactgggaaccaagatgatatccataatggtgaatcctcacaaaagactgcatagacacaacacgcgagtgctggagaccgcgaatattttttttagggatgtcaaaagctacagtgattatcaaccggggagacaggagtcctactttttctggacataatcggctgctcgacgcagaaatagtacaggaggaggtgtgtgtcgtctaggcggaactctttgagtagttttcataatggactcccgagaggggggtaatgagaccgtttccatacgttgaggtggacctggccattggtctgcaaactaaggttaatcctgtaggcaatatgttgtgagccggaactggggccagtttccggtactggtgcgttatggctggcccgcgcagc

SEQ ID NO: 171200 - DNA, 390 bp, Arabidopsis thaliana
  unsure (1)..(390): unsure at all n locations
atgacgtcgcatgcaccgcgtacgtagcttggatcctctagagcggccgccctttggttttttttttttttttttttttttttttttttttttttttttttttttttttttttttttaatttggaaatatttttntttnnntttttttaaagggccccaaggggggaaattgttaatcccccggggggggggaccccagaaaaanncttggaaaaagggggaggggggggactcggccgtttaacccccccccacccccggggcccgggggaacccacccaatgggattcgagcccaaaacccccctagggagggggcaaaggatcgcccaatttggaaacctctatccccaaaaattgccccgggggcactctgggggggaaaacgggc

SEQ ID NO: 171201 - DNA, 495 bp, Arabidopsis thaliana
  unsure (1)..(495): unsure at all n locations
cactatagnagagttatgacgtcgcatgcacgcgtacgtaagcttggatcctctagagcgtccgcccttttttttttcttttaaggaaactgttttattaattgggctatcaaacgcaacaaatctttaaaactgttgtgtaccaggaataacgcaggagatgaacgtacagaacgtctttcatagaatgagcttgctcttaactagatgactttggtaattttttaggcgagagcgggtagaagataccaacccttgatagaatgcgagcaggaaggtggacgctaagatggcagccgtgccaacccaatagaatctcctccgtagaccgatccgctaagatccttggaattaggagttcgcaaaactagaaccgacttagtcggagggtaagaagcggacccttaaagatccgaagcccgcgaatccgactataattgtgcagacggaacgcccctgacctgaaggagagcgaggggctccatacccttagga

SEQ ID NO: 171202 - DNA, 514 bp, Arabidopsis thaliana
  unsure (1)..(514): unsure at all n locations
gcacgcgtacgtaagcttggatcctctagagcgtcncggctttttttaaacctttttttgagagaagaaggatttaatggaggggaaaaatgatgtgtgtgtgaaaaaatatattattttgaaaggttgtatgnagaatggtagaaagaggggaggttgggataaggggggagagtttaagggggatgaaaaaaaaaatttttttttaagggggggggaggggaggagaagaagaagagagtaggagtaggntgagaaatatatattggtgggtgggaaagaagtggtaattatttaggttatggaaggggtaatagagttggttagggaaaataatgagaggagtgttatttgtagatggaggaggttaggggtgtgtgaaataggaaaatatgtaatggggaggggagatgagatgagggggatattagtgtaataatttataggagaagtatggtgggaagggggagaagtggtgaaggganggtgggttgtagaagggtaggatgtaaag

SEQ ID NO: 171203 - DNA, 523 bp, Arabidopsis thaliana
  unsure (1)..(523): unsure at all n locations
tttaggactacactatagnaaaatctatgacgtcgcatgcacgcgtacgtaagcttggatcctctagagcggccgcccttttttttttttttttttttttttttttttttttttttttttttttttttttttttttttttttttttttccaccccaaacccatggggggaaaacattttaaataccttaaaagcccccaaaaaacctaaaccttaaaaggacaccaacccccccccaaggccccaaaaggaaaaaaaaaaaaaaccgaattttaaacctttataaaaccaaataaatgtaaaaacccccttttttgaaaaatgaaccaaataaaggttgctgtttaccatccatgtatccagcataaacaagccttttttcctttttagcaggctaaaaattttaataaaccttaattttaaaaagtttttaaaaccttatttggggttcccacccaaacatttccttggccttgctggcatctcctgaaaggttttttacttaagcaggccaaaagcccctt

SEQ ID NO: 171204 - DNA, 472 bp, Arabidopsis thaliana
  unsure (1)..(472): unsure at all n locations
tggggacgacctatagnagatgcttgacgtcgcatgcacgcgtacgtaagcttggatcctctagagcggccgccctttttttttttttttttaatacacttgtttttttctttcttaatcgatgtgagaaacaagctatcagggcttgaccgcgcctgccttttccttttttggtttttatccttgtaggaacctgggttacctttttaacctttaggggttttttggtttgggttaaggggcccctttgggggggggttttggagttttaagggggggggcttttccccccccttttgggggtttcccccacttctggggggggggggggggtcccggggcccccttttgccatttttccccttttttggggttaaattgggggccccggggtgttcccagggggggggggcaccgggggttccccctataataatactcttgggggggtaaaaaaattgtgggggctttt

SEQ ID NO: 171205 - DNA, 520 bp, Arabidopsis thaliana
  unsure (1)..(520): unsure at all n locations
ttaggacgcactatagnagtttctatgacgtcgcatggcacgcgtacgtagcttggatcctctagagctgccgcccttttttttttttttttttttttttttttttttttttttttttttttttttttttttttttttttttttttttttttttttgagagcaaccaactattaggattttttttttaaattaaaaaaattgacgacgtttacaaattcccccacccgttcgggggcgggggggtcgacccgggaattccggaccgggaccgggggggggaccagttttccctaaggggggggcgataaaagctgggggaaaaaaggggcaaagggggttccggggggaaaagggtatccgttaaaaattccaaaaaacatgcgaggcggagagataaaggggaaaggcgggggggcctaaggggggagcaaacctccattaatgggggggggccccagggccgctttccagggggaaaacctggggggccagttgtattaaggagacgggcacccgggg

SEQ ID NO: 171206 - DNA, 486 bp, Arabidopsis thaliana
atgcacgcgtacgtaagcttggatcctctagagcggccgcccagtgtaaatacctttgaagagaaagaaggggcggacacaaccgaaaaacgaaggggaacgagccggaaaaaccaatcgacacagacacacaccaaaaaaaggacagggcaaaagaccaaaccccgaaagaagacggggagaccacaagggccatatttatcggcgggccagacaacgcgagcgacaagaagcgagcgacgaaaacaaggaggcagcccgatagacgaccaaacaagcagagaggtgaaaaaccgaagcccaacgaggcggggcggagcacgcgcaggaaaaagacgcagggaaaagaaaacgcgcaagaccgacaaccaaacaacgcggcacggcgcggagaaggggaacgagtgacgccggacaccgaccgaagcaaggacgaaagcggcgaccaccacaaaaaaacgacacaagagagacggaaccgacaac

SEQ ID NO: 171207 - DNA, 359 bp, Arabidopsis thaliana
actatagaagattatggcgtcagactgcacgcgtacgtaagcttggatcctctagagcggccgcccttttttttttttttttagagagaaaatgggcttcaggatattctttatttatttttttgctagagcgcaccctgaccattttcaacacctaatccatgcaaaacaccagaatttggggggcagtgggaccaccagaagaatttctccccttgagctcgtgtttttgtgacacggaggggaagaaagactattgggaagccgagctttgggtgactagaatgcccaacctttcgtccaagtaaacaagaaaccttgcggaaaggtttggttggaaacccacccgcgaaagggct

SEQ ID NO: 171208 - DNA, 521 bp, Arabidopsis thaliana
  unsure (1)..(521): unsure at all n locations
tttaggacgcactatagnaagatctatgacgtcgcatgcacgcgtacgtaagcttggatcctctagagcggccgccctttttttttttttttttttttttttttttcggcccctataacaagattattattattaaatcataacattttaaaataacagacaaacaataagaatagggttgtattattaagtgtttaagaataagagaaagaaaacaacacatgttgttgagaagactctcttgttttcccagaggtatcccaatgttttcttctttattggtgagtattaggattgagactaaagggcagatgatccagctaaacgccttcttgatgcattcgaaatggaaacttgaccaaacttatccttatccgaatcacttgataacgttcgttctctcactggctcgtaatgcctcatccacactccagtataggcctgttggggtctcatgatcctagggtcaggatcatctaacgactcacgccagtgtgacaagtatccagccatacgcggga

SEQ ID NO: 171209 - DNA, 530 bp, Arabidopsis thaliana
  unsure (1)..(530): unsure at all n locations
tttatttaggcgacctatagnagatctatgacgtcgcatgcacgcgtaccgtagcttggatcctctagagcggccgcccttttttttttttttttttttttttttttttttttttttttttttttttttttttttttttttttttttttttttttttttttttttttgggggaaaaaaaagggaggccaaggagttgtttacttttgaggggtctcgccaaaaggcctataaaccaagtccatatccccccgggcccggttgagccaaatttgcataacccaatggccaaagttctcccttaagcctagagccccccagaactgggagaatactttgaattccctccccactgcagctggggagggggaacccaaaaacggaaccccatcaacgggcagccggggctaaaggggtgatcccaccactggccctgccactaatcctcctgcgcgaaacgcaggtggtttccctagcttgacttttttttggggcataaaggatagggaagccccaaagctgttagccaaaa

SEQ ID NO: 171210 - DNA, 516 bp, Arabidopsis thaliana
  unsure (1)..(516): unsure at all n locations
actatagagagttatgacgtcacatgcacgcgtacgtaagcttggatcctctagagcgtccgcccttttttttttcttttgagaataagaacttttaatcggaaaaaatcatcaacccgagttattgttattcttcaaatgattcagattcatgaaaaaacaataatattcacattgatgatctccatattcttccttcaagagagatcactatcacatttacatcatcgggatacctcctacgatctccttgcggtatctccaacaattcatgaatatccataccaaacttgttggccgcacgaaggaggacttcttgaattaagtgttgagctggaccgccttcagggaaagcagagatgaaagattcaacctcgaaaatggcttcttggttagagaaaatattcatacaatccatcagaagatatggattaggaatttagtcacgnggaacgttagctttgggatgacataatgatcggtgaacatgtaatatatggtgatggcccgatttaa

SEQ ID NO: 171211 - DNA, 404 bp, Arabidopsis thaliana
ctatgacgtcgcatgcacgcgtacgtaagcttggatcctctagagcggccgcccttttttttttttttattaaaagcttctttattacctgtatgataagatccttaggatccaaggggcccagggaaccaactcaaaagttccggaatgaaaattaaaccccaaattttttaaacccaactcgaaggggggatttttttaaaaaaaaccccggggggttttttaagggttttttttaaacccgtttttttctttaaaaaaaaaaaaaattttttgccccctttttttttttttttgccacccttttggaggaggtttttttattaaaaaaaaaaaaaatgggggggggaaaaaataaaacccccttttttttttttttcccccagggttcccccccctttttt

SEQ ID NO: 171212 - DNA, 508 bp, Arabidopsis thaliana
  unsure (1)..(508): unsure at all n locations
tttaggacgcactatangaagatctatgacgtcgcatgcacgcgtacgtaagcttggatcctctagagcggccgccctttttttttttttttttttttttttttttttttttttttttttttcattggaaaattaattttcattgatgagtcctaggggaaatacaaggagtcgacgatcaatacatgatcccgaaaactaacccgaaggataacaagatttcctaggaaactaagtccaaaaaaatggggagcaaataacacccctacaaaagaaacaggtcaaaacactgacggttaaaaaagcaaacttcagagggaattaaaactcataactcaaaatctagcaccaaacattttgcaaattatcaatccaaaaacgaaaaacgcttgaattaggggctagccaatggagacaaaaaaatccacgacaccggatagcgacttttcctataccaaatgaagactacctcacaaataaagagaaccaaagcttccatcccagcaag

SEQ ID NO: 171213 - DNA, 528 bp, Arabidopsis thaliana
tttaggacaactatagaagatctatgacgtcgcatgcacgcgtacgtaagcttggatcctctagagcgtccgccctttttttttttttttttttttaaccagttaagagattttattagtcacacaatctttaaacacacaaacacaaatgaatgaagagatactgaaaacaggaacagagcgctcaaacattgagcttcataagaaaaaacctaagcaaaatgtgtgtttcttttgtttctcacgctttaatcaaagacgcggtaagactttcgcgtaaaacagagtaaaccgatctccatccttcttctgtagggtgaagtccatcccaaaagaaagcagttttaggattatcacatacaatatacttcttcactcccttctcatccacacttccacagttatactcgcggctcacacctacgcaacacggctttaatggactctcaaaccttgtactccctggattagatcctttgttcttgaacacagtcaagaaagcattgtagagatcaaggatgatgaaag

SEQ ID NO: 171214 - DNA, 492 bp, Arabidopsis thaliana
actgcacgcgtacgtaagcttggatcctctagagcgtccgcccttttttttaatcttttttttttttttttttttttttttttttttttaaccaaggaggctacaacttggtggtttttattcaaaaaagggcctaagaaacttggaataatgaaaggggagagggaaagggtgtgaccgctccggcgtgcccgggaattttttttgggggtggtagaaaatccaaagggccgaaagtttctgcgaggcacacatggatggcacaccaccctattctcccaggctgtggaaccacagattgtttaacaacgggggctttgcattgggacgggttcaagcttaacagaataatacaagtttcccttataattaaaccgggggtgtgactgtttactacatccagagcggggggttggactaggtgattcaaaaccggggggaataaaaccatctgaacggggaacgaacaccccaggtggcaggttttaattc

SEQ ID NO: 171215 - DNA, 514 bp, Arabidopsis thaliana
  unsure (1)..(514): unsure at all n locations
cactatagaagattcttgacgtcgcatgcacgcgtacgtaagcttggatcctctagagcggncgccctttttttttttttttttcgtagcaaacacaaaattttattcaatacaacaaccaaaacagaacaaaaaccaaaatatcaactcaataaaaaaagacaaacacatgagacagattaaacaaagatcgaatgaaaaaagtggaaaacaaaaacaggcttcggtcaaacaaatagcctgtcaaaatgcttgactttgagttaacatgtcagtatctgttccgcgacgccgttttatgacttcgtacaatccccaccaacctagacttactaagcctaatcgctgccgtcgtgaccggtctttctttctaaaaaaggtatcttattgtaaccaccgtcttatcaccaatcccgagtatggatccgggccaactttagctcctactgatcttgatctcagcacaaagattcgacaacgaaaccggtaacgtttcttccggaactaatttttg

SEQ ID NO: 171216 - DNA, 516 bp, Arabidopsis thaliana
  unsure (1)..(516): unsure at all n locations
ctatagnagagttatgacgtcgactgcacgcgtacgtaagcttggatcctctagagcggtcgccctttttttttttcttttttttttttttttttttttttagtattcaattattacgatttttttttttaatttattaatttttttaggggaacaaaatttcccaagtttttttggaaagctaaggattgacccgggaatacaggaccgcccacgggtggtgtgacggggggggctacccggagaatacggaagggggcctggagggtgaccaaatttcgttatgggggggaaaaagaaaggggggagaaaaaaagggaaaaaaggagccgggggggaaaagggtaaagcctgggaagtccaaaagagagaggtggcggggagtaaaaaggggaaggccgggggggcgttaggaggggggaaacccagaagtaggggggggggaaaagagcgcgcataccaggggagagaagggggtggccaattgggtaaaaaggggggcacaagggggggggg

SEQ ID NO: 171217 - DNA, 529 bp, Arabidopsis thaliana
tattgaggacgcactatagaagatctatgacgtcgcatgcacgcgtacgtaagctcggatcctgtatagcgctcggcctttctttctcgctcccataatataccatcgatggcactaccatagctcactatgaaaagagtaggacctccaggatattatatgactccttactcactgatgacatcttaacatacatccaaacgctcgactgactgaagatataatctcgtgctaggcgaaaattttgggaaccggtcagctggtgtgtaaacaacgactatacttacagactgaacgattcggaagggttacagtgtctttcttatgagcacacacactaaccttacaaggcacatgcagaggtactgaggaagctagtgttgctagcagaatcttatctgaccattcacgtaaagaacatgccattagcagctaacttgttctttagttgagagaatgtatcaccgtcaggtccactattatcgtataacgcgcaacaaacccactttcctattctctacgaagagcg

SEQ ID NO: 171218 - DNA, 516 bp, Arabidopsis thaliana
  unsure (1)..(516): unsure at all n locations
ctatagnagagttatgacgtcgccatgcacgcgtacgtagcttggatcctctagagcggccgccctttttttttttttttttttttttttttttttttttttttttttttttttttttttttttttttttttttgtttcaagccaaccttaatgaaaaaacatggaagccctaggccctaggaaagtagaggggtccaacattaaaacaaaaaccgcaattgacgacccccaacccaaaagtaaaaaaaaattaaaaataaaccaaaaaaaacccagggggccacgaacaaaagaggagtttcggccgtttagttatgacccaaaggttaaaaaacgggcccctttttttaggtgttcggttaaagaaaaaagcaggccggaaaccgagaaggggtcggctaaggttaaaagaaaaacgcgattccagagaggcaggaaaaagctaaaaaaacgcgacccccaccaaaaattcggcaaaaaccgtcccatgggattcggggatcttcaccggagga

SEQ ID NO: 171219 - DNA, 510 bp, Arabidopsis thaliana
  unsure (1)..(510): unsure at all n locations
tatagaagtctatgacgtcgcatgcacgcgtacgtaagcttggatcctctagagcggccgctnngttttnttttttttttttttttttttacaacatactacacgctgaaagcgcattaattattccttattactacaacaagttcccaatttttaaatacgcttacataaaaagcccacaagtttctaaggattagttgaaataaacttcatacttaaactgtcgatctggaatgaaacagtcccaaaaacttctaatacgttgggttccttcttattctcatcgaacatagcgaatatataagtctctatagcttcccttggccttctcggtgatccattcttaacatgttgaataaaatggtaaacataagtttttgcgttttcaacactcgtccggacgtgttcctttggggggccaaccgggtctccgaccccacaatttccaacgttccgccccctgatttttccaatgctggataaaccgagtcaagatttgcgtcgaatagg

SEQ ID NO: 171220 - DNA, 357 bp, Arabidopsis thaliana
  unsure (1)..(357): unsure at all n locations
atgacgtcgcatgcacgcgtaccgtagcttggatcctctagagctgccgccctttgtttttcctttttttttttttttttttnntttttttttttttttntntntntnttttnnnnnttatntntttgggttnnnnntnntgggcccccggataacccccaccttttttggccctttgggggagcccggtttctcccccccggtaaaaatccctttcctcgggggggcctctctttttaagaaccaaggccttgggccacaaaaaactcctccttctctcgcgaggagattctgggctccccccacaaaaacaccggggggcccccacctttggcggggggtgtggggcgctcgccc

SEQ ID NO: 171221 - DNA, 510 bp, Arabidopsis thaliana
ttgaggcgcactatagaagatgcttgacgtcgcatgcacgcgtacgtaagcttggatcctctagagcggccgcccttttttttttttttttttttttttctcccccaaaccaataatagttcacacaactccacaaaagagtacaaaaacagaagacgatgcaaattagaaagaaaaagaaatctcctagtctcatcaaagcgtttcaatatgtcataccaaatcctaagatcaaacagggggataacaaaatgtacaccattatattcacaatgggaaaatacgaagcactcacactattgttaaatcattttccttcctcctatcatactctgctgcgtctgagacccagacaagttttgagaaccattactactgttcgccggtttattatgcttcccgtctgcgctcccaaacacatccagatcttcaaacaatctgtatgatggaacaaacggcttctgtcctacagatacacctgaattgcttgcagttgaagtagcctgagga

SEQ ID NO: 171222 - DNA, 506 bp, Arabidopsis thaliana
  unsure (1)..(506): unsure at all n locations
cactatagnnagattatgacgtcgcatgcacgcgtacgtaagcttggatcctctagagcgtccgccctttttttttttctttttttttttttttttttttttttttttttttttttttttttttttttaaaaaaaggggctttggtagtttattaggcccattaaatattggttattatatatatatccacaaattttcccaaagagcaaactggaaaaaattttttgaatgtataatattttttggctgaaacattttaaagctcatggtgctttttttttttatttaagcgcccccaaccgttttttcagttaattgattccagaactgccaacatcctttgtttttttcccaccaattttcccttttggaacaaatgataactgcggggcgatttcaatgccgattttataaaaaacctggtttggaaaaacctttgtttcgtcttcaacttcgggattggttaaagcattatttatggaatttgacatcatttcagaagtca

SEQ ID NO: 171223 - DNA, 501 bp, Arabidopsis thaliana
tttaggacgcactatagaagagtcttgacgtcgcatgcacgcgtacgtaagcttggatcctctagagcggccgccctttttttttttttttttttttttttttttttttttttttgggtttttttttttttttttttttttttttttttttttttttttttttttggggaaaaaaaaaaccccttttggtcaaggggttcatttttttttttcccaaaaaccaacaaattcccccttaactttaaaatttttgggcttcggaaaaacaaaggggtttcaacgttcccaaaaaccctttttccattttttacagataaatttatgcggggttcgtggttttggggcctgaatttgatgatcatgaaatgggggaacccaacaggggttgccatgaacaatgggaacagaagggggagagttaaaaagcccctttttggccccaaagcaaaggaaagccggccaaatgaaatgatccccaatagggggaaaaaaggcaaaaca

SEQ ID NO: 171224 - DNA, 503 bp, Arabidopsis thaliana
  unsure (1)..(503): unsure at all n locations
ttaggtcgacactatagnaagagctatgacgtcgcatgcacgcgtaccgtagctgggatcctctagagcggccgcccttttttttttttttttttttgatcaccctgacaacttggggtttaaaagaaccttacccctagttccaaaaaggcccgtccaaaaacccaaccaaacggttttttttttgggggcgccccttttctacgggcccacaatttttggggcccccttccccaaaatttttgaaaagcccctcgcgggttttttttttccccccaaaaaaaaacacaccccccctccgggggagaaacccccccccctccctgcggggggggggcccacaaaaaaaaaccgcggggggggggccccccacccccccccccctcttttttttttttggggggggggtggtttaaaaaaaaaggggggtttttataaacctcctcttttttgaaaaacccaacttttttggggggggggggtgttttttctttttttttttt

SEQ ID NO: 171225 - DNA, 516 bp, Arabidopsis thaliana
acctcgacacattatagggcaagacctggccgcctgcaggtaccggtccggaattcccgttttcgacccacgcgtacgcttatcagcaggagagatcaactttcttctgcaggactggaaacttggatacgatagataatctccttaaagagaactggaggattgttagaacggtagctccaggagcagatgttatggaggctgaacatcttcttgatttgttttatgggggagggcagctaatacaccaccagagtatgacagcgacgatgaatattttgctctaaggtaacaaatcagacacccattcatcaatcggacagccgccccgggaactggtgggccacttgctcatacttcggaccaacgcacaagctgtagcgaccctccgagcgcacgcttgagggaaatagatgtgcttgagcacatgctgagttcacaaacgattccttagagtcacaccgggtccatggaaatgcaatctcaaccaaaacgagtgaagcggcggatgccccc

SEQ ID NO: 171226 - DNA, 474 bp, Arabidopsis thaliana
  unsure (1)..(474): unsure at all n locations
tatacgactcacttagggaaagctggtcgcctgcaggtaccggtcccgnatcccgggtcgaccacgcgtccngataccagctgaagatgaccttcctctgacaagactgnaacctcgatacgatttatatttccctaaaaagaacctgaagattgnaaaaagggtaacccttggaccccttgtttttaagggttacccccttttggttgccccttgggggggggggcctttacccccccccccgggtttgcacccggggtggaatttttttttccccaggggaaaaaaaagggccccctttttttaaacccccaaacccccccctttaattttgtgggcccccctttctctccccttttttgcccccccccccccccccccggaccccccccctttgtgggccccttaagggaaaaaaaaagaggttggcccccccccgtgtataaaacacaacccccccgaagacaccccccc

SEQ ID NO: 171227 - DNA, 514 bp, Arabidopsis thaliana
gccggcactaatacgactcatatagggaaagccggtacgcctgcaggtaccggtccggaattcccgtgtcgacccacgcgtccggatcgatttctaaagtcttcgtcttcttcttcttctgataactagctttttcaatcttctgaagctttaattttttcatacccatggctaatcgttatgatccaaatcctttcgctgaggaagaagaagtcaatcctttcgctaatgctagaggagttccacctgcgtcgaattcgagactttcgcctttgcctccagagcctgttggtttcgattatggtcgaaccgtagacattcctcttgacagagctggtacacaggatttgaagaagaaagagaaggaactccaagccaaagaagctgagctaaaacgacgagagcaggacctcaaacggaaagaagatgctgctgcacgagctggaatcgttattgaagtgaaaaactggccgcctttcttcccacttatccaccatgacatcgcaaacgaaat

SEQ ID NO: 171228 - DNA, 434 bp, Arabidopsis thaliana
  unsure (1)..(434): unsure at all n locations
taatacgactcatatagggaaagctggtacgcctgcaggtaccggtccggaattccgggtcgaccacgcgtncgcgtttctctaggcagttnttttttgttgtttgaagatggtgtcacatgaaagagacacaaggattggtggaatggtttctttggtcccacatccattccccgttttccccccttaagggttttgggaaagtttcctgggggtgttttgaagttttctttggggttttttttttttttttttttttccccaggggggggggggtttttccgagggggtgggaaaactctttggtttcccgggggtggaataaaaagagaaaaaattttttgtaaactctttctcaacaaaaaaattttttttggccggggaaaaacccccaaaaagaaaccttttttttttcttttataaaaacccccccc

SEQ ID NO: 171229 - DNA, 527 bp, Arabidopsis thaliana columbia
  unsure (1)..(527): unsure at all n locations
atgattcgccggcactaatacgactcactaagggaaagccggtacgcctgcaggtaccggtccggaattcccgtgtcgacccacgcgtccggaagagactagttctcttagaaaacaattggacactcagacaaaggagcttaaccagagaatgcgccaaatagaagaacttaaagaaaaggagaggatagcaaacgaaaacgttgaagggcttatgactgacattgctgctgttgaagaagaaataacaagatggaaagtagcagccgagcaggaggctgctgctggtggagctgttgaacaagacttcacgtcacagctgtatgtgctaaaagaagaacttgaagaggcaaagcaagcaataatagaatcagaaaagaaactaaagtttaaggaagagacggcagcagcagcaatgggtgcaagggatgcagcagagagatctctgagactcgcagacaatagggcgactaagttgagggaaagaatccaagaactaaaccgtanagttgaagaattagaaaccc

SEQ ID NO: 171230 - DNA, 484 bp, Arabidopsis thaliana
  unsure (1)..(484): unsure at all n locations
ctaatacgactcacttagggaaagccggtacgcctgcaggtaccggtccggaattcccggttcgacccacgcgtccggctcgaagcttgcgattcacatggatggccatcaagccactcgcaattcatgttcttcttcgctacgtatttcagtttgatgggatgtaaaggaattggattctggtttggtttaaagaagcagatggattatgaatcttcttcattggtctttagctgttgttaccatgtattctagggtttatttaggttaccacacggtggcgcaggtttttgctggtgcggctcttgggggtattgttggtgcgagttggttctgggtggtgaattctgtgttgtatccatnttttccggtgattggagagagtgtattgggggagatggctatatggtaaagggtactttcgataattctgatgtggtgaagtttgaatattaacatggcccaagctgctaggaaggaaatg

SEQ ID NO: 171231 - DNA, 360 bp, Arabidopsis thaliana
  unsure (1)..(360): unsure at all n locations
acacgactcagtanagggaaagaccgcacgcctgcaggtaccggtccggaattcccggttcgacccacgcgtccggtctgatccaacatgaaggagaatatagagcacgacgttcttcttacataatacgaggctaccaaaatctcagagagctacaccatgatatcggatcatctgccactcttgaactactcttactacaccaccgctgggacaaccagttttaattggggcggagaactccgcagacgctatgatccttatacagtaccaccaacaatgacaacaaagcccatgctgcttagcaatctgaaaatgtacgcgcgcatcaagctggtactataggtgacacaatccgcg

SEQ ID NO: 171232 - DNA, 512 bp, Arabidopsis thaliana columbia
atgattcgccggcactatacgactcatatagggaaagctggtacgcctgcaggtaccggtccggaattcccgtgtcgacccacgcgtccgcacggctgcgagaagacgacagaaggggaacaacgaaatggacgatttctcaatccctatgaaatctaacggtaacttagatgttccaccaccagcaccagctaacttcatccgtcctggaaaacgacctttgtcctctatgtcacccaccattgtactcaaggacggtaaagtgaaagccgctgtgggtgcgagcggaggagccaacattattgccgggacaacggaagtttacttgaatcattttttcctcaagatggatcctctttcttccgtcttagctccaagaatctaccatcagctgataccaaacagagcttcgtacgagaactggacaacagtattcaatgatcatttcgagattcctaaagcaacaagagttgtgttggagaagaaaggtcatgtcctatctcctattgccg

SEQ ID NO: 171233 - DNA, 492 bp, Arabidopsis thaliana
  unsure (1)..(492): unsure at all n locations
taatacgactcctatagggaaagctggtacgcctgcaggtaccggtccgngattcccgggtcgaccacgcgtncgaacatntacaaaaggcctanaaaagcaaagatcttcgctgacttcgtntctttttcgctggcgaagaaaatttctggggtttttgggtggatttccgggaagccgaaaatttttttttttaacccgtttaaccttttttaacgggggaaaaacttggggggggtttttaatttttgggaaagggggggtttgttaaaacccccccccgactttttttttagggccccctgggggcccccaaatttggggaaaccgggggattcgggaaaaacttcttcccccgggggcggaaaaaaaagttttttaaaaggggggggaaaaaaaggggggcgcccccaaaaaaggaggggggggggggcaaactttttttgtttttttttttttggggaaggggggtggaaaaaaaccgggggggtt

SEQ ID NO: 171234 - DNA, 527 bp, Arabidopsis thaliana columbia
  unsure (1)..(527): unsure at all n locations
atgatatcgccaagcactaatacgactcactaagggaaagccggtacgcctgcaggtaccggtccggaattcccggtccgacccacgcgtccgaaagagcagagaagagagaagaggaagcttgtagaaatcgatggcgacgatagtgcagtgtctttcttcctgtgcgaccctcgaatcccaattcaaagtcctttcgcttaagggaatctcttgttcgtcaccatcttcttccttctctcaatcgggtggtgcttcggctaccttatcctcttcccttagcttctctcagagcgtttctcagtgcgtcgccttctcaaccgggaatttgtgggtacagaagccaatgaggcaattgattgtgtgtgaggctgctgctcctaccaaganagctgattcagctgcaaagagagctcgccaagctgagaagaggcgtgtttacaacaaatctaagaaatctgaagccccgacccgggtgaagaaggtcttggaagcacttgaggggctcaagaagaaaactgatgcgc

SEQ ID NO: 171235 - DNA, 514 bp, Arabidopsis thaliana columbia
  unsure (1)..(514): unsure at all n locations
atgattcgccgaggcgtatacgactcatatagggaaagctggtacgcctgcaggtaccggtccggaattcccgtgtcgacccacgcgtccgcagctcttgaaggtgttgcaatggaactggaggattcattgttcccattgttgagagaagttgatataggaacagatccaaatgaagtgttccaagatgtggagtgggctattctgattggagcaaaacctcgaggccctgttttggaacgtgctgacttgttggacatcaatggccaaatctttgctgagcagggcaaagctctgaacaaagctgcctctcctaacgtcaaggttcttgtagtgggaaacccttgcaacaccaatgccttgatttgtcttaaaaatgctcccaacattcctgcaaagaacttccatgccctcacgaggttagacgaanatcgtgccaaatgccagcttgctcttaaagccggtgttttctatgacaaagtgtctaatatgaccatatggggaaatcactcca

SEQ ID NO: 171236 - DNA, 519 bp, Arabidopsis thaliana columbia
  unsure (1)..(519): unsure at all n locations
atgatttgccggcactaatacgactcacttagggaaagccggtacgcctgcaggtaccggtccggaattcccgggtcgacccacgcgtccggagagagagagaagtagattgagaggcgagagagataatggcagatgaaggtaaggaggagacaggaatgggtcaggtcgaggaagatttttctgtgtggaagaagacacaccatttctctacgatcttttgatctctcacccactcgaatggccatctctcaccgtccattgggttccatcgacgccaaatccttacgtagcagactcttacttcggtgtccacaagcttatactcggtactcatacttccggtagtgctcaagattttctcatggtcgccgacgtcgttaccccgacaccaaacgcagaacctgngataggcggcgctaatcaggatccctttattcctaaggtggagattaggcagaggatacgtgttgatggagaagtgaacagagcgcggtgtatgcctcanaagccgacgct

SEQ ID NO: 171237 - DNA, 461 bp, Arabidopsis thaliana
  unsure (1)..(461): unsure at all n locations
agagtatgacgtcgcatgcacgcgtacgtagcttggatcctctagagcggtcgccctttgtttttttttttttttttttttttttttttnttttttttttacaaaccaaaccctnacccacgaaaaaaaaaaaaaataattaatacattgctaagaatatattatctttttgttaagactggtgatgttggagcgaaaagaacgaggattttttcccaaaaaaaattcgaaaaggaggagcgaaagttctgttccggggaatcctgggttaggccgctgcacttttccgcctatccgagccatttaaacagattggaaggaggaattgaagcattggaatgaggagcttaatccaggcgactaactagggaaataccactcaacccctgggttaggagggctggattcggggtggggaaaaggcggaatttggacttggaaaaccctaatcaaggaactac

SEQ ID NO: 171238 - DNA, 671 bp, Arabidopsis thaliana columbia
  unsure (1)..(671): unsure at all n locations
atgatctgccagcactaatcgactcacttagggaaagctcggtacgcctgcaggtaccggtccggaattcccgggtcgacccacgcgtccgcggattcggagctgctggtataaggcatgtgtttcctcatttggtgctgaccagtttgatgagaagagcaaagactacaagacacatttagaccgtttcttcaacttcttctatctatcggtcactttaggcgcaatcattgccttcactttggtggtatatgttcaaatggaacttggttggggtatggcttttggcacattggccgtagccatggggatttctaatgctttgttctttgctggtacaccgctntatcggcataggttgcctggtggtagtcccttgactagggtagctcaggtcttagttgccgctttccgcanacgaaatgcagctttcacaagcagtgagttcatcggtctttacgaagttcctggcttgaaatctgctattaatggcagtcgtaanatccctcattccaatgatntcatatggctagaaaaggcggtagagtggcagcgcttagccgagaaagcgacggaacatanacttggttcttccgttatgaattttgagacnggttgtagcaagtttcttttgngacannaatcacaggattaactaaaatataagatga

SEQ ID NO: 171239 - DNA, 535 bp, Arabidopsis thaliana
  unsure (1)..(535): unsure at all n locations
tgacgtcgcatgcacgcgtacgtaggcttggatcctctagagcggccgcccttttttttttttttttttttttttttttttttttttttttttttttttttttttttttttttaattttttgttttttgttttatannnaaaaaaaaaaaggtaaaggggaaaaaagtttttccgggagaaacaaaagaaacccccccccctccccaaaatcccccggggcccccccaaaaagaacagatttttccggagggtttccccaaaaaaagccctttaggggggaggccccaaaccccccccctttttttgggggggggggaaaaaaagggggggggacaaaccccggggaccctaagggggggggctaaaagggggggggacgaaaaccccaaacccaaaggggaaggggggagaaactaatggggaaaacggggaagaaatgcgggcggagggccttcaggggaggagctcccccggggggaaaaaaaaaaaggggtgcctctcaaattgagggggggcccctcacgggcccaaacg

SEQ ID NO: 171240 - DNA, 266 bp, Arabidopsis thaliana
tacgactcactttagggaaagctcgtacgcctgcaggtaccggtccggaattcccgggtcgacccacgcgtgcgtccacggcgtgcgccacgcgtgcggccactcgtgcggggggaatcatgtgatgagctttgattcgagggattggggtgagagcttaaggaaaggaggtggtggttgggtgggaagcttgtggtgtctggctgtggctgtgttttttatcgttggcccggggaggcctgcgaagcgcaggaggaataggtgta

SEQ ID NO: 171241 - DNA, 674 bp, Arabidopsis thaliana
  unsure (1)..(674): unsure at all n locations
ttaggacgcactatagnagagttatgacgtcgcactgcacgcgtacgtagcttggatcctctagagcggccgccctttttttttttttttattatgatgatcttgaatcttgatttgacattttagactttagattctgcaaacaaaaacacataggagcaaacacaatgagcatcttatggctcttgctataacatcgaaatcgttgtcttaacagagacagggattataacattatgaacaccatcactccatgtgaagctggcaaagaagtagccagtgaagactttgtgactaggggtagccttaaccgagaatgtgtgttctctgttagctgcaaacttaaccacgagtgtggttgggctcacggcgagagttataccgagaggagactcgatcacagctctatagactgactcgatgggttcaacactcgggacgagccttgggggggtgacttttcttttaagagagggaatcgtgactgttgtgccgtttgtcaggaagcaccagtggctcacgaactgggcaagaagctcttttaccgagcctcgaaggagtgaagaggcggttggccccgcaaataaaatatgcgtggacgaacgaaaaaagcgcactatcggtgaaagggatggttacccgctcttgcagggagtgcccccctccgctggggg

SEQ ID NO: 171242 - DNA, 698 bp, Arabidopsis thaliana
  unsure (1)..(698): unsure at all n locations
taatacngactcactataggggaaagcntggtaccgcctgcaggtacctggtccggaattcccgggtcgacccacgcgtccgcacggacctccgaaacttgttatcatcctagaacttctatcgccctgtaaggtgtatcacagagtgctccgatcaactctgctcagttgagtgatctctcttcactcatcaggagacacattgcactcggtggcgactgcctacacatgtaactggtcatcatatctcaacagaaccaacggaacgaagcctcacttctctgaagaacgaaacactctgcctatctgcacaaagcgcaatgtctcacaaatacggcactagtgacgctgagcgatctagagctgccttgtctgatggatatcggcgtaatacgacacgtcatctggttagctacgcgtcagccaattgttgtatggattgtccatgtctctcggaactccttgaatgatcacaactgcatcctcagtctctgatatacttagcttcagcagcatgcatactatccataggaggcaccgttagttcagaataccacacacagacatggactcgatgctagcacataagtgtctacttctggagatcgtgggatacagcgtagctatgactccttgccctatctggcagctgatcaacgaatctaagtggtcacccatcaagatggcatatgcctgag

SEQ ID NO: 171243 - DNA, 529 bp, Arabidopsis thaliana
  unsure (1)..(529): unsure at all n locations
ctatagaagagttatgaggtcgactgcacgcgtacgtaagcttggatcctctagagcggtcgccctttgtttatttcttttttacataaaatgcgatttgatcggataaataagagggaagacaaaacaaacttcaccatgaccgggagctaagaaaagctagagctcacaacaccgtaaaaattaatgattcgagttgcaaaaggatatgacagatgtaacctatattatgaaccgtggngtggcgtgagggcattacaaagcccacacaagagacntctggacatgcaggggcgcactgggaaagcgatagaggatggatagctgaccagcagaacatggggagagacacggggacgatggatgggagatactggcaggagagggtggcggtagtggccgcggggagaccacgggctgggaagggcgagcggagccaggcaaggggagggggaactgcgcggggcggggggggacaggggatcgggggggagagggagcagcggaacgtgagcaaggagggacggaa

SEQ ID NO: 171244 - DNA, 255 bp, Arabidopsis thaliana
  unsure (1)..(255): unsure at all n locations
gcacgcgtacgtaagcttggatcctctagagctgccggccttttttaatacctttattcgacaaacatacacacagggatgatagcctgggtcagccaacatacgggaaagattgcataggtgcgcggcggcctgatgcctggatgcggggctgcgacgccgggaagagcagggcgtgggtgccgggagagggtgggcagggttgggttttttttttgagaggggacagaganggaggggagggggaggattggg

SEQ ID NO: 171245 - DNA, 630 bp, Arabidopsis thaliana
  unsure (1)..(630): unsure at all n locations
cactatagaagatgcttgacgtcacatgcacgcgtacgtaagcttggatcctctagagctgccgcccttttttttttttttttttttttacatatctataagagtaaagacacatcatttcctttattggacaaagatatacaacgaaaagaatcaaaaacagaaaaagaaattctcggacataatagacaagctataaacagagcattcacaattttcacataaaagaaagagaggaagtgtagataaataaatagaatataatttgagattctatgagcttgttgtgcattccttaggagctccctgtggaaacctcctatggtcagtacaataattggagatcatgtaattcttctgaacccatttgagtctagcttggcttgttgaatccatttcttgagtgaccaattggagtttgggttcgagtcaatcttaatgtttctgtaagaagccatgaatggagctttagaccaatcagttntaacaagaccgcctcttggtgccaatcgtctgcgttcataaactcgcgtacatcctcatcggcttgttctttggaacaagacaccgagagactcatagtttttaaactctctaatgggtgtgtcatcgacgggcaatatgattctt

SEQ ID NO: 171246 - DNA, 367 bp, Arabidopsis thaliana
  unsure (1)..(367): unsure at all n locations
acactatagaagatgcttgacgtcacatgcacgcgtacgtaagcttggatcctctagagctggcgccctttttttttttttttttttttttttttttttttttttttttttttttttttttttttttttttttttttttttntttttttttttgggggaaaagggcaattaaagccccttttactaaaaaaatttttaaaaaattggggttttgacaacattttcaaaaagagggggaaaatcctttagtttaatatagcttgaaccccttttaaattccaatcccagttttgggttataagaagaggaaacccacccttttatttttaagctttaaagccccttatttggcaaaaatttttttttt

SEQ ID NO: 171247 - DNA, 565 bp, Arabidopsis thaliana
  unsure (1)..(565): unsure at all n locations
cactatagnagagttatgacgtcgcatgcacgcgtacggtagcttggcatctctagagcgggcgcncttggtttttttttttttttttttttttttttttttnttttttttttttattttttttttttttatcttttttnatttttataaaaatattgttatcctcttttttttttaaaaaaggagtgtgttatatccccgccgggggagaaaaaaaggttgttttccccctttggggggagaaaggggggctttaaaatagggggcgctaaaagggggtggggggaccgggggcgcctgtgtagttaattattggtttaaatgcgggagggcctctgagggaggggggggcgggcggcccccgggggaggaggccgttgggaaaaagggggagaggtgtgtttggggaggtgccccctggggccccggtgggggaatntttaaagagggggggggcgggcgttctttggtggggggaggggagccccggctttctctacaattctggggagggaggggcgggggggggtttttttgtcgggggggcgcggggggcgaaaaaggg

SEQ ID NO: 171248 - DNA, 543 bp, Arabidopsis thaliana
  unsure (1)..(543): unsure at all n locations
actatagnagagttatgacgtcgacatgcacgcgtacgtagcttggatcctctagagcggccgcccttttttttttcctttttttttttttttttttttttttttttgattttttttttttttttttgtgcaggggtatacggcggagagaatcccccccccaaaaaaaaaagcgggcacaaaacgaacaaggggggggccgaggggggacaaatttcttttttttggaagaagggggtgagacaaaaaaaacctagaagagggggggagaaagcaagaccccgaaagaggacaagggggcgcccctcgggcgactcgggggaggcggggggttataaaaaaacataatgccaccttgttgagccaaggggcgcctagcccggatagcgagaatcaaaaaaacaagctaccaacaacgagtacgtgtaagggctacacttacgggtctcagacgagagggaaaagggaggttaaaagaaaaccgtccagaagagaccagaagtggcgggccccacctgccgcgaaccggagaggggggaacaa

SEQ ID NO: 171249 - DNA, 646 bp, Arabidopsis thaliana
  unsure (1)..(646): unsure at all n locations
actcactatatgggaaagcctggtaccgcctgcaggtacccggtccggaattcccgggtcgacccacgcgtccggcaatgttagctgctgggttgcagaacatcggcggtggagatcctttaagacagcagtttgtacagctgcaagagcctcaccaccaatatcttcaacaatcagcttcccataattctgatttgatgcttcagcagcaacagcagcaacaagcgtcacgccatctcatgcatgctcaaacacagattatgagtgagaatcttccgcagcagaatatgcgacaagaagttagtaaccaaccagctggacagcagcaacagctacagcaaccggaccaaaatgcatatcttaatgctttcaaaatgcaaaatggccatcttcaacagtggcagcagcaatcagagatgccatctccctcgttcatgaagtcagattttactgactcaagcaacaaatttgcaacaactgctagtccggcttctggagatggcaatcttttgaatttttctataaccggtcagtctgtactccctgagcagttaacaacagagggctggtctccanaagcatccaacactttttctgaaccgttgcacttncacaagcctatcctgngaagagtcttgctctagaa

SEQ ID NO: 171250 - DNA, 626 bp, Arabidopsis thaliana
  unsure (1)..(626): unsure at all n locations
cactatagaagagttatgacgtcgcctgcacgcgtacgtaagcttggatcctctagagcggtcgccctttttttttttttttgaccagagaacgacattaactcgaaacaaattcataagatcattacaaaaggaaaaatcaagagacacaaaccaaaccaaagaacccattttttttttttaaatagcaaaccaatcacccaaaactgatatataataaaccggaccatgactctgcaaattaaagaaacacanacctcggctcaaagacactcttcactcttcttcttcatcataactaagccaagattcttcacttcttcactgctgcttacattccggtggcctctcacctgcttgaccttccgcaagttgacttcttccagccttcttgtgcccagctgatgaacttcttttgctcttctttccttgatctgcttcttcctctcgaatcatcctcacatcnctctcctggcatcctcatatcttcctcgcctcttatcacatctcataatctcatcatcgcgccctatataaggcatctgctcacagctcacagtgaacatgacacagatggagatgatttctctttgattgtgaccgaatcatatatgctcatttgcctg

SEQ ID NO: 171251 - DNA, 648 bp, Arabidopsis thaliana
  unsure (1)..(648): unsure at all n locations
ctcactatagggaaagccggtacgcctgcaggtaccggtccggaattcccgggtcgcccacgcgtccggtcgactcaaccgagtgagttctctctactgagtcttgatacatctccgctctcagctctttcccagattccacaaattccatcgccggagcttcttcgatctcaaactctcttatcctcggccacgttgccgcctgaatcggacgcagagacgacgaaaaaggtaacctaactgcagatctcatcggagaactccacgaacaaccacctccgttcaattgcattttcctcatcgacgcantaagttcaccggtactcggagatagcggcggagattccgacggtggtgaaaacgaaggagatacaagaatcgaagtcggagaagtagctaatcctgagaagatccaagatctggatctaacgaacaaggtaatacacgtaactgctccgtcgtatgagcgaagatacagattcttctccggcagctagttccgtctttacacggctgagtacggtaacgagaaggatggagccaacactcgaaaactccatgagagaactcacacgaatcacctcttctaccaacttccttacgaaactcaggacaagcggtgccggagtaaatgaaacttctcggatc

SEQ ID NO: 171252 - DNA, 605 bp, Arabidopsis thaliana
gtacgtagcttggatcctctagagcggccgcccttttttttttttttttttttttttttttgaatattttttttttggtgtttttattgagattctaattgttaacaaacctggaaacaaaaaaaaacaagagcacgggacataaacaggagaaaagactcggagagagacccagcaccaaaagatactgttccaaggtgcctcacaagaggaggaacgcgtaatgctgctccctgctctattcactcatcacacgtccgtcatccaagggggcgcttgactctgggacccccggctgcttctttccaccagctttcaagtaccaaccaatccaaccgacaataggaaccacacctgccacatccgcataggttctgggcttgccctctgacacctttgggcccgactcacctgatgcagatgctggtggaccaggatcctttgtttggatagctgaccggctgctagttctaaggaccgtgtgagcaactaccgaggctcccccgcccatcctgcgaaggaaacaaccgaacggggccctccattcgtaagaccccgccaccagagaccaacaacacatggggaggagggcggcggggcaggga

SEQ ID NO: 171253 - DNA, 548 bp, Arabidopsis thaliana
  unsure (1)..(548): unsure at all n locations
actatagnagagtcttgacgtcgcatggcacgcgtacgtagcttggatcctctagagcggccgccctttttttttttttttttttttttttttttttttttttttttttttttttttttttttttttttgtttttttttttttatttttggtttttatttttttttttttttttgtttttggggaaaaaaggagcttttattatgaggggggcggtctttttggggggggggtaaaaaaagcggggggaaaaagcccccttttttggggggcgggggaaaggggggaaccagagtaatcttgggggggaaaaaaggggggggggacttttatggccttgggaaaccattcgccagagggggtgggggggggaacaccgggggggaaagaaatatgggcggaaggaaatcccaatcggacggtaaataacgtgcagagatctttagtaccactaggagggggggcaaaaaccgcgtgcacggggacaatcatcagcttgaaagccatactgaggagacagaggcggctacagagtatatcgaccccgcg

SEQ ID NO: 171254 - DNA, 620 bp, Arabidopsis thaliana
gcacgcctgcaggtaccggtccggaattccccttccgagggacgcgtaagccggctgcgaagacgacagaaggggttggatcaagcagatgaatgcgaagacccatacttgcgtttagtatatgcttcgtcatgggctatatctgtttactatgccttccaacgaacttggaagcctttcaattctattcttttttgagacatatgagatggtcaaccatggtgggatttcttttatttctgagcaggttagccatcatccaccaatgagtgctggtcatgccgagaacgagcacttcatttacgacatcacatcaaagttgaaaactaaacttttgggtaactctgttgatgtttaccctgtgggaagaacgcgtgtaaccctcaagaaagatggtgtggttctggatttggtgccgcctctcactaagattcacaatctaatatttggacgaacctgggttgactcacctggggaaatggtcatgacaaatttaaccactggagacaaagttgtgctttatttccagccatgtggctggttcggttctggccgctatgaagttgatggctacgtttacagcgcagctgaagaaccgaaaatcatgatgacaggaaaat

SEQ ID NO: 171255 - DNA, 653 bp, Arabidopsis thaliana
  unsure (1)..(653): unsure at all n locations
taggtaccactatagnagagttatgacgtcgcctgcacgcgtacgtaagcttggatcctctagagcggccgcttttttttttttttttttttttttttttttttttttttttttttttttctttttttttttttgggcaaaaacacccttgtttcttacaggtaatacattcttttttctgggtcatcccaaaatttctcgcttaaaaaaggatcgatagacataaaccttttaaattcttttacaacacccaatttgacaattctgaaatggtctttacattttcttggctaagggctccctcctttcacctggacaaaactagaacgaggttcttgctaattttcccggacagggtggtcagggccctgttgttcccccattggttgacccaatataggattagggcctgactcaccctctcgggacgaaccttggggaggaacccttgggttttcggggcattggattcttaccaaagttgtggttactcaagccgacattctctgttgccgttggtacaccggcgttcgagcggtttgttccccataaaggggaacccctccctaccgatgcattttgaacttccaaagcttcgggagatgcgttaacccccgtcattttcagggcaagaaggcccgatcagagagctt

SEQ ID NO: 171256 - DNA, 454 bp, Arabidopsis thaliana
  unsure (1)..(454): unsure at all n locations
actatagaagatcatgaggcacatgcacgcgtacgtaagcttggatcctctagagcgtgcgcccttttttaattcttttatatttaaaacaacgcgaagcgcttgagaggaaccaaatacactggatacgatgatatccagcctggtntagtcgtctgcgtagtataataacacggtgagaggggacacatcatatctgtaatcaccactcgtatcgagaacagtatatctttgagtgtcggagagaaggcactgatggccatacatgcagacgcttactctcatacagtaggcacctagactaggatctgtatgtaatgctgcgcgtgccgcgttcaggagcctcgagaggaacgggtagattgctcaaccaactcaagagtctaagagagatacctttttgtgctgtgcaacatgggctcaccagaggcgagcctggctataggacgtggaa

SEQ ID NO: 171257 - DNA, 531 bp, Arabidopsis thaliana
  unsure (1)..(531): unsure at all n locations
acgactcactanagggcaagaccggcacgcctgcaggtaccggtccggaattcccgtgccgacgccacgcgtaccccccgcgtccggacacgtgtccgagggtttagacgaacttaaagccgcacgagcaaattgctaagtcggacatagcgtttccctatcaaagcaaacattcggatgtttgtcagcaccactttgcatctaaatcagggactggatttgtttgcgcaggagtgaaacgactccggtaacctgcgcggcggatgactactgcaatgggagaggaccgtccgcttatgcggctgagctacatagtgaagcggaggccacgacggcatctgtgatggactcctctcaatgctaaagctccgagcgatatataaccggggaagagattgaggcgctctctgagtaccgacaagatgtgatagttcttaagactgagttgtgactacggtcaccgtagaagaccgtgctggagctactcggattgaatcatgatgtgcactagggtacaatatcatgagcgat

SEQ ID NO: 171258 - DNA, 505 bp, Arabidopsis thaliana
  unsure (1)..(505): unsure at all n locations
ttaggacgcactatagnagatctatgacgtcgcatgcacgcgtacgtaagcttggatcctctagagctgccgccctttttttttttttttttttttttttttttttttttttttttttttttttttttttttttgggccacaaaaagcttaaggtatttgttctgtactctttgaaaaaaacaaaaggcaaaaaaaaaactctgctgggtttgattttgacatccttttttttgggacataaaaaaactatattcttgctggagagccaaaatttgaaattatgattgttttgtgggcatactctagctgctttttttaaaaggggcttcttttgcttcaggttctagaggaaaaattctgatttttttgctctccggtgctggcgctgccacttgatcaggtgcgtcgcagncccttaagactttttgggttgttcaaccaaacatggtctgtatttcggacaattcatttgttgctaagccattttgattgcaccgaaggggg

SEQ ID NO: 171259 - DNA, 423 bp, Arabidopsis thaliana
ctatagagatctatgacgtcacatgcacgcgtacgtaagcttggatcctctagagcggccgcccttttttttttttttttttttttttttttttttttttttttttttttttcctgggaacccccggaattaactttaatctcaagatttacaaacattacaaagtaacaaaatccaaaacacgtgaaacaacaacgcgttacaagctttaacaaattctaataaggaaagaaatccaaatcataaatttctgctgacgtggatattagatacgcgctctaatccagctggcaacgacttttccagagtttttaccttacctatgccgcgtaaccgtaaaaaactaaaaaacccaatttagcaccagccagtggcaaatcccccacacattataaaaaacccttttcgctcctttctttttgt

SEQ ID NO: 171260 - DNA, 362 bp, Arabidopsis thaliana
  unsure (1)..(362): unsure at all n locations
cgtacgtaagcttgggatctctagagctgccgcgcttttttttttttttttttttttttttttttttttnnaaagggaaagctaagtggatatcatattactacatccgcaaagatattaacctctttacacaaccgattttttccttgtgaatcaattaagatanttatatatctctaagaacattatcattattacagtgataaattaagtataaacggagaatgtaacggtatgtttaaggatcgacccttttcgaccttcctcgaccatgcgagctccggctccaatgtactgtacaatgctgaagattgttgtgtgggatggggcacacggagactgaggtgaggtgtgccgccatg

SEQ ID NO: 171261 - DNA, 405 bp, Arabidopsis thaliana
  unsure (1)..(405): unsure at all n locations
tatagaagagttatgacgtcgccatgcacgcgtacgtagcttggatcctctagagcgtgcgcccttgtttttttttttaaatanaaaaacttcttcagttttggaaacaatgtttttgataatacaaaaaaagctgtaaaaagtccaaatgaaaaaaaaaattattcggattcgtcactagttaattcgatatcagaatttccatcttcagcatctgttccatcttcgggttctactactggatcatcaagatcttctggttgggcatctagatatgatagtgtctcgacttgtaatgaatcaacttgcacaatagaatcatcgttatcatgctgcattgcagtgaaatccagatttttgggatgcatacttggcctctgggggggggattaggggcgggtgccc

SEQ ID NO: 171262 - DNA, 511 bp, Arabidopsis thaliana
  unsure (1)..(511): unsure at all n locations
atgacgtcgcatgcacgcgtacgtatgcttgtatcctctagagctgccgcccttttttttttttttttttttttttttttttttttttttttttttttttatatttcaccctttttnnnnnnaaaagaacacaaacagaggattttccttcagaaccaagttatattacagagacaaagcagtaacactctctccttcagaaccttgtctcagcaaacacaagccaaatcaaaccaaagggaactactctttttcctcgataacaagaaacaagagaccaattgtccaacagactaaattgtaggaacaaagagagtcgtgacaaacatatactcattgatgcttcttgattgaggatgaagcacttgtccatgcttttatgagcttggggaaatcaaactgcgagcccttaattccaatcttgaccacgttcccaaaatcccaagagcaagccgtggaaaaaaaattggagctgggtgatgtgagccttacaaatgggatggcgtttggg

SEQ ID NO: 171263 - DNA, 524 bp, Arabidopsis thaliana
  unsure (1)..(524): unsure at all n locations
cctatagnagagttatgacgtcgcatgcaccgcgtacgtagcttggatcctctagagcggccgcccttttttttttttttttttttttttttttttttttttttttttttttttttttttttttttttaaaaaaaaacagtttgggattaaagatttaagatcttttatcataggaccccaaaaagaaaaataaatctgctttttatagcctaataaacttttttttaaaaactaaacaaaatagggttgggggatatatatttcccttgaaaagttttttttaaaggatcaaaagaaaaacaaattattgcctgaggggagctaaacaaaaaccaaaaactgtttttttcaccaaaaacaaatgtaggctcgaatcctggacgggcccaaaccaaaaaggttttttccccgggtttgagcaccctatgccccaggctggggtcgattgtcagcactcncgaaaacccttatgtttttttcccgttccggngccaacgcagggggtgcgaccctttttaggtca

SEQ ID NO: 171264 - DNA, 636 bp, Arabidopsis thaliana
  unsure (1)..(636): unsure at all n locations
gacgtcgcatgcacgcgtaccgtagccttggatcctctagagctgccgcccttttttttttttttttttttttttttttttttctcacaannanaananacacaaaaaaaaaaanaatcccttttccatggcaggggcaagactacacgaaatatccttgatcaggacataaccccaacagaacaatctngaaaatccatgattatttgtggggcgcttgagaatcctaacccagggagacatggcgccacattacccgaaactaacttgaatataaaacccccaaaacgtgtcggaacaaaaaatgcaaacccagctacagagcatttctaaaccctccaaaaaggcctaaagaacaaaaggcgggcgtaccgagtgaacacaagaancaaccgcggcccaacaaacccgagaaaagcccaaccaggagcgcatagtagtgacggacccgacgccaagggggatgggcggagcggcgaggcgcggcggcgacagaaggcgcgcgcgggaggagagacaaagagtcgaggcgcggagcgcgggcgggacgagaggcgagcggggggcggcgcgacacgcggcgggagaggggaacagcgacggggtagggccgcgggcaggcaggacaaggcaaag

SEQ ID NO: 171265 - DNA, 631 bp, Arabidopsis thaliana
tgcacgcgtacgtaagcttggatcctctagagctgtcgccctttgttaatccttttatagcagaaatggcaaaggacgtacggggaaggaatgagaggaggaacgtggcgcgaggtggagagaggcagaggggggtagacggaaacaagagatagaacatggaagaggttggaagatggcaaacaagaggagagaattttttttggggagggccgaagaaagaaaaacggaacatgtaagagataacaaagaagtcagggacgcaacaatgggtaggtagcggcaaggccaagtagaagagaagtggaagaagaaaaaggcgtagaaagacaagatgcaaacaagtggtaaggaaataagcaccagaaaaaatcgaaacagaatacatgaaagataaataaaacgaacacgcaaatgcaagagccacactagcgaacacaaagagaatacgcagaaggaaggtcgaaataataaacaagagactataacaagaagaaagcaacatataagagaacagattatacaaaagttcaaaaaaaaggaaaaaaatagacgaacgaactgaaggataaacaaaaactaataagaatgaaaagcgcaactcctgatataaaacgaatatatagagaat

SEQ ID NO: 171266 - DNA, 396 bp, Arabidopsis thaliana
agaagatctatgacgtcgcatgcacgcgtacgtaagcttggatcctctagagctgccgccctttttttttttttttatttcaaaacgtttaacgtatacaaaaggaaacaactctgtctccaagtaatttacacattctcattccaaccaaagaatagtagaatacaaaaaacgaaaagttgacactgcatatacaatagcaacgaacctagttatgtaaggtaagccaaaaaaaagaagagtttgatagaaatttaccttacacaattagttttcatcatcttttagttgtttttttaccggcgtggttgattcatagactgtgcttgaacaactgacgcaacaatgttgtgagatgtggaagtgagtactggatgggtgtggtgacgatggggg

SEQ ID NO: 171267 - DNA, 458 bp, Arabidopsis thaliana
  unsure (1)..(458): unsure at all n locations
atgacgtcgcatgcacgcgtacgtatgcttggatcctctagagctgccgcccttttttttttttttttttttttttttnttnnnnnnnnnnnngggaaagctgggacatcctactcctatataaaatttatgtatgttgtacaaatctcacaacatttacatatataaaataaaataaataaacattttccatcatcttttttatttttacaagcttatttgacatccaaagcaaactgctctcatattttaagtaactcgccagctttgagaccatcaatcgtgtttggccacattatcaatccttaggcgacgaccggtggcaaacttgtggcggacggggggaacagaagacagggacggtgccgaaattgcgggtgaagccgaagtgatgcggcaggggaagagaaaggcgtacttgatggactgagtcgttgtgtcgagagatgacatgagtt

SEQ ID NO: 171268 - DNA, 495 bp, Arabidopsis thaliana
atgacgtcgcactgcacgcgtacgtagcttggatcctctagagcggccgccctttttttttttttttttttttttttttttttggagggaacaccaatcaaatctaatatacagagaacacagccacatacgcagaagaaagacagataaagaatcagacagagaacatagacaaatcttgtttttcacaggataaaagaaaaaagctgtgtcttcttccacaatcaccatcatcatcatcaaatgaccaaaaacacaagaaagatcgacaactgcagagagttgacttctctccttttggggtaaagtttaattcgatgatttggagtgcttacaagccaatcaatgacttgatcgatgttggtagaagtcttgcaagatatcatgaagcaacagacttgtgtatctgagagagactggggacccatttgatgggtagggctggtttgggcggagtggagcggtgggaggaggtggggggatgacgggggaggg

SEQ ID NO: 171269 - DNA, 693 bp, Arabidopsis thaliana columbia
atgatttgccagcactaatcgactcattaagggaaagctcggtacgcctgcaggtaccggtccggaattcccgggtcgacccacgcgtccgcggacgcgtgggtgtttctcaagacaaaaaaagaaaaaatggtggaagatgaacaatgacgaagaatcattgttattgttcatgcattaaccttgttgttatgttcctccatggcctgttacatcgttccttattaccaccatcctgttttgtctcatcccaatagagaaatcttcagtcaccgtcaccaccaccaccaccgtttctgcaacaatctcttgaatagaagaattagtgttcctcgaagctccgctattagtgacggtggtgtctcctacaatactctagtctccgaggcggtgaggcttttggttccacaagcaaactttgattcttcaaagcttaaagttgagttcttaggagagttattggagaacaagagtaacggaggaattattacgccgcggacttatattctttcgcattgtgacttcactgctaacttaacgttaacaatctcaaacgttatcaatctggatcaactagaaggctggtacaagaaagatgatgtggttgctgagtggaagaaggtgaatgatgagctgcgttacatattcattgttgtgtgagtggtatgagtttattgcaggatgttgctgctg

SEQ ID NO: 171270 - DNA, 584 bp, Arabidopsis thaliana
  unsure (1)..(584): unsure at all n locations
cactatagnagagctatgacgtcgcatgcacgcgtaccgtagcttggatcctctagagcggccgccctttttttttttttttttttttttttttttttttttttttttttttttttttttttttctttttttatctaccttgaaacaaacaaaccacaagagaaccaagaaaccaaatgaataaaaaaccacctacaaaattgaaaacccgttaaaaacttaacccatggaacacacttataagaaatacatgtcccaaaaatccgactatcccaaaacccaaggcccacatagcgaacctatccctagagaagaaaccccataaaaaacaaaaaccccgaaaacaccaaaaaccctaaaaagaacgatccccatacccatccggccccatgggtcaccccgggacgtccggaccgggccctgcagggtaaccagatttcccaaaggggaagcttataaaaactaggggtaataatgggaatagggtgtaacggggggaaaggtgcaaccggcaacaaatccacaaacctaacaagccacacgcataaacggcaaagccggaggggcctaataagtgaggggcc

SEQ ID NO: 171271 - DNA, 590 bp, Arabidopsis thaliana
  unsure (1)..(590): unsure at all n locations
tgacgtcgcatgcacgcgtacgtaagcttggatcctctagagcggccgccctttttttttttttttttggcatcaataagagcactagttaagaagatatccaacgatatgctatgtctcataatatagcaatgaatttgctacaatactcaaggttttcaaacttagaaactgatggaagcaaactagaaaatgtgatagcatcatggcaagaacacctgaagaaatcatctcatagaaaaaggttaagctttcttccattaatccactctgaacatatccagatatcatgcaattccacgtcacagtatcagcacgagacatcatccgaaacaacttagacgcatcatcaaaacgaccacattttgaatacatagataaaagtgagtttttgatagagccttcaaaatcaaccccagaaacaaccactagaccatgaagctgaactccnagatcaatcaacaacttagatgcacacaccgatgaaacgcaatgaaaggtgacagcgtgaggactaatgtgatccatgctgatgacactaaacccttggtaacactatgcaaaggtgcagactggggtgccgatggagc

SEQ ID NO: 171272 - DNA, 325 bp, Arabidopsis thaliana
  unsure (1)..(325): unsure at all n locations
tcgcatgcacgcgtacgtatgctttgatcctctagagcngtccgccctgttctttttttttttttttatgaattgattcatcttagaaaccatatattgaagatacaccaatcctgtttctaggcattcacaagcctacacatatgggtttgtttctgntcaaataaccctacaattgcagcattactagtaaccttttttatcatgtgtggcagactttacctcagttctgtgccgatgaatgggtcagtgattccgcatttgatcagccggaggattctctgcctggtgatgatggagggcggggaggacggcgggtcggttg

SEQ ID NO: 171273 - DNA, 563 bp, Arabidopsis thaliana
  unsure (1)..(563): unsure at all n locations
ttgacgtcgcatgcacgcgtacgtatgcttgtatcctctagagcggccgccctttttttttttttttttttttttttttttttttttttttttttttattttttntnttctaaaaaaaaatcatgaactgaagcatcctgcagggaggttctgatacatacatataaagttttatttacacttaaaggatttgtatctttgacatgttaaaaaacagagaaggaaacagagcaaaaatttgagttgaagaaacaagatcattttcaaaagaaggggcaaaaatgatttaaccatgtaaatatatttattggtggttttgcaacttgggagactactcggggagggtaaaaattatccgccaccaacatcgcggggggggtttttttgctcccattgttgccataagattggaatgagggttttgagttaagaaggatctttgtgttgaaaaaaaaccgaagctggggtgccaaggggtgagaatagggggagaaggcaatagatggtggggtggagtggagaagggcggggtgttgagaaacgtgagaggggtggattggggg

SEQ ID NO: 171274 - DNA, 673 bp, Arabidopsis thaliana columbia
  unsure (1)..(673): unsure at all n locations
atgatcatgccagcactaatcgactactatagggaaagctggtacgcctgcaggtaccggtccggaatcccgggtnacccacgcgtccggctgtcatagatgaaaagatactttgtatgcatggtggactatctcctgagttgatcaatgtggaacaaattaagaacatagagcgtccaactgatgttccagacgctggtttgctctgtgaccttctttggtctgatcctagtaaagatgtcaaaggctgggggatgaatgatcgtggtgtctcctacacttttggtgctgacaaagttgctgagtttttaataaagaatgatatggatttagtctgtcgtgcccaccaggttgtagaggatgggtatgagttctttgctgatagacagcttgtgactatgttttctgctccaaactactgtggtgaatttgacaatgcgggtgcattgatgagtgtcgacgaaagtttaatgtgctctttccaaattcttaagcctgtggatcggaggtcgcggttcttttgaagagaaagagtccttcttaagttataaccctgattcanatcttatgggaagaatgggaggaganaaagcgacgacggatgttggtggcggataattctgaacctccacgagtagtctccgaangttgcaaagcaacaatatatatatta

SEQ ID NO: 171275 - DNA, 486 bp, Arabidopsis thaliana
atgacgtcgcatgcacgcgtacgtatgcttggatcctctagagcggccgcccttttttttttttttttttttttttttttttttttttttttttttttttttattttttctttttttaaaaaaacaaaacaagtttttttcataccaaaataaagttactgaccccacaatttttgcaaacataacgaaccagggggggacatttttttggccggggttttaagctgcggctttcgagtttcagtttttattcaccaggctttaaaaatatacaaaacacagggttggaaataaggacccagggctctgaatatagcgtcccaagggtaaataattccaccgggaaggttggtgaagaaagctaagatgaggggggagtggccaaaaaaaagggagatgtaaagcggttaggagtgcgacgaaaagagtatactaatttatataactcatacgtgggagtctccttaagtggaagatataaggatg

SEQ ID NO: 171276 - DNA, 566 bp, Arabidopsis thaliana
  unsure (1)..(566): unsure at all n locations
tatgacgtcgcatgcacgcgtacgtaagcttggatcctctagagcggccgccctttttttttttttttttttttncaatggaaaaaccaaatattttaatacaagttagaacaacgtcaataaccataactaaaccaaaaggtaaatgttgttactaaacaagtaaaaaaactgagtcacaaataaactcagaaaaaggtgaagaaattattcattatcatagatgcatcgatgagacaagtgcgccttgaagatatgaacacgaagatggaagaaatttgcttgcattcgttattaactctatcaactcctctccttgtcccttcaaaatgtatacttcttcatcaatcttcttcactaccgagctgttggaattagaaaacagatcctttacattagcgcttaactctaatgcggaacctggttcattttggctcgaggaaagaccaagcgaggaaaaggtgtttggatgcaaaataacatgtggaacagaggtgatgtatgtgggaacgggccatgagccggggaggggtgggggggtggagatatgggagtggtgatgggga

SEQ ID NO: 171277 - DNA, 670 bp, Arabidopsis thaliana
  unsure (1)..(670): unsure at all n locations
atgacgtcgacatgcacgcgtacgtagcntggatcctctagagcggccgctttttttttttttttttttttttttttttnggagaggnaattnnatnnncnaatgagaagacaaacaacaatcttaaacatatggtattggatggactggatatggatgcaagcctaaggatcagaaagtacggaaacaagacgaagaaggagtttttttcaaacgcgcaagaaaaaagaaagaaaggaacagcgagagagacgacgcgcacgaaggaagatagagagagaaggcggaaactaaaggagaggaaacgaacgaagagtgagcgagaaggagaaacgacagaaagnagaaagagagagagagcggagaaaggaaagagaggagaaaagtataaaatagcagaagagagacgtactagaagagagagagagacagcgagaagacagaaaagagaacaagtgtcagcgaaggcagccgagaagagagagatagaagaagagagacaagaagagagagcggaaggcaggaggtgcctcaggagggaagtaagtagatgaagagaaacagagagaagaacagagaactgaaagaagcgacactagatcagagagaagagaagaaagaatagagaacgaagagacagagagaagagagagaagagatatgcgaagaa

SEQ ID NO: 171278 - DNA, 599 bp, Arabidopsis thaliana
tgacgtcgcctgcacgcgtacgtaagcttggatcctctagagcggccgcttttttttttttttttttttttttttttttaagctcatgcttcattgaatatatatatgattcataatggttggtcacaattgcttttacaattcttctgtatctacttcgtgatatctttagacatttaatcaatcattacaaaacaaaaccaaatattcgaaacttgctgactcagtgtgattcacctgtgcaaaaccccccaattaccccagaatccgttaagttggttagtctcggaaatccaaatgtggaaatctcaataacccgattatgtaatcgtatgacccgacttggtctccgggtcaggatccgacacaatgccggtgatcgaagactctgaaaagcttgaactttttgccgattatttttacccttgaggagcagaattgcaattgaagaacggttgctgctggaacgggtcctgaaacgaatggcgaaagggggggactgtggctggggccgaggaacaatgcggtattgggtactagccattgatctggcttgtagcggcagttatgaattcgcacgtggtgtaacaattggggct

SEQ ID NO: 171279 - DNA, 647 bp, Arabidopsis thaliana
ctatagagagtcatgaggtcacatgcacgcgtacgtaagcttggatcctctagagcgtgcgctcttttgtttttcctttttttttttttttttttttatttttgtttttttttttttttttttttttttttaaaccaagggggcaccattgaggggaaaaaaaaaatacccctctttcgggtcttttaaaaagggggggcctttcccaattaaaaacaatttttttacagaggcccctctaaccccccccaaaaaaggacgaaaaattttttggccaaccccgtttttcaaaaaattccccgccccttgaaaaaagaaggaaaaaacccccaagtccgcgataaaaattcccacagaaagcctagccccagcaagagttggaaattcccccacccctttaacccccccgagggtgggcgccccccaagagcacctgattcccggttttagggcgcccaacacgtggaagattatgtgggggcgcacaacgggcccgggggctaagtgctggggggcacagtccctaagtattgtaggcgggtacccgaaacccgaaagaagacgagcgctttgaatccaccggcagggcacacctgtgggtggaaaacggggaggcccacaccgagggcagccctctgggggataaa

SEQ ID NO: 171280 - DNA, 618 bp, Arabidopsis thaliana
  unsure (1)..(618): unsure at all n locations
tagagagctatgacgtcgcctgcacgcgtacgtaagcttggatcctctagagcggccgcccttttttttttttttaaatcaaaagacgatttcgtgtaaattcatgctcttacatgtttggatcattaccagttcaaattcatgttttatgtcacttacagatgagagaatcactcttgacaaaacgagcgaacagagaaaaaatgtagatgtaaagtctttagattctgttatctctgcgctgaaaatgtgaataaaatttcttgatcatattaccatcttgattttctggcattctggttctcgcctttcgaagcatccgataaccgcgactttgaatacagatccaccgcggaagttacttagtctcgaacccgagaggatatggtgatcttttgaagagccttgtttggttataagctggtgttcatctattaccctgaggctcaacgtcatagatcttccccatccaaccctccatctccacttttttgaagcttctcgctctgtacaacccaatcaacacaatccgatntgcttctttgtaagaaaggcttttccttggcgttgatttcttgctgtggtctcttaccataaggcctttatagctgttggggg

SEQ ID NO: 171281 - DNA, 665 bp, Arabidopsis thaliana
  unsure (1)..(665): unsure at all n locations
ctctctatagggaaagctggtacgcctgcaggtaccggtccggaattcccgggtcgacccacgcgtccgctgataggatttgcaccattatgatgtaccattactccggaagtacatcaaggggtgtcaatcgtgctgtgatgaaacaancttgttgataattatcgtgattctcaccttggaagtcgtcttccagcgtatgatggtcgaaaaagtctgtacactgctggtccacttccctttaactccaaggagttcagaatcaatcttcttgacgaagaagtaggggctggaggtcaaagacgagaaagggaatttaaagttgtgatcaagctagttgcacgtgctgatctgcatcacctaggaatgtttttggaggggaaacaatcagatgccccacaggaagctctgcaggttcttgacattgttcttcgtgagctgccgacctctaggtatattccggtgggccggtccttttattcccctgatataggaaaaaaaccaatcattgnngggatggcttggagagctggcgtggattctaccaaagcattcgtcctacacagatgggcttatcactcaatattgatatgtcatcgacagccttcatagaggcaaaccctgtgattcagtttgtctgtgatttgcttaaccgggatatttct

SEQ ID NO: 171282 - DNA, 527 bp, Arabidopsis thaliana
  unsure (1)..(527): unsure at all n locations
actcactatagggaaagcctggtacgcctgcaggtaccggtccggaattcccggttcgacccacgcgtccgcggacgcgtccgcccacgcgtccggacaagtgttcatctcaccggtctcgttaaaagatcgggaagagaggaggacaaatcagagtttgttcagaggctcttgtcatcagccattttcgatgaagtctaatgcacatacaaagattgagaacatggaggaactaattcgaatcagacttgagagaatctggtttcgagaaaaacaatggttgggatgagaagaagacggagaagagcgagatgcagctatgttatcaatatctatatctatctatgtattgtgtctgtttggtgctactaaatacattgcgtagaaatgtgttttcttaagtttattaagcaattgaaaagtaagatataggaagaagaataagtcctcttgtctgtagcataaaccctattggtgttcttgtgttgtgtgtcttaatgaaatgaaaatgttcactctaanaaaaa

SEQ ID NO: 171283 - DNA, 453 bp, Arabidopsis thaliana
gcacgcgtacgtaagcttggatcctctagagcggccgcccttttttttttcctttttcgaaagcgcagagggtctagtagacatgaacgacagggagaactctcgacgaaaccaaagaaggagctacgaaacaggaacagctctcgacctaacagatccacacgtaaaaacagcccagaagcagaaaaagacttctttccgggggggaacaaacctcctatcgcgtgaccaaaaaatcaaaccccgagcccaggaagccctggaataccaggcggacacgacgcgtacaacgaccgaaaccaggctcgcaaaggagcgataacctacgcggatcacagcctgggggagagctgcatctcccacaacactcaaccggggcggcaccgcctaagacgcacccagcgtggacagcaacggtccggacagagcagcgaactgaggcactgcgcgagg

SEQ ID NO: 171284 - DNA, 513 bp, Arabidopsis thaliana
  unsure (1)..(513): unsure at all n locations
gcacgcctgcaggtaccggtccggaattcccggttcgacccacgcgtacagcccaccactaacgaacacacgtgtttatggaatggcgcatagagattacggatatcaaaaggacccttttcgacgttcattaggaagatgaggcgtgacctcacagacaagagacagtacttccagagacaaaattcgacggacgttttttgtttggtgggtagcacatgccaccgcgacggaagataaaagtgaccacgctatcctgggtcagacactgtgtaaaacactcggccgcattgcagcaaacgatattgccgacggcatctgaactgtgcgtagattcagtcggctgaccactgagcgtnggcgtataggtcccgggcaaagaaactcattgacaacgaatcgtgactggatcccacacgcttgtacacgtgctgtcttgtggagggacaaaggcccttaggggtggggcccctgatcgccgataggataaattcgctctgcgaaggccggccg

SEQ ID NO: 171285 - DNA, 488 bp, Arabidopsis thaliana
  unsure (1)..(488): unsure at all n locations
cacgactacctanagggaaagacggtacgcctgcaggtaccggtccggaatacccgtttcgacccacgcgtaagccgaaaaataagaagaaataaaaagtggtagtggaaagatatagaagaaaaataataggagagatgatgtggattgaaatgagtgagaggagttaagggggagatatgtagatgaatgagaaggataggaaaggaaatatgggggagaggatttttttttattgagggggggggaagaagggaaggagggagagagagtgggggagaagagggagagaagaggtgagggagaggtaggggggggatgtgaggtggagtggtaaatggtgttggagaggatggtggatggatagtagggtggtgtaaggggtggtgttggtngtaggaagggaaatgttggtgtggtgattgaatttatggtagatagtgagttgtggggaatttgggtgggggggggagagaagagggaagggg

SEQ ID NO: 171286 - DNA, 487 bp, Arabidopsis thaliana
  unsure (1)..(487): unsure at all n locations
actatagnagagttatgacgtcgcactgcacgcgtacgtagcttggatcctctagagcggccgcccttttttttttttttttttttttttttttttttttttttttttttttttttttttttttttttttttctttttttttttggtggcccctttttttccttttaaaataatgggggaggaaccccctaaaaaccccggggagaaaggggaaacactttttttttctgggcacaaaaaataaaaaaaacacggccggtttaccggaaaccccaaaaaggtagagaaaaaaaacccccccccaaatttaggcccccccacaaaaaaaagggggcccccattaatagacgggggaaaacttggggcaaaaatataaccccccgcggggagaaaagttttaaaaaaggggaaacccggggaccctctttggggggcgggagaacaccaaaaaacaggacgggacaaaaaacgggattaataaaaagaa

SEQ ID NO: 171287 - DNA, 508 bp, Arabidopsis thaliana columbia
atgatttgccggcactaatacgactcacttagggaaagccggtacgcctgcaggtaccggtccggaattcccgggtcgacccacgcgtccgtctcaaccttctcgtcttctttcggacaacaatgtcacaaaaagtctgatcctttctctttagatttggcttcgagaaatggctcgcgatcggcgggaaggtctggagatcaaggtggtgaatccaccggcggcggcgacaaacaatgtggctgtagaaacgtctccggcgacggcgacgaggagacggagacaacaacaacgagcttcgttcgctgagtttagaccgtttaagctttggtttccatggcttgttccagctatcgtggtggctaacattgcccttttcgccatttcgatgtttattaacaattgtcctaagaactcggcttattgcttagctaggtttcttgggagatttgcttttcagcctatgaaagagaatcctcttctgggtccttcttctttgacattggag

SEQ ID NO: 171288 - DNA, 511 bp, Arabidopsis thaliana
  unsure (1)..(511): unsure at all n locations
cactatagnaagagtctatgacgtcgcatgcacgcgtacgtaagcttggatcctctagagcggccgccctttttttttttttttttttttttttttttttttttttttttttttttttaaaaagaaaaaaatagtttgggaatgggaaagaaaaaaaaaaccggggaaaagttgtcatccaataatatacagccacgtcagcgcacctaatacacccaaaaattccttaaacaaggttcgcaccttggtttattacaccattctgatttaattttttgctattattcataaggatttttttaaaaaacttgcaaggtccctgcaatggacatgctcttatgattcttgacctatccttggccgtaaaaaggtagttcagttggaagagacagcgaggtttttctcaactagcttctcgagtatgtttgacttgtatgttgaaatgtctgaatcttccaaggaatttggagtcgatttgacgatagagagtgctccattagagcctaggaat

SEQ ID NO: 171289 - DNA, 474 bp, Arabidopsis thaliana
actatagaagatctatgacgtcgcatgcacgcgtacgtaagccttggatcctctagagcgggcgccctttttttttttttttggacaaaaggtttcattggtccagcaattgggaaagagcttaacgcctcatttttttatagaccccaagggggcttttacctttttctttattaaaaagcctcttctgaggggtttaaaaaagaaacccccgggagcccacaaagggggggggaaaaagatatataaaaagagttcccccttttataaaaaaagggggggggcccctcttcaggggcggggggccgagggggaagtcccctcccggggggggggtttttttccccccccttttcgggcgcgcaaaggggggagaaaaaaaatttttttttgtcccccggggggggggggggaaaagagaggggcgccctcaaaaaaaaagagccttttttattaagcaaaataatttttttg

SEQ ID NO: 171290 - DNA, 521 bp, Arabidopsis thaliana
  unsure (1)..(521): unsure at all n locations
gcacgcgtacgtaagcttggatcctctagagcgttcgccctttgttttttccttttttttaaaaaggatagaataaaaattagttaaaagaatttaaaacgaaaaagtagggaagatgaaaaggatacggaagtgtgaagtgaaggtggggtggactcgagaatattgtatacataagagaatatttgtaaaggatgaaattttttttgtatgggggtggaagaacatgagagtttgttacaacagcgtattagaaagcaacttttactgtataaagaagaaagaaatagtttattattatagatgacagaaaaaggaaaaangaaataggaaaagagagggtttgtcgtagaggcggaggaggggtagtaaataataagtggtatattgccagttataaggaaacgatttcagtttaagaagatgagttgaggttgatataagctgagagtaagagaaagttattctcgaatataggtgggttagatgtggggtaagcacattgaagagatacatatccg

SEQ ID NO: 171291 - DNA, 327 bp, Arabidopsis thaliana
acgacacatttagggaaagacggtacgcctgcaggtaccggtccggaattcccgtttcgacccacgcgtccgccctccctctctgatcctcaatgaaaaactgtgtcggagaaaaccgcagaacaagagacggagcataatcctagaaaatacggcgccggaagaatctgttacgtttgggacatgaatcgggaatttggcgaatgggctggagaccgatgggatgttttttttttaaggggggggcaaacaaagatgcggtctgtctggacagaggaggttcgttgcaccactttgatagggcggtcggagactcgacgttggtgg

SEQ ID NO: 171292 - DNA, 494 bp, Arabidopsis thaliana
  unsure (1)..(494): unsure at all n locations
actatcagagatcnatggcgtcacatgcacgcgtacgtaagcttggatcctctagagcggccgcccttttttttttttttttttatgtacgcttcggcattaaaaattagccagcgactcatggacaagcatatagatcgcactcacatgcatgtgtctgatatataaatagatatctgataagttattgcaacaatcaagcataggaacattaaacatttgtggtggttgaaagaagatgacagaaacttgcttatatattgaaagctcaacacccaagcaactctactacttcacatccattactcttcagtggggcggcttttcctcctactgtcccatctttatgaattagagtaggagaagtgcagtcgaaagctgattgaaaccttcctaagttctgacactcttgagccaggagggagtcacgaggtggaggcccaatccaaatacacacagtgttgttgcgagccgggatatagacaagtgcaggg

SEQ ID NO: 171293 - DNA, 343 bp, Arabidopsis thaliana
  unsure (1)..(343): unsure at all n locations
actatagaagagctatgacgtcgcatgcacgcgtacgtaagctggggatctctagagcgcncgccttgtttttttttatcgagattatacgatttttaaagttgctaacttcgaactggcttatttgggaaatcctttgtcaagcccaggggttttgggtttccttgggaaatccctgaaaaccccaaaagggggtaaaggtgggatttccaaaaattgggaatttttcgggggggggggcttaaaaaccttcggggggaacccgaaaaaaccccaccggggggggttctcccaaggaaggggggcccggtttttttaaaaccccaaaaggggtttttttttt

SEQ ID NO: 171294 - DNA, 506 bp, Arabidopsis thaliana
gccgagcactatacgactcctatagggaaagctggtacgcctgcaggtaccggtccggaattcccgggtcgacccacgcgtccgcccacgcgtccggtcgtccctaacctcatctctgcaagctctcaagctttcgtctccgttcgcccatggctccactcctctctcatctctctctaagcccaattccttcccgaaccacagaatgcccgctttagttccggtcatcagagccatgaaaacgatgcaggggcgcgtggtgtgcgcaaccagtgacaagactgtggcggtggaggtggtgaggcctgctccccaccccaagtacaagaggcgcgtgaggatgaagaagaagtaccaagctcacgaccccgataatcagttcaaggttggcgacgtggtcagactggaaaagagcagacccattcagtagactaaatcatttggggcgcttcctgtcatcgcaagggccgccaggaaagccgaagccggaggagaagaactccttg

SEQ ID NO: 171295 - DNA, 531 bp, Arabidopsis thaliana
  unsure (1)..(531): unsure at all n locations
atggggtaaactgcacgcgtacgtaagcttggatcctctagagcgtttcgccctttttttaattccttattttatgactaatcaacgtatatgcttttatggaaaaaataaggagtgcaaagaactgtaacagtggggaggcgcaggttaacaatcaggaagataagggagcactaaagggtgggagggatctaagttggatgagaaacgaaggattttttttctggagggaataagaagccatcggtactaaggactctgggtagagggtgtggctagatctgaggatgaagagagagtgtcagtggggaagtgatgatggaggagtagcggaggtgtgaaagcgaggggggggtgttgaggcgaggagaagttgaattgcagggagaaataggaaaagagagtaacgggcggatagcgaagatatagagcaaagatggatgcatctgtgagcgcgaagtgcgnagaaggatgtgtgagagagagttagaaataagagtggagaagagtaaagggagtgttcagagatga

SEQ ID NO: 171296 - DNA, 500 bp, Arabidopsis thaliana columbia
  unsure (1)..(500): unsure at all n locations
atgactcgccggcactaatacgactcatatagggaaagccggtacgcctgcaggtaccggtccggaattcccgtgtcgacccacgcgtccgcggacgcgtgggcagagatagaagaagaagaagaagaaggatcagcaagtgcaattacaggttcgagaagtttcgatcttcccgatgaacttcttcaagttctaccgtccgatccattcgagcagctagatgtagctcgcaaaatcacatccattgctctctcgacacgtgtctcagctctcgaatcagagtcgtcggatctccgggaacttctcgccgagaaagaaaaagaatttgaagaactccagtctcacgttgagtctctcgaggcttctctttccgatgcgtttcataagctttctctcgctgatggtgaaaaggagaatctgataagagaaaatgcttctttgtctaatactgtcaagagacttcagagagatgtctcanagcttgaggggtttaggaagaa

SEQ ID NO: 171297 - DNA, 485 bp, Arabidopsis thaliana
gtaaactgcacgcgtacgtaagcttggatcctctagagcttgccgccctttgttttatcccttttttaataggacggctactattgtgggtgtggttgcccacgagaacacgcgtagcacagaaccgagatcgtgcgagccgtaacgagcgttgcgacgcctaaaaagtggcgctaactaaatggtcccggggcaggcattttttttccgaggggtaaaacgcgggtactatcagctatctcggttgcaatcagcgccctcttaagaactagaccagacgcgagcgcctggtcagacggcgcgtgtggtacgtcagtagaggtgtgccggcgtctagaatatcgcccacgacggttggccggtccgacctgaccccgggtcccatgatgcggagtgaagatcccgtcgctgcattgccgccgccgacgtgtgggaggcggcgccagcggcacgggggattggcgtggcgcgacacgcggggggac

SEQ ID NO: 171298 - DNA, 512 bp, Arabidopsis thaliana
actatagaagagtcatggcgtacactgcacgcgtacgtaagcttggatcctctagagctgccgcccttttttttttctttttttttttttttttagccaaaactacagaggattttattatgcaaacagcaagtgttacaactcaaaccacataaaacattacataatcaaacttgattcccataggggcggttcttagacgatagggccaaaaagatttgttttttaggggtgtacaaaacgcaccacggttcacttaaaatcaaacgtccattagagccatacaggggaaggggctggagggttaattggtaaagtgcgagggaccaggccccagtaggagcaggtggggcgagtattcagccgggacttattatgagaagtaaggacttcggtagcgaggggtaagagcagagaacgccgcgagggcagcggcgcgggtggtgttgagtgaaagcttgttgggatggcgctgcatggcggttgggaggaaatagcaactgttgagaatg

SEQ ID NO: 171299 - DNA, 377 bp, Arabidopsis thaliana
tacgacacctttaggaaagacggcacgcctgcaggtaccggtccggaattcccgtgtcgacccacgcgtacgcacggttgcgagaagactacagagggggatcactaagctttccataatgagagacttttcaacatttgaaacataacaaacggtttccaaggatacggttactgagagccgcttagctgctcttcatagtcacaacagatgtttttttatgatgtgtggagccacagagaatgcacacattaagatccatatgtgcaccacgtttcacagaggcttctgggggacacccggtggctaatttcctttttcttatcggtggctcccagaagagtgatggtcctacttagtcaaaggacgatcgatcg

SEQ ID NO: 171300 - DNA, 483 bp, Arabidopsis thaliana
  unsure (1)..(483): unsure at all n locations
ctatagnaagatctatgacgtcgcatgcacgcgtacgtaagcttggatcctctagagcggccgcttttttttttttttttttttttttttacattggaagattttatacagacggttctttaacaaagaaagatgattgatgctaatatacacaattacataatcttatacttgaattatacagtagtttggaagaaagaattatacagtagaaaaatattaccgtgaaaaaagtaaaaagtnaaagtnnnnccatcattattagttggtactctccacttcatctctaaaccaatctgaagtaccccaatcaaacggcgtggacttttcctccggtaagaaccggttccgacaaatcgggcacgttatcttattacagtcaacgatccaacggtctaaacaacgatgatgaaacacgtgtccacacttcggcagctgtcttaatttatcgtcggatacaaaatcggattagcaaaccgggca

SEQ ID NO: 171301 - DNA, 503 bp, Arabidopsis thaliana
gccaagctctatacgactcctatagggaaagctggtacgcctgcaggtaccggtccggaatcccgggtcgacccacgcgtccggattatgtaaaaagtaaaagtaaaaccatcattattagttggtactctcctctctatctttctctcacactcatgggtcttccaacagatttcaaagagcttcagattccaggttacgtactaaaaacactttacgtcatcggtttctttagagacatggtcgatgctctttgtccttacatcggtctaccaagttttcttgaccacaacgagacctctcgatccgacccgacccgactcgctctctccacgtcagcaactcttgccaacgagttaatcccggtggttcgtttctccgatcttttaaccgatccggaagattgctgcacggtttgcttatccgattttgtatccgacgataagattagacagctgccgaagtgtggacacgtgtttcatcatcggtgtttagaccgttgg

SEQ ID NO: 171302 - DNA, 519 bp, Arabidopsis thaliana
gccggcactaatacgactcactaagggaaagccggtacgcctgcaggtaccggtccggaattcccgtgtcgacccacgcgtccgattctataatgggcttatcaggcccaatcaaatggaatttaataataataataaaaatataaattaaatttatcatttatataaactatatatgtagtatactgttgagctcattattgaatagcttgagaggtttgatgtacatagccaccacatgcagtgagcttcttctttttttggtctttaggaattcttttgatttcgtaataaatcaaccttgattgtttaattttcaattactttacatatatagcatttgatacgatatgatttatttatgatggtttagtaaaggatgagacatgaattagtattattttcaaaggctgcgtattgttataatattcgtattctacttaagaatattctaggggtgttggcgtttttaaatatcaatttggtataaagcatgttcattatttcttgttataggtg

SEQ ID NO: 171303 - DNA, 518 bp, Arabidopsis thaliana columbia
atgattcgccggcactaatacgactcattaagggaaagctggtacgcctgcaggtaccggtccggaattcccgtgtcgacccacgcgtccgcggacgcgtggggaaagttttaacccaaaaaagcaaaaaaaaaaaaacttttgttcactcgatggcggcgaagagaatcggagccggtaaatctggcggcggagatccaaacatattagcgaggatttcaaactccgagatcgtgtcccaaggaagacgcgcagcaggagatgccgtcgaagtatcgaagaaactgctccggagcaccggaaaagcagcgtggatcgctgggacaacttttctcatacttgttgttccattgatcatcgagatggatcgagaggcacaaatcaacgaaattgagcttcaacaggccagtctcctcggagctccaccatctccaatgcaaaggggattgtaagaatcccttattatggattagggtcctctgttttacgaggttttttggtatatgttggtgtttgaa

SEQ ID NO: 171304 - DNA, 468 bp, Arabidopsis thaliana
tggcgtcacctgcacgcgtacgtaagcttggatcctctagagcttgccgcccttggttttttcttttttttttttttttttttttttttttttttttgtagtttttttgggggtaaccaccgaaaatttattccataaaatacatattgggggaagaagaggaaacttggccctttacatttccataagcctctgggggattttatgttttgggggggggtaaaaattacagctcttaagacgggataagctgccgctgtgaccaatgtgggtgaacccaacgggacagccttttactggtttctaaccacaaaaattggcttatgcctcaaaggcacttgcgtgggcagagaggattttttgccgacgcttaagagtgttgctacatgggcggcgctctcagatggaatattcgcccgggtagccggtaaaacaaattgggacctcggctaatctccatccccccct

SEQ ID NO: 171305 - DNA, 496 bp, Arabidopsis thaliana
  unsure (1)..(496): unsure at all n locations
cactantagaagatctatgacgtcgcatgcacgcgtacgtaagcttggatcctctagagcggccgcccttttttttttttttttttcaggaaataaatattcagagaagaaagaagcactcaagtaatagaaaccataaagttgaaacatcaaagagacactactctcaacgttaccaaaactgtatgaaagccaaaataacattattgcctaaaccaacaaacaacatcaaatcttcaccggtgagatttaagattcaagaatcaacaacacaccaaactagagcttgaggaaaacgaactcctcaaccgctggaatttccccaatcttcttcagtgtctctttgcttggtatgtcatctactccaatcgccataatcgcttgcttcctcggtgcaattctcccaacgctcatgaagttaacattgacattagactctccaaggatgcttccgacagtcccgatcataccaggttgatccacctgcctgcacagt

SEQ ID NO: 171306 - DNA, 466 bp, Arabidopsis thaliana
actatagagatcatgacgtcgactgcacgcgtacgtaagcttggatcctctagagcgtccgccctttggttttttctttttttttttttatttttttttttttttttttttttttattttttttaaactggcccatcccaaattttataaggttttcgacaatgcattggttttcaatatggcccatggaaaacaagaagattggggagagtatccttttttctgaaagggagttccctttttaaacattcttatcaatgagaacaccattgaaaaactttttgtaggcagaaacgggccaaaagaaaccacggaagatgaccccacttgccaaaggaacatccaagaggaactttgttatggggggtttgttttcaccacaaataactataaagaagctttttccaacccacccgattcatccagcattgggtgaggaaaaaaatccctggagtaatgaactctc

SEQ ID NO: 171307 - DNA, 499 bp, Arabidopsis thaliana
actatagaagagttatgacgtcacatgcacgcgtacgtaagcttggatcctctagagcggccgccctttgtttttttttttttttttttttttttttttttaataataccaaaatttagaaagtattttaggtattttttttctatataccgttgcacaggttgtaaaaacgttattttttcattgaatataatttaacattaaattaaccgttagcgcacctttgatttaatgaccgcgggcaaacaaagacgaaatagttgcataggacctgaatgccatctatgttgctgttttctataagcttcatacgattccggtaattcacattggcactcaacgtcatttaggaaaacgaatttccttccgtgaaggtgagcacgaaccgcaatgtccatatcctcgacggtagttttctcgagccaaccaccggaatcttccaaagctttgatcctccacacaccgggctgtcccgttaaacccgaagaaattcaagaag

SEQ ID NO: 171308 - DNA, 485 bp, Arabidopsis thaliana
  unsure (1)..(485): unsure at all n locations
gctctaatacgactcactatagggaaagctggtacgcctgcaggtaccggtccgnnnatcccggtcgacccacgcgtncggctttgaagcttttaacatttgttgcgaagaacaaaactttcgaactagaacttggggagggaattccttcaacttttttggctcaattggggagcccccttattggaaaaccctgtttttttgggcccgcccctttttggttttaaaaacctctgggcggggggaagttttccccaaataaaaagaaaggttttttaaaaaaagaaaaaaaaaggcgggttgggaaaaaaattttttttttttggaggattttttttcccgggggggggggggggggaaaaaaaaaaaccatttttttttttatatagaaaaaaaaaaagagggggttaaaagaaatcccccccccccctatttggtgtttttaaaaaaaaaaaggggggagatttttttttttcccccccccc

SEQ ID NO: 171309 - DNA, 515 bp, Arabidopsis thaliana columbia
atgatttgccggcactaatacgactcatttagggaaagccggtacgcctgcaggtaccggtccggaattcccgggtcgacccacgcgtccgcccacgcgtccgctaaaatcgcgaaagagatatcttacgaatctccacaagtgcgaatttcgaacggagctacgattccatggcgaccaacggagagaaggtcacggctacggtggtgaatggcggagggctatctactggtgaaaaccctaagaaaattgtagacctcaacactacggagttagatcgtactgacgacattctcgacggagaagtcaagggattttcagattctggtgaaaagaaggaagaaaccgactctaatggtattggatcgacggctggtgttgattctggggatatctctccggtcgatgatatccagaagaagattcgacgtgctgagaggtttggtgtttcggtgaaattgaccgaagaggagaagcgcaattctcgtgctgagaggtttggtactgtagctgca

SEQ ID NO: 171310 - DNA, 530 bp, Arabidopsis thaliana
  unsure (1)..(530): unsure at all n locations
ccagctctaatacgactcactttagggaaagctggtacgcctgcaggtaccgggtcggtatcccgggtcgacctacgcgtnncgcaaacttcaaaccaaaaaaataaatgggagaggttccaggaaattcctaacttttatttcagcttttaaaattccctggaaaaattaaacaaaatgggcccagactttttttttttttttttgggggcccgggaagaaaaaaaaccccaaccccggggcgggaaaaaaaaaatgggggagaaaaaaaccccccccgggaaaaaaagggggggggggccccccaaaggggggtgtgtgttaaaaaaaaagaggggaaaatttttccccaaaaaccctctcctaagggagggggttttctcaaaattttttctcaaaaaaattttttttttgggggggcgggtggggggtggggagaaccaccccctttctctctcccccggggagggggggttttttttttttatccccccccggggggggggggggaaaaaaaaaacccccccccc

SEQ ID NO: 171311 - DNA, 534 bp, Arabidopsis thaliana
  unsure (1)..(534): unsure at all n locations
ggacgaactatagaagatctatgacgtcgcatgcacgcgtacgtaangcttgggatccnntctagagcggcncgcccntttgttttttttttttttttttnnttttttaaggaccattgcttattttaatttaagaagatctctcttttaaatgagaaaaagggatcctccaaaagatttcccttggtccttggggaatatttacccggaacccaaaatttccccggggaaaaagagttttttttttaaaaaaaaaagaaaaccccccgttgtagaaaaaaaaaaaccggggaacccatttttttttggggtttaaaaaaaagaaaatttttgtttttttttttttgcaaaaaaaaaaaccaccccgggagcccccccgggggggtggggggcccatttttgttttttcccgcggggggggggtttcttatattattggggagggccccttggcgccccccctcttaaattttggggggggggttttttttaaaaaacaccccccagaggggggggagtttttttttttttctt

SEQ ID NO: 171312 - DNA, 496 bp, Arabidopsis thaliana
  unsure (1)..(496): unsure at all n locations
actatagnaagattatgaggtcgactgcacgcgtacgtaagcttggatcctctagagcgttcgccctttgggttattcttttttttttatttttactcaagataaacgaatcaaaaccaaacgacaacgagataatgttctcaatagactagacagacgtgtcacatcacattttttttagcaagttttattacctcgagtaataagaaactaattaattttttttacaggggggtagcaccgccattacgaatgtgacgggggatgacaggaataacagagtcgggtgagctaagctgaggaagatgaccatcagaaggaataaccgcgacgaaggatccacagccaagattggagtgaacatacttggagacaacgactgggacagttaagtccttaaaacttgggaaagtgtgacacggaacactgacaaagggttagatctggcccagggcactttggaaaatggggttgcccgacggagaaagcttttttg

SEQ ID NO: 171313 - DNA, 520 bp, Arabidopsis thaliana
tttttaggaacacactatagagagtctatgacgtcgcatgcacgcgtacgtaagcttggatcctctagagcggccgccctttttttttttttttgaaaaaccctagaaggccaccaccaccacttttggcatctgtttttccggttttgcccccacctttattctctttcccttctttcttacccttctctcctcctttaccctttttaccatcctttccatttttaccctcacccattcccttcatctgcaccggaatctcaaacccgccaccaccgcctttctttcctccaccgcctccgcctttgaacccattcatcatcatcattatctcattgggacccttaggtccaccaccattaccatgatgaccacccatctgaggcatcatcttgttaggcatcatcatcttattaggaggcatgtgattacccccacctcctccatgtccatgaccatgacccatctcatcatcatcatcttcatcatcatcgaactcatcatcatcataatcatcttc

SEQ ID NO: 171314 - DNA, 530 bp, Arabidopsis thaliana columbia
atgatcctgccagctacaatacgactcaccttagggaaagctggtacgcctgcaggtaccggtccggaattcccgggtcgacccacgcgtccgtggcgctctcactccggtctcaccgacggcaaatcaagcggcgtgaatctggtcggaggttactacgacgccggagacaatgtgaaatttggattaccgatggctttcacggtgacgatgatggcgtggagtgtgattgagtacgggaatcaattacaagccaacggcgagcttggaaactccattgacgccattaaatggggtactgattatttcatcaaagcccatcctgagcccaacgtcctttacggcgaggttggagatggcaacaccgaccattactgttggcagagaccggaagaaatgacgacggaccggaaagcttacaggatagatccgagtaatcccgggtcggatcttgccggagaaacagcagccgccatggccgccgcatcaattgttttccgccgatctaaccctgtttactctaggctact

SEQ ID NO: 171315 - DNA, 513 bp, Arabidopsis thaliana
  unsure (1)..(513): unsure at all n locations
tatagnagagctatgacgtcgcatgcaccgcgtacgtagcttggatcctctagagcggccgcccttgtgtgttggttttttttttttttttttttttttttttttttttttttttttttttttttttggagaaaaattttttttttatttttttttatgtttttttttttttggggggaaaaggggaaaaaaaattacatgggaggggaacccgtttttttatagggggggggaaaaattttgccctttacaaaaaaagaaaaaaagtttcggggaaaaaaaaaagaaggggcgtcccccaaaaaggctattggggtcccgggacatgggaaaaaaggaaggggggggaaaacccggaaaaactttaccgggacttgcccgcgggcccccggggcccaaggggagaccccgaaaactcggcgggggacggccaaattccccttcctgggagaaaatgaaaccgggacaaattccagacaaaaaaggggccggggggaaaaaggggaaacccgg

SEQ ID NO: 171316 - DNA, 479 bp, Arabidopsis thaliana
atgacgtcgcatgcacgcgtacagtagcttggatcctctagagcggccgcccttaagttttgttttttttttttttttttttttttatttttctcttttttttattttactttttttgtggaaaaacccttttttggtgtacacgaccccgggtcaaaaatttaaaagggagcgcgggatcccttgtgttaaccacaaaaagacgctaataactttaggagagaggaacccgaggaggggggatagacaaaaaacaaaagacctttaaaggaaagaaaaaagatttcgaaagtgtgcacaaaaaaaaaaccgggggtcaaaaaccaaacacaccatttaaaagccccggaaaatcccgtgcaaaagaagggaaaaactcggcgaagagcctaaaaaaggtggaaaaaaacaatggggagaggttttgaaattcgggggattaaggctggtaacggaacccccccaagaaaaggagtccg

SEQ ID NO: 171317 - DNA, 501 bp, Arabidopsis thaliana
ccagctctatacgactcaccttatgggaagctggtacgcctgcaggtaccggtccggtatcccgggtcgacccacgcgtccgtcattttttttttttttggaggtaaactttattttggatcaacaaatatgaacaagattagtatggttgttagggaacaggacatatctgaaacaaagtttttagacactaaatgtaagaaaaaatgtattttttgaaaaagagacttttttaaagtggagaagcaaagttgaggagtgtgaagtctctgtcgttgtttaatgtaagccattagaaaccagccgtgctttgttttttaattctttttcagcccaaccgggttggttcacctttgtgtcaaggatgtgatattgtttgaagaaaagtaaatttttttgtggatcaacagtaactgtattaattattttagatagaaagtttgattatatttttaaagccggattttggtttgaattagagtgtggagtagtgtatttgtg

SEQ ID NO: 171318 - DNA, 536 bp, Arabidopsis thaliana columbia
atgatctgccaagctacaatacgactcaccttagggaaagctcgtacgcctgcaggtaccggtccggaattcccgggtcgacccacgcgtccgcggacgcgtgggccgcaaccttcgattttcgtttattcgcatccatcggagagagaaaacaatcaataagcgaccatgttggtgtaccaagatcttctcaccggtaagctcaataattccttaatctcggtatgaactgtgtagctatcgatctttttcttccgatcggaataaatcatgttatcgaattgttagatctgtcatcgcatcataggtttttcgttgatttgctgctctttgcattgataattcaaatcttaggggattagtttatgtgatttggttagatctgtgattcattagtatataaacgtcctttaattgagcttaccgattcgttgtagattggattttagggtttattcgcttgtatcgattaatgtttgggatcttatgagtaatgactaaagagtctgggctattgatttacaggtgatgagctt

SEQ ID NO: 171319 - DNA, 418 bp, Arabidopsis thaliana
cagctacatacgactcactttagggaaagctgcgtacgcctgcaggtaccggtccggaattcccgggtcgacccacgcgtccggagtactttcaggatggttgcttcgaatttccgaaaaaatttggtggaaaatgctttaaaaaccttgttccaggaaaccccggagggggacccacacttttttttttttttggcggcctcctaaaaagaaaccccatgtgggggaaaaattttttttttaaaaaaacccccccttggggggaaaattttttttaccccggcgctccctgttgttgggggggggggcccaacaaaggtgggggtgtggccctctctctttcttttttcggggcgggcatatttccacacaaaagtttcgattatcgaaccatattattttcttttacgtcctcacc

SEQ ID NO: 171320 - DNA, 509 bp, Arabidopsis thaliana
  unsure (1)..(509): unsure at all n locations
atagaagatgatgacgtcgaacgcacgcgtacgtaagcttggatcctctagagcggccgcccttttttttttttttttttttaaacaggaactaggccccttctttaagggtgtcattgacgataagccaaattacttaggaaccagacctaaagaagaacatatgtcagcttataggatttcacttgagctttagagatgttttgtgtcagaatttttgtctaagagtaaagacgagttgttgatggttttgtntaaagatgtaacagatttaaaccaattgggagttctattgctaggggtttttgcgtgggagatgtggattaaagattggttatgtggtgagtgattaatgggtggagggtggcggggctgagtcacctgtatcgtgtttctgttggtttcagtggatggaaagtgtgtttgatttgtagtggaaatggttgggagtgggtactgaaatgtgtgggtgggatggggggtgctatcagaaactgagtttgtatgtg

SEQ ID NO: 171321 - DNA, 540 bp, Arabidopsis thaliana columbia
atgatcctgccaagcatcaatacgactcacgttagggaaagctggtacgcctgcaggtaccggtccggaattcccgggtcgacccacgcgtccgcggacgcgtgggcgagctctcatcttcttcctcaggcattgcatatgataccgagaaccccttctttctcgtcgaagaatttaggggtttcttcaattctaccacgagcatcatcagtgaactcaagactatcagtttctagggtttttctcaatcattcgagctccaattttggtttcgccatcgattccaagaagagaaaagagtttatcgctaaagctgaagagagtactgaaggtgaaactgaggctgttgtggagaatgctgttgaaactgaagcggaaggagaaggagaagccactgttgcggcggaggaagctaaacctccgtggaagacgagagtcaagctcggagatatcatggggctactgaacaagaaagctattgaggttgcagagactgtaagaccgggtcctggacttaggactggggatattgtagaaatc

SEQ ID NO: 171322 - DNA, 511 bp, Arabidopsis thaliana
aatacgactcactttagggaaagctcgtacgcctgcaggtaccggtccggaattcccgggtcgacccacgcgtccgggttttgccacggccggtgacgtttgtgactggaaatgctaagaagctcgaagaagtcaaagctatcatcggaaattccattcctttcaagtctctcaaactcgatttgcctgagctccaaggtgagcctgaggatatttccaaagagaaggctcgtttggctgctcttcaggtggatggaccagtgcttgtggaagatacatgtctctgtttcaatgctttgaaagggcttcctgggccatacataaagtggtttctagagaagcttggtcacgaaggtctgaacaacttactgatggcctatgaagataaatcagcttatgcattgtgcgcattctctttctcgcgtggtccaggtgctgaacctcttacatttttggggaaaactccgggtaagatagttccagccagaggaccaactgatttcggatggga

SEQ ID NO: 171323 - DNA, 546 bp, Arabidopsis thaliana columbia
atgatcctgccagctactaatacgactcaccttagggaaagctgctacgcctgcaggtaccggtccggaattcccgggtcgacccacgcgtccgaaggaatggagttaacaatggagaggctgttaactctaatcaacgatgtctacaaatatgttgacagtgtcgtgggaggtcaaatagctccagacaacaacattggacgattcattgcagatgcagtagcctcccttcccaagttacctccacaagtcttcgataacctcgtgaatgatagtctccaggaccaattgcttctgttgtacctatcaagcataacaaggacacagttgagtctagcggagaagctaaacacagctgctcaaatgctataataagcttggaaacacaaggttttgctaaaaatggggaatgctgcttttttggtttcgaattttcttttaacaagtttatgtaagaatcagcttcttgttgtagtgttcctaaattgcaagtttaagaaagaccaaatgctctgtttcgtgaattaaggtctttaaaagggattt

SEQ ID NO: 171324 - DNA, 534 bp, Arabidopsis thaliana columbia
atgatctaccaagcatcaatacgactcaccttagggaaagctcgtacgcctgcaggtaccggtccggaattcccgggtcgacccacgcgtccggctgccacgaattggcgtattttagattgatacgtcaaagctcctcctcgcgcacgttagctaaaggaatgtcttgtactctttttgttgttgttgttgattttttgaacaaagaaagaaactaatcaaaaagacgaagaggaagaagaagctcaccgtttctatctctcattttaaccactgatcttctccgattgcgtcttgcttctcgtcgtttgcttccgatctctctctggattttctcaatttcgtacggagtaggttaattgtgtataaaggagtttagttgatcattgttttgtacatttgggatgatgatgcgtactgttgctttaccattgtcccatgatctgaatgttcataagatccatgaagcttctggattccataatagtgctgctggtaaaaatcgtgtgtatctgactcggactggtctttcat

SEQ ID NO: 171325 - DNA, 505 bp, Arabidopsis thaliana
  unsure (1)..(505): unsure at all n locations
ctatagaagagctatgacgtcgcctgcacgcgtacgtaagcttggatcctctagagcagccgccctttttttttttttttttttttttttattttttttttttttttttttttttttttttttttttttnnnnnnnggggcacaaaaagggacacagctcttacattcatgtttcactaggcagtctcttgggtaccttttaccttttttcccatttccccaattgaccccgggtaccagattccgttttttaagccaagatcctaggcctccaaattccaatccttttgtgaccttggttaaaaccccctcggccccaggggcccccaatttccccggtggttacccggcccggtttcccccccccttaataaaaaccctggtaaaatttttgttttaaaaacccccccctggccttaaccattccaaaaacggccctttttccgggaaccccccccgttcctccttaacaaggctttgtaaaaacccccgccccctctccccc

SEQ ID NO: 171326 - DNA, 529 bp, Arabidopsis thaliana columbia
atgatcctgccagctactaatacgactcacattagggaaagctgcgtacgcctgcaggtaccggtccggaattcccgggtcgacccacgcgtgcggggacgtttccgtctccactccatcaaggatgaggaggctaagttcaagctttgcaaagtgagatcgatccaatttggtcagaagggtattccctacttgaacacatatgatggtcgcaccatccgttatcctgacccgctcatcaagcctaacgacaccatcaagctcgaccttgaggagaacaagattgtggagttcattaagtttgatgtgggcaacgtagttatggtcactggaggaagaaacagagggcgtgttggtgtgattaagaaccgtgagaaacacaagggtagctttgaaaccatccacattcaagactcaacaggacatgagtttgcaacaaggttgggaaatgtgtacacaatcggtaagggaacaaagccatgggtgtcccttccaaagggtaaaggtattaagttgaccatcattgagg

SEQ ID NO: 171327 - DNA, 512 bp, Arabidopsis thaliana
atacgactcactttagggaaagctcggcacgcctgcaggtaccggtccggaattcccgggtcgacccacgcgtccgcccacgcgtccggaaaagttagagctcttctctcatctccaatttctctctctctctctccttcgctcttatcctctggcgattgtttccagagattctccgattctcgaggaggaggaggaggaggaggaggagggagagatggttaaggacattcttcgattcgattgatgtgaaacagctcctactcgactgccgtcgtctgagatcggagatctcatcgaggattgataatggcgcccggatcatcctaggggataatgagttgatctggcgatgattacaagggcaatattgatttcgaactctaggcaccgaagctctatgactgctctagacctgaccttcctaccgagactggagacatcgagctctggtagcagatccggaggaaactatcctacttcacctgacaacccaaagttcaatcggaaat

SEQ ID NO: 171328 - DNA, 514 bp, Arabidopsis thaliana
taggtaccactatagtagagttatgacgtcgcccgcacgcgtacgtaagcttggatcctctagagcggtcgcccttttttttttttctttttttttttttttttttttttttttttttttttttttttttttttttttttttttttttttggaggatttgattttccccgtttttttcccaatttccctcctttttggtttttaaaacccctttccccccttttgaattttaacaaccaaaattttcaaatcaaagagagggtccttcctcccccctgttttttttttttttgaaaaatttgggagcaaaactccaaaattaaaaaagggaggttttaatccaccaagtttcacccatgggccccatgcgaataacaagggtgggggaaaaaagggctttcaggaaatggcctcttcccaaatttctccccaaatgttatggggggtttggccacaaaacaaaccaactttccatttttggtaaaaaaaaactcctcgttggcagtcctttaaa

SEQ ID NO: 171329 - DNA, 515 bp, Arabidopsis thaliana
ctatagaagactatgacgtcgcacgcacgcgtacgtaagcttggatcctctagagcggtcgccctttttttttttttttcagctcaataatatcaataggttccaaaagaacaaacatcttcttggtgttgaaaatcacaatgaaggatataactatatctctacacttctaaagcagttcatcacttgatttactaccaaaaaattacctcctcacctataaaattcgtaaaccaaataatttccgtgacctattaccccaaatttccacagagatctgccataataacatcattaaagctgaagcagaaccctccaaccgaaccaccaacttcaaaatcaagaaagaatagaggtgtcatcacctgacatgagagtgagggagagacagatgcttctttgagaaaaatgcatcaacgtcatgatgctttgtcattatgagaatttaggcatgaataatccatatcagtcgacatctcagctgttagtgtctctgtttcacttgtcactcttcg

SEQ ID NO: 171330 - DNA, 522 bp, Arabidopsis thaliana
  unsure (1)..(522): unsure at all n locations
tgtccgccagctctactactgactcacttnatgggaaagctccgccgcctgcagtgtaccggtccgcacttcccgggtcgacccacgcgtccgctgatttataccaaatccaacttttcttctttcaaaaagtaaaacaatcactcatttatcatttattatggcgaagactatatgctgtttttttttttttggtaactgatcaaagccttttttattaaacggataactcaattttgtgagacaggagtcccatcagtatctgcctaaagcccttcaccatcacaaatccggttccctccgatatttccccggacctcgttgttccccaagccccctcttactgtcttttttcgggtgagagcccatactctccctccccgctccccacccggtgccccaccggcgcgtctcctcctcccttactcgccgtccccccccccccccacgccccgactctcggcaactgggttcccctcccatgtttctccgtcgggccccccccccccttgccccccgcaa

SEQ ID NO: 171331 - DNA, 531 bp, Arabidopsis thaliana
  unsure (1)..(531): unsure at all n locations
taggtgccactatagnnagactatgacgtcgcacgcacgcgtacgtaagcttggatcctctagagcggccgccctttagttttttttttttttttttttttttttttttttttttttttttttttttttttaaaaaagaagaggcgcttttttttaaaaaacaaaaagggggagaaaaggggggccgtcacaaaagaaaaaaaacaacgtcctaaaaattgggggaatcttttttaaagaagaagaaaaaccaccccccctgaacacccccgtcctttgaagaatcctcccccctcctaatttgtggaaggagacaacgtcgccacatttgacatattttttgttgggcggaacaacaaggagttcctttatcatcgtgggaaaaaaaaaaaagagggcttcaacaggggccaaaaaattcagcttcttgttaccaccacaaccagggggaaccttttgttgttcccccaaaaaaaactcctttcataagggagggcacacagagttccaaatgcttcttaagagactcct

SEQ ID NO: 171332 - DNA, 508 bp, Arabidopsis thaliana
ctatagaagactatgacgtcgcacgcacgcgtacgtaagcttggatcctctagagcggtcgccctttggtttttttttttttttttttttttttttttttttttttttttggcttcaaactgattatacaatcaaaatcgaatatcctacaatgatgcaattaaaatcaacaggttcttaaatttttattactaaaaaccaaatttctctacacttgagaataataatattaggaatcaccctgaaccccaaaattgtctttcgaaagggaaaaatatctatgtacactgatcatgggattaaatcctgcaagtagttgcagacgtaaaagcatgactacgaagttccatgtgtaataaacctaattgcttcggaagttttcgtaactgaagcctgatgatatgggcctcaatctttcgggggctccttgatgttctaccctttcgctagagtccaggaaattttcagcatcagccaataggaacggtgatccctcgtagctctccag

SEQ ID NO: 171333 - DNA, 508 bp, Arabidopsis thaliana
actatagaagagtctatgacgtcgcctgcacgcgtacgtaagcttggatcctctagagcggccgcccttttttttttttttttttttttttttttttttttttcaaaaaatgtatttgataaattaaaagattctacacttcacagaaatataaatagtagtgggaaccattatcttttctacgagctcaaatcaaaacgaaaaaaaaaaaaggtaacttttctctactaaggtttttgagtaaaatgcatatttagtaaaaattcaacaccccttgggtaaatgctttttttttgcagcaccctgaaccagggagtactaaactgagctgcggaatgaaaaaaatcagactttgccttcgagtttatcattattaacaaggggaagtaattccatcttgcttcttggggtacgaggagtcctaggagttcccggtgtttgctgtgaaagcatatgcctcacatatccataaaacgtgcagcccacaagcgtaattccgcatccaaca

SEQ ID NO: 171334 - DNA, 528 bp, Arabidopsis thaliana
ttaggtacaactatagaagagctatgacgtcgcacgcacgcgtacgtaagcttggatcctctagagcggtcgccctttttttttttttttttttccgaggagacataattattaccatgctctggcaattctaaggacaccatccccagtttttcttatacattaaactgtaaaaagctgatagactaaaaacaaatgtgaactcgagttacagaaattaggagatgcaacttagttcttaatttaactgcaaatttgattccatgtccttaataattctcaaaacacactggaattttaacaacagccataatctggttccacttctgctttctcttcacttgtaaaactcaaagtccgtgtctggcttcttaacatttgcgcggtagcccttctcgaaatccttaggtagtatcacatatctgttctttcgcaccgcatgcataccagcttcctggcaaattgctgctatctcagcagcgctaattttatcaggccgtgaaacatagtcttccaagtcaacctcat

SEQ ID NO: 171335 - DNA, 510 bp, Arabidopsis thaliana
taggaacaactatagaagagttatgacgtcgcctgcacgcgtacgtaagcttggatcctctagagcggtcgccctttttttttttttttactaaattgatgatatattctactaaatttccgaacaaagaaaccgatacactgtttgacggtcaaacacagagtcaacgttacaaaatattaccgtgacctctctgtgtaacaacaacaatcagaactcactcaaaacacaagtcaaaaggataaaatctccaagttcaagacaagactcttagagagttgtttctgggtggtagtgataatgagatcatggcttattactgtttttttactaagtaagataaacccccaaaaggatcagatatctccgtaaagaaccttgcgtggatcaagctgtccgctgcagtaacttgatgagacgatggatagttcttgtctgcctttccactcttcacgaggctttaacaataccagaggttcgattactccagaatctacacaaagcattgtt

SEQ ID NO: 171336 - DNA, 500 bp, Arabidopsis thaliana
actatagaagagtctatgacgtcgcctgcacgcgtacgtaagcttggatcctctagagcggccgccctttttttttttttttttttgactttaaaactttcttactacgaaccagtagaatcgtggattcaaagaggttagaatctttggccagcaaaataggttcgacagacgactaatagtttctttactgcccaaataagagcatagttgctccgtgttttacttcctatttcggttacttcatcctgtgccggatctcgtataagtaaccaaatgccacaaccgcagcagcgactgcatccccgaacgcgctctgggccagaatcgagcggtctgcaactgctttgcctagctggggagtttgggtggacaccaagctcacatagtgtcttgtgcgataccgcgtagtctatgaagaaagcatgctcatcctttgcataaagctcaacaagacgacggatctccggggcttacactaagggcttgtcagttggaag

SEQ ID NO: 171337 - DNA, 510 bp, Arabidopsis thaliana
cagctctattctgactcacattatggaaagctcgtacgcctgcaggtaccggtccggaattcccgggtcgacccacgcgttcgaacatacatacgcaaacctgtctatactagcatatagttgtagcaggtgatgctactaggtcatcctcacatatagttaatatccgccagaaaggattcaaatgtctgcccccatgaacgaatacttactagcgccgaacatacgtttccatcatcttaaacatgtcttctaccgcatgggactctttgataaggatcttgtggcactctcacgaggtcatactgtgataagggatcactcgtacaggtcatgctttgatgaaccattgcctgctgatccgatgaaatttgacaactcccacttcgtggaactgctgaaaggacaatcagacgtcttgttgaaactgtacactgacaagacctgattgaaagacccagacttgcctagtcttgtggatctttatgcagaggataaagatacattctt

SEQ ID NO: 171338 - DNA, 509 bp, Arabidopsis thaliana
actatagaagattcttgacgtcgcctgcacgcgtacgtaagcttggatcctctagagcggccgcccttttttttttttttttttaaattcaatttttatttcatatatcaaagaatttatacatatacttgggaaaaaattagatcccatatatccaaattgtcatttggcgtcgttcaaaaaattagttactattacacatgaatcaattaaattcaaacccccatgagcctcaacaatactgaagatcaatcctatgaaatctttggaaacatatacataatatcacttatggggctgcataagtccataaaatatggccttagatctcacggattgtgaactggtcggcattggtgtatttgggtgcagctcccatctatcttctttaagcgaattaggggctttacttggttgacgattgcttcttgcgggtagattttgcatcatttatagtttctttggctcttagcttgattctcgattccggtaaccgtgtatgtcactaa

SEQ ID NO: 171339 - DNA, 523 bp, Arabidopsis thaliana
actatagaagagctatgacgtcgcacgcacgcgtacgtaagcttggatcctctagagcggtcgccctttgtgtttttttttttttttttttttttttttttttttttttttttttttttggaacaaaaaaacagcctttaccttccccaaagtttgaacccaataaatgaaagaagaagaagaagccgaaattaaaagtttttttagggggggaccaaatgcttaaaaagaagaagaagagttattttcaaatctgggggaatctactcaggatctggttatataccgatgggcctgaatctgaaaccggttcaaccttgggttccatccctttctggataattgcttaactcatcccaaccggttgggtcatatacgggggaggcaaacccggcattttccctggaccatacgctaaaccaggcttggaaagattaaccaaaccggtttggcctaagcgggggggaaaaccagaggggggaccccttggtggttgaaagctaagggggcgggttaaaggaga

SEQ ID NO: 171340 - DNA, 527 bp, Arabidopsis thaliana
taggtgcaactatagaaagactatgacgtcgcatgcacgcgtacgtaagcttggatcctctagagcggccgccctttttttttttttttttttttttttttttttttttttttttttttttttttttttttttttttttttttttttaaaacccaaaaccaattttttttacttataaagggggattcccttttttgaaggggccacataaattacctccaaacaagttggggttttaaaacaacttttgcataaaaagtttacttgaaagcttggcaatttacttttaaagaaaaggtaattcccccacttgaaagccccctgaaaaatctcccataagtttcactcgcatttggtgagaaaaaggcatcatcccctgggtctctctccttaaaaaaaatttccattttttaaaaagccttttttatattaaaccttttttccacatttactttaaaaaaactcaatccaatttttaaaaaaatgagtatttgggcctaaaaatggcttgttttccccattttttg

SEQ ID NO: 171341 - DNA, 506 bp, Arabidopsis thaliana
  unsure (1)..(506): unsure at all n locations
ctatagnagagttatgacgtcgcctgcacgcgtacgtaagcttggatcctctagagcggccgccctttggttttttttttttttttttttttttttttttttttttttttttttttaaaacgttcccaaaacagggttttttttagtagacatgaccaataaaaaagtctttaactatgaattatcaggggggttccccataatttggattaggatgaataaaaagtatccgtttttttagttcaaggaaataaaccaggggtcagggacttagcgatttttggggaaatacaaaaagccgaaaacatgactgggatcatagggttaacaccaacagcgctggggaccgcatttgctttgcacacaaacaacttttttggttccaaactttttcctttaaaatttatggccccttttttttttttttctccaattctaaaggttcccatttgaggagctgagctataaacgtcccatttcgcagaccttcccttggccccttccta

SEQ ID NO: 171342 - DNA, 499 bp, Arabidopsis thaliana
actatagagattatgaggtcgaacgcacgcgtacgtaagcttggatcctactagagcggttcgccctttgggggttttccttttttttaacaaaattttatccattttttacactactggaaaggagtcccaggatcacatactgctaagttctatcatagctcgacatgaaaacaagatacgtttgggggaggatctgcagaacacgaggattataaaattctttcgtgaggagatccttactaggtgccattttggatggcagcgcaccgggcttactgagcagtctttcttggggcccgtgtagctaatgtgctggggtgtttaggcgaggtggtgattttgtggtaaaggcttgaggcgtggactaactggcggattgtccttgtgaaagtctgtccctgggtttggttctaaggcccggtgggcaagccgcgtccaagggggggttgtcgggtgggggtgcaagggggctcttcggtagcatgggcaccttttt

SEQ ID NO: 171343 - DNA, 519 bp, Arabidopsis thaliana
ttaggtacaactatagaagactatgacgtcgcatgcacgcgtacgtaagcttggatcctctagagcggtcgccctttttttttttttttttttttttttttttttttttttttttttttttttttttagaaaaaaaaaaaaaatcttctgatactcttcctcaaaagggcaccaaacatttagcatttaacatatttgggagagcagccaagtaaacatttcccaatggccaacaaaatacaagtctaaaattttaagtagattcgaacacaaggggacatgaatttgaatcccaaagcacaatagccaactcgttgagcatttcacgcctttttttaaaattttcgagcttttcccttccgatgcgttttggggaaaaagttgcttttttcaaccgttttgcgttttctaggatgtatggggcaacttttttctcatcacctcggtggcattcatatcctatccacaagaatgtctcaagatggaacaacaaacattccggggcacattttgggggat

SEQ ID NO: 171344 - DNA, 515 bp, Arabidopsis thaliana
ttaggaacactatagaagagttatgacgtcgcctgcacgcgtacgtaagcttggatcctctagagcggtcgcccttttttttttttttttgggtggacacaaatacacttctgcaaacaaacaaacaaaactgagaaacaaaataaagttggaaaatgtgcggtgtcaaaaaaaacgaactttttttttcaacacccaaagatcttaagcagaccgtcgaacgaaacgccgtcgtttaaatcaccaccggctaatcgaatcatagatttgatttcatcgtcggttacagctaaaccagccgaatccatataactcttcagatctccgtaactcagtctcccatctccgtctttatccatcaccttaaacacatctttcatcaatccatcgtctcctccgttaccagatctagaaaacggcgtcgtttctagaactttctcgaattcatcgaactcaacgaatccgtctttgttcgcgtccgctactgatatcatcgttccgatcatcgtctcgtc

SEQ ID NO: 171345 - DNA, 519 bp, Arabidopsis thaliana
ctatagtagcatgatgacgtcgcctgcacgcgtacgtaagcttggatcctctagagcggtcgcccttttgttttttttttttttttttttttttttttttttttttttttttttttttttaaaccccagctgaaaggtttttagtttttcccaaaaaaacaaacaaaaaacaacagggcctatcaggggtactacagtcttttaaatatatacacaatcttaatggttcccaagtttgcttgaacaaaccataagcaaaaatatgtttttaagaccagagaccaaaaacttggggaagatttgcattttaatggttcctggctgacttattcttgttttcaataaaaatgaactctctttttttttttttggctgtggctctctcccttttctttggaatccctctccatcgggaaaacccctctggcctaatgatctgtttcacaaagaattgcaaaaatcccttccacacacattggatttctttaggctttttgggggagggagacaaaccggttt

SEQ ID NO: 171346 - DNA, 516 bp, Arabidopsis thaliana
aatacgactcaccttagggaaagctcgtacgcctgcaggtaccggtccggaattcccggtgtcgacccacgcgtgcgcacatccctaattctcgagctcgaagaaagagacgaaaatggcactgagaaatgcaattcttcgtcacctgagggttccggtgcaaaccctaagattgaatcagtctaaaattgggttccttggtacgatccggtcattttcttctcacgatgatcatcttaacagagaagctgtcgtctatagagtactcgatgttgtcaagagcttccccaaagtcgatccctctaaggtgactcctgaggttcatttccaaaacgatttgggattagatagtttggacacagtggagatagtgatggctattgaagaggaattcaagctggaaattccagacaaagaagctgacaagatcgattcttgctctctcgccattgaatacgtgtacaatcatccaatgtctagctaatcgctgtgtgctctctcatggtttctccttcc

SEQ ID NO: 171347 - DNA, 509 bp, Arabidopsis thaliana
ctatagaagacttatgacgtcgactgcacgcgtacgtaagcttggatcctctagagcggtcgccctttttttttttccttttttttattaatcacttcttttttttatatttttcttgttttttttggttttctttccgagacaaaaagggacaagcgttccaaaatacagtggtacttgggtaaattttgggaactttcaacattcttcccgcttccttttttgactccgcgaccaaaattcatttcttttatggcatgctttaggtattttggaccacaaaacttcttgatccacgcttaaacacccatgcgtattacaggcagagtgtcctcccatttatacggcacagatttctcccactttaatttaaactaagtcaaatttgttgttcaaactcccattcttgggtaacatttccaaaaagggccctttgagggtcacattcaagaccatcttacaaggctttgaaaaatccaatcaaactcatccccttgggcctttaattt

SEQ ID NO: 171348 - DNA, 481 bp, Arabidopsis thaliana
catatgaagtataaaatttattcatattgggcaatacatttagctacatacatgcatgaacaataataatacgctagaacaaataaaacataatggcaaacacaaacgacatatagtaaaatagaaataaaaacgacaaattaactaaagtgtggacgttacgttgcatcattgtccatctgtaacaataatacaactgccttcacttaacttaaaacttttataggccctcaaaacaggagtataaatgtgggcaggtggcctcatatttaactcaatctgaaagtgagaccagatccagctaacttgtcatccactaaggctgacaatctttccacttgtgatggcgacaaatagttaaccaaatcactcacttctcctttcctaaacaagaaccggttctcatagttctggatcaatttgcttgacttgttcacctccaacttcttcagattctcaaagctacacagatcagcgatag

SEQ ID NO: 171349 - DNA, 335 bp, Arabidopsis thaliana
cagttagcagtagaaaacagtgagagctgcgtattccggaaaacaacaagacatgttcaagcttctttaattaagcatgtgcctcgtgtgtgaagtttataaatgttggaaactagaaactatgatctcttaatcatagatataggtctcttcttccagtattgtacaccataagctgcagttgaagccatagtcgtcgaagcaactaaccagcttagataagtgatccatgtctgggtgtctggattcccaaactcttgttgaagtattgcaccagcgactagagtcaactggaaaactgtattcaccttgcttataaacaatggttctacttt

SEQ ID NO: 171350 - DNA, 273 bp, Arabidopsis thaliana
ggatccagtgagcaaccgaggattatctaatccaaacaaaaaaccagaatacttgagcaaggaaccagtgaagaagaactctttcatcttgatgaaagtacgcaacgttaacaagctatctgatccagcctggtgagaaatcccaactcgtttaacaccaagtaactccgctattttctccagacctccatagaggttagtacagaatcccatcaagtatttgatatcatacactaccgggaaaaacttctccatctgatcaaagaagtccga

SEQ ID NO: 171351 - DNA, 418 bp, Arabidopsis thaliana
ggggatggaaacctgatttagtttctcaactgttgaatacaagtgccaaggaaaatgaaaagataaccaacattgtaaatacagaggactcatttcgcatcatgggtgggaaatgtctttaatagaccatgagaaggttttgatcatctacctctcttgggagtgtcttcttggcatctctgtcaccataactatgactacttcctcctgggtttgtcttatgacctttttccacattctaactgttgacgtgtcgtctatttccttctgctaactgattttcacaaggactttccatttttctcttccggctaggcattgttgaagaaacatcatctatcatttgaccttcctgggtattgaccaccaagttgtttccatcaagaatctcgacatgttactgacccatggagctttt

SEQ ID NO: 171352 - DNA, 202 bp, Arabidopsis thaliana
aattcaaaagcatacgatttggggtcccatttgttggaaatattacagttaacatgtattcgtcgatacatcttccctcaaaacatccattgcaaggactctcttagctaataatactactcctaaggcattttaccattgttccaaaaacaaaacttgaaaagaaatgagcttatggagtaaacactcacggctttggaga

SEQ ID NO: 171353 - DNA, 162 bp, Arabidopsis thaliana
aaaagggaacctaacacaaaacttttttgaaccaagtttacaaggttttaataagtaacaacttgggacattacaaaagttaggagcagggcattattaactaaaaaaagaactttttttaagccccaagcaaattaaacccagaaacccaagaaccctttt

SEQ ID NO: 171354 - DNA, 394 bp, Arabidopsis thaliana
agagtaaacagttttttttttcagaaaaagtttcaataaaaaccagagaatcataaagctagggacataaaccgaactatgtattcagaaatgagaaactaaacaaaagtaacaagcttttaaaaactggtgaagatgcaaaaactggtttttcttttttggcagagagactggacgatacgagcatcagttaaactttgcatttgagaagtccatctccggatgctcagacatgaatttcttaaggatctcttgcttctgtagctcctcgcttgttggaagacccatctgcttttgcctttgatcaaacatcattttctcaacagtcgagcgagtttctggatcaaggtcacctaatttactagtctctggttcaactttctgagtatcgatt

SEQ ID NO: 171355 - DNA, 491 bp, Arabidopsis thaliana
agccaaatccttctctccatatgatcaaggaaaagattttgacaacgtagggtttacaaattgagagaagaaacaggaagagagataagcgacaagatctagcaaacttttctgaacagggcagaaaatgtaagagatctataaaactgaaacgacttggtatacatttaaacttctaaccaagagtccgaaccaatctatgaggtaagttttcttccttgaagacacaacactgtgcagtcagcttcttatataaggaaccacgcaccataaactggacatcacaagtataaaactcgtcgtagagtgtaaaaagttgcgtaatttgttcaaacatcccaggagcttcgaggtttgtaggaccatcctcgtcagcatatatgtccatctcctttaaactaggaaaatagtccaagaaatgttttatcatttgcatctctttctttgtccctcgaaacccatggatctctaacatatttactggacaagat

SEQ ID NO: 171356 - DNA, 318 bp, Arabidopsis thaliana
aggtacactcccaaagtattaattttacaaaacatataaacattacaatgccatattgctctaaatctccctcttacatagaagtcaattcagagcctctgttgccaaacaagaaaaagaagatgataaaaagaaacagatgattttctttagatctctattgtcgtgatccaaaggcatgatgtcttaacatggcagcttgaaacccatgtccttgcctgccacgtaatcagtccagacatcaagagctccaaaacttgtcataaggactgggctcagagacatcacgggtccaaccgagaaaactataatggaagc

SEQ ID NO: 171357 - DNA, 211 bp, Arabidopsis thaliana
cataaatacattttcatggtttacaaaacgctccgagttaagacttatgaggttcgctagtgttcatatgttgcagatgggcgctgagaaataaaacatgacttttactttcaaggttagtttacaactgctagctcagttcttgatcttattcgaacatgaaggtttcatacataatgattcacaaataaacatgaacctttccttctta

SEQ ID NO: 171358 - DNA, 218 bp, Arabidopsis thaliana
ggggccccaaagggcccatttttatttaggaaaaccaacggggggccttttcttaagggaaaacaatttattcaacgggggaaaattccaaccccacccgttattgattaaatctctaaaaacccaaaaagaattcggaaaataacttccccaaaaaaacactttttttggatgtacccaacaaaaaaaggggtggcctttttgaaaagggccccaag

SEQ ID NO: 171359 - DNA, 300 bp, Arabidopsis thaliana columbia
atcagtaatcttctgataatgaaaaaaaatctgactcaagatctcagtttcagaccaaaacagagcattcatttttgacaaaagatatgcagacaaaaaaaaaaaacagacacacacattaacacagccacggccaaacggaagattcacaaaaaaagccttcaaaagtagtagaagctttccaaagagacaagataggacttgtccagagatctttataatttacgtcaagtcttattgaggagtaaagctccagacgcggatacaagcattttcagcagaactcaccggacgcgtggg

SEQ ID NO: 171360 - DNA, 287 bp, Arabidopsis thaliana
ggatggaagattgaaatttttaagttttcgtaatatttttggaaaatacaaatatgtttctgatcagcttttattcgatccgaaatacatgggcgaaagcaggggtcctaattgggatgctttcgcccagggaaagactccgacaaatctacaagagttcctccaaggcccttatagcttaagtcactgatttctctttcaagggtcatttggaaagcctttgcttattgaatgttttttttttgccctcggaaacctttgggtctgaccttgaatgatgagacttt

SEQ ID NO: 171361 - DNA, 356 bp, Arabidopsis thaliana
catatgagtgaacacaagccactcgttacatatagatttaccatcaccttttacttcactgttcgatatttttacacacaatacaagaacagttcaaacaaatgcctaaaacctatataaactacaaaacaaataagctcttactgatactaaaaatacaacttaggtaagagccgaacttcaagggctgggacccgtatctgatatgtcttctggaccagcaagtgtcacattacaatgacaagcaaatgttcgggcaagcatgatcgaagtgtttctttctctctcagactcaaaagctattacaaatgacactccttgattcggctgccaatacaatgcctgagctgcagcat

SEQ ID NO: 171362 - DNA, 393 bp, Arabidopsis thaliana
tctaagattcttccggcagattcagaacattctgccatatttcagtgtattcaaggtttgcctgaaggcgctctgcgcaagataatcttgactgcatctggtggagcttttagggattggcctgtcgaaaagctaaaggaagttaaagtagcggatgcgttgaagcatccaaactggaacatgggaaagaaaatcactgtggactctgctacgcttttcaacaagggtcttgaggtcattgaagcgcattatttgtttggagctgagtatgacgatatagagattgtcattcatccgcaaagtatcatacattccatgaatgaaacacaggattcatctgtgcttgctcaattgggttggcctgatatgcgtttaccgattctctacaccatg

SEQ ID NO: 171363 - DNA, 289 bp, Arabidopsis thaliana
aagtgtgcagattttacgattcattcagatgactgaaacaaaacccagaatatgggaccggatatgatgaacactggaaacagaacaacagggggagcggggcacccatatgacaagtaccataaataaaaccaagcataagtcgcaaaaccaaaagaagagtcctaatgcggaaccatcatgaaaaaaccaactaacaaagatagagatgcatcataataggcaaaaagtggataatagagagatagaaggcggcgggagaaagaaccgatcacttgtgagataacca

SEQ ID NO: 171364 - DNA, 314 bp, Arabidopsis thaliana
ggctaaaggactcattaccactcgatgattatcactttttatattgaaagttactaatattccgttgtctttttttttaaaagattcagcaacatattacactaatatcgagaaatgacttattgttaatgggttgggggtatctgcttaaaaatattcatatccccaagggcttaaacgtgattatggaaatttttcttttcaccatttttccggcgacagcttaacaagggggggaaggaacaattttccctgggcatggcccaaacccaacattgggaccatctcccttgcatacacctgaaaaggggact

SEQ ID NO: 171365 - DNA, 230 bp, Arabidopsis thaliana
aatcaatgaccaaaatattattaagataaaacaacaaccaacatcatatacatgtcacagtacgggtgaaccatgcttgtattaataaagtaattccaaagactatatttcttattacattattagaacctggcttggaaattcctgaccgcattaacatccatttggaatgctcttgcaagaacattggggtctacatctggtttagacccaaatattgcgttagcaat

SEQ ID NO: 171366 - DNA, 273 bp, Arabidopsis thaliana
gggaaaaaaaacttttaagcaccaaagcaagtttttaataacttcagggggaagagtttaaataactaaaaaacagagcccattttcaaaagcctctctcaggggtttactcttctgctttggggaacctaccaaacggaggaacccaaatcgaaaaaactttccctaagagatttacccaaaagcaaaagggaacagaagcattatcaagcttttagcattacatacgggaaaacagaagaaccagaaggtttagacaaacattttttacat

SEQ ID NO: 171367 - DNA, 178 bp, Arabidopsis thaliana
aaaagcgagcatttccactttacaggtaaaaccaacaacatacatgcgtgggttacaactgaatatacatcaacccgcctttggagttaaactttggtctgaaaaatataactcccggcccgggctgggcaaaagattcctccccccccaaaatcgagccttataaacccccttaagc

SEQ ID NO: 171368 - DNA, 414 bp, Arabidopsis thaliana columbia
gtcaaaacctttctccagaatagtaggtttggagatgcaatgagggtgttaaaagaaatgaaagaacaaggaatcgcaccagacatattttgctacaattcccttataattggcctttcaaaagctaaaagaatggacgaagcaaggtcttttctggttgaaatggtcgagaacggattaaagcctaatgctttcacctatggggcttttatcagtggatatatagaggcaagtgaatttgcatctgcagataagtatgtgaaagagatgcgggaatgtggcgtacttccaaataaggttctttgcacgggtttgatcaatgagtattgcaaaaaggggaaagtaatagaggcgtgttcagcatatagatccatggttgaccaagggatcctgggggatgctaaaacatacact

SEQ ID NO: 171369 - DNA, 193 bp, Arabidopsis thaliana
ctaaaaaaaatccaacggggctgaatttaaataatatcagggaacatttgacatcatcaaatttgatggggaaaaatgctaaaaaagaacaggttcaaacaatgaaagggggcatgcctaatttgctgcacatttacaaacaatggcatggattttaccggttttttgaaataaaatggggatttccgaaatc

SEQ ID NO: 171370 - DNA, 270 bp, Arabidopsis thaliana
gaaatgaaatgtgtggaaagtttcacaggaaacaaacaaccataagaagtatacttaatccaatacacaaggtctattgctggattacacatgatggacacaatttttctagttgaaaacaacacgagagatacagaagtttatgtaccttatttacattagatgagactattttcatcccgattccaaaagcagtaaagtttatgttttctcatgatttgaggctgggactgcatcatgtagtattagcattgttgaacttttggagga

SEQ ID NO: 171371 - DNA, 421 bp, Arabidopsis thaliana
ggactcgtcaactttgtaacaatattattgagagaagaaaccaaacaaagagttttattacaataatacaatcccacaaacgagaagagtcgatcccatgcaggggaagatacacacctacgaacttagctaacttatttcatgaaaaggaacgacgacatgatagttactttcaaacacagtttaacgtaaaatacaaaactatgatttcatattttgtatttggctacgttacttaaaagccaagatattttctagatttaccattgtaatcagaattgggtgttacaacatctagtataaaagcccccaatgcccaatctagtggtatgtgtttttctcctgctttacttgcatacgtgatactttcatcatcaagagcaataccaagactatcatgaagcattgatatagtatatgc

SEQ ID NO: 171372 - DNA, 359 bp, Arabidopsis thaliana
ggtacaaaagcaataattgcttacaagcctacaaggaattggattttttttgtcccgaccattctagaatacatccccacccaaatagaaaaaagagaaccccattgcttattggtaccaaaagaatgtctccttctactgactattactgtatcaatcagctattaactcttttttttcctcctccttcccatcttctactttgacagcttgaaggcgctctgataattgctccacggaggtcctcttattccccaactttttcccttgttccattttctcccaccttttgcccctttaaatcatcatagtagccgaaatcatcaaggattgatgtgtgggcctcgaattctttgaaa

SEQ ID NO: 171373 - DNA, 231 bp, Arabidopsis thaliana
cccacaaacaaggattccgattcgacgaacaaaatacaaaaatttaggtttaaatccaaataaaagccccccccttgacccgacgttttcatcctccaccaccgttgcatataccggttaaggatcccggaaatttacaaggggacggggttcccggggttctttttccggaacccacttaagctgaagccgggggaagaacccttccgtaaggaaacaaggcccgttccc

SEQ ID NO: 171374 - DNA, 153 bp, Arabidopsis thaliana
aaaccgggcttagagcccttggtattgagatttccaataaaaggggtaacgggttttatttttcccttcctttggaaacacagttaggggtgaaaattttagagaagcttttataaaaatgacatttttgtgtgaaagataaataaaacccct

SEQ ID NO: 171375 - DNA, 313 bp, Arabidopsis thaliana columbia
aaactcaaagtcaattcaatcgtaacacttggccactcatcgggaaataatacaaaggcacaaattctggcacacatgttttctccatctctcgcctttctctttttgctatattttagagaactacagaacaaacaatgaacattttcttctttaaaaaaaatatatatatgttcgaagcacaccaaaaatacttcacaaacacatgcacaaaaggggtcgctaccgagcggacgcagcggcggcagtagtacataatatgcaccgtaaacgcgaccgcccaggtctgtctccatcaccatcctcatcttct

SEQ ID NO: 171376 - DNA, 218 bp, Arabidopsis thaliana
aaagaagataatttcatatgatttttgaaggaaaagatcaaacttgtaaacccaatattaacaaaatttttacaacaatttacattcttttcttaacgaaatccaaaaggtggtttgaagccaattttttaacttatttaacatcattaagctgttcaatgggaaaaaagatgaaggtttggcttttttcttttttttaaactagaacgatagcattt

SEQ ID NO: 171377 - DNA, 209 bp, Arabidopsis thaliana
ggaggggatgacttaaatgtagggacatattgataaaatatgccctcaagacttaaaagtagatccaagtccctaacatggcatctttttcaactggtttctttttttacaatgacaaaaaaagtgatccacgttacaatacaacattacacaacaacacaacagagctgagctaactggctaaaaggatacacaatacatgttacaaa

SEQ ID NO: 171378 - DNA, 396 bp, Arabidopsis thaliana
agtagaaaagattagtgatcattgagagtttacatagttacatggatttattcaaagcatgtgttcgcaatacaaagtttgcagattccgagttacacactgagacgattcttttcattgttctcttaccaagaggggattaccagaacaaccttaggttgtttgtatactagataagaccatactcatccttgaatcaaccgtttctgggattgccgctggaccacacgctatttcaggtgttgtggtgttgtaggtacaggatccaagtgatgtgcaccttcttttgtgacgagagcaacaatggtatcagataagttcttgagaacactgccaccactccaaggatctaacagaccatttgagaaaatgatgttacttccaaatgacttcaag

SEQ ID NO: 171379 - DNA, 402 bp, Arabidopsis thaliana columbia
tctttctgtggacgaaactaaacctgagagaaaaagccagaagaaccaaactcagaccgagagatagagattgagggagagctctagctctgtagaaaagaaggattcattcatcatatccagaaatggctctaaagtttaaccctttggtggcatctcagccttacaaattcccttcctcgactcgtccgccaactccttctttcagatctcccaagttcctctgcctcgcttcttcttctccggctctcagctccggccccaggaggttgagagtttgaagaaaccatttacgccacccagggaagtgcatgttcaagtcttgcactccatgccacctaaaagatcgaggatcttcaaatctatggaaaactgggccgaggaggaccttctgattcacct

SEQ ID NO: 171380 - DNA, 116 bp, Arabidopsis thaliana
ctaataagcaaagagagaccccattaacggggtgatcatgtaaaagcttgagaggtacataacacagtggtccacatcgacaatggcaagacattaagcggagagttcacactacg

SEQ ID NO: 171381 - DNA, 131 bp, Arabidopsis thaliana
gaaagagagagtttaagaactttggtgcatcaatggcgatctccaagctccatctactcttccttctctcagtctttctctcccttcatcctcttgttctttccgacaccgccggtaattaactctctcat

SEQ ID NO: 171382 - DNA, 282 bp, Arabidopsis thaliana
agcagtattaatcttcattctttaactagggggtttttactagccccaacggagagttacattgtcgaaaatttagcgattagtctttcccaaatagtgttctatctgaagacaagcttgagaggacgagccacttggtttagttccaagcttgagtctcttaccacttactgagcttgcattggttctagaaatatggggtttagatctcaaaactttgattctaccacctttaccatcaggtccaatagagatgagaacatcttttcttggaacagaacc

SEQ ID NO: 171383 - DNA, 164 bp, Arabidopsis thaliana
attggggggattaaacaagatctatgggcgttttaaaataaaaccacttagctcccaactcccaacaaagaaaattagaagccaagctcaatcccctgatctaccacaaaaccaggttaaagggtccaacaacgttctaaggacctattcccaattggcatccc

SEQ ID NO: 171384 - DNA, 319 bp, Arabidopsis thaliana
ctctacaacctcattgctttcgccgagcctactctttcgtaaaccattggttctgtagcatctttcgacttgttctctctgaggtaacgctcgaaagcaccgtctcctttaagaatttttgctgcgcatccacgagacgcttctgagcttgttgattcctcatctactataaccgcatggattcttttcatctccctttttatcatctggaatctcaaacatggcttcggtaagaatgctttcaagtaaggctcttagtcccctcgcacctgtattttccaccattgcttgcttggatattatctccagcgctttctca

SEQ ID NO: 171385 - DNA, 401 bp, Arabidopsis thaliana columbia
  unsure (1)..(401): unsure at all n locations
tttttagagtgaccggaactctctcggcggcatcatctccagcggtggcggcggcgtctttctccgccgctctaagactttccataactcccactctcgctatcgcctctcctccccatctccgttggttctcgaagttttctcgtcaatttctcggcggacgcatctcttcactccgaccacgcattccttctccgtgcccgattcgactctctggtttcccggnctctcaaaatgagagcttcgtttagcagtgggagtagtggaaagtagtgcaagtagagagattctggtgcagcatttgcttgttaagaataatggatgttgagcctctttgccgaactccaaaagaanattcttggatggagaggagatgaagtgatcttgcggctgagtattcg

SEQ ID NO: 171386 - DNA, 235 bp, Arabidopsis thaliana
ccaaccatataatggcccatagattacaaacgatcacatcagcaatgacccaaaaggccaaaacacttgtaataaccacatcagaaaactaaaaaaaaaaaaaaaactttaactaacttgataaattaattaagcagaagggagattaagagacttgaaacaggtaaatccaccatcaacaacagggttttgccccgtcacaaacttagcataatccgatgccaaatacaaagcc

SEQ ID NO: 171387 - DNA, 416 bp, Arabidopsis thaliana
aaatagagaaaccatgaattataatctcaagtgtatataatacaacaacgtggagctaataaactgaacaaaatttccttttttgactatttctctccctcgaaacagcctgagaccaaatctaatagtttctattgcacaacgggatgtttcataatggtgggaaatcgatttatccaccgagagtatcctgctcttatgatttcaagaagatccgcggtatcagacatatcctggccacttgaggacaagcttcttgtaacgagccgggccaaactatccagggagcttctgctaagttgtaaagcatcttctgatgtgaaatcaaagatcagagagcatatgcttgcagccatcattactaccgaatggtcattactcccatctgcccaatatgccaaagctttcaatagact

SEQ ID NO: 171388 - DNA, 246 bp, Arabidopsis thaliana
ccaaactcaaaacatcgtatgcactttatttctgtttaacattcaaactggttgggactgtgaagcccgtatcgaggacaaaagacacaacaaacccacaaaagggtcaaataaagctacaaagaaagaaagaaacttacatcaaagcctttcaaagaccaaacgatttccaccatattgagtattgagtagaacagtataattagtagtcaaggagcatgactgagagaatattaactttagcta

SEQ ID NO: 171389 - DNA, 295 bp, Arabidopsis thaliana
ggataggaaaaagatcaactattactaaatgattaaaagttaaagttaacaaaacgtataaagatcaaatttatcatacagtaacataaatttttctgaataagctcatatgagaaatgtatattacagtagctaaaaaattacactcttccatcaaaactaacttaacacattatttgaaataagttatcacataatcacacaatttgattcgtccgttacaaatctagagttcccatatggttgatagtaagaatttgcataggcaggattgtattggtaagggttgttcatc

SEQ ID NO: 171390 - DNA, 106 bp, Arabidopsis thaliana
acacgaatcttgtcaaataaactaaaaaccagtcaaaagtgttgtgtgggaaacagccagacaagttattatactttgtttaaatctatcctcctggtgtatttta

SEQ ID NO: 171391 - DNA, 295 bp, Arabidopsis thaliana
  unsure (1)..(295): unsure at all n locations
gtcagctccaaggctcaccaagtttctcatctgtaatttaaaaactttaacccgagtctcagtacaataaaatgataatccagaaatgtaaaacgaaaaaaggaaattttaatccaacgaatacaatttttctttagactcagcaaaatgtatgaatttgtttcaatgtgttcttccgtgtggagagtaatgaggattaaangcgttcttccacctgtaaccaaagaattgacaaaaaaatggttgttttcttttgttgctaagcaagcttcttgggtctaccaacagaaggtgt

SEQ ID NO: 171392 - DNA, 134 bp, Arabidopsis thaliana
actttttgttgagaagagatatcatctgttttcgatccaaagaataaaaagcttggattccgaaatctcccttctgttcaaacagaaataattcttgcacatgaacactaaaccagaacgataacaggaaacaa

SEQ ID NO: 171393 - DNA, 340 bp, Arabidopsis thaliana
  unsure (1)..(340): unsure at all n locations
ctggaaactaatcatgtcatcttcatatcttattcggacctcatacaaaatccccacaaactaagtaataaaaaaaactcactcaaggaacaagcttgaatattcactaaatcctttacacatcttctttcttacacctaaaaacaaagtgcactatgacagcaaaggtgctttcgagttacctatgagccgttggtgtacgcggcatggtgtacggcatttgaccaatgttcattgctgcaccaggaaccactgagccagggactggagccgcatgaactccataagccatgtgaggtggactngngaggttcactggtgttccaactgctggctgacc

SEQ ID NO: 171394 - DNA, 419 bp, Arabidopsis thaliana
gggaccaataatcgatacatatagtgtaaatacactcaacaagagcaacaatacagcagttcaccacatattcctccaatggagagtatactagtaaacaaaagcaacttatgctataaccagcaaaaggatcagaagaatcagacattcatagctcgaaaacaagacaaaagaagatcacattcatgattttgaagaaagaaagccagttcctttaaacttctcttccatcaaaccatcaatacgagccaccatctccggagtcagataattctgccaatccccaactttccctttcctgaaatacgcactgttggcataaacagcaggacgatcttctctatctttctcacctttgttagcttcaagattcttcaaagtctcaaagctacaaagcttcactactttctcaacaacat

SEQ ID NO: 171395 - DNA, 460 bp, Arabidopsis thaliana
ataaaagagcaatgagctcttttgaatggggggtttgttttagacaacagacggggtaatcaagtgcttttctttatgcaactaatagaagcgttggggtctatatggctaacattcccagcttacaacaatcgtatatgattagctcgagtctcaatagattgaaaagatgagcctccttgttcgaccgatttctcgacctcatctttcagaactttcattctctcacgaatcttatttcctttactttgctccattaacaccctcacagctttctgaatctcctttttttcaatccgaccttccaagcgaattccaatcttccaaatatcgctaacaaatcttgaatgtcagcattcgatcccaacctcctggtaggcagatcataggaaccccttagcatatgctctatagcgttgagttccaaccattgggtgtcaaaaaccctcctgtggcacga

SEQ ID NO: 171396 - DNA, 411 bp, Arabidopsis thaliana
ggtgagaaattatttggggtattattatattttgctaaattattaaacaagcacaatacacagatagcatccttgaaaacattacatagtagggctctaagacagtaagtaaccctgatcaagcttaatcaaccttgaatttgacattgtgcagacggagaactactacaaggatgcggtttcgcgggttctgaatttcttgaagaagccatagatatggtcagtgacctcgtcaggcttctcttgatggaggaagtgacctacaccttccattaccaccacttcttgtagaaaaggtacgtgcttcttcaaaccaccttcatgtatgtattcctttgttccggggatattgtatgttatgtctagatcacccactatgaatttcacagggactttgatttgtagaccggt

SEQ ID NO: 171397 - DNA, 170 bp, Arabidopsis thaliana
ggggaagcatagctaaattaaaacataacaaagccccccaaattttcgcgggtcaaaattcagcatttacagaagacaaccatgggatcttttaaccctttaggagacataagggaaaatggcatgccgattagccggataattttaaaacttccggggatcccaacggg

SEQ ID NO: 171398 - DNA, 120 bp, Arabidopsis thaliana
ttttagcgccccccttattttcttcttgggcaattccccctccttgctatatatacctgaaattggacttttataaaacaaacttccatttttcgcatggccgcttccttactaacaatg

SEQ ID NO: 171399 - DNA, 170 bp, Arabidopsis thaliana
gttcttatccaatacttattttaacattgcaaagagtttcagggtttttcttctgggttttgaaagaaattttagggaacaaatggaataaagaggcatcaattcgatcactcagagctccaaaacaatgggactaaaacgcaaaacgaaagcggtttttttttttgaaa

SEQ ID NO: 171400 - DNA, 424 bp, Arabidopsis thaliana
aattcagttcttttgtttgtttaattatcaataatcatctagagattcagacgtaacatattctataattattttatttttcagaaccttatctctttgttgaagatacaaatataaacgtacgacaaaatcgacctatatctactacacaataaacatatgagaaccgaaatgaatgatgttgtcatgtgtcgctatcgctccatgtatcgctttcgccttctccatcgtcgcttgctacagcctgtcggatagagtttgccttctctagaatcacgctaatattggtgttcattgtagtttctgatgatgatgtctttgtcctgaccacacgtctcaagttgaattgtttagttcgaatttgatgcaagaagtctccagcttttgtctaatttgtgttgacatgactttgtttataattcct

SEQ ID NO: 171401 - DNA, 175 bp, Arabidopsis thaliana
cttaacaaacacagatttttttattacaaaagaggggacattggtttggcacaagaaacacccctgggattttatacaagaaaagccttttttacgggggttttattctcaccccttgaattacaaaacattttttccaggggggggggactaccgaccttgaaaacccatttta

SEQ ID NO: 171402 - DNA, 436 bp, Arabidopsis thaliana
gtaagaatcatattcttattcaaatattgttttgctcacaagcagatgcgaacagttacttactagtcacacaaacagatacaaacaagttttacattatttttaggacaagtaaaaaatcatatcttgagtttaggagatcttgattctctgagcttcctttcttctgacagaacttttgcaaaccttttgagagcttcttcattagtcacattttcggaaataggttgataatggccgctttcgagattgacacgagagactcttttctttaataaagcttcaccaacttcaacaagaccttccatgttcttttctgttgatatgtccactgaacctaagtcacccttcaacgaatcatcatcgatacgtaaataattcttctcggaacgaagagcttgaaagacgacagagctttggtaatcaaccatgtcat

SEQ ID NO: 171403 - DNA, 402 bp, Arabidopsis thaliana
gacaaatcgtttatgttggagatagtccttattcattattcattatttcattattagagagaatgacaagaaaatcattgtgacgaatgataattgtgccgttttcaataggctattttcacacaaagtgatcagatctccccgtcccacatctcggcgacaagatttgatgggacctttcttagaggtataaacctctccgtggacgtttctgaactgaggaatctcagttgaaattctctgtgtctcatcctctgtcaaagaccaatcaaatatctttagattctcttctaatctctctttggtaaagctcttcactaccatgctcactccttgttcataagcccatctcatactcacctgggccactgttttttcctttgcttctgctatttctttgag

SEQ ID NO: 171404 - DNA, 329 bp, Arabidopsis thaliana columbia
gacgttaactctcaaagactgtttgtttcatatttcattcaaaagctatttgttccaatactttctatcggtgtccaattgcacaccaatgtttaatgaactagcaaacaagccagattcgaaaaagaatatacaatgaaagtagcattctctatcacaaatttcaggaggaaaaaaaatgaatcttgcttgagtaggagacagatcaagaagaagtacaacaagtgctggtcttagcgggaatctcctgtccagaacctgggatgagaatcttcttaccagccaatgaaccggggttatttgagtcgccttcagatgcaagattcttc

SEQ ID NO: 171405 - DNA, 470 bp, Arabidopsis thaliana
ataaagattctttcatctaaaagagtaactaatctaatagaactcttatgtttgctttaagttacattgtacgtaaaaaaagagagacctacaagtgtgtgtattgtgtaatgaatatactttagaaatccttaaatcaactaatccgtggtatgaataaatgatcttgtacgtatatataaatatatcttttgctcctagatcaagatgatggtgaactttgtctgccttcaaaatctctcctaataatctccagaaccatctcgttccatgtgtccactggccctggcatgcaccaatgcaaacagtcttgtggaggaggctgaccgtctggtccacgttttgtgatctttttcgggtcaggactcctgtatggaccaggatgaccgtcgtggcgatacccgaaagcctcagtgatatccattagcttcagcttcttcgatctattcccgagcttatcatccgcgaca

SEQ ID NO: 171406 - DNA, 309 bp, Arabidopsis thaliana
ataatattgtttatttttctcctaatttaacccccttaaacttacaaatttatgttcaaaccctttatttttttttattgggacccctataaaacttatttctatatggaaacatcaaaaaacaaaaacagaacatgctagatatttcaacgaggattaacttgggtgattggtgcttcatctacagaactagtaaaagacttgctgctcgattgaccaggcaccattccctggcttgatgggttcgatcctggtccgttcctgaagaaaaatccaggtggctgaggcacaggtagagtaattgagctg

SEQ ID NO: 171407 - DNA, 427 bp, Arabidopsis thaliana
attcataagaaaaacctagatatgaaattcaggggggttcatcataagatccacgacatccaaaaacaacttccaaattccaaaaaaaaagcagtattcaattcaaaatgatagagatcgagatgaaaatgattcctgagctccttctttctggtaaacgtaggtgagaccacacttaccacagtagtgacgatcgaaatgactcgccatgaaagtcccagcaccacaggttgcgttagggcactccttcctcaaacgctgaaccttacctgaaccatcaaccttgtagaactgaagaacagcgagcttgaccttcttgtgcttgtgcttgatcttcttaggcttggtgtaggtcttcttcttcctcttcttagcacctccacggagacgaaggacaaggtgaagcgttgattcctttggatgttgt

SEQ ID NO: 171408 - DNA, 302 bp, Arabidopsis thaliana
gggggtcaaaacaataaccacgttgatgaatcatataatggggcatgtactgttcttaaagctttgaacaacaaacaactggatttttaacttttcaacatttaaccatcactctaaaacttttttttaccaaaccagatggaaaatctggggtcaaaaatactaaatgaaagaatggttgggaattacagctccacaacaaagaggaatttacactttttcccatcttctttccttttgggtcaggaaggcccctactttttcacctcaaaactaaaacaatcacagaggaagagagcttt

SEQ ID NO: 171409 - DNA, 309 bp, Arabidopsis thaliana
tttttttttttttttttttttttttttttttttttgtttgtttttttttttttttttgtgttttttttttttttaaaaaaaaaagctgcaaggtggttttggggggaaaataacaggccaaaaaagctccccaaaattttttaggcccattttttttaaagcccttgaaatccgtcccccataagattaagatttcccaacatttccaaggcttataaggggggtcctttaaagaacatttgaacccaggcataaatttttggcttttaaacattacaaaggggccccaggggcaagagaatggccaag

SEQ ID NO: 171410 - DNA, 292 bp, Arabidopsis thaliana
gagctctgcaaatttcttcattatctaacttgggggcaaacaaagagctatcggcgcgattcgggatacataggaaagtccaaacaagcctttttttatgaaggtatgtttcaacatgctggggcccatgggtacccaatacagcagggtgtattctccaagagaggccttaccaggaaagcgaatttgcaaacataataccttgtcgcaagctctcgcttgcagctgcaaacttggtttttaaactggtttcaccaactggctttgctgcagcttgaaactggttcaaaaa

SEQ ID NO: 171411 - DNA, 432 bp, Arabidopsis thaliana
tttttattttttttttttttttttttttttttttttgggggatggaacaaacccattcttgcaaaacatttattctcttcaaaattcttcacctcttaatcttaggttctaccacataatatcatttttcacatttacaggtactaaacaagttttagtcatttacaaacgaccttttagaagctttccatggagtagtaaatcaagatttttccctctcaccccgatttttcaacatgcaaacctaagcgcaaacaccgcgattaccggtgcagctttgtagaaaacctccttcatacttttttccacactgtttatgattgcgtgatctttcaaacttgaacatggcttgttcgctttcctattgacatgaacaatcacctccctgagtttattcacagcccatgacagttttaccaaactcaaaccaag

SEQ ID NO: 171412 - DNA, 535 bp, Arabidopsis thaliana
  unsure (1)..(535): unsure at all n locations
gtaaagaagaatggatggatgaattattccaaaactctgtacatgcatgccaaaaagaccacttgttaagttgaaaagaagcaaatcgatcatagatgagtaaaaaccaccagcttgtaggtggaaagcaatactagacgaaataattgttatgagaagacacaataacgattagaaaacatcgatcgaggaaggccatgtaactgaaaatctctcgaaaagtgactgtaacatccactgccgagaagatgtgcacacttgcgcatatatgtccactgccactaaaattgcacttaaatgttggtattcgagagaatcaaatccaatgaagcatttccacaaagcaatatggaataggcaggagggttacaataaaaactcatttttgtcagtttaggaggatctcgaaacttttgattgacctcagggaactctggcttttcttatcatgctttaattcatccacttnctttgtcttccctgcantcttgtactgcaaatctacactcaccgcagcttattatctaagaacata

SEQ ID NO: 171413 - DNA, 341 bp, Arabidopsis thaliana
atgaagattggaatgaaattttattagtagggcaaacgaaacaatgtggttgtgaatatacaaagttttgcttctccaactgaaatgtgatatcaatttacccactagatgctttaaccttcaagaaacttaatattgactgtccatgaaactaaccagaagctcattcaccatgcctcggtctggcatcttccctgctgctccatatattggagccaagcctcccgtgatcggtcctgggtttgcttttacagtttccacagcttcacgcagatcccgaaggaagtcatcgactacagggacgtgttgaagagtaatacatatatgaatgctgttgggtc

SEQ ID NO: 171414 - DNA, 187 bp, Arabidopsis thaliana
tttggccgacctttttttttttttttggggttaggatgctatgaatggcaaccgagagaagattcaaatctaacagagcctaaaaaggctgttcaaacagtcatgattgttgcacatgaacactagacctgaacgattacagggaacaaagatacaggcagtactcagatgattgagggcacctacg

SEQ ID NO: 171415 - DNA, 253 bp, Arabidopsis thaliana columbia
tcttttgaactcgcaaatttcaagactgcaactgtagaagacattgcaaatgttcacgacaaggcttatgtctttggcctagaaaagtgtaggcaatggatgaggcttcagattcgggactaattttcattgaaggctctggaccaacatatgccacttcaacgacattccaagattcacttatcgcagcaggagccggaatggctttagttgattcagtgatcgcagcatccagaaacagcgtagatccacc

SEQ ID NO: 171416 - DNA, 461 bp, Arabidopsis thaliana
  unsure (1)..(461): unsure at all n locations
aacttaatcacctgaattccttaatcttaatcagtttttgtacataagtgctcaataatcctacagaataaatagataaaaaatggctataacacttatgaacattttaacaacataaagaagaagtccttcatcttctctttttgccttccttttatttcatccaatatcagagagatgtaataatgtcatcaaataatttggccttgggagggttgttatctcaaaaccccatctttgttgctataatatatacattgtgccctcctcaagaccgctaaaaaaccttcatcagttagccttctagcattgtctgtaaccgggctcgagcttcatcggaaacacagaaccgtatccttcttctctgaggagctgnggatgatgagaagcagatgaccaccactgtaacgttatctgatgagtctagccttaacgcttcccttccaagttccatagcgcac

SEQ ID NO: 171417 - DNA, 391 bp, Arabidopsis thaliana columbia
aataaatatattatgggatattagaaaataaaaaaaactggaaccgggttttttagacatatttacccagagcaagcaaaaccaatctatatgtctggcgttcgggtgaaatcaatgaatcaaagcttccccacttaaaagaaaaaagaataaaagcaccaaccacaatccaaactaatttagatgagccaaaaaaaaacatactttaaaaagcacaaggcaaagggtgtaagagtgggccacttcttctttctttttttattcttatggaaaccaaagatttgcaggagaggagagattggcattaccgagaaggaacaatggatgtggattggactcatagttgggatcatcatccattggcggagttttctcttgcttcctcggtttc

SEQ ID NO: 171418 - DNA, 441 bp, Arabidopsis thaliana
agcaagactacaatcgtatcacattccatttaacagttttacaaacagtttggattacaagaaaacaaacacaaagcacatagagaaacagtgatacaacagcttaagaacagtaacaacaaagaagcagatacattcatacaatcaaatacagaaaatcagtaaataatcataaacagagagatacagattccttccttctatggaataataatgcgcaacgaacacaaacggacctttttttctgttgtcatggcatcaatgtaagcttagcatcaaacacaaaacctcgacacaatccatctgcataaccagggacgccctcaatccatctccaaccttgccaacaatcccacattgcaagcttccccatccttttagcagagaagtaaaccctatctccacctccaaaaactttaaacttactcgattcttgaaaac

SEQ ID NO: 171419 - DNA, 440 bp, Arabidopsis thaliana
gatgagtggacatcactttcttggagaacaaggtcacccagtgaacaattgcgtctctacttcagaacttgggctactctcttcatcacctcttccagtactttcttgattcttatttgaccaaacttcgctttcatgagatccccacttttcagagagcttctcgttttctgcagctagagctttctcctgcaaaagttttagattccaatttgtaaaaagcaagcacaagaggcttacttacttggaatattacacaatttgcatacatacttatatctgtttatatacactcataaaaactactttaccttttgcttgagctgctcaatttgttccttaaacacttgagtctttcttgctcgaatacatttgacacttttctcaagctgttgctcaatctgttgcagctcctcgatgagcatgttcctatgccttct

SEQ ID NO: 171420 - DNA, 337 bp, Arabidopsis thaliana
gggttaactaaagcttaaccttttttttttttgcctttcaagcaccccacttttccaagattttttttttaattaattaaactcaccccttttccaattttccccaccatacctgcacactttgggttctccccttgcaatgttgacacatccccttttgaatccccctgagaatggacatgggttcatacactccctgttcaagcgtttccatgctctacatatcttctgggcaacatgtgttcttgcttcatcaacagatgatcccttgtactcgttcaggtaacactctacatatgacccatcaagttccatcttggttctcatccttggcact

SEQ ID NO: 171421 - DNA, 309 bp, Arabidopsis thaliana
ggaaagggggtcaaataaataaatgaatgaattggggagagagaaatcacagaggttttgcaagaaagaaacacccccccaagaaggaaaaatttacccttttggaatcttctttccttttggttcaagaaggcccccctccccccctcagactaaaaagaaaccggggaagagcttttttagaatccgagcttttcactagtgcaagaataccaattctgggttttccagtagctttttggccggtttgacactcgcaaagtctttttcgggcatcgaattcgaaatctcgtttattgaaaagggaat

SEQ ID NO: 171422 - DNA, 490 bp, Arabidopsis thaliana
  unsure (1)..(490): unsure at all n locations
gttggcaaaagaattattctcgttaactttaatatcttatgtagtctttagtgactcggtttcgttcaattcttcttatggaacaaaatcagaaagtcaaaacaaaacccccttaatgggttatatagtacgctgtgatataatctggttgcgtcattgatagtagtgtacaaatttactttgctagtatgtttatgtctctcgttctgtctatctgagctccggtttagcgggacgccaaaatcccttccgaccaaccaaaaaccggtcctcgtatattttggttgaccaatgaagcgaaccaagtatggattcaagcttcattattgtttccatgttgncttgtaccacaagatatccacctggtctcactatccgatctatctcagctaccancttgtacaatctcacaccttttggtgagatcacctaggaggaaactggaatgtaacagatcgtatgttctagggtaagtgttgacggactcaca

SEQ ID NO: 171423 - DNA, 408 bp, Arabidopsis thaliana columbia
gcttgtttaagacggtgactatcccgaaagtggcgtggtctttcagcggtggcgccgtcgtggagcttggttcgaaagggatattttacgtgtttaagatatctcaggtttgtctggcgtttgcagggaatagcgatgacagtaacgctgccatctttggaaacgttcagcagcaaacgctagaagttgtgtatgatggtgcgggtgggcgggtcgggtttgctccaaacgggtgtagttaagttagttaatgaaaaacagaacggggtaaattttaaatttatggatttggcacaaattagctttatccttaatcaagtgtgtaatttgggtaaagatcggaattcgtgatggtctttgaagtaattgtatagtaataagtgtgcatgatacaacaattacaagaac

SEQ ID NO: 171424 - DNA, 398 bp, Arabidopsis thaliana
cccacgcttccgtccacgcgtccgagattctagagatcttgaattcatttctgctttgcaatgcttcaaacggcgtattgcttacgcgaatacaagtttcgaccaccttgttgggtggagtacatcgtctatccggcgtcacaatgagcttcctaagcttcaacgtggtccagtcaatgagaagtatcctcacattgtgaatgttgaagcaccggatactgcaagtaactatgaggaagatcattcaaggaccaaagcagacaggttcaagaacttagatatggaagaggagatgataagagaattaacaaaactgagctgggaacgagttgatgttagtttcagaggaacgctgcaaagatttctcgctcacaataccattcaggtgaaaacaaaga

SEQ ID NO: 171425 - DNA, 249 bp, Arabidopsis thaliana
cttgagtgtttctaattaaaaagcttttaacctcagccgataaatctttctgcgatcatgcccaccagaaacatcggcattggtggagtgcaagaagaggtctatcaccccaacgcacttagggcggggctcgctgagtttatctggactttgatcttggtcttcgacggatcaggcttcgggatggcttgcaacaagatcactgacaatggagcaaccactccttccggtcttgaagccgttggctta

SEQ ID NO: 171426 - DNA, 342 bp, Arabidopsis thaliana columbia
tcgtctaagggtggtccgagtggaccgggacttttgcgttgaacactctgacttacagagagtattcgaacacaggagcaggggctggaactgcaaatagagtgaagtggaggggctttaaggtaattacggctgctgctgaagctcaaaaatatacggctggtcagtttattggtggtggaggctggttatcgtcgaccggtttccccttctcgctcggtctttgagagattgttgtgtaatgtgttcctacgtattgttggctacaaaaattattgattaatattgtatgaagcaaatcgtgttgtcctctttgttttgtttgggttgtgtactttttct

SEQ ID NO: 171427 - DNA, 313 bp, Arabidopsis thaliana columbia
tttttgacagaagaacgtcccgggacaaacaacgctactgttactgctctcatttcactgaaatggaaggaattgagtgaagaagagaagcaagtttacaacggaaaggccgcaaaactgatggaagcatacaaaaaggaagtggaagcttacaacaagaagtctgcggctactaccagtagctagataaatctctcttagtattgaaatcatgttcaagtcctgttgaacattccttattatgcatcgttagattactctaagtacttttatgttttaactctcgctgatcattacttactagttactatct

SEQ ID NO: 171428 - DNA, 153 bp, Arabidopsis thaliana
tctttttatccctaagtctcaacaaaacccttatttcaaggtagacgaagaaagaatgagttacagcgtcggtaaagcatcgaagcattttgcgatcaccggtggtgggatcacagacatcaagcttgcccagaagttttgggtgttttcatg

SEQ ID NO: 171429 - DNA, 454 bp, Arabidopsis thaliana
aaccaaaaatttaattgaaccggtaatggttaaagattatattggtttatcgagagtttgttacaactataatagagaaagatcatctctaagctgtgttcattctattatctttggagtgagaacacttagtcgtgaacctctggtagaactcttgatgatcttgtaaacttgagatagtggattgctagtctctgttctcgccgagacataggatcaatcactgaatcacgtgggtgtcattcttctccgtcttcgttccaagtgtttgattgtatggttttctcgagtgtgagtctcttgatcgttagtagagagagtccagcttcgattccggctgaagatttatagaagattcacaacatagactaagggttttgttcaccgtgagggtcttataaactctttgaacagttcaaccttatggttttttgctggattttcaacggaattg

SEQ ID NO: 171430 - DNA, 270 bp, Arabidopsis thaliana
gggggcaggggtcaaaattatattaccccaaccacttgcccgttaaaaaaaaccaaccccaaaatcagataagggctggttccaaaattaaaaacccctcaacccaaaaaaaacaaaaaagggtttttttgggggggggaacaattaaaaattttttttatcaaacccccctttgctagaagcctaaaaaatttacccctccaaaccttgaaaccattatatgaacgggggggactataaaaaataaaacaggggggccctgcttttccc

SEQ ID NO: 171431 - DNA, 108 bp, Arabidopsis thaliana
ggttaagttattttctagggcttattctcatgattggaccgagggggcttttgttcatccgggggagagtgccaggaggtgagatccgaggaagtatccttacacttg

SEQ ID NO: 171432 - DNA, 270 bp, Arabidopsis thaliana
aatacgtatgtttttttttgtttaaggttttggctggcccaaaaaacaacttatcataactgacgtaaaaggggatcaacccccgaaaagaataaaacaacctcaaattccaatgttagttcttcatttattaaacaacaaagcctccattggctttaataacttgaccgttaatccattcaccaccattaccgggcaaaaaccctacaatctgggttatatcctttgactcaccgatcctccccataggacaagcccctgcaagcattt

SEQ ID NO: 171433 - DNA, 211 bp, Arabidopsis thaliana
gtagaactatctccatatcaaattaccaggtattcattacagttacagaagggaaataaaatccattattacatgaatttaaaaaaatcatgattctgtctttattttgattaaaacgagtctaattccagactacattataacaaatggacgaaaggagagtgaaagatttgacgaacatgattaatctggccaactgtcatgaatcacg

SEQ ID NO: 171434 - DNA, 222 bp, Arabidopsis thaliana
catactaaaggggctgattttgaatataacaggattgttcacaaataccccataacatcttatgcatttttttttactatggggggggggatatataacatgagttaaaaaaatagagttgccaaaatatatgaaaagaatttaaaaatggaaaaaaaaaggagttcctttctttttgcgatcacaaacttaatgatcatcataatggggaaatttctgtgc

SEQ ID NO: 171435 - DNA, 267 bp, Arabidopsis thaliana
cctaaaattacattagatactcaacaacagggaagcgaatatggaatcatggtttcctacagagatgcaaacacatggaattgctaacgctcacacttctgataagaagacttagtcttcttttctcaaaatcaaatggtaattgcgattgaaaaaaaaagagacagaggaaaaaggaatctgaacagaatcatggtcgacacatgcccaattacatgaaaacgacgcatatctacttacttatagaaacgccgactatcaagtcac

SEQ ID NO: 171436 - DNA, 427 bp, Arabidopsis thaliana columbia
cccacgcgtccgaggatactttgtatggtcattgttggataacttcgagtggcaagatggttacaaaaacaggaaatattatcttcagaggcatcttttgagtatgcaagaagctgtttgcatcgacaaagtgaatgttacaggatactttgtatggtcattgttggataacttcgagtggcaagatggttacaaaaacagatttggactctactacgttgatttcaaaaataacctcacacgttacgagaaagaatccggcaagtattacaaggatttcctcagtcaaggtgttcgtccatccgcgctcaagaaggatgagctttaagctatttctgtttcaatgtgtttttcctatgttttactttgtgagtgaccaagattcatgaggtcttggttctaataaaaagagtttatttttcttctc

SEQ ID NO: 171437 - DNA, 304 bp, Arabidopsis thaliana
tttttttttttttttttttttttttttttttttttttttttgtttttttggttttttttttttttttttttaaaactggccctcttacaataaaaataaataaaaccggtccaatattaaggactcctacagatcaaaactcaaggggcatttacatatataatcacacaaatccctggaaaaaaaaaaaaaaaactctcccttttttaaataaataaccaaaacggaggaggggtcctttaaaaccggcatccaggactttggaaaatggttaaaaaaaaaattttgggattttcatttttgg

SEQ ID NO: 171438 - DNA, 206 bp, Arabidopsis thaliana
cacaaaaaatcggtgaactgacctaaaacatggggccggggggggattaaacagagaattccaagggggccttccacccataaaacaccacaggtcacatttttactttatttgaggggttggagattagcacaaacaaaatggggttactacacattttttccacagcgtgaagaaacttaccaaaaaaaaggggattcagaagg

SEQ ID NO: 171439 - DNA, 254 bp, Arabidopsis thaliana columbia
ttgacgcgtggggaaatctcgccgccgtttgaagaaagaagaagagatgggagttttctcattcgtgtgcaaaagcaaaggcggagaatggaccgcaaagcaacacgaaggagatcttgaagcttcagcttcttccacctacgatctccagcgcaagcttgttcagactgctctctccgccgattcatctggcggcgttcagtcttctttctctcttgtctctcctacctccgccgtcttcgtggtggtcattg

SEQ ID NO: 171440 - DNA, 172 bp, Arabidopsis thaliana
gggggtaattctctttgaagaggggagagagcgacatattttagagaccaatgatttttttatagagagaaaactttttgaaaccatataaaaagttgtggtttatgcctacattgatacacattcgccggacaagtgacagtttgaaagttgaaaacaaagactaaagttt

SEQ ID NO: 171441 - DNA, 193 bp, Arabidopsis thaliana
aaagcaaggggtaagtttgccattggaatttcaggattcaaagatgtatttttgatctatttaaactactctaccttccaaaacttttcaatttttttttgttgaaaagaaatatacccccttggagcggggttaaagagagatcctaatggccttttaactcctgaatataatggcctagttgctgggcccc

SEQ ID NO: 171442 - DNA, 397 bp, Arabidopsis thaliana columbia
cggacgcttgggtggcaatttaccattctcaacctccggatacatcttcagtggtcaagcctgagaacaatcctccacagtaggatttctgcaataaagagtttgtacagctaatccaactgtccaacatgggtttttcttctgctctaatgactctggtttcttctctcctctctcacccacttgaaaggtaaaaaagtgaaaaaggctttgtagatggaatcaatgtaggatttgcagtagagggaaaaaaaatgtcaaaaagctcaattgatcaagtattattgtaatcattgtacctttattttaggtggactttgatgaaagcaactttttgttttcaagactttagtgggaggttgaggaaggagcttgaagggtgttatttattagtagt

SEQ ID NO: 171443 - DNA, 474 bp, Arabidopsis thaliana
caaaagaatctatcgttctttacttatacgtgtcttctcttctctaccaaaatcatacaaacaacatcacttataagaatgtaagaaagatacaataattaaaaaaattaaaaacaacgttaataaataatgttgctactacaataatgaaatttgttggttgtatgatcattggtcgtaatttttgtgtatcgtgtggcttactcatcactccatatctctaaggctttcactagtcaaccacagcttcttctggacaatgaatacaacattgtctgaatcttgatctgaatctgagtctgtcttggtacctacttcttcccaatgcaatgcctttagatacttcttcacaaaatccaccactctttgtttatcccttatgattataaacccgctcgggcgcagtattcgatccatctccagtaacaaatccacttcactacatccttttttcttgatatccgatataatatc

SEQ ID NO: 171444 - DNA, 263 bp, Arabidopsis thaliana columbia
aacggcgtaatttgggcttcattatgcattatattcttaatgggtctacttatgaggcccatttgcatatcaatgtcttggtattgttgttttgtttctctctttttcgtcccgtgacatgttaaggagccttaaaaagccaacaaaaacttgtacctggctaatagacaaaagaaatactcttgttttactaaaataggccatgaaagtgattccctcaaatcccatgtgcacaacctgatgactctgtacgggccttcttt

SEQ ID NO: 171445 - DNA, 246 bp, Arabidopsis thaliana
agaagaaaaattatacaggagaaaactaaaatcatatacatttctttactcataactcctttatacattgttaactgcttaagtttaatgaaaaacacaccaaaacgagcggctcaaacttaatttcccgtcaattttccaaagatatgacaaggaaaaaataacacgttatcaaaggggaaagtgattcacacagagcccttgggctggtgcacaaccataagaagcctaaaatcaccaacactg

SEQ ID NO: 171446 - DNA, 239 bp, Arabidopsis thaliana
agggggaaccatattaatcttatttctccttaaccggattcggtttaccatagaccaaacccaaaaccgggttcaactaattacactcaattcctcgggagattgttaattaaacagtaaacaaccctctgactcactagacttctgaatctttcacaaaagaatacgtttttgtaggcttttgctttttaccggtgcttacaagcttcctctccaccggattctccttcaattctcca

SEQ ID NO: 171447 - DNA, 270 bp, Arabidopsis thaliana columbia
accaaaacgatatatataagaattttaggcaagtttacgaaaataaatagaataaacaaaaggcaaaacggttcgattcagttcggtttaggtcttggtccgaacatatgtcatcaccggtccactgatctcaatctcaaattcactcgactcgactccaccaccgtcgtatgcttcgagtcaaactcagtacgccgccgtcgagagtttccaagcggaggtggtaatgagtggacgagtgtgccaacccaacatcaaacatccattact

SEQ ID NO: 171448 - DNA, 329 bp, Arabidopsis thaliana
agctaaactattttttggttccgggaaaaaaacccatttaatggcctcctggggacttttaatcccggaacaagtttttcaaaaaaaccccccaaaaaataaaagaaaaggtttcgtcagattttggggggattggcccgtttaaacagaagaacatcaattgggtcttttaagaaggggggacctaagaaacgacgggagggatgtcatcaagctttcctccgtaatacctgtagccagcctcctgagccgcaattgcgaaagggctttgccgttttttggcgactggtttttgacgggccaactttggaatcttttgagctgggcct

SEQ ID NO: 171449 - DNA, 223 bp, Arabidopsis thaliana
ggcaaaaaaaggggtttttttcccttttttattattcaacttttacaactaagtccctaaacaacaaacatttgcatacctcatggcaggggtgcccaagtttttttttcatttttttgataaggggaatcccccccccttggtgggaaacccaatggggttatcatatccttttaaacccgggcaattcatgttacattttttattccgggggtttgccttt

SEQ ID NO: 171450 - DNA, 255 bp, Arabidopsis thaliana columbia
aggataacagtttgggaatatatataaccgaattatttaagtgacgtctggtataactagggcaaaaatttctgactcgttacagaggaaaacgaaataaaacccttagggagcttcagaagtttttaccaagttctatctttttcatgagtgtcatggagtgatggagaatagaatccaagattccggccaccgtgaagacaccaccaataatggcgcatacgttggtgatgaaatgtgagaaggacttggagt

SEQ ID NO: 171451 - DNA, 455 bp, Arabidopsis thaliana
cttcgaaaccaataacacacgattgtaaaattgtaactgtacgaagtaacttctggatgtgtgatatgtttaaagctcttttctttttaagagataaataaaaactctctacgaggttttttttacccaaaagattctcaggtaaaggaagaagaaagaagcatcatcagatcccagagttacatttcgaaaacaagagatgagagatgcagacaaacatctttacatgtctgtgtaatgctgtttttaagacgacacagcgatatatatattgcggagacatgagatatgtgaaaacctgtaaagctaagatcaatgcattggatgcctcggtgatctcggacgaacaggcgtctttgaaggactcacccttataggtaaagaaccaagaacaactccactgcagttgagagcagctattgcgctttccgccattactaactctacaaaagcaa

SEQ ID NO: 171452 - DNA, 267 bp, Arabidopsis thaliana
aataataagggtaacggatttaatgtgggggatttttttttaaaaaacgttacagagatttctatgcacataaattaagttttgactggtatatcgcgtatatgtaaaaatcaaattttctggtaagaagagaaacgccgagacagaggtggctaatgtactccttcccctggagctacggctagagcattcaacaaaggttgaagagctttgacaacgatactcatattcgggctaaaatctgcttcatattgcacacacaacgca

SEQ ID NO: 171453 - DNA, 259 bp, Arabidopsis thaliana
  unsure (1)..(259): unsure at all n locations
aacaagagcaaaatttcctggtgtcattggagccgntgctgagtaaatttcgtttcttcgatatcaatcaaaaaccaaaaaaaaaaacatctttcatctttggctccttctttccttttgaagacctgcaaatatttctcgtctcgatcaaagctttgcgacagatcacagatgtgctttcgatctctcgtgacaacatcttctatcaatcgagttcaagttatgtctcccttatttcacacgatccaagatcttgcca

SEQ ID NO: 171454 - DNA, 392 bp, Arabidopsis thaliana
ataatgctaaccctttttttcctcctcaatttcaatataaactcatatcaccaccaaaccatcattacaaattctaaaaacaaaactctatgaaacacataaaacagaaaaatatatatttagtctcttatatatataacatcactgcatttagaaagtattaggctgtttagcctgagagatcatctggacaacctctctcatggtcggtctctcaacactatgttcttgcacacatagcattgccacaaagaacagttccatggcctctgctaatggaatattgctcaatctctggtcaatgatcttcaccacaccttgtctgttacagtttgtttggatctttgaccattgcacaatgtctatcccttcttccacaaaattatctactg

SEQ ID NO: 171455 - DNA, 279 bp, Arabidopsis thaliana
tcctttttttttttcctttaatagaacaatttcttcatatattcacagggagtgttacaaaggtaaccttaacaactagtacaaccacacagcttccattgctgcagaggaaaagcaaatgaaaaaaaaaacaatcctaagcattatctgatatcaaccagtttccagctttccctatcttcgtaatgaacctaatcttcttcagtaggcttagatgaaccagccttcttggggagaaggagattgtggatgttaggcatcactcctccattagcaatt

SEQ ID NO: 171456 - DNA, 262 bp, Arabidopsis thaliana columbia
acaagaaacgaaagccaggggagtagtagatactatttcttgctctttgttgttttcttaaaaaggaagttgaacaaaagaagaatcatacaaaataacagcgatacggttacacacaagcaagtatttctcttttgtttgggtgacttgtattttcgcaacaatagccacttttttttttgccattcgagagaatgcatgcaaggttgatcaaaatcattggagagttgatgctacactgtacgacttcttaatcactcat

SEQ ID NO: 171457 - DNA, 236 bp, Arabidopsis thaliana columbia
aagaacctctttgatttcattgattataattccaatcactcgtttaaaagcgaaagaaaaaacaattacaccgaaggaaaattcacaaaagagcaaggggaaaacacaaatataagaaagggaaatgaaaactgcaagggactgatttagatttgtccagagagatcacaacttcatttattcttgagaaatctggtttgatgtgtttagacgttggcagcacttctgaatgatcc

SEQ ID NO: 171458 - DNA, 201 bp, Arabidopsis thaliana columbia
cccacgcgtccgcccacgcgtccgcggacgcgtggggagagatcatgaggtcaccggtgcaactccaacacggctcagacgccactaacggtttccacacgctgcagcctcacgatcagaccgatggttccgatcaagagagtgtggtctcacgcgcggttatgcatgttccctgaacaccgttgcgatgcaccacacaca

SEQ ID NO: 171459 - DNA, 261 bp, Arabidopsis thaliana
agtataaataatatcatttatttgtggtcattgtcatacaaaactggaatcattctcctaaaagttaatctttccatcaaaagtctgtccaaatccccaattgtttggcatcacattattaaaatcttttgtaaccccatcactcgtcgtaaccctgaatgaaataccctgaccagtcaaattaacaccagtggtccagttttgtccccagttcttttgcattgttatccacccggtcttgtctcctttaacttgcatcaa

SEQ ID NO: 171460 - DNA, 262 bp, Arabidopsis thaliana columbia
aagataatgtttattcataaataatacacagaaatgttttcaataggatgtgaagtaaataaaaagcagaataagcagagcaaatctttgacttatcctaagacattgcttgatagagaacacaaactttgaatcttgcaagaaacacaaatttgagtgacattcaagattttttcttgatctgatgatcatcaaggattccagaggattgtagtctctgcaatcatggaagtgacaatgtaaggatccatgttcgaagctg

SEQ ID NO: 171461 - DNA, 287 bp, Arabidopsis thaliana
ccttaaattactgcacaagctctgcctccactggcttctgtttaaatccagcccttatcatcctcacttgccattgcttgtacgtctcaggtctctccactctatctactccttcacatgctatcacattcatcacttctctcccgtaaaactccccttcgaaatgtatcctctccgggttttctttggacagagtcgcaccaaacaagtcaaagagtgccgagtagtgaaacaaagcttctttgaaccgtgtggtgaagaacggtgcgttgaaagatccattgact

SEQ ID NO: 171462 - DNA, 258 bp, Arabidopsis thaliana columbia
ggacgaaaatattacattcgataaattgtacataaccgcaaacaccaaaacctcaaggtggtggaaatatttttattcaggtccatatagactagagttttaacttttaagctcaaagacaaaagaaacgagcacacacacatagcacgacacaaactaaaccacatcttcttattttagatcaaactctaagtcttccttttattttatgatcacatttttattattatggttttgtgatctcgaccttcattcatc

SEQ ID NO: 171463 - DNA, 262 bp, Arabidopsis thaliana columbia
cattcttaaccatgaagaagttcaaacggggatctaaccaaagtctagcaaaggaccagacttaacataacattaaaagttgttctaccaaactcacatgattctccactgaagagaattcatgaacacaataaaaaaaactacaggaacaaaacatcagagtagtattttaaaacctcgtttacgagagacataaacagagattagggagaattttgcataattcttctacttagcaatctgagcttggtgctcctgctgg

SEQ ID NO: 171464 - DNA, 270 bp, Arabidopsis thaliana
aacttaaagattcgaatgcttttaaataaaaaggttcaacgataagtgaaagaaattagtctccaatctccatacgcatacgagcatcctaattattttacatcaattctcagttacttatatcacataaagcttaaccatttattcttcctcttcttcctgcttctccaatccagcaaccaaaagtagaagaccattggattcttcagttcaaatcaaaatggcacaagaacaaagccagaccagatcataattcaagttctttaactg

SEQ ID NO: 171465 - DNA, 263 bp, Arabidopsis thaliana columbia
gagttctatatatataatggtactagggcaaaatatccattccgagggaattgtgttccatcttctttttaaacaaaacctgcatcgagctgatgcaagcgaaactagtaatacaagtaaaggtgattgattcttatcttaaatactgctcatcaaccagagacaaattccggtttcttatgggcaattcgtgttataagggttgtagatcactcagatcttctggtcatttccaagcttctggaactcattttctaaggtat

SEQ ID NO: 171466 - DNA, 263 bp, Arabidopsis thaliana columbia
caccaaactaccaaatctattaactagggcaatatcatggtaatcagcctcaagaaacaatctaacctcaaaaactctatgaggtgatagtgacagtgttacacactcaggcgaaaacatacttgttatcctacaggacaaggtgcataagagaatccggtaacgcttactttcattaggcatcgccgggacttagagcatcagcctctgctctggccataggatcatttttggtatctgtatcttcctccatctctccttgg

SEQ ID NO: 171467 - DNA, 262 bp, Arabidopsis thaliana
gctcttcttctaaatctttcattctgcgccaaagtaccttttgtgtggggttacagataacacttgagagattttccttcaataatctcttcaggtttgtgaattcatcagcatctgcttagatatgagtccttcccaatagctccaagcatactacatgctacttccagcaacttccctcttctcggctgaacaactttcttaaccggaccggtcggtttcttaaccggctcttcttccttctcctctgggaacaaaacac

SEQ ID NO: 171468 - DNA, 224 bp, Arabidopsis thaliana columbia
aagtagcattgggaagatacccattaaggggatcattacacttgtatcaaaaatttgaggaaaagatcgcacattatatatgttattgggatggaataagctattgctaaaaatgatagggatgctaaactaagcaggaagcctacctagcctgcaataggacttaagaatcttaaatgtttgttacaaaattacaaaggaagccaaatttattaaggcttttt

SEQ ID NO: 171469 - DNA, 161 bp, Arabidopsis thaliana
aaccccgaagagatattttgaaggtttagagttgatctgattgaattttcacatagtttaaaaagcaggaaaaaatatttaaaggtagaaaaacgtattattttacacaaactccttccgcgattgacggtgtcaatgaccaccgtcgtgtcggttggttt

SEQ ID NO: 171470 - DNA, 275 bp, Arabidopsis thaliana
gaaatcaacataggcagctttttcctctactagaggctctatagattggagtagtcaaatactcggattcttcacaacaatgcaagaacatcaacgcaacatacaaatttagatctatggacaccaatagaaactacgtttaaaagaagaaagaagatactcagaccatgtatgtcataccgacctgcatcagatgcgactgaggcacactcaaatttgcgatccctctcctgcagtttttcctcaggaatgtgtagaagtagtttatgactaac

SEQ ID NO: 171471 - DNA, 355 bp, Arabidopsis thaliana
gcgggaatcatgatttattcatatgatgattaattcaaaatttcagtttcacattacacattctcttgttcaaaatcattacactcgcaagctaaagtaatccgcttcaatattagcctatctcctcttagtatccatatcctgaggtggccattggcttcaacctccttagacattttcttgagctcggtaaccaaagcctttgctgtcttctcaatacctctggtgatcgaaacagggtttgcaccagcaggtaccaccttgacaccctcagcgataaaaccttgtgcaagaacaacagatgttgttgtaccgtcaccagccaagtcattggttttggcagccgcttgcctca

SEQ ID NO: 171472 - DNA, 268 bp, Arabidopsis thaliana
atcggaacatttggggatataaaaattagaagagatgaaacaaacttccttaattaaaatggaacacaaccacatcaaagaaaaaccggcaacacaagatacaacacttaaaagttaaaacacttatcagaggtcaccagaggcatgaagagacctcaaatgaccaatttataagataaagataaagatctccatggaatcaaagataaagatcttcatggtcagttggaaacgggacggacatgaactccaattttgtggagcaaag

SEQ ID NO: 171473 - DNA, 424 bp, Arabidopsis thaliana columbia
accgttgatcacattcattgctgacttagccgttggcttgtccactggacaaatcaaaaccggtgctccttgcagatccgagcgtcttgccaagtacaaccagcttttgcgtattgaggaggagttgggatcagaggcaatttacgctggagtcaacttccgcaaacctgtggaaccctactaaatggagcttttagaagcaaagtggtcttctttgtgacgaggagaagatgacctgagtttgatcatttgctttaattaaataaaacgttctgtttttgtttcttctttgtttggtttcttacgtcttttgttgaaccctttttgggaaaagttactcatttttgtaagggaaacatgagaatgctctgcctttgtcgaggacggtagccccttatttcaatctaatttcggctttactctt

SEQ ID NO: 171474 - DNA, 110 bp, Arabidopsis thaliana
aaaaagcaatttgaaactttcattgctatttagctaacattacaatcttattcgttaacttatttaagacaagtttaagcccaaaaaatgcttggggttgaaacgaactt

SEQ ID NO: 171475 - DNA, 259 bp, Arabidopsis thaliana
gaaaagtaaatatctattgtcactgatcgagaaaagagagacatgtaaacatccagacactaaatttgagtagatagaagcaaatggttatcaattacactacaaaaacgaccagcagcagtaataggctcagtagtacgtgttgtagtacgcttgaggagcaacagcagcagccggttgctgcaccggtgcagccgctggtgctgctgctgcaactggaggtgcataactctgcgttgggtatgtctgagcaggatac

SEQ ID NO: 171476 - DNA, 177 bp, Arabidopsis thaliana
agaaaattcttcaaatcaaagagtataaactaagaccaaacataattcggtttacatatcacataagggaaacaagatttaacaccactcaacaagtccacataacacactacaggcatatatcatcacctagcggaaatgacatttttattgaacaaacaaagaaagaagaaaaca

SEQ ID NO: 171477 - DNA, 313 bp, Arabidopsis thaliana
gaggcaatactttcatattcatttaatttccagttccgagagtacatactcaaaagtaaagatctaaatgtacaaaactcatggaggaatagaagactcctttgagttgggaaaagaaaagagtgggatttgtttcatctaaccatcttagatgactttctttttctcgaaaaacgtcttcaaatgcacaaactgcattcccgcgactcctaagcatacgaaaagagagaggaaactcaaccacgccattttcgagttagtagcccgggtcagattctgcatctcttcttccctttctctgagataaaacatc

SEQ ID NO: 171478 - DNA, 288 bp, Arabidopsis thaliana
aagcaaagtgggttacaaaccattattattgctttatcaaattggaatattaaaaatgtgcataaatcaaacaaaagaccaattcacaagaactataaaatggactctcaagtgtttaaagtcacacagatgaaaagagaggttattctataaggccaagataataataaaaacactactaagcaccactctgtacaaaacaaagtattgactgtgtaacaaacaaataaacaaactgggaatgagcacaaaagataagccatagtaagattttttggttttagaaag

SEQ ID NO: 171479 - DNA, 450 bp, Arabidopsis thaliana
aaacaacaagctaaacgagctgccaaagcagagatctattcaagaaaacctcatttgatgccgtcatcgccagaacacgtggatggaaaacgacacatttcaaatcagatggtgagtaacagaggattgacccggcaacgcaaagagatgatattggagaacggcgtagaaagtttgagctcagagttttggctggagctggtgtgaagtcatcagagggagatggcaggaataaaaatggggcatttgcatcagatgatgaggatgataacgatggtgataacaatgacatggttgataatgatggtgaatcagaagatgaattttacaaacaagtgaaacagaaacaacaagctaaacgagctgccaaagcagagatctattcaagaaaaccttatttgatgccgtcatcgccagaacacgtggatggaaaacgacacattttaaatc

SEQ ID NO: 171480 - DNA, 356 bp, Arabidopsis thaliana columbia
ccttacaaaacacgaatatgtttacacagggtgttacaatacgaagaagccaatggtagcgaaagatggaaatattgtacgatacaagagacataaaaccacatgagatgatgatcacctcagtggaacttgaggctggtcaagacgttgttgttgacgggatcagccaagtgatcaagcaggttctgataaggtcccacaccggtcactagtccttggataaagtaaccgaggatggcgagcatagccagtctaccgttcttgacctccttgaggttcaactccttcagggacttctcatctttcccaaacccaagagggttgaagaaaggtccaccggggtaagccgggttacc

SEQ ID NO: 171481 - DNA, 279 bp, Arabidopsis thaliana
ttttttttttttttttttttttttttttgatttgtgtatgttgtggggggcgtgaaacatgtgcattaatggaaagagattatatgcttattccaaagattaaaacagcaaaaccggaatcacactcaaatttacaaaatggccgaccacaaaaaaagagagggcctaattctattgggatcaaagttgggagaaatgaaggagaaacaaacaaaccaaaaaaaaacttccccatttagggagatagtaaaattaccagaaagatctaaactttttatt

SEQ ID NO: 171482 - DNA, 278 bp, Arabidopsis thaliana
gcttaattaacttaattattgactgagtttcattatctttaactaccaaaaaaacaacaacaaatgggaattttaccttcaaataatcccactccgccccctaatttttcttttattttcactaatttttcctcggcaaaggtaaataaattcaatataaccttctaataaggaaaaaggggaagaaaaaacatccaaatttattttcttaaattttttaaaaaaatgattagggaaggaactcagaatccttcccataccttatatatgcacacgca

SEQ ID NO: 171483 - DNA, 418 bp, Arabidopsis thaliana
agtattaaacatgaccatactaaaagaaatgttttagcataagtaatgataacagagttataatatgttttattaactttaaatcccaatcagaattgcatttcagattgcactcctgaaacgggacttaaagaagttttgatggtttgaggaatttcctcatgcgcagctcagaaatgaatatgatcaaaccgtaacatagaacttttaaacttacagtaaacggagctggagactctagttttatgtccttgaccttcttttccactgagtgcaccagttcgagtccatgcttccgcacccatcacgcacaagtttctcagatccagagtagcaacactttgctttaacgttttaagatgtttgataatacgttggtggttgcatctgctgtctgagggtaataagactgatgcac

SEQ ID NO: 171484 - DNA, 233 bp, Arabidopsis thaliana
agctgcagtgaactttgtctccagctgtttggtctgtgatttggcttcttctgctgcttgactagaggaccgaacaacatcctctagctcaaggttcttctgggtagcagctgctgctgcagatccagcttcagaatgaagctcctccagcgatttcagtttctgttcaagctcagagttgtttgacaaagcttgagaaagaagagcatctgttttggagaaattctcatctg

SEQ ID NO: 171485 - DNA, 434 bp, Arabidopsis thaliana
gtagatattatttaaatttaatttctccaaatgaaattatagaacagaatctttgtgtgaaacaaaaatagtttattttccctctattaatttgccattctttttttttttgacacaaattaaagttgatcattgactatttgactcttttggccattcataagttaaggagcttaatctttcttcggcctcatcaaatgacggagtctaggaattaaacggcccgatcgagatcctgacaccaactcttgataacacatacaaagatcgagataaacacatgacgcgggagaaacgtttgatagctgtagcatgacgtggggggcaaggatactggtcgcccaatagaagaagaacgccgatattaaggaaatgatgactacaaaccatttcacatgcccaaccgcagtaaccacaccacaaaggaatgccaa

SEQ ID NO: 171486 - DNA, 395 bp, Arabidopsis thaliana
gacgccgtcactaacttcaaatctcaagttgatggaaacgacgccgaatcggcttttcttgacgctcattctaaagctgagatcgtggatatgttgaggaaacacacttacgccgatgagtttgagcagagtagacggaagtttgttaacggcgacggaaaacgctctgggttggagacggcgacgtacggaaacgacgctgttttgagagcgcgtgaggttttgttcgagaagactgttacgccgagcgacgtcgggaagctgaaccgtttagtgataccgaaacaacacgcggagaagcattttccgttaccggcgatgacgacggcgatggggatgaatccgtctccgacgaaaggcgttttgattaacttggaagatagaacagggaaagt

SEQ ID NO: 171487 - DNA, 470 bp, Arabidopsis thaliana
  unsure (1)..(470): unsure at all n locations
aaaacattcttcctcatccaatgtttggcttcttttaccaatacaaagcattaaaacagatctcatggtgtttaaacgcaacaatcccatgcaaatgcataaagagataaaccaatgcaaaagcagccaaaccctacaaaaaccccagaaaaaaatttgttcaacactcagcgtcttgcatcagtaccttacagataagagagggaatccctaatacagagagatatggggagaactctccaccaaatcatacaatcagtaacgtcttctcggacttcttgaacgttgcgacctcccatacctcgagttctttctcctgtaagattcaccaccactgggaccgctgctgaaggcccagtcaacgctaacattctgtgttagaagctcagcaccattcattgctgaaatagcgctctgngcttcttccttcttctcatattctatcaaagcatatcccttgacataaccac

SEQ ID NO: 171488 - DNA, 124 bp, Arabidopsis thaliana
cttaaaccgattcatttatttggatccgaagcaacccgttaaaaaagtttcactgatttaaaacatacagagtctagacgtaatgaacctacaacagtttaaactaaccaacacgagaaaccgg

SEQ ID NO: 171489 - DNA, 182 bp, Arabidopsis thaliana
tgattactgatgatgattatagagatctggcggacagggttcctccaggctgcacaatgacaatgatttcagactctcgtaacagtggtggcctactcgacgagaccaaggagcagattggagagagccctaacaaagatgccgaggacgaagatgaactctgaagaatcttcctcaagatt

SEQ ID NO: 171490 - DNA, 373 bp, Arabidopsis thaliana
aaaacaaacccccttaattttccattggatttaagatacaaacccttaaacagacccttagggcatacaaattacataattaaatccaaaccaaacccaacccaaaccaaataaaaaatttttcccaggggacattatttctccattttaaaaacacgtaaaaacaacaaattggggggatttttttggttccaacataatcaaaagcaaattaatcacccctttccgttttcccagtttaacccacaaaaaaacgaagttaaaccgggtcgccccccccctaagaaaaccaacccccttaaaaccgaaccgggcttggaaaaaaaaggagcgttttgtgtttaaaaacgaacagaaccccttagtttttttt

SEQ ID NO: 171491 - DNA, 333 bp, Arabidopsis thaliana columbia
tggattctttgcgggtctatctctcccggaaatgaagggtatgtcactccagtaccaccctgaagcctcccctggacctcacgactctgataacgcattgcgagagctcatagagcttatgaagagatcgaaacaaagctcctgatcaatgagaagaactctttgtttttgtacgttgctgtttttaatcatggcacttaaattaaaaccaactgttttgttagcgataatggattggcattattgactctttgctttgactgtattgagcaaccatccaacctataaaataagtaagattttgtaaaagtcataaagagataaagagatgtg

SEQ ID NO: 171492 - DNA, 147 bp, Arabidopsis thaliana
gaaccacaccgaatcaggtgtgatcagatccccgggtcgggtgttttgaaacaaaacactatccataagggaaaactttagataaaccagtgattaacccccaacaccataaaggatatcttggagagaaatgaaggtggggcctct

SEQ ID NO: 171493 - DNA, 165 bp, Arabidopsis thaliana
cttaaaccgattcatttatatggatccaaagcaaaccgttactaaagtttcactgatttttaacactgagagtctagacgtcataaacctacaacagtttaaactaaccaacacaagaaaccgggacgttctttatgtttacagtcccatctaatgcggcaacca

SEQ ID NO: 171494 - DNA, 408 bp, Arabidopsis thaliana columbia
agtcgatctcaataaactgcaatattttagagaaaagagaaaataacatcatcaagtggtcatgactcgagagactaaagcaaattatgagttcaaacgtcacggacaataacaaaaccaaaaggcaaagaagaagcaacgttaccaaaaaatcacgatcaacaaaacaaacaaggaagcaaatctctctgtttcttttggttcaataaattacttttctcagttttaaagatgtaaaagaaaaacatgcttaggatttcgagggataagaagaatctcactttgccatcatgactttgacgaactcttcatagttgatctgaccatcaccatcgacgtcagcctctcggatcatctcatcgacttcctcatccgtcaacttctccccaagatttgtcatcacgtgac

SEQ ID NO: 171495 - DNA, 155 bp, Arabidopsis thaliana
ggaagtctctgtcttgttccttcactgccaagttcaagtgtctttatggcaaagatgtcttgaaaaacaggcataagacattgaggaacttgattaaatctgtgaattatcttttgatagaagatgggtttagttgggatgatactaaacagatg

SEQ ID NO: 171496 - DNA, 109 bp, Arabidopsis thaliana
cccactcttacgcgaacatgtattcgatatagccatgagtgatgtccatatgcctgacatggacagttccaagcttggtgagcatgttggtatagagatggacttacct

SEQ ID NO: 171497 - DNA, 276 bp, Arabidopsis thaliana
tttgttttttttttttccttaatcaatacggcctacaccggctctagctatttgatgttcctcatcttcgcaatcctcaaagttgagaaagcctgttctcttcctcaaagacacaacctttgggttcttgtcgacaactgggattgaagagacggattctactcggggaccaacactcttgctggccgatgcatcacctctactgtggacgtctacatcaccattatcatcatgcaatgcctggaccttgtgcttcttctttatcaaatctctttg

SEQ ID NO: 171498 - DNA, 323 bp, Arabidopsis thaliana
aattgccaagtgaatgaatgatcattagaattaagacgcaaaacaacgtcctagatccaattttaacgccacacatacttcgctaagcaactacgtttttttctttcttggctctttatgaactaaacaataacaaattcacattaactaattaataaattacttaaatatcctcaaacatacagggatattatcggtaattcagataatgtccactcctgtctcctacgtgaaaaacggcggcaaacaaaaccgcgagccagacatcggcgaggaatacaataatcaccggcgacggagacggcttcaatgggccttaagca

SEQ ID NO: 171499 - DNA, 363 bp, Arabidopsis thaliana
cacgcccggattcatcaatgagaccaaacataggtttcaaaaatcagtatttacacacaatcaataaatatgatctggatacatatatataactcaaaaaggatcaaacattgatttacatacacacgttttatatttgtatatatagaagatctacaaaaagaatctgttatatcgccattgttgaaataaaaacatcttagtaccaatctcttcgtgtgtgttgtgtgacactgattctgtcttcatgttatgttcatgattgtctttttgagcagccatagaagaagagcaagttcgatgctgaagatcatacgcaaccatgttttatccaccaagaatccgtaaacagtgatccctgct

SEQ ID NO: 171500 - DNA, 259 bp, Arabidopsis thaliana
ggatagaactaaccacacttgtatattttatttgtctattatgctttaaatttacattgagcctttgaccaaagaaaaaagttgacaataattagccgtttcttgacattggtgcctgatatatcataattagccatttgttggcaaactcttagatattcaatgagatcattaaactgggacttaaagggatttaatcttttccaccgggtatggactcggcccatttgaattaagtatgcctccaggcgaaagaagc

SEQ ID NO: 171501 - DNA, 213 bp, Arabidopsis thaliana
tttcggccgccctttttttttttttttgggactaaactaggtgtgttgtatataatatagtctcaaaaatttcaatcttaacttataacagaaatatatctcacacgtctttttaaaacgaaataataaagaatgtttttatttccagcatttcagcttctttgtagcgtctatgatgctttgcttcgtttccaatctttggcacttgagcaa

SEQ ID NO: 171502 - DNA, 365 bp, Arabidopsis thaliana
atacgttcgttcttttctgttgacaacttcgttcataatacaagaatctctacgctaagaatttcattgaagagttaaacttataatccaaagccaaaagagtaagggtagatagaaaaaaagaacgcatttacattcttcttataacgttgtcgtcgaaacgtttttaaccttacttttataagctttattagtcttcttcaagccttttgatggtaagctctgctctgagatggagaatgccattgatgaagtattgactatcttccgctataaaagacgtccatgggaccccaaacaggtttctgtaacctactgctttccctcctgtgaatgtgtagttccctttgtatttgcttatgaaa

SEQ ID NO: 171503 - DNA, 333 bp, Arabidopsis thaliana
aaattaaaatatatacaatgggtcaacaaagttgatatattttatacacaatataaaatatatatatattcccgattagcaaacagtgtccttagtaaaccaggcaaaaaaaaaaaaacacagaaaattgctgccaactattccgcctcaacgtccggggggaaactcgcattttccatatcgaggaggatgcgtgacgacgggagcagctccaccaaagaagcacgtaccaacacgacgtgagttcttctggtagtaactattgaaggcgtacgaagcgagagcttctaacgactcaggatgataacacgtggcacctggctgaatcgggcg

SEQ ID NO: 171504 - DNA, 452 bp, Arabidopsis thaliana
tgaaaacattcatatgtcagaaaaacatcaaaattatagagagttcctttaactgaagattatgattctggaatggtcggagtcaattatggtcggatagctaacaatctcccgtcgccggagaaagtagtgaacctcctgaaatctcaaggaatcaaccgtatcaaaatcttcgacaccgataagaatgtactaaccgcacttgcaaattccaaaatcaaagtaatcgtcgctctccctaacgagcttctctcctccgacgcctcccaccaatcattcgccgacaactggattaaaacccacataatgccatacttcccagcgacggagatcgaagctatcgccgtcggtaacgaagtattcgtcgatccgacgatcacgccgcatcttgtcaatgcgatgaagaacattcacacctctctggctaagtataaactcgacatagccatcaa

SEQ ID NO: 171505 - DNA, 133 bp, Arabidopsis thaliana columbia
aaagaaaccaaactttatttaattatttttgggttacaatgatttaattagcaggggggaaaacaagatacgcacactttgttttaataaaagggaaccctttcgggaaaaaaagaaagaaagatacttttgg

SEQ ID NO: 171506 - DNA, 135 bp, Arabidopsis thaliana columbia
tcttaaacgtatctttctttctttttttctcgtaagtgttgccttttattaaaacgaagtgtgcgtatcttgttttcacgcttgctaattaaatcattgtaaacaaaaaataattaaataaagtttggtttctat

SEQ ID NO: 171507 - DNA, 187 bp, Arabidopsis thaliana
ggaaaagaaaagaaacgctgcggaactcggtgaacaacaacgggcttttacaggtgtgtgcaaaaaaaaaaaaaaccaaggttgcaggggactactgttatacaaaaccaaaaacgcaaaactttggtggagaatgagacgaccatatatcctgaagagggttctgagttagcttactctccttaca

SEQ ID NO: 171508 - DNA, 412 bp, Arabidopsis thaliana columbia
cctctctttccaatggcttccttatccttcgtttcctcttctcaccttacgctacgcactccttctattgccctacgcagcactggctcttctcctcgaacctccgtttcattctccgtcaaggctcaatccgtcgcgctttcacaggacgatttgaagaagctcgcggcggagaaagctgtggaggcaattaaacctgggatggttctagggctcggaaccggatccaccgcagctttcgctgttgatcagatcgggaaactactctcttccggtgaactctacgatattgtcggtatcccaacgtcgaaacgaacggaggaacaagcacgggtcgttaggggattcctcttgttgggttagatacacatccgagaatcgatctcgctattgacggagcagacgaggactc

SEQ ID NO: 171509 - DNA, 228 bp, Arabidopsis thaliana
ttagtggaggagatatggctaactagaatcttgacgggagagatgttgctcctcataactgaggaccgctgtgagtatgagctgaggacataatagtaatgatgaatgtggtgagaggttgagaacttaggaaggattgaagacaactacaacttcacatctactacacaaattcataaagaagggacaggaggaggaaaagccgaaccagtgaagagtaatggatgg

SEQ ID NO: 171510 - DNA, 126 bp, Arabidopsis thaliana columbia
agaagaaaatactttataaaccagaaatcaatagaaacacaccaagggaagaagaagggaaagcaagcaagcaccagaagattttaagtatactactaacaagctttaaactgaacacaaacccca

SEQ ID NO: 171511 - DNA, 124 bp, Arabidopsis thaliana
attaggggccaaggttttattacatacagaagcgtcttctagtacttgtaaacacatatctgttaactcaggatgacctctaagccaaagttggaggataaaacaaaaagtagattaaagtttg

SEQ ID NO: 171512 - DNA, 145 bp, Arabidopsis thaliana
  unsure (1)..(145): unsure at all n locations
ggntcaaattcggcgagttataaatggtatgaaccgaactgaattaaccgagtaccaaactgaaccgaatttttattcggttcaattcggcaaaattttaaaaaaccaaaaaacccggaaaaccgattaaaccgaattgtttaac

SEQ ID NO: 171513 - DNA, 166 bp, Arabidopsis thaliana
gtagcagattgagggattacctggggacttactatgcaatgggatggaaacccaaatatagcactaggcgtccagatgttagaagagtgtatccctccccattcaggtgaaaaacatcggattcactggtgttttcaggctaatttttaggccactagttgaggac

SEQ ID NO: 171514 - DNA, 150 bp, Arabidopsis thaliana columbia
atcattatatatacatacaactacaaatctacaatcatcctcctcttcatttcaaaatcaattccacatcaagatgttttggtacccttaaaatagacatatgtagaataagttaccaatctgtgtatatgttaactatattggaatccg

SEQ ID NO: 171515 - DNA, 150 bp, Arabidopsis thaliana columbia
atccattaattatcagtggcattattttttgaaagtcaaaattgtaacattttgttcaaactgtatgaatattataaaataaaagaaaactcaatacaccgatgctttcctcgcccggcaaaaactcttaaaactattaagaaaactcca

SEQ ID NO: 171516 - DNA, 391 bp, Arabidopsis thaliana
aataaaaaatcttacttttaatcgttataattagggactgatattctcgtaatcaactactatacattacaattctacataaccaatcgaatattggatttcctcaagtgtgcgacctttggtttctggtacgagttttgctacaaaaataacagtagccccacaaacagtagcgaaaacataaaacgttcctgccggattccaattcattagaaagttaaatgtaaaagatataatccatgatccgacccagctaacaacagtcacgaggcttccggctgatccttttatgtctattggaaatatctctgacataatgacccaaggaatcccacccatccctaatgaaaatgatccggtgtacaccaaaacgcctgtaagtgctagatat

SEQ ID NO: 171517 - DNA, 393 bp, Arabidopsis thaliana
gttactgatcaaagccttttttattaaacgggtgactcaatttgggagacaagaatcccatcagtatctgcataaagccattcaccatcacaaatccgagtccctgcgatatttaccggaactcgttgttctccaagccctttcttactcgcttttatcggatgagaggccaaagctctcactccgatatcacaaccgttgatctcatcgacgtctctgatgcatccgttcacaacgattcctgcccatccgttgttctgagcttgaacaacggggttacctccgagtattgcacatcgttgactccctccaccatccaccacatgaactctaccgtttgctttctcctcgatgaattgacggattaagccattgccttcaaaaactttgaca

SEQ ID NO: 171518 - DNA, 375 bp, Arabidopsis thaliana
ttctttttttttttttttggttgagcaggaaccatgatgaattataaccgggggactctaactatacatacatatagcaaagttcagtacctatgctgttttggcatgacatttctactttatctttacttatcagagcttaatcaattctaaccctaattaatcttcttacgcattcccattcgtgatctagcatatggcagcctcaaaacttccccagtgagggatgagtaaagcactgtgccttgaagagtatgtagtgcttcacttgagcaactgacgtcctggaaatcaacaaatgcaacaggagtcccatatgtaccctgaatcttcaggttcaagaatccacggcatctcgagaaaacttgaattagc

SEQ ID NO: 171519 - DNA, 142 bp, Arabidopsis thaliana
gcccggatgacaaaccactgctaagggccaactgattatctgggtagctcacccgtttatcggtctggatattatctgcagaacttggtatagcttttccgcttcccacatcttccttaatcttctcaccaatctcattttc

SEQ ID NO: 171520 - DNA, 164 bp, Arabidopsis thaliana
ttttttttttttttttttttttttttaataataaaagatcaggtaacaattggtttaatagaacattatctcccttagttaattacttttgaaaaccaagattagtacgttataatcttcacctccgaagatgttttaaaaccctaattctaccgtaagaatct

SEQ ID NO: 171521 - DNA, 233 bp, Arabidopsis thaliana
  unsure (1)..(233): unsure at all n locations
tatcttttttttttttttttatatagaaagaaaagagaactgtcatttcaatggtgcatccagttttaccaaaacggaggaaatcagatatttgttcttaatagcactaatcaaactgaaaaatacaagtcaagaatcaaaaacagagtcattgcataatgcaaaaacttngntagaagacttgaccgttctaaactttcaagtaaccgggctaatatagagatctttaaaga

SEQ ID NO: 171522 - DNA, 428 bp, Arabidopsis thaliana
caaatcttaaacgttttactttgtgctgcactactcaacctcaatggccgcctcaacaatggctctctcctcccctgccttcgccggtaaggccgtcaagctttcccccgcggcatctgaagtccttggaagcggccgtgtgacaatgaggaagactgttgccaagccaaagggcccatcaggcagcccatggtacggatctgaccgtgtcaagtacttgggtccattctctggcgaatcaccgagctaccttaccggagagttccccggagactacggatgggacaccgccggactttcagctgaccccgagacattcgcaaggaaccgtgaactagaagttatccacagcaggtgggccatgctcggagccctaggctgcgtcttccctgagcttttggctagaaacggagtcaagttcggagagg

SEQ ID NO: 171523 - DNA, 248 bp, Arabidopsis thaliana
acaaaatacaacggtccttccttataggttctcttaatcacagcattacacgccaacatctatatacacctacaataattattgtgctaacatgaaaaaacgatcaaaggaaaaataaaggatttagagataaagaaggcaaattcacatgatggaacagctctttggattctattcgctgaaggaatcacatctagggacgtggcattgtctataaacaggtggggcggaggtcacaccccacccca

SEQ ID NO: 171524 - DNA, 315 bp, Arabidopsis thaliana
aggtaaattataaatggggggtggactttggtaatacacggaaagatcattcaaaggactacaattatacgaactagcttctgaatggtggtctaatgctttctaaaaccgttgttgggatattgggttatttcattaaggcgtaatgcattatattttatgtggtaaagaaatctacttattttggcttaaactatataatgggtccttacatattagttttggtacactgacacctagaaaaatacgaaacgggttttaagatgaggcttaagagaaaattcatgaactaaccacattggccaaacaaaacaa

SEQ ID NO: 171525 - DNA, 295 bp, Arabidopsis thaliana
actctattactgattggtattaaagctgtatgagaaaggttacctatcacacttttgagaattacaaaaactaaaaacgagttttccaccattggggataggaaattacaagcaaacattcattaatcataacccaaaattttctctcagtaaattttacatttcccgtgaaaacacgaaggaaaattccccaacaaaaaaaaaaagacaagactgagagaagaaaagaaaacaaaaaagctcactgactcgttgtttcttcattttctttggctttctctctgtctcccatttt

SEQ ID NO: 171526 - DNA, 247 bp, Arabidopsis thaliana
gaaaacaaggtacaatacaaagcatctgtatataaatgatacaccaaataaaaaatgtcgaaaagggtaggaaaactaatgtaacctatagtttctcccagctgctcttattcccattaagcttaagaccaagagcagcccaattctaatgatacaacaaacacttcataacaaacgtatgaaacaagttcaactacacctgatggttgatacggttaggagagattcagcagtagtaccatcctgc

SEQ ID NO: 171527 - DNA, 191 bp, Arabidopsis thaliana
gacaaactatcttcattttccaaattacaattcattacataatttttttaaaacatccaaagtacaaacatatttataaatggaggaactgcaaactggagataaactatttcaaaaaaaaattgccccaaagatggattaacttgctcagaagtttttagaatgtggaagaacactaattataccccccg

SEQ ID NO: 171528 - DNA, 396 bp, Arabidopsis thaliana
cccacgcgtccgcccacgcgtccgcgcagactctctctctctctctctctctctctctctctctctctctctctgtgggcttcggtggagatcacttgggtcgaatactgatgaagaaactggctgatcggatccttcatcggcttactaatcatgaaaccgctttaaacgccggccaccactgtgatttctcgcctaccgttctattctcatggctcagaggggacagatcaaggtacaagtggtcttagtcataggaaggatcacaggatgtcctctcatggtgtccacctgcatgtccatgatcgatatgttgcgatggacaatgggatcctccaagatacactgacaaagccaggtggaattatcactgggatagagtataacggtattgac

SEQ ID NO: 171529 - DNA, 123 bp, Arabidopsis thaliana
atcgaccacatctgagcttcgttggttacagatactcaagtgttaatacaaatggagagtagtatataggcattgttctcaatatgacatcaaacaaaaaaaccttctgaaacatattgagac

SEQ ID NO: 171530 - DNA, 279 bp, Arabidopsis thaliana
ggtgatttttgggagcgagccggatcaccggggggggattcttaaggggagggctggggcactccgccgttccaaccgccaagcaaaccgtaagggtgactcgaccagaaaagccaccgagaaaggtaatcgggaatcttctcgcgctgctattgcgatcgcgttatttgattattaaaccatgatctaaataaaaccagttaaaaccaatgaatgtttgcttagttagaggttacgtgaaattgagtcgtgaggaagaagaagatgactccattcatt

SEQ ID NO: 171531 - DNA, 314 bp, Arabidopsis thaliana
gggaaatcaaataaaagtggcaaatgaaacggtttaacactttaaatcaaagggggggaggaacaaacaggttaaattttccgaacctgaaaacctaaaccgctaactaaaaactttaatggacaacccttggttttgttcccactcggcttcccgtttggcgatttataaagttcgggggttaacttgggcagacgggggaaaatcatttgccttccaaggttccaatcataaatcttatgttgggcgccttttgttcgcacctttggttcgagcccaccgggtccttatgaacataccgagaattccccggc

SEQ ID NO: 171532 - DNA, 409 bp, Arabidopsis thaliana
ggcccaaaataaaagatcacaaaataacaaggaataaataatgatgtgcatagctgcttgtttcaccagcattgattctaaaggtgtgagctttgatgaatatacaaactaaaatgggtcagtccttataaacatcaatctcttcacttaatttggctttgtagctttgtagatgaagattgtattgaacgaataccaactcatccagatgctgtctttcacgattgctcattccttcactgagcaacaacttctctgctaagcttctcttcagcttgtactttgaagcaccttcacatgtctggctcagaattttaatggccaagctctgcagttctgggtactggctcgccttatgagcccaccattcagctggagagattccagtgatctgatcagcttgactcgc

SEQ ID NO: 171533 - DNA, 258 bp, Arabidopsis thaliana
aggaagtcgtgaacagatttcagatttagaccaaatgaccagaatacgagaaagtcttgatggcagctattgagtttaaatgacgaaatggtttcaacttctcaagcatataatctaaacccgcagccattttgcaaagtaaaaatccaactaacatcgaaataaaatagttccagcgttacacacacaagccttacatttccattggagccacgtcttggtcacctgcaacaccaccacctcgttctgctggtgcag

SEQ ID NO: 171534 - DNA, 110 bp, Arabidopsis thaliana
gagaccaaatcttcaatcttccataatatcattagcaatacggcatcatcgtaatattatcaaaacttgcaaccttctaagattgctgattttggatggggagggaaagc

SEQ ID NO: 171535 - DNA, 190 bp, Arabidopsis thaliana
cgggggcgtgttcaatgacactgaataaattcttaaaacaaacttctcaaagaaaaaaatggcttcaaagaactcagcctctattgctatctccttggcccttaacataatattctttaccttaaccgatataacacattggggtagtgacccaagacctaagcacaagcctgtaccaagttctaaaccc

SEQ ID NO: 171536 - DNA, 351 bp, Arabidopsis thaliana
aataaaagactctttgattccaagtaaagaaaaacaggataatggagactagtttcaccaaaagagtaaatataacagtactactactaagtttctaaagatcaagtcacgtttgtcgtaatccaaactattaaggtttcacgacagcaaagagaagtcgacacattaatctaacccaaactcctttgaaggcctgttattgtagatatcagcagatcatcatctcctacaatcatactcagcgtcttataaaattcctttctcgacaccttcttctccctgagttcctggtaaccagcaattatcaaatccatgtctttacgagcaattttgctcgagattgctttgaac

SEQ ID NO: 171537 - DNA, 174 bp, Arabidopsis thaliana
gaaacgttggggtcctaatacaaccaaactgaacaggggtcctacgacgattaccacattgtttcaggaaccagaaccaaaaccagaactaaagctaataaaattggggaaagggtagggtattcttaacttttttatttttccccaacatcggaaaaatttttcaattggggg

SEQ ID NO: 171538 - DNA, 105 bp, Arabidopsis thaliana
accaaatcttcaatctttcatgatatcgggggcaatatggcatgatcgtaagatgatcaaagcttgcaaccatctaagaatgctgattttggttggggtgggaaa

SEQ ID NO: 171539 - DNA, 223 bp, Arabidopsis thaliana
gggaagataccttaaaccgggttgagaaataggtagactcacattgataactgaacaaaaggggagcggaacccgaatgactatcacaagcaaaaaagggactatacacagatcggaacccttttctttatttagaagatattctggggatcagctcagatctcattaggccatataaaactctgtgttccaaaaatgtgaatagaagagagctgaagaaaga

SEQ ID NO: 171540 - DNA, 366 bp, Arabidopsis thaliana columbia
cccacgcgtccgcccacgcgtccggtaggatacaagaagacagttgtaaattgaatacaaattcatcagagactaaggtaaagagcaagttttgttatggtgaaaaggaaaaggaaaggttcagtagaatactaagttgttatgttggatcatataatttccataacttcactacaagaacaaaagcagatgatccgactgcgaatcgtcaaatcatctccttcactgctaatactgtgattaatcttgatgggattgactttatcaagtgtgaagtcttaggcaaaagctttatgcttcatcagattcggaagatgatgggtcttgctgttgcaatcatgcggaattgtgcttctgaatcactta

SEQ ID NO: 171541 - DNA, 444 bp, Arabidopsis thaliana
caaaactctataaattcaatcaaaaatatttgaattccatatgatacaaatcacttgcaaaactcaaatccactcctaaatgatatcatcccttccaagtatacaagcaaaaccagtgaagaaaaagttgccctaaataacgtctttacataagaaatacgaaaaccaggtttaaggatcagtctcctcttcaaagtccatgagaaaatcagttaagttctcagcatcatccacggcctcgtttagagacatccgaccttccttctttggtttaggcttggcggtgcgaagctcaggggtttccttcaagacactccagttcctcggcactttctcgtcgtctttttctacatctgcatcgtcttcgtcgtcatcgttttcaccaatatcaacagcttgtgccatttgcatcatccatgtcaggtacctcgagctgctcggttt

SEQ ID NO: 171542 - DNA, 197 bp, Arabidopsis thaliana
aactcattgaggtgctcaccgttatcatttgatgcaaccatgggtcggctccttctcctattgttgtacatcgttattctactccattacggttgttgctgcagacaccaacaagaacatggccgcatctttgacctttccggagaaccaaaccatgaatccttctttaactgatgtgggtgcatcaccgaggacga

SEQ ID NO: 171543 - DNA, 149 bp, Arabidopsis thaliana
ctctttcttaagtttgtgagtcttcgatgcaacggaggcttcctggacctagaaaccactggttagaccctaattcgtcgcctagctcaaaagagggggctttcgcaatagctccatgacgcatggaaaggaacagctgagaggatcac

SEQ ID NO: 171544 - DNA, 505 bp, Arabidopsis thaliana
atgttcgcaactaatccatattagatttaaatggggcattacctctggaaactaagaaccatgccaataaaagtccatctaagccatataatcatatatccaagggaacattcattggctgcttaagaatgtggtcggcagaagattttatttttgctcaacataagatttaacagtctccatccatctaatatactcagctttatctttgttcttcatgtactgatgcaagaactcagcaagatcatcacttatacctctttcctccaaaaatcgataaaccgagtcttgaagttcatcttccatttcctggaattcaggtccaatataggcatttggtgagttctggctgcttttacgaacaaagaacttggtgatctgtatggtatcaggccaagcagaacacatgatctctaaggtctcaccatcacccttagagatgttgacaatgaaagtaatatgaagctgaacatcttcagggtcgctggtagtagattttgatgat

SEQ ID NO: 171545 - DNA, 189 bp, Arabidopsis thaliana
aagatctgacaaagggcggaaatattaaggggcaaaacacgggtaccaagataagggtaacaatgctcaaggtgatcaaaagctattaaaaagctaacaaacaacacccaaaaagccaaaggtttggacaaaggtagctacaaatgagtattcacaattggggatcacatcgtcgatctttaaaatcat

SEQ ID NO: 171546 - DNA, 283 bp, Arabidopsis thaliana
aaaaacgatattggataagcttcaaatatttcccgggtagcaaaagatttaaagagctttctcttccatccatagtatatagggaaaccgcaaccgaaaattaaaagacaggcaaaaaaaaaaactaaagaaagccaggaaaaaccattataagaaccaggaaaatacccaaactgggtataagaccaatctagcttatgctggcttaagaagtatcttaaacttgcaaaaccccaaaatataaaacctgtaacaccgtaacgtcgaaaagagaactaaaccg

SEQ ID NO: 171547 - DNA, 333 bp, Arabidopsis thaliana columbia
cacttctctttatctctttattacttttacaaaatcttacttattttataggttggatggttgctcaatacagtcaaagcaaagaaacaataatgccaatccattatcactaacaaaacagttggttttaatttaagtgccatgattaaaaacagcaacgtacaaaaacaaagagtacttttcattgatcaggagctttgtttcgatctcttcataagctctatgaactctctaaatgcgttatcagagtcgtgaggtccaggggaggcttcagggtggtactggagtgacataacattcatttccgggaaagatagacccgcacagcttcca

SEQ ID NO: 171548 - DNA, 397 bp, Arabidopsis thaliana columbia
cgattataagcgtcaaaatttcattaaagatagagagatcatctgaaacatatccaaagctaatggaaacaacacaaaaactctttgatataatgcaaacttagaggaaagggagatcccttaacgattggccttagcaactctctcaatctcatctttcttcttgatggcatagctgttggaagatccctttgcagcattgatgagttcatcagcaaggcactcagcgattgtcttgatgtttctaaaggcagcttcacgtgcaccagttgtaagcaagaagatcgcttggttcacacgtcttagaggagagatatcaacagcctgcctcctaaccacaccagcagatccaatcctggtagcatcttcacgtggaccactgttaacaatggcatca

SEQ ID NO: 171549 - DNA, 397 bp, Arabidopsis thaliana columbia
tgatgccattgttaacagtggtccacgtgaagatgctaccgggattggatctgctggtgtggttaggaggcaggctgttgatatctctcctctaagacgtgtgaaccaagcgatcttcttgcttacaactggtgcacgtgaagctgcctttagaaacatcaagacaatcgctgagtgccttgctgatgaactcatcaatgctgcaaagggatcttccaacagctatgccatcaagaagaaagatgagattgagagagttgctaaggccaatcgttaagggatctccctttcctctaagtttgcattatatcaaagagtttttgtgttggttccattagctttggatatgtttcagatgatctctctatctttaatgaaattttgacgcttataatcg

SEQ ID NO: 171550 - DNA, 408 bp, Arabidopsis thaliana columbia
gtcttttgatgacaaatcttggggagaagttgacggatgaggaagtcgatgagatgatccgagaggctgacgtcgatggcgatggtcagatcaactatgaagagttcgtcacagtcatgatggcaaagtgagattcttcttatccctcgaaatcctaagcatgtttttcttttacatctttaaaactgagaaaagtaatttattgaaccaaaagaaacagagagatttgcttccttgtttgttttgatgatcgcgattttttggtaacgttgcttcttctttgccttttggttttgttattgtccgtgacgtttgaactcataatttgctttagtctctcgagtcatgaccacttgatgatgttattttctcttttctctaaaatattgcagtttattgagatcgact

SEQ ID NO: 171551 - DNA, 123 bp, Arabidopsis thaliana
aattagaagattagtagtattaagtatcaggggtggaaccatttaaaaagatgagcgcgagattagaccacactagatgaaacttactaccaaaccatgtaaaatacttcaatagctgcgggc

SEQ ID NO: 171552 - DNA, 239 bp, Arabidopsis thaliana
ggcagaataaggcactaaacttggggggtttttttaacatgtcactggttacaaagacttaactttaacagcttcactatcaccaccatcaccatcaataccattatcatcatcatattaaatactcttccaatggccagcttaaccaaacaatgacttttttccaaactatgctaagtcctaacgtttaactttcttagaacacatgagaaacaaaaggatgaagtaaacaggagaat

SEQ ID NO: 171553 - DNA, 134 bp, Arabidopsis thaliana columbia
aaaccaaacaagccgaagcccataagacgattcagggggatcatagctctgtttttacataagttacaaatagaatctcacatgataatgattttaagatgaggagaaggtatcgttgatggtggtgtggagtg

SEQ ID NO: 171554 - DNA, 293 bp, Arabidopsis thaliana
catgcatcacattcgaatttctgatttataaatagtgcttgtgttaacatgaaaactgaaatgacagagaggaatgtacaacaaagaatcaattagatccctttggttttatgttcatcaagacaaacactatcaccaccctcgtcatctgtagctacaagcctaattaacagcgaagaatttgtttgttagtctcatgaggttaatgatctacgactaatgcaaatgaaaggagagtgagttttactataagtacccaagagattgattttgcgtttttttcgacaccgtgt

SEQ ID NO: 171555 - DNA, 268 bp, Arabidopsis thaliana
aaaaagggggtgatttaaataaatttgggccttccaaaaatacctaaaaggctaaaggtatattatctaaaaacaattactcatctacctagagctgctattttttttatgactaagcagaaaacaacccaacacattcttgcttaggccaaaacggggcaaaacctaaacaaaaagacggtttccaaaagccatccatagccaaccaagcctgttcccccatttggcatttgtgtctggagatatttgggaatttccttggattgct

SEQ ID NO: 171556 - DNA, 233 bp, Arabidopsis thaliana
gagcacctcgacggagaaacctacatctacggagatcaattgtctgtggatgctggaatggattactctgccggtccagtgaaacccagcgatgccttcccctatgcttgcaggtggtacgagtccgtggcttcccaactcggtagactgttacctggaaaggccgttggagtacaattcggtggctctgctgctgctggtccagctgttgaagctgaggcacctgcagctgc

SEQ ID NO: 171557 - DNA, 174 bp, Arabidopsis thaliana
ggaagcaaacactttttaaatggaacctaacaaagaacatttttgaaccaagtttacaagcctctcataagtcacacctggggacattccaaaagttaggaacaaggctttatcaactaaaaaaagaactttacttaggccccaagcaaaaaaaaccccaaacccaaagacccc

SEQ ID NO: 171558 - DNA, 240 bp, Arabidopsis thaliana
ggcgggaataaaaaatgcttggactactaaccatgtttgggggcaaacaaaaaatactggttttggtcaaagggaaacaaaattggggggtctaaagcaaaaacagcaggtacaagggttttggttttggccattcaattatcccgcttcctccatcgatatcgacttttcccattccaggggcttcttcttaaatttcggttcccttatcaccactcattttttcattatccattctaa

SEQ ID NO: 171559 - DNA, 452 bp, Arabidopsis thaliana columbia
agttccgcaaaccgtgttgtaatgtattgttatttagtacaagctcggatttagaaaacatcgtcatcgttcatcttattctgaaaatcaaagcattgaacttattattttctcattccggacgagtcttgacgatgaaattctgacggctaatgggattcataacaacgggaggaccagcggttcttggccatgcttggaatttctcatccgttgctgcccaccattctttgttagagacagttcctggagtagtccctccaaagatcttattatcagagataactttgtcgaagatgtatgagattccgaaagaaccgatgagagcaccgattatgtacttggctttacctcctgatgccattttcttctaaagctttgccgattcagagacagtgaagcttaaacagtggactccagttccagaacccacgcgtccgcccacgcgttcg

SEQ ID NO: 171560 - DNA, 439 bp, Arabidopsis thaliana
cgttgtgaattgtggtgaatatattactgtcgcgtcgaaatatttagtaacactaagtcgaccaaaaaaaagatgagagacgagaaagtctaaagaaagtgtaataagttagattgctggagtttacacatctatgctcgttctcctctaataaccaccaacagagtaaattggtaacattccggtagatgttttgtcgggcaccaaatcgaatccgtagggttcccgagcattgaaactttagaaattaagctggtaattggagctttttgttgttcttccagcttaggaaataataatagaagaagtcggcatagagcagtgtttgaacaaacccggcgatccatgttatccagtgaacaaagtgcggctcagtgaagtaacggtagatccagttgaggatgtataatccacggtaccccccaaggagaaatatata

SEQ ID NO: 171561 - DNA, 202 bp, Arabidopsis thaliana
aaaaggggcaaatttcacaaaaggaacattaacgggttagttaaagaatcaagggttcggtttaacaatttcttcggttgggaaaacccttcccgaataaaccaaaccaaaacctatactactaaccaaaaccgggactgaagcaaactacccataacatgggcttaagggaaaaagccttttacaaaataaagggggggaa

SEQ ID NO: 171562 - DNA, 151 bp, Arabidopsis thaliana
gggggggaaatatttctattcagggccatatagaccagagttttaacttttaagctcaaagacaaaagaaacgggcccccccccattgcacgacccaaactaaaccacatttttttattttagatcaaactctaagttttccttttatttt

SEQ ID NO: 171563 - DNA, 506 bp, Arabidopsis thaliana
  unsure (1)..(506): unsure at all n locations
aaagaaatgatttttaatatattatagatttagagtctaaagcatcaatctttgataattaaattttttaacatcataataagaatttaattatccaaacgatataacatttgttcttcaaagcaaccaaaaacaatttgcaaagagaatcaacgaagtcttctagcttctctctcggactccagcaaggtgagaatatctccctctctgacaggtcctttaacgttcctcatgatgtaacggtccgagtcagtgaacttcactctaacctgagtcacttgaccccttgatccagtccttcccatcactttcactacaacagcgtgcttgatctgagaatccattctgattcaacaaaacaaaaacattcagagaccaaattttacaaaagaagtgaaaatccttagaaaaagagaattgctcacatttgaatcaagactgtataacctntataaaccaatcacagctctggagaacaacagatgcaaacaaagcagagaaaacac

SEQ ID NO: 171564 - DNA, 434 bp, Arabidopsis thaliana
aaaactacaaccacaaagtagggtaaatttaacttttgaattttgtaaacataccaattaatacttcccaaaatagatcccaactttttgacaaaacattgaaactttttggcgaaagttaatgacattctcagagtttgtagctaataattgcaaaaggtttggtctacattaagacttaacccactgaaattaaaaggagtagaaaaatgtgtttctggtaatttgccagaaaattaattggtttgaaaacttcgaagttgaactagctagagagcgcaataatcgtcagtgtggggaacgttgaccagatgattgtaaatgacataagcacccccaccataaccaagctctacgatagattttcactcggaaataggggcatatccgtcatctaaagtaaaacatatttacggtacttcctgaaaaacttt

SEQ ID NO: 171565 - DNA, 420 bp, Arabidopsis thaliana columbia
acttcaaattttattgtacgattcacaaagcctaataagaaatctaacagggagtcttaattagcatcagaaacagagctttatattctaaaaccgcacatcatccggttgatatctttcatataaagttttatctaacgacgtcgttctggtgaccaatgcggcaacgaagggctgaaatgagcagacacaactctagagtcaagcagctccatgataggtgtgaagctcacgcacctcggtaccttatactgattaatcgatgcgcctctcgagatggcatagtccatgagctcctcaaacgtaccgttccgtaccacacgtatctccaacgggccgatcgatttatcagcgacccggctttgtctataaaccgagtttaaagattcctccatctccaaacagcacttagccatgact

SEQ ID NO: 171566 - DNA, 435 bp, Arabidopsis thaliana
atacgctactattatattcatgatgcatcgaagaattacttcaacattattgtgttgatttgttttcactataccagcaaataacaatttattgccttaccaaacatcagctagtgttactacatttgtactagatagtatcaaatctaaaacagaggagttttacttgggttcttctgtccatcgtctcttcatttcggatttggatcgaacttctttaagattcccatccaaaccataatctctctccatcacaagattgattccttcatctgaataccatccaactccaatgcacaacactccatctttcttcacatccacgtatgcactcacaccacctggtagccacatcacagacacatcttgcatatctatcatctcttcctccccaaacgaaaccaaagtttccggtaagttccttctctttagagc

SEQ ID NO: 171567 - DNA, 174 bp, Arabidopsis thaliana
ccagcacatgaagaggggcaaaacgggagtgtattggtccaggtagcgttttgaatacacatacaggctgtacctacaccattgacaatctcacgacgactgccaaatcacattgaaaaaccgacttctgaatcaaataataagagaggaggatcatctgggatcggtggaagt

SEQ ID NO: 171568 - DNA, 142 bp, Arabidopsis thaliana
attattccaaacccaaaacatcaaagttggacatagggcttgaaactatcaagtccaacagggaaataggggaaatccctccttttggttcacaaggccccatcatttagcaatatttcggcgatgcatagcatttgatttt

SEQ ID NO: 171569 - DNA, 304 bp, Arabidopsis thaliana
ggagaaaaaacccttttaaaataaaaaaacacaaaaaacccacacaagtttaagcccctttcataaattaaaacacttaagagagggtaaaacctttcctaggggcaacttttagggagaaacttctaacataacaaggcctggttaatggaaaggggggccaaaaatgcgggtccatgtttaaaactgggttttccccataaaaattattgtcccaaccatgctaaaactcattcttataaaactttcccattacaccattttaaaaaaactcccaagccaagtaatcaaacccatttgaaaa

SEQ ID NO: 171570 - DNA, 144 bp, Arabidopsis thaliana
  unsure (1)..(144): unsure at all n locations
ttcttttttcttttgnatcaacctttttttggacgggctaataaagttaagctgtgtgtttacccccgcgccttcttttaactacatttgcttggttcaaagaatagaaacttggcaatggccataccataccaatggaccaaa

SEQ ID NO: 171571 - DNA, 298 bp, Arabidopsis thaliana
aaacacaaaaaaatgggtttttttccccaaatgatttagtttttgggacaaacttccaaaaagaaaagaaaatcggcctttgttttttcatagttcatggccacgagttaaggggggggcttgaagagatagagaagattgatttttcatttttgggagggtcccactttcgttcgatatggggcttacttaaaaggccaagcaacttttatgacccaattcaacttttttacctttaaaataaaggtgaattgaccagggggaacattggggcttccgaactggaaaccagattggg

SEQ ID NO: 171572 - DNA, 456 bp, Arabidopsis thaliana
acacgaacgttgacttgggatttactctcaatatgtacattgtccagagatgcatgtaaaacaaagaagagacaacgacaaaagggtactacaatatcccaaaaaggctttttgtttagtttttgtacaaaggctgcgactgctgcgagtaatgtcacaagacaaacctaaaataaaatttatgtgtagaaacaaaaagaaaaagaagaaagaggtccaaaaccaagaacactggctacaaataggctggtctgcatcatttgcttcgcttcattttccagctgactaattttcatagaagcgggttcgacgccttcttgaactttggtgcatagagctacttctgttagctccacttgtgctgatgaactcgtcatcgatctcatctactctatactccggaaactctatggatgctactgagctgtcatcagagttggaattctcatagctaga

SEQ ID NO: 171573 - DNA, 191 bp, Arabidopsis thaliana
gaatgattctgcagtttattgatagggatgaaagccaatgaaactaactgttccatacaaaagaagttacttccaatgatcgacagaagagatttaaacccaaagttgtgtaagcgcggagattacggcctccgttcatgctttgacttttcttaaaccctgtggaaaactctatcttactttagacctta

SEQ ID NO: 171574 - DNA, 179 bp, Arabidopsis thaliana
gcgaaaaccaactatggataatggcgaatttaccttcatgcctgtccatgggcacaccttggggaggaactagcacctacgcacaaaatactaccggagcttccgccaacaaagaacgacgattggcctatgatgaacagctggtgctggatctcaaggatcatgaactcaaacaaagt

SEQ ID NO: 171575 - DNA, 246 bp, Arabidopsis thaliana
ggaaagaagtaatcaagatgaatgccctcccctgaaatcatcatagcaccaattggcaatgcattttgcagttaaatatcagcttccttcaataaaacaaaaaacaaacttttcacatggggaaaaacaaactaaaaataaaccggggatgcatgaataatagatccccaaagaaacagaacaagtggggagaaaaaaggggtttttttgctcagggtcaaagggaacaaaaacctaccttttttt

SEQ ID NO: 171576 - DNA, 265 bp, Arabidopsis thaliana
caacccaaaagttttttttttaatagattaaaaaagaggaatttgttctttgattctttaattgttacaatacaacagcatatggatccatcagtctgatcatcaccatctaaaattaaatcatgtgagaccaactaatcttaagggaatttagtcgcttctgtggattcataagcagcatcagctgaagaagtatctatgtctgtgagacccaactccttgttttgatcccatgacctctcgtactcttcaaatgtgagctgat

SEQ ID NO: 171577 - DNA, 425 bp, Arabidopsis thaliana columbia
atagattaacgatcattaattaaactcatagttacaatgcataaaaactaggacaagccattaaatccagaaaacacaggaatctgctacagcaaagacatacattctctacactcaaaccacctcacagatgctctgcattatttaagaaagacaacacacgaaagtaaaacagagagcatcttaagtccgaaccatatgacaagagaaacatatttactcaggtacaaatttcttcctgagctcagagacgaattcagtaaccttctcaggatcaggcaaggacttagccacgctctccctttgcaaacacttcttaacccaagcaatcagtttcggaacctcagattcgatactgaagttagcaaacttctcgtatgctggaaaccatgtgtagaatccaatcaacgcaatgtctacatagc

SEQ ID NO: 171578 - DNA, 316 bp, Arabidopsis thaliana
aacacggggaaaagaaccccaaacagaaacatgcttattagaacaatctctcccaatgtcgaatcatacaacagcggcaaaaattgcgggacctttcgtatattatcttctttgtataaagcctaaccttggctgttattgtaaccccaaatgaatccatattaaaaagaaaaaaagacgcagccgcaaaaatattacactcgaaaacgactcaacagagcaaaattctttggcctcttgatgcctccaaaaaacatctgtacaatctctttaaggagcacgagccccttgaattctcattatctcgggttagttc

SEQ ID NO: 171579 - DNA, 222 bp, Arabidopsis thaliana
aaggcaaaaagggttttgcataaaccaaaaacggttacatttggggaacaagcaagcagtagtaatgggaccccacaagcaagcagtagtaatgggacccctgaaactaaaatgtaaaggggaagagggtttgaatgatgggcttatgccacggattggagggaagcttaaccagggtttcaatagggcctgggggaggaacagaggcttgaacaaagaacc

SEQ ID NO: 171580 - DNA, 282 bp, Arabidopsis thaliana
gtagaaaaactttgacttccaactctgagggcattttgtatcatagggggggccaatcttgtaatatattgacatttgattagcactaaagaaagatgtggtacccattggactttcttatacatctaaagctttctcaaggtttccacgatttgctccaccaagttaaatacttgaagcttcaagcagacgagcaaatgagatctgaaatctttcaagcatttttagctgttaaggtgcttagtagtagaacgatttggctttattatctgcagggtcctt

SEQ ID NO: 171581 - DNA, 368 bp, Arabidopsis thaliana
  unsure (1)..(368): unsure at all n locations
agagaagaagaagagttacttaaaggaatctcagtgttcaaaatcagttagtcaccaaacagatcgtcgttatcatcttcttcaccaacccctccacattcagtttcagctgctggttgactcacagaagcccatgacgtaccaacagccttggcaagtgagtcaccaccgtaaaggtcatcgtaaatccctgtttttggaccccgtttcaacatattcatagcttcctggagtcgatctgttacacctcctcttgttcctcctgtaaaggctttctcttccttcactttgcctttggngtatgagtgtcactcgcaccagtgattcatatttcccaacgaggcttccttctttgacatttataggac

SEQ ID NO: 171582 - DNA, 268 bp, Arabidopsis thaliana columbia
aagataaagatcaagttttaaactgtaatatcaagcatatgacaaatagtttggtggaaatcaaaacagttttgttaaacaacatgcatcatcctgctaaatagaagaagcattttaaatccacaggttggttttggtctggttgttttttcacctccaggaggaaccaccaagctttatcacttgttctgaacttgaatctttccttggtccaaatcctttatgccttttttgactacttgcgtatccatacaaatcttttagcttt

SEQ ID NO: 171583 - DNA, 329 bp, Arabidopsis thaliana
caaacaattggtatccatgatggcttgggtatgtatatgaagaaatgacatattaagtaacatgacaaggccatatatacgcaacaatcctggaaatttcattgttatgtaaagggacccattaatcaataaccatgaaaaagagaagaaagaaacaaaagtcttataagtcttggcttcttcacacaggcttagagttatgatctgcaaccttaggcctaagctttctgttaaacttggctaaagtagaaaccaggaagacccaaaattaaattatagaaacggaaaaccaaaacccaaaaagagaaacaaaggattaatgatttata

SEQ ID NO: 171584 - DNA, 373 bp, Arabidopsis thaliana
ctccgagacttttccataggtaatacaaaggtctcaacagtttttcctcagaaaaatagcaatcatgaataaaaagccaaaaaagaatcttaacataaaatagtgatttggtttcaatcccgaaatcaagaatcacatcacaggaagagataatatctaactaagacttattgtacgccatcgttttacagaccggacaagagttcttcctcacaagccattgattcacacagtcgatatggaacctgtgcccacatcgtaattcccctacctcgtccttcgcctcatactcgtcttgacagatgatgcactttctatcagcaactgttgtatcttgccggcatggtttgactttccgaagacaacttttgat

SEQ ID NO: 171585 - DNA, 446 bp, Arabidopsis thaliana
gcatcacacaaatcaaaacgtatttattagcaacaaccaaatatcttaatattttttataagttaccaataaataccagctttcccataatacttaaaaaccctaaccttaaaaactcatttattagagcatttttgattttgtgctattacctactacccttggcttactactaacaacatcacacacaactcaaactcacagaagctcatctataaacgatttccctttaaatttctccattttgaatcccattttctccatcctcaaccgttctgcttcgatctcaaccatctgagcccgcgtctcctcaatccgccgcttcacttccaccacttccttctccatcctaaccaaatccgtttcttgagcctcaagctcttctctcttagccttcactaaaccatcatgcctctctttctcattttctacatcttcttgagact

SEQ ID NO: 171586 - DNA, 253 bp, Arabidopsis thaliana
tttctttttttttttttttttctttaagacgggatcggtttatatgaaaaatggtatttacttaaaaaaaaagtaacaggtcataaggttaaattagtgaaacttcttttgaaatcttacaagttacaacactacgaaaactcttatctttggagtatcccatacattaacaacaacggttcatgctgttttaaagaagaactagagcgcttaattatactgatccatgacaatgttgtgaacaagttgaaca

SEQ ID NO: 171587 - DNA, 363 bp, Arabidopsis thaliana
atgatacactacaagctatattgtattggtaattattctaccatttagtaccattacatgtgataagcaccatacttcatcaactaacaactaaattttcaatcatgaaggcaccaaacattatcttccaagtatagcgaacacgatataaaattgtctaagggatccaaagagatggcaacaaaagagaccgagtatcttacgactcttgaacgatttcctcagtgacatcgataagatcctcaaactcaacttctttggcttcatattcatcttcttccacatcacttacttcaccatcccgaaggttttgcctcacgagattctcctcttcatgcagagacttccactgcattacccatt

SEQ ID NO: 171588 - DNA, 218 bp, Arabidopsis thaliana
tctttttttttttttttaacacaatctatagatatcctttattgaaataatcaagaccagagctaaagaaacaagagatgattagaacaacaacattgccaacaacaacaacacaacactaataacaacaataaccataagaactaagaaagaaaaaaagaacatctgaagaattgaaacctcaagtaaagatgacgagaattggtatttacccaaat

SEQ ID NO: 171589 - DNA, 282 bp, Arabidopsis thaliana
  unsure (1)..(282): unsure at all n locations
caagtcaagctttttgatataatttttttcaatgcacaaaatcgagtaagaaaaatcaaacacagaataccattaaactgaataggaaattcagagaaaaaaaaagggggcaagtgtttctcggagcatttccagaagcctagccattagctttatccttttacgtttctcgtcaagctgcacattagccttgatggtcgaccatgttccctgccacaagncaacttcttgactcaaagcctttgaaggccattttcttgctgaagcctgcttcatgctttg

SEQ ID NO: 171590 - DNA, 424 bp, Arabidopsis thaliana
gcaaaactagaatggccccatatatataatcggaacttcatataatacaatgttgtaaaaccctgaatctgggtgaaaaataaatacaggcaaaggcagcaacaacaacaggactctttccacactaatcgagttgaatatgagatcactcaggcttaaaagatattggaattccacagtatattatcatatgcttttccattctacagtatcattagcagctcagacggggggcgacaaatctcttatatgggatatgtgaaactaaatctcgactgctggataatgcagcttgactgttatgacaatccaaatgtcccaacaaatccagggagatactatacctcctctaggagaacaggtctgtcactgaaatgaagagctcagattttcatcccgagtgcaaggggtttttcccctcaca

SEQ ID NO: 171591 - DNA, 234 bp, Arabidopsis thaliana
acaacaaagggggaatcagattagatcagatttcatttttgtacataaatgcttacaagataaagcaaaacaaatgttacattttgtttcaagataaacaaaacacagggttttcagggctgggcataaacaatggggtttttagcaaaggttgtttcagggagggatgggggttttgcttccacaaaaaaagagactaggagattcctgagctttggggggattgcagttttt

SEQ ID NO: 171592 - DNA, 227 bp, Arabidopsis thaliana
ccagcaacccaaaacccgataatcatcatcctaaaaaatggggtttgggccttatggggggaagctaccaaaaggttttaggggtaccacaggggagcccaaatggacggtctatgttatagctaaagagggggctccttttttggacttggcggccaacggggtctccggtttttttttaacgggcttttttttttttgacaaaataaactaaagggggcaggggt

SEQ ID NO: 171593 - DNA, 446 bp, Arabidopsis thaliana columbia
cttgaacaaaaaaagacttctattggccaaatgctgaaaaaacttgcgaggaatgcgcgtaaagcttgtccaaatgggaattcacttccacaatgggtccttacatcgagagacagaggtggtcttgcatgcaacctcgagggcattatagaatcaccgattacaaatggctacaggaacaagtgtgagttctcggttggattatctcttcaggggaagccaactgttggattcagtctaggaagtttttgtgcgggtgtgacagcagtcgaggagcctgtggattgccccaacgtctccaaaattgcttcttaatatgcttcaatatttcagaagtttatagaaaattcaaaattccaagtttggaataggtttcaacatagtgggttctggcggcaattgacggttcgagaggggagaaaacccggcgtgttttcaaatgatga

SEQ ID NO: 171594 - DNA, 277 bp, Arabidopsis thaliana
gggcatcggaaaacatattatcttgtattatattattgcgtttcacgttgacaaaaaaaatgttagatggcatagttaattactcgtagcagtttcgacttcaactctattggccaaaaacgcatcaatcaaatccgatgctttgtgagtcacagggactgtgttctcctctcttgtctcagtctcgcattgggcgttgggtcttgttcttgatttgacaccaactgtttcagcttggtcagagaacatgacctttgagacgtgtgagctgcaaatc

SEQ ID NO: 171595 - DNA, 279 bp, Arabidopsis thaliana columbia; identical to SEQ ID NO: 122944

SEQ ID NO: 171596 - DNA, 399 bp, Arabidopsis thaliana
gcgtctctatctatgtcaatgaaccctagaattacacttcaccaatggcagattctttatttacacacccaggacaattctaataccttataaaaaaaaagctctgttaaaaataagatttgttgtaaacaaaccaaaaaacagaatgattactactagagtactagctagctactgttgaatcaatacagtgttgttgttaccattgatggttccttcatttataatagtcgggttagattcgatccgtggagttacggcctctactgatgtgacacgacgctctattattgctgttgttccctgttctattgttctgcgacgaagatgaagatgacgaggaagagaaaaactgaccaaagactactgaaccacctctgattgagcaaacgggaacgt

SEQ ID NO: 171597 - DNA, 386 bp, Arabidopsis thaliana
gttcacaaggatagcctttttcattgtctcactgtgaacatacaagggagagaattagggcatcgaaagctttcattataacacaagcaatatccttctaaacccaccagggctttttctccatcaagtccttggagaaaacataacggaattttgaactgtatggcaaccattcgacgacctgcgatgctttcttgttgtttggtttgccttgtacgcatttttgtattgattctccaagcttttcgtctgcgttatctattaaccatctcatcaggtcatcaaagctcagagaagcttcctttgtaaacctctctataatcttaggtgataacactttcttctgcatctttacaaccacgtttgctccaagaaactctcttttt

SEQ ID NO: 171598 - DNA, 412 bp, Arabidopsis thaliana
aatcttaaacacatccagttgtttcactgtagaggttaagcctaagctcagcaaaagacattagttgttcatctttacattagaagctactacatgcgtcttcttcttcttctctaacataagttttcagagagggaatactttcttgtgcttgaagtataacacaaaaccaaaatacaaaaaaccgcatccaatacctgttatcagtaaaacatactggaaagtcgtcggattctggaaaacagagtcttgcaaattcatcccgaagacagcggttacagcggcaaaaatagctgccacaaaggttgccgcggtgagaagcagttgaaactgaatcaactgattctgcacattccccagcttaatgttgatcagatcctctgcatcatctatatactctttcagcgatgat

SEQ ID NO: 171599 - DNA, 263 bp, Arabidopsis thaliana
aattggaaaggctcgatggggattcagtctaatatgctcgggagaagtaaaatatgcatacaactttatggtaagttttgtaacttttccataaaaattaaagggcctagatccataaaatataggcaacgttttttttgcctttttatccaagaaaatacaatataagcaaaggcccatttgcctatataaaaccctaactttggaaaaaaaaactttgtttttttaaccttctcgtttcaataaaatccaacacaccccaa

SEQ ID NO: 171600 - DNA, 335 bp, Arabidopsis thaliana
ataaaaacgttataataagcaacgtgtcggtaatctcatactcttacaatcacgcaaaagggtcttgacactgaagtaactatcttaacttttaagtaatagaaatctcctcaagtaagtgatcaagatacatactcaccctgatcaaacttgattgaagaatccaacactgaaaccactcacttaagtgcaaattgcctaccattcataccgaatcttgccctagtcgagccatctgtatcggcatactttaaaaccaccttgccaaggcctgccactggcttaccattggggcttggacgcggaatcacaacattggtcaaagcaccaaactt

SEQ ID NO: 171601 - DNA, 364 bp, Arabidopsis thaliana
gaaaaacgatattaatttcccaaagaaggatatttagcaagactttggtatattacagcttatattttatattgcagttaagagtccatcatttaaacggcttgagcttccaagaaagcattaaaattcttggcggcttctaataaccgtggagagatcgccggagacgtcgggtatgaaaccggcgatgatgtggagaatcgaacctgacgcagtgaaggagactccattgcttttctgtttttcgaaccagaaacctttaaaacacctttgatctctttctcaacaggttccttgtcgaacacgaaagccgctgaaaccggttcgtcatggtcgttatcacctgaaccacttttgattagct

SEQ ID NO: 171602 - DNA, 415 bp, Arabidopsis thaliana
cgtcaagctgctttagccatggctatggcggcgtctattatccaatcttctccgctctccttcaatagcaacaacgcaaagccacggattcatagttcaggatcgctcggcggaatcaaaagccaaaatagagtctctccattgagtgcggttggattaagctcaggccttggaagtagaaggaaatctcttttgatatgtcactcagccattaacgcgaaatgcagtgaaggacaaactctcaccgcttcaccacctccctcctctcccggaaaaacccatctccgtcgtctccaccatacaacttccgatcaagattcaaatactcaatggctctaatcatctcactccccataggaacaccaccacaagctcaacaaatggttcttgacactggaagccaactttcttggat

SEQ ID NO: 171603 - DNA, 348 bp, Arabidopsis thaliana
aatgtctattgccctatttttaacatgattcaaaaccaaaattaaaccaattccatttttttctttatacatttctttgtctttaactttttaccttaaacaagactgtttgaagaggagtggaaaagattcgatgaaacctatgtttgcttcttgcttgcttaccactctaatgcacctcaggttaggtgtttggtcctgtgaagtttgaggtagcagctgtattgtactggaagatcctcagtttcccctcctttgtcccataaacaagacctcctccaggagaaggatgaaaacacgcaacgttcacttcatcctctgaacttggcagtactctcacaagctcca

SEQ ID NO: 171604 - DNA, 357 bp, Arabidopsis thaliana
gattgaacattgtgtattgaacaaacaaaatgggataaagacttgtcaaagcagcaacaagttccaaaagagtgactgagagcttacaaaaaaggcaaagcgataggatttgataaggtttcaagcctgagtgcctgtcaacgacttcatctgaatgtgattagaatcagcattgttagtcggcaaagcttcataagaaccagttcttctcactccggccgccatcaccaccatcgtgtaagtcacaaagatgaggataaccacaagcacgacgtgttcagtgaacattagatccaatatagaaacagctcttagcttagagtcctgaatatcacattgggttgatccttcaacacc

SEQ ID NO: 171605 - DNA, 423 bp, Arabidopsis thaliana
aaaaaactaataattcttgaaacacaaaccaaattaaaacacaaaaatagtacaataaccaagttgatttaacttaaaaataaaaacaaattgagaaaattctccatactttttccggtgatgtttcctttctacctttctcaagaactctcctccggtgactccggttttctgcagagaatcatatgcatcggagagaatattccggtttcacctcctctggtcaaataatcagcagtcttaaacaacatctcatgaacatcaacagttcctttaggagcaactccaaccgctgacaaaatctgaaccacaatgtgattcctccaataagcaagcctacccatcttaagcctagtccaccacggctcagccggtggactcgccagatccttctccttcactatctcaaacccaaccttttta

SEQ ID NO: 171606 - DNA, 440 bp, Arabidopsis thaliana
caaaaacccattctatgaacacaatctcacctccttcatcgtgtttcatacctctcttcccaacacgatgctcaccaatactaatctcttcttctttctctctttacttcttctttcttgttttctccaagtttcttccaatggagacgctgagatattgagtagagttaaaaagacccgacttttcgaccccgatggaaatttacaagattgggtcataaccggagataatcggagtccatgtaattggacgggaatcacatgccacatcagaaaaggtagctccctcgccgtcactaccattgatctctccggctataatatctccggtggctttccctacggattctgtcgtatccgtacactcatcaacatcactctttctcaaaacaatctcaatggtacgattgattctgctcctctctccctctgttctaaac

SEQ ID NO: 171607 - DNA, 412 bp, Arabidopsis thaliana columbia
aacagaaacaaaccattcattgcataaacaaacaacaaagtacaactttatttgtaatttacagttttgatattaagccacatgatggcgtcctcaccgcaaccgcctccatttgcaccttactgttcaccacattttcgcattctctactaggtcaccaccacaactaccagattatgctgctttcaccatgtttccgcattcaccgttacaaccaccgccacagccgctagcatttactgatttcaccatgtctccgcaaccaccgccgcagccaccaccgcaaccacccccgcaaccgctagctttagctgctttgcatctagccccataaccaccaccactagcgttagctgctttcaccatatttccacattcaccgctacaaccactaccgcagccgctagcattt

SEQ ID NO: 171608 - DNA, 336 bp, Arabidopsis thaliana
aaaagttggaggataataatctataatctccttagatttgtcctagtatttaaatggagtctctcaaatctcctactttccgacataccaaaagcaaaacaaagaaacttagtcttggcttgggtaccaaacttttgtctcaatcatcttcattgggaaggccatgcttgtacatgagctgttccaaagcctcatcaaattctttctccagatcaaatatctcctcgggatgcctcttcttcatgtcttccatcttcttctcttgatcttttatcagcatctcccttttttccacaaactcctccatcttttttttttgaaactcgatgaagcttg

SEQ ID NO: 171609 - DNA, 170 bp, Arabidopsis thaliana
ggaaactggtgtctgatgaaaatccacctagcaatataagcgtgaactttgatgatctaggagctttggaaaatgagaaagaaactaaaaaagagtaggagatgcttgctctttatagaccagccaagcttaccaaaggccacatgacaaagcctaccaaaggtatactg

SEQ ID NO: 171610 - DNA, 304 bp, Arabidopsis thaliana columbia
atttctgccatggttccatgatggttgaagctttggcagccagagatacactcagagtaccacacacttccgttggtggaggtcatgtcaagaccgcgagtttcaagttcacggcggttgaggcaagaactagaattactttcttcagtggtttttaccataccaagaagactgatactgtatctttatgtggtcctgtcattgacgagattgtggtttctcatgtcgcttagattaagtttactctttatgacaactgcacttgtgttcttagactggtcatggacttggtgccttgctttgt

SEQ ID NO: 171611 - DNA, 220 bp, Arabidopsis thaliana
tcgcggacgtgtggtcggacgcgtgggcggacgcgcgggtgaggatttgcatggagcccctcttttaatattggctaacaagcaagacctcacaaatgctgtatcggctgaggaactggaccgataccttgatttaaagaaattggatgaaagagtgttcatgtttgaagcagtttctggatatgatgggcgaggaatcaaagaaagtatagaatggctg

SEQ ID NO: 171612 - DNA, 459 bp, Arabidopsis thaliana
atcacttgaactctccccagtgagatgagccggactcaaaatttcatcatctttctgattttcttctgacactggtcctggactttgacctggctttcccttgacctttgggcgagctttcctttgagcgtcccttgctttaataccagaatccggggttatataatccaacaggtctgatacactgagatggcctttgctggaaatagaggcgtctggcttgggagtaccatttcgtgcagcttcttgctgttccagagctttggactcgaaatattcaagccacgcagccgcatcctgtgtccgaagatcctcagggcctagttttgcttgtagaatctgtagagtggtctgctcatgttgaacgctcaaggagtatgcgtccatcagagaaagagcaatagcaatggcatggtagcttgcagcagtctggatatgatcagctccaagtagtctctg

SEQ ID NO: 171613 - DNA, 282 bp, Arabidopsis thaliana
tttggtcgttcctgcgtcccataatttattatggagaagggagagcaagtgttagcttttgatctttcttatattcttctctgaaatagtaacacactgtgaagagtttttcctacatctgaatggtgtctgatccagctgagaacaggaaaaagaagaaaatggcgtttgtgacaactgcggaagtttgtgacgcgaattaagagctgattcggagtggtcagctacgatctatgcaacccattttccagatttatggccgtcgacaaatattctcaggac

SEQ ID NO: 171614 - DNA, 309 bp, Arabidopsis thaliana
agtgtaaagtaattttcattatattctcatgtgtaacgaaattattactttatgctaacaatttgttaggtgttttaagtttatgggccaagaatatatttatagaaccataataataatattaagacccaatctgtgaaaagcccaaaatgcttaaattgttactttcttcaacagacgggaaagctagcgagtgcggatcacgcgcggagaacgggaacgatcggataatggttccaccaccgtgaatgcgtcggagggaaggtctccgccgtaaagaagagagatagagttcgcgtggagaaagct

SEQ ID NO: 171615 - DNA, 168 bp, Arabidopsis thaliana
cctgaaaatattgatacaaaactcagcagaatgttagagatacagttaaatgtccatgagcaaattacatttgattagatctatgtgggaaagatctgattatggccactctaaagaatcatactgaaatgttcgaacgacagaaattccactcctgtctggcaacag

SEQ ID NO: 171616 - DNA, 169 bp, Arabidopsis thaliana
ggttatgtgacactacgtaataaaataatcacagttttcagttttatttgccccaaagtaagataatcaacaatctgagacataataaaaggagaaaattatgaacaaaaagtagcagcatcactctctctctgtttggtaactgatagatgagcatttaatgaatgtt

SEQ ID NO: 171617 - DNA, 364 bp, Arabidopsis thaliana
acttgagaaataacggggagaaaagcatgttgtaggagcagaaatgcaagatggctgttggatgcaagcaggttgcgcacaataacccgagtttttttgcccttcagacgcaagaacagttgatctgaccactggggggctaacagtacatttcaaggggaggtcgaagtcagaaagcatcacatgtccatcatctttaacaagaacattctttggctttagatcgcggtatatgatgccaagcatatgaagattttccattgcaagaagtacttccgctacataaaactttgctggttgttctgaaaatcgcttcccgggctgtctttgtcgaagggtatgcaagtcaccttcaggacagaac

SEQ ID NO: 171618 - DNA, 152 bp, Arabidopsis thaliana
tatgctatcggtctacgacagaaaaaggaagaaggtccctttttaaaggtaatggggtctgtagaaaatttgtgttcgaagaaacaagttttaaacttgatgggttttgtggtctatccggtgaagctattgatgctcttggtgcacatttt

SEQ ID NO: 171619 - DNA, 289 bp, Arabidopsis thaliana
ggccatgtccttccagggggttccttgaaaaggtttcaatccaaaaatttaaggcggccccaggattgtcgggggcaccttctttaaaagaaggcttggattttggctgatgaccacaaaggttttggttccttgttctcctacagccttgccatggccctggataccatttaatccattcgaaacacaccaccgttcagttaaggttaaagaaccaggggaggattaatttgcaggtttttagcaaaaacctgaaaggtccacctcctttttgtcctttgaaatgggg

SEQ ID NO: 171620 - DNA, 153 bp, Arabidopsis thaliana
gggtttgatacgacaacgcgcacgatggaaaggagaagccggtataagaccaggaagatgagtctgcaggtgaagaggagtcttaagaggatgatgactctgacaaaggaatggatgttgatgagaaggactcagatgatgacgaggaggagg

SEQ ID NO: 171621 - DNA, 213 bp, Arabidopsis thaliana
ctacaagggggggataacttaaataaacccccaaacttgaatcaaaaacatcacgggtcccctagagatttttcatttgtaaactagaaaaaaagattttttgggccataaaacgaacatgattttctgtttcaagaaccaaaaaacaatgccccaaaaattaacaagggggggccattgattcgaggagcaacgcatagccctttgggacag

SEQ ID NO: 171622 - DNA, 130 bp, Arabidopsis thaliana
acgtcatcaacaatttatacgcattggaatatagaccaacatttagtaaaacctggaccaaatacaacaagtctgatgttaaaccaccgtttctgtctagctcgattctactgtgatgatcggagttggt

SEQ ID NO: 171623 - DNA, 275 bp, Arabidopsis thaliana
ctggcccccaatgggaaaaaaacaattttttgcaaatcgcaactttacacggtttctggacttacatacccttgatttctggttcactaacaataactagaccgaaatacatgggaatcgggaattgaaaatgaacatttttttttttataaagatttaactcaccatccctgggggggtttaaaaagggaggcaggggctggtttcttcattcatgggggtcttcatcatcattcattacaaaaatgtccctccaatgtatttttaaaaccagt

SEQ ID NO: 171624 - DNA, 371 bp, Arabidopsis thaliana
gggaaaacttttggctttcataactttaaaattaagctggagcttttaaagttttttctcaagagtctcagagaaagtatcatttgaaatcatgtggatttactattttgttatacagactcatactacaaatttagatttggacatttgacacacaaaaatacatttcttgagaagcttatttcatacacacttttggatggccatttcttttacagtcgttgccagtctctggaacaccttcaggttatgtcctacttttccctcattcagtaatgcaagcctatctatggtaggtgacaatttgccacagagatctgtaacttcctgttgtatatgggattttgaaccatatgatcccctttcatttg

SEQ ID NO: 171625 - DNA, 278 bp, Arabidopsis thaliana
gggccaaaaaagagtttcaagcggttataatccataataactggttcaaatagatctccccacccctaaactggtaaacccaaaggcctcgaaagaacctttttatttccacacaaagggaacacacttggttagcccacaccaatcaattttttcctttccttaacaaaatttcttcattcaacaataacttccattaaaagctccttttccatttttttttcctttaaaatttccgggaacccttttattcccatatttttaaaaattttggaagg

SEQ ID NO: 171626 - DNA, 153 bp, Arabidopsis thaliana
ctcggcgaatttggcttggtttcaccgctctctctgctttttccgtttgatcaacctccaataaatcctcgggtaaaaacggattcctctaaaccggacgaagaagaagcattttcacgagcctagagataaaggtacagtagaaagagaaag

SEQ ID NO: 171627 - DNA, 133 bp, Arabidopsis thaliana columbia
atagaaaccaaactttatttaattattttttggttacaaggatttaattagcaagggtgaaaacaagatacgcacactttgttttaataaaagggaacccttacgagaaaaaaagaaagaaagatccctttgg

SEQ ID NO: 171628 - DNA, 132 bp, Arabidopsis thaliana columbia
ttaacgtatctttctttctttttttctcgtaagtgttgccttttattaaaacgaagtgtgcgtatcttgttttcacgcttgctaattaaatcattgtaaacaaaaaataattaaataaagtttggtttctat

SEQ ID NO: 171629 - DNA, 237 bp, Arabidopsis thaliana
ggggaaaccaaggggttacttctaggtcattaaaattaatacttcgggctgcattgggtttaaccaacttttggaaatccaaaactgggggcaaaatgtaataaaataaaagagtggttttggaacacaaaagcaaatttttaaaactccttccgttccttaatattggaggctttcgggaaaggcttatatttcatcttcctcaaaggggtttttttccggataatcaccaacctt

SEQ ID NO: 171630 - DNA, 169 bp, Arabidopsis thaliana
tttaaagactgtgagagagagagagagagagagagagatagagaccccacatagagcactaatctttacatccctaactacgatgattatcacacctaccgatctcgctttctttctctctgatgaaaagctaacggaaaatgggggaatacataagaaagagcaaaat

SEQ ID NO: 171631 - DNA, 133 bp, Arabidopsis thaliana
gttctaccatatttattgatgctgaacgaagaaaataattgaccctttcaaaaaacgagaaaattaatgctgttttcttctcttcactcacatgatgaatcaaacacagatgacatcaaacccatattattta

SEQ ID NO: 171632 - DNA, 415 bp, Arabidopsis thaliana
  unsure (1)..(415): unsure at all n locations
tttntttttttttttttttttttttaatacaaattaactggggctatagtgcagcacagcagtacaagttggggcttatattcatagaaataatattggctttgctaaatctaaactcatacagatataaagggaaaaataaaagactcgagatactttagcttatatttattataagggtttctacaaccacaagaggttacacttacattaagccaaagtactaaaactcttctgtgtctgaaaatggattccggaaggttttggtgctagcctaataatcctagggaaaatcttgtaatcctcgatgttgaaatcgatgagcctttgctggtacagcccgaaaggtgagcctgataacctgaggctaaagatttctgtgttgactttccagtttcccatcaataaacttttg

SEQ ID NO: 171633 - DNA, 190 bp, Arabidopsis thaliana
gggggatacaattttttttatgatcaaaaacaattgggtttacttttttaagggttgaaatttaaacagagggtaaaaagttgcaacaaagatcagccaaattacataacacttggtttaaccaaaagggaccaaatctcttttttgaaggtttaaccaaccaatccactagattcgatcaagctccttt

SEQ ID NO: 171634 - DNA, 368 bp, Arabidopsis thaliana
aaacaaagctcttacgagagtaaaaaaacgagtgggttccaacacaaaaataatacacacgaaggcggcaccaattcacttactacatacactaacagaagaaatttgcttaccttagggcagtgtaaaatcaaatgaagccttgaagagaatttcgactgcttcaaagaagagaggagcgatctcaggggttggagtcttgactgcacatttcacaccaggttgacccactatggccgttagttccagcaggaacggtgtgcctcttggtaccttggccgaaagatagaggacgtctggggtcccattcttacgctttgctatgaagaacatgtttgatgcggcgagtaaatcaagtgttgactcca

SEQ ID NO: 171635 - DNA, 381 bp, Arabidopsis thaliana
gataagagtaattaattgtacattttgggtcttgaaagagaataacgtacatgatattgacagagaccaaaaagagtacattttgtgtcttgaaggatgatggagaatttatcatgtggaggagtgagaagcgtgtgaacgtgaagcccaaatgccaaacacaagaaaccagaagacgaacaatattgcccagtaacgtgctggtccgtacctgattcttgtcagcacaacgaatctgaagaagatgactactgttaaagcacagagaccacctagaagtatgtgtagaccactctttgcagttctctttccgacacgaggagcaatgagccaagccaaagtaactgtgagtaatccggttgcaagtagtattccggtacc

SEQ ID NO: 171636 - DNA, 452 bp, Arabidopsis thaliana
gttaatcacggtctaaatcgatttaaaatcgttttggtcaattaccacggtttttacatagaaccaatcgccaaaccgaagctccaccaaaaactaatataataaaccggaatctttagcctaccgttgtttgtttcccggttaaattaaacatcttcaatcttgaatcctagagtcacctgatggtttcttcctcaagctcatcaatattccctcaacaagcttatcttcaccaaaagtttttgcaggcttcttatcagtgtcccaagaacccagaatttgaagtaaatcactctctgtttcatcttctttcttcttcctttccccaccgctctgttttgaagaagctttttcctccatctctgagtcataatcttctccctctgaaacagatgactcattctctggacacgtaagcagcttaccattaattgaatgttatttctatgata

SEQ ID NO: 171637 - DNA, 462 bp, Arabidopsis thaliana
aaagaaaacaatacataaaaagggggattcaaagagagaatctgcacagttccatctaacttcttatgaacatcaacaacaagtcaacaactacaatttcacaagcagaatgatactaattactttcaccattaggttaactactattacattaagaattatttttttctttactttgtttttgtaagttgaagccagatttgttcgaaaacatggatgataagatcatgatactcctttggattcaaagtaaggtagcaagcaagaaggtcttccaagtctttcgaagctctgatgttgttctcttctatcatctcaatcattgattccctgaaatctttctttggatcaacggaccgcttcatcacagcgaagctctctagaacatcttgtttgctctctgatcttctagaagtgcttctacgagtacctgagagttgaattctaggtgaattcactctt

SEQ ID NO: 171638 - DNA, 323 bp, Arabidopsis thaliana
ttctttttttttttttttaccacaaatcgtttggtgtgaaacttttattgcaatttagctggttatgagaagaaaatacactaggtctaccttcagtcgcttgattactttctcaattcaatcttgaaagaaatttctaacgcatttgaatacgagagccgactatctctatcttccctaactgaggattcaccagcaacagaaaataataaatgtaatactgacaagaagaaaagaaatgcggaaagacattatattggctatatacctctcttccctgtcttcatcagtatgatcttcataagttggagggttcaataaca

SEQ ID NO: 171639 - DNA, 350 bp, Arabidopsis thaliana
ggaaaccctttaaatttgtatataggtcaacattaatgattcatagtccctctctgtactatagtattcttctcatgtttatattttacaccaaaacattcatctacttgcttctggaaacaagttttaaattaatatgttaaaactcaaaatctctaattaattccctttttttctttacaagtcctctaagaaaagaaaaaacataaagggaaaaaaaaaaaaaaaaggagattagagaagactcaaaacgattagcctgcaagacatggatcattacaccacaccataagctcaaagcgacaccgtatcttcttcttatacaccaaatttcacacaacacctgacgg

SEQ ID NO: 171640 - DNA, 412 bp, Arabidopsis thaliana columbia
cggacgcgtgggctaaaggtttcgactttactgtttctattttcggaaagagagtgcaagattgaaatcgaagatgaaggcggcaacaaggccgatccacgccgtgacgacatgggttcgtcggcaaccaccaaaggttaaaggttttctcggtgttgtctccgccatgactgccctcgttttgttgagagtgattgttcatgaccacgacaatctttttgtcgctgctgaagctgttcattcccttggaatctccgtccttatctataaactcaccaaggagaggacttgtgctggattatctctcaagtcacaagagctaacagctctgtttttggcggtgagactgtttgaagttttgtgatggagtttgatattcacacgttacttgactcggctacattggtgacta

SEQ ID NO: 171641 - DNA, 135 bp, Arabidopsis thaliana
ttcacgcgtgcgtcgacacatctggtatgcaaggtgattacagaacctttgtggagattatttccgaaaattctgaggatattgtgcagagctggcctctcgatggctactctatctgggttgatggaatggatg

SEQ ID NO: 171642 - DNA, 395 bp, Arabidopsis thaliana
agagagaatatcctcggaaaatggcatcatataaccgaatctccaaataggttcaaaattgataacaattcaaaagcaaaataggtgcaaagtagctccgccacctccgatcaagaacccagttccgggaacagagttccgatggagaagaaacgaagctataacacgcgaccaaataccaaactaaagtaaagaaactaatattgttttttgattcatctgcggatagagttttgaggattcgagttcactttgcacccttcttaactgcagccttggtaaccttggctccggttgggtccttcttgtcaacactcttgataacaccgactgcaacagtctgcctcatgtccctaacagcgaaacgtccaagtggtgggtactcagagaaggtc

SEQ ID NO: 171643 - DNA, 308 bp, Arabidopsis thaliana
ggggaatcaaaccgccattttcaaacgtttctagagtctttccaaatcataagtctgttaaaagagtttaaaaaaaactgagcaaaagcttggatcatttgtaccggggaaaaatccttagatttttaagaagaaagcaaaccaaaatccaaactaaatcgaacacaaagcaataattttaatggggagggagaattcagcaaatgccgctatttagtgtagaggccattgcagtagccgttattattttttacattagccaagccattgggagatttcttggaagttccattgatgaaaatgtttgt

SEQ ID NO: 171644 - DNA, 484 bp, Arabidopsis thaliana
agtcaccaattcttatctttgtttgatgggtagaatcatatatggttctggacaagaaggttatatatatacacacacaagcaaccatttgttgctttttggatacaaaacaaaaagcaattaaagtaccaattgattaagcctaaatcgcatcaattgatcttctcatgctaatatgagctccaaggagtggtccaatgtttccatccaagaccgatttcaggtccagaatctctaaaccggtttttctatcaaccaccatcttgtgacccttagagacataactcctggtttcttcccgcggttccaaaatgttcttgctgtcgattttatttacatccgaaaccttttgctcttttgctatcacaagtagcttcgccttcaaccggtttagagctttgatcctgtttgcaaaccggtttctttctcctgaagattgtagtgttactccactcggaatatggtggatacaaaccatattctc

SEQ ID NO: 171645 - DNA, 479 bp, Arabidopsis thaliana
cttcaaaatctcaaaattctatgacaaaacgatagtctttgtttatgtcagtaccacaaagaggtggaaaaaaacaccaaaaaaacaataagcaaactatacactgagaagaaaaataaaagagagctcaatagatgttttatactaacggtagattagatcaaagatccaagctttactctacatagagcagaacccagaatcccttcatatctcttttattctagcaccgataatctactgaaaagaagacacttagagctctgtctctttgtcaaagaagtcccagccgtcatccagaagctccttacgttcattaacagaagcttttgggctcttgttattgctcgaggcttcaggtgtttcataagatgcttccaaaggcttctccgtcaataagctcttcatggatgaggcggaagaagccagtttacagctagtctggcttgaggagattgattggctcaatggcactcggt

SEQ ID NO: 171646 - DNA, 277 bp, Arabidopsis thaliana
aatgatctgcaattttctcaaacatgatcaaatcataaaagaacgggttgattaagtacttcaactaactaatgctgaattacatagatactatatccctacttatcaatcctaaagaccagagggaagcacagccggaatgtgaatcttagatattaggctctcataagactagaatttggaagccatggcaacaagaccaataggaggagcctgtgagtagctgtcaatgttctcttccaagaagctcatatcatcatcgcttatagggaaatca

SEQ ID NO: 171647 - DNA, 494 bp, Arabidopsis thaliana columbia
ttcacgcgtccgcttctctcaagaacaaaaaagaaagaaagccctcacattgctgtgtccaaagagagtcttagaatctcaaacctatctcttagggagaaaccctgattctatattcttacttgctttcctttaagtttctgtctcgtccagagggacaaagccccccaattccagtcaatttcctttgtttttgatggattgagtttctttctgttggagaaagaaaaagaaaagagctacacatacacttgcagagaagaagcaacaatgagagaagagaaatccaagactaataagctggcatggtccaagaagatggtaaggaaatggttcaatatcaaaagcaaaacagaggagtttcaagcagatgatccttcttctgctggaattgaagtagagcatagaagtagcttttcagctgagaaagcaccttccacaatcaagaataccaaaactgagaaactcagtaagaactgggagcagcaagctcg

SEQ ID NO: 171648 - DNA, 154 bp, Arabidopsis thaliana
aacgccattacaagaatcttaagcaggggacttcaaaaaagatttgagaaaagaaacaaaaggctctactagagagagagaacaattgctttgtatcttcctcagtcgatatagatttatagatatagatagttctctattgcatatagaagaa

SEQ ID NO: 171649 - DNA, 441 bp, Arabidopsis thaliana
gttctattcctgtttgaatatgcgactgtaacaaaattcatgaaaattgagcttttgtatataaattcctactctatgttctgtcatgatctgtctcatttctcttggaatttgtactcttgttgttgttctgttgcctcttccagtagaataagcttgctggaatctgatgttgaagaagagccgctaagtattgtttgaaaccatcgagcagaagctttaggtatccttgtgagattgttcttgtagtcaacatagtagatcccaaaccggaccgtgtatcctgagttccattcccaattgtctagcaatgaccacacaaaatatcctcttacgtcgcattcatcattccttatggcagctgataagtttgagaggtaatctctgtggaagccaatcctcttgtcatcttttaatgctttttccatgtctatgaatgga

SEQ ID NO: 171650 - DNA, 308 bp, Arabidopsis thaliana columbia
gctatacatataacaaacacaagaaaacaccaaaagaccacatatccttccaatggccccccttcaacgcaccatctcggatatttcacaccaaatttcaatagacaacactctaacaaaagaaccatctccaaccgcaaccgcaacaactttgttatccttatcagcgatatccgaagtggaagatgcaaagtgtgagtgttgtggcatgtctgaagagtgcacgccggagtacatacaccgtgtgcgttcaaaattctcagggaagctgatttgcgggctgtgcgaaaaagcggtggagggggaga

SEQ ID NO: 171651 - DNA, 339 bp, Arabidopsis thaliana columbia
gataaagaacacatcaaagtctcaaaacttgagaagcaaatcgttttaacttccaaaaaagtaacaaactaaaagcaaaagaaaactccataacattgtttaaaggataacatctctgagataagtagcaacagataaccaaacatgaaactttctaagaagaattgtgataaaacaactcttacttcgtgacacggttgtaaaacctcatcttctcaagggaggtctggaagcgaccatgtccaaaaatggaggcggtgtcaataaacttgagtttgatctcctccaaggcaagacgggaagtctgagtgagaagtgactgtctgagagttacaactc

SEQ ID NO: 171652 - DNA, 341 bp, Arabidopsis thaliana columbia
tttgagttgtaactctcagacagtcacttctcactcagacttcccgtcttgccttggaggagatcaaactcaagtttattgacaccgcctccatttttggacatggtcgcttccagacctcccttgagaagatgaggttttacaaccgtgtcacgaagtaagagttgttttatcacaattcttcttagaaagtttcatgtttggttatctgttgctacttatctcagagatgttatcctttaaacaatgttatggagttttcttttgcttttagtttgttactttttggaagttaaaacgatttgcttctcaagttttgagactttgatgtgttctttatc

SEQ ID NO: 171653 - DNA, 417 bp, Arabidopsis thaliana
  unsure (1)..(417): unsure at all n locations
cacgtgaaattgtggtatatacttgtctgtcaaaaattgatataacaaagaaaggaatatttacaaagtggtgagaacgactaacaataggattaattatcgtctaactcgagtttattttttgaaatatattttgtcccggtgataatatcattttgggatcatatttatattttctctctacgaaaatattccacctcggaccaaaatgtctaacccatccttcttgtgatgaatgatanggaagatattgtataacccccatattagcatcctcacaaaacttcagtatttccatgttttcttgatcaaaagcctcccaattgtcaaaacccgcggatcttaaaaaccctaccgcataaaatacatcttactcgggtatagcggcagacatccgatcattccacctaaaaacgc

SEQ ID NO: 171654 - DNA, 350 bp, Arabidopsis thaliana
tcttttttttttttttttttttttggatcgataccattggtgtatatattcattcttataacattagattggcaaatagctaacttacaagttatgtgttctggtcttcagataatctttacaagaactcaatagattccccaaaaccgaatccgaagactcacttctcgaacctaggcgtctgttcacatcgtccattaacctcaaaactgaatcttgctcaaatcgggacaagactctggaccatgcggaagttgaaaatgctcgtaactcagtctcctcaatttttccattaagatcagcaagagatgatatagccgaaatatgatcgcctttttcgagtttcctga

SEQ ID NO: 171655 - DNA, 442 bp, Arabidopsis thaliana columbia
cagatcagcaaaacagtccaacaaaactgaacaaaggcatttagatctacaacaaatatacaaaatacaaaaaaatccgatcgatctccgggctcacagaagcaggaagatgaacgtaccgatttgggaaaatacaagtaacagtagtagtagtagtagtaacaaagaacgagaatagtaacagagtaatcgaatcaagtaacagagaaacacaagatcggaacagatccgtcgaggatgagatcatcgatatcactcggagtccgatctcggcgtgtaacagaccttggaatcaataacgtcgccgtattgagcgaaggcagtctcaagagctctgtcatcagtggcccatgctagacctccaacgaagcaccgatactcaacatcaccggacgccattgaaatttgaaaagaagatctaagggattaccggacgcgtggg

SEQ ID NO: 171656 - DNA, 446 bp, Arabidopsis thaliana columbia
ttcacgcgtccggtaatcccttagatcttcttttcaaatttcaatggcgtccggtgatgttgagtatcggtgcttcgttggaggtctagcatgggccactgatgacagagctcttgagactgccttcgctcaatacggcgacgttattgattccaaggtctgttacacgccgagatcggactccgagtgatatcgatgatctcatcctcgacggatctgttccgatcttgtgtttctctgttacttgattcgattactctgttactattctcgttctttgttactactactactactactgttacttgtattttcccaaatcggtacgttcatcttcctgcttctgtgagcccggagatcgatcggatttttttgtattttgtatatttgttgcagatctaaatgcttttgttcagttttgttggattgttttgctgatctgaaaa

SEQ ID NO: 171657 - DNA, 495 bp, Arabidopsis thaliana columbia
ttcgcgatcgcgtttcacagatcaacatcacccgcgccggagcagaaactcacactcttcgctctccgccttgcaatcatcgagaaaatcgccactaatctcggaaccctaggtttcatttgggccacggcggttcttctcggtggattcgctatcacgctcgaaaaatccgatttttggttcatcaccatcattctcctcatcgaaggcactcgaatcttcagcagaagccacgagctcgagtggcagcaccaggccacgtggactgtatccggcgtcggaatcagtagcttccgcgtgctccaatcaagctcaatttcacttctcagaaatttaaaacgaatcagcgatgggatctttaagccgatcctcgacaatggattgagagaagcgacgacgagaatcggacgacaagagatctttgatcgtcgaacaactctgacatggaagaactcagagttcctcttcttccatatgcgagatggctttacatct

SEQ ID NO: 171658 - DNA, 309 bp, Arabidopsis thaliana
cttgaaaatattgattcaaaactcagcagaatgtgggagattcagctaaatgtttgtgtgtcaattacattttatttgctctatgtttgaattttctgcttctggacactctcaagaatcatactgaaatgttcgaacaacagaaattccactcctgtctggcaacagcttcttcatgtaatactttgatctcctcgaaagattgattctttcccgtcttgcctctggtatcatctcgattggacattcctgaaacccgcgtctcacaaaccagtccgcggttctcgttgtcagcagaaatagcatctc

SEQ ID NO: 171659 - DNA, 503 bp, Arabidopsis thaliana
tttattctgttgtgaataatgcagagccggcgtgagctcaggcgccaccgtaacgaagaacaaacctgaaggagaaaaataagccatgggatgtgcggcgtccaagctcgataacgaagatgctgtacggcgttgtaaggatcgccgccgtctgatgaaagaagctgtctacgctcgtcatcatctcgccgccgctcacgccgattactgccgatcgcttcgtatcactggatctgctctttcctcattcgcctccggtgagcctctctctgtatctgatcaaactccggctgttttcctccatactccccctcctccgctttctgaacaatctccggctaaatttgtccctccacgtttttcgccgtcgcctgctccttctcatgcctcctccgtctggaactgggagaatttctaccctccttctcctcccgattccgaattcttcaacaggaagaagatgatgatagaggatcaatttccgaggtcgggacacgctccga

SEQ ID NO: 171660 - DNA, 354 bp, Arabidopsis thaliana
aaaaataatggaaatcaaaacaggaacaatcttacatctttgagtttcctttttccttcaaaccaagagaccaatatgaaacttttctcttctcaagtatgtatctgaagaacaacatgtcaatagaagatacagaagctctctttctctctctttcttctctacaactctaactttatgaagcctttcgcactccgagttcttccaaacgtttccaagtggcttcacgttttgcttcggtttcagctgcttttgattcatcttccttgaactttgcgaggcattctttaaataactcagggtcaaggtcatgaaatatctttcgcacgtttagtgtcaagctatgaacagctt

SEQ ID NO: 171661 - DNA, 351 bp, Arabidopsis thaliana
ttctttttttttttttttttttgcaacagtgaactttttggttgtttgtttgatacaaacttaattacatgacaaagagtatgtaaagcaaatcaataaattatatattataccaagaaaaaaagatttaataataaatgccacggagcaaaaaaaagaaatgttttatcttctggatctcctccgatcggcggcgtattgagacaacggcacaacttccgacaaaggagttgactgcggcgtaaattgcggcgtcggaagtggagaattccgacaaacgggacaagaaccattgagcttaagccaagcgtcaagacaataaactgggaagtatgtgtttacactcaggca

SEQ ID NO: 171662 - DNA, 167 bp, Arabidopsis thaliana
tcttttttttttttttttattttactatgaacattacaagactcttaacattgcttcaatgctttgaccaaatcctacagataaacggctaaacatctctctgattgcaaatccaaaaactaacaagataaaccattaatctatagctaccatgaagcgcaaaagat

SEQ ID NO: 171663 - DNA, 324 bp, Arabidopsis thaliana
atcaagacatattttattaaatgaaggtagggggtgataaatcccaagacctaggtgcatgttttcttacaggcaaacctcataaagtatcaattacccctaattatgattgtttttagttcccttcctggctgatatgctgctgttctgtttcttcttgtatctctgggatcttaattcctgctgacccatcaccacctgattcggagtatttagcgatcttctgtaactcatctctcacacctgactgttcataactagcaactgcttgttggtctatcttagcttggggcttacgacggcgaatggcctagactgcttctg

SEQ ID NO: 171664 - DNA, 382 bp, Arabidopsis thaliana
accaaagaaaagatgaaattaaaagaaatattttgaagctactataacaaattaacaactcaacataacatccattttctactcttctattaccctgaagtatccgtcacaagtcaactcaaagtcacacacatacgaccactaattgtctacggttacttgatctgtatcagtaactcctccttttgattacattcatctaactcccaactcctactccatctcaagttcttgtggttgaaccaactgctgcctaatgagacttagttatataacggtgaatctggttcagagccgcaaccgaagtgtatgtagagacagagtcttcctttggtattgcacaaagttcaagggagctgttgacagtcttcttacttccttg

SEQ ID NO: 171665 - DNA, 527 bp, Arabidopsis thaliana
tctcccacgcgtccgtccaacttaaccctctctcttttcttgcaaacttttgctcggaattctatgctttgctgatctattgttttctctctgcaaaagtaatgagaagctttttgctatgttaagctttagatctgctattatttgttcctgtgagtcttttatatcttgtgtggtttctttgagaccttaagcagccattgtcacaagctgagctctctttctttctctctagttcaagattctaactttggagcaagtaagcaagtcagagagaggacaaattagctgaaatgctggagattgaaagccctacgagtctctgtttccgtacaaacactacttgtaatgctctgcttcgagagcttcagaaaatatgggttgatattggtgagagtgatgctgagaaagaccggatgctaatggaattggagaaggaatgtcttgaaatctacagaagaaaagtggacgaggctgctaattccaaggcacagcttcatcagtcattggtatcaattgaagctgaa

SEQ ID NO: 171666 - DNA, 380 bp, Arabidopsis thaliana
ctatcaaaacgaagaaaaagaaaaaggctaggccacttcgcaagtagccacttgcaatagatcaaatcaacatacaagttttttttttctctcaaaaatacactcatgatcaacacacttgtacttcttctccaagttatgccatacaaatagcaattcaccgataatcacaagtccttgtttttaattattatatcaatcttacatagctgcaacggaagaggtagtactaatgggttgagaagacttggtattgccaatgccattgcagacattaaagccgtaccaaacagagttaggcaagaaaaggttgtagtagaaagtgactgatctgatggatgagccgtaaatcttaacattctctggtttccagccgtcgg

SEQ ID NO: 171667 - DNA, 402 bp, Arabidopsis thaliana
  unsure (1)..(402): unsure at all n locations
aacaaacaaacttacacttcaccacatattttggttatcatactccataaaaaaattcattgcaaatacaaaacttcatatagttatatattacataaccctgatcaaacatcaggtgatgtgtttcaaacttccgttttgtgaaatatttccccttgggtggcagatttgatgatcctcaagtgcttccaccatatcatcacatagtcgattaggatcttgaatcgttgttgtgtcaacagctagaattgatgacaatcttgtctacgtagcttataaaatggatattgagagcttgtgctccaactaatgcacttcctgcgatatatgaaatcgnatggtgaaaaaaacttatttcttcatcgggacctttcacatttgaaaatgccaatgatgtgtgac

SEQ ID NO: 171668 - DNA, 378 bp, Arabidopsis thaliana
atatgagaaaatagaccattcaaaagtaataggggataactagagaattcatcgggtatatcgccagaaaaagaaaaaaaaaatcggttattgaagcaaagaacttcaaatagtgtttatatgtacaaaccaaaagtaatgctctggttttttttccaagtgaatgaacaaatgtcaccaactcacctgtcactcacacccctgagagccaccggaaaagctcacttatctcttctccggcatgattcgcttctaaatccatcaccgtcaattcctcactccgacgactactcccagtaaaaaatcctaccagagcttttaaacgacattgcacgcgacgatatacctcgtgagagtctgtcaacgtaatcccttgag

SEQ ID NO: 171669 - DNA, 427 bp, Arabidopsis thaliana
agaaaaacatagacttggatcaaagggtatgcaaatgcattattcttaatcttacagaacaatcataaatccatgattcagatttgtaaaaagcatcagttacaagcctctacaatagaggtggttcataggaatttttgttttcctttttgactacttagagaatagcacaactattgagttttaccttctcagcttcaggagaaaaaattgccttcacctcctcgaagacagcttcaatgggctttgcagcattaatcttcctaactttccccttagcttcgtagtaatgaatcactggtaagctagattcaagaaacaccttaaagcgcttccttatagtctcaatattgtcatcctctctcccctggtttcggcccaacaggcgcttctccatctcttcctcaggacaatcgaagaataagac

SEQ ID NO: 171670 - DNA, 494 bp, Arabidopsis thaliana columbia
attaataagaataatcagtgcattttagagagaagatggagatagagattaccttcttcttcttcttcttttttgtcaaagagagagattaccttcttcataggaaaagatttctttcttcttctgcattccccaaattttatcttcccaagaaacccaacacagaagaaaatcttaaagtttagtgaattgtggtggagatgaaagttggagctccggcaagtaagccgggtcggatcattgttcaagtttttcttctacaacttcttcttcttcttcaaagtgttcattcacagagatcacaaaacaaacttaacatcacaaagcctggacaaaacataccagccttaacagttcagctaaggagagttggccatgatacggcggtagatgataatggtattgaccaagttactttctcgaacccagaaggcttaataactgggataaaataccatggtatcgataatgtgttggacgacaaaattgatgat

SEQ ID NO: 171671 - DNA, 132 bp, Arabidopsis thaliana
caaggaagagattcatagctgggaacttgggttaaattgggaacacgggtgggactttcaggtgcacacagttggaactggggtactaacagacatggattgggtcaccatgaaggcatacctgaacgtgga

SEQ ID NO: 171672 - DNA, 118 bp, Arabidopsis thaliana
ttcatttgtccgctgttgtgctttttctgcttaagcatgctctagtcgactactcgagatctagaacaaggaaacaacaatctgaatagacatggctggcaaaggtgagaaaggactc

SEQ ID NO: 171673 - DNA, 174 bp, Arabidopsis thaliana
tttattttgggaacaatgtcttaaggaaaacaaagagggttacctgtgtggaattaaataagcgatgaacgcaaaaggcactgcgaaaaaaagggacataggataaggctacagagacgatattaaacgaaattgacagcttgcccaacatgttataagaaatagtcaaagaat

SEQ ID NO: 171674 - DNA, 384 bp, Arabidopsis thaliana
gaagttaatgttaaattagattcaaaaagtaaacaaacatttgtacatcaagtgcaacttatacttagagagtagaaagaaaagttataaagagatttgaaagcttaagatcttgattgaaaccataattggagagccttctcatatcgatagtctccacttgcggggatggttgatatttgatttcttatttgcttgtcaagccatcggattaattgagctgctgtatttggacgttccccatgtcttctaccatttctctcatgccatatggtgtgaatggctgcttggaagatataacgtgctagaaaactcttttactgtcccgccaagaagtactgagagaggttactaaagaggaccaacttgttgagaacttcgcct

SEQ ID NO: 171675 - DNA, 449 bp, Arabidopsis thaliana
aaaaaaaaaactcaaatttccaagtcattaaataacaaagcgatatacatttttcgattgaaaaacgagagtttaacaattgaatatgcatcttacaagtgatcatctatcgccatatttcggggaaacaaaaattttgatttcaatctgacctcaaaactcccaaaaaaaataaaaataaacaaatcatttcattaatttatttattgcttcaaaagcggctcacggctctcttcccactggtccaatctgctcgaagctttctcaacctctttgtcccaatcagttcgtaaagtgacaatcactaagattattgtttgcattaaagtaccaccaatcatcccagtccatattcccttagctcccatatcataagtgaagccaagaacgaatcccactggaatccccacaacgtagtaacatccaatgtttacgtacgcaacaaatgc

SEQ ID NO: 171676 - DNA, 297 bp, Arabidopsis thaliana
aggtggaaccatattacaattgggcgggtaagaaaaatacaaggggctttatagaatgtacccaagacaaaagagcttaacacattatgcttcattatctccatatggttataacctgatagttaaaaaaataagctcaaattaataatatgtaactactttttcttggagagacccatattcattttaaaaattatgaaaaaggaccctctctgcctcagttcaagggttagctcttgagtttcctccgaggcttaaaatcaaccaccaccacacttatgttgtctttgcttcctt

SEQ ID NO: 171677 - DNA, 127 bp, Arabidopsis thaliana
gagatgggcggagacggaaaagatatcaccttgtccgaggtttcttagcacagtaacgccaaggattgttggatcgacatcgacggtaaggattatgatgagacaaagctcttggatgatcatactg

SEQ ID NO: 171678 - DNA, 453 bp, Arabidopsis thaliana columbia
  unsure (1)..(453): unsure at all n locations
tgtaaaaccagagaattttctgcttgggcctcctggaactcctgaagagaaaaaacttttccttgtagacctcggcttagcatccaaatggcgagatactgcaactggactacatgttgaatatgaccagcgtactgatgtttttagaggaacagtacgttatgctagtgtacatgctcatcttggcagaaacttgcagtcggagggatgacctggaaatctattgcttacactcttgttttccttcttcgaggccccggcttccatggccaagggttaccagggaagagaacaaagngtttccttgttggcaagaagaagaaggacacttccccagaaactctttgctgcttctgtccccaaccttttcgtcagtttgtcgagtatgtggtcaatttgaagtttgatgaggagcctgattatgctaaatatgtctccctttttgatggaata

SEQ ID NO: 171679 - DNA, 161 bp, Arabidopsis thaliana
gttgaggaagcaaggcaaagtaggcaaaaactccctccaaaaaaaaaccaagcggactgagaaaactaagcaaaaagaacgccgatcggaatatagttaaacgccatggatgctctgtctcaggcgaacagggtccgggatctcggtaccgtacaagaaca

SEQ ID NO: 171680 - DNA, 176 bp, Arabidopsis thaliana
gaggtgattatgaaagcgcgtaagcctgcactcgagactaaaaacataacgaaagacattcacgattgcaagcgagacagtgaggctctatacttacagttagggataagagggcacaatgttgaggacactcagattgcttattctctgaatgaagaacaagaagggcggaggag

SEQ ID NO: 171681 - DNA, 491 bp, Arabidopsis thaliana columbia
ttatggatcctggagaagaagaaacagagcaattaaagaaagagtatgtaactttcatgaaaggagttgtctctgctcctctaaatctaccaggaactgcttatcataaagctcttcagtcacgagcaacgatattgaagttcattgagaggaaaatggaagagagaaaattggatatcaaggaagaagatcaagaagaagaagaagtgaaaacagaggatgaagcagagatgagtaagagtgatcatgttaggaaacaaagaacagacgatgatcttttgggatgggttttgaaacattcgaatttatcgacggagcaaattctcgatctcattcttagtttgttatttgccggacatgagacttcttctgtagccattgctctcgctatcttcttcttgcaagcttgccctaaagccgttgaagagcttagggaagagcatcttgagatcgcgagggccaagaaggaactaggagagtcagaattaaat

SEQ ID NO: 171682 - DNA, 126 bp, Arabidopsis thaliana
aaagacaaaagcattagagggagagtaaacaacaatgctctttacgaagattcatcattcttgcaaaacacactatcgcatgtgatcagatattaaaagattccaacgttgcaaagggaactgacc

SEQ ID NO: 171683 - DNA, 246 bp, Arabidopsis thaliana
ggattacagggggtttttaaattcactaaaacaacggaatttacccaaatatactgaattggtgagtactgaatcggcgacacatttgaacacgaatatacttattagcttatgggattgcaagccctaaaccatggcaactttggggaattaagaaatatacaacttagcttggccgtcaataaagagactaatgaactttttaccgtaaacagtttttttttcgatcaggaactgtgcaagctt

SEQ ID NO: 171684 - DNA, 447 bp, Arabidopsis thaliana
attctacgaagtgcaattggaaactaaacatttatagcaaaaatagtttcaaaatttttgtgacgaattgtgtcagcgttatactgtagtttctcagtaatacaatggattcttcgcctcaacgaacaatgttaagtcaagaaatatccaaacccaataacttgtacttgacccgacacacccgagggatcatcacaggagaactatgcttctgatctcggtttgttaagtttggtttgggagttacccgttcttgaattatgtctaaaagcttgtcttcctttcttgggtgcttctgactcaaccaactccttgagcttctctagagcgggtgtgtaagtggcacgaatggaatctaatgaagtaggcgggatcggatagataggacatgaatcactcccaactttctccaggagcttcgagaaacgccttacctcatgattactc

SEQ ID NO: 171685 - DNA, 390 bp, Arabidopsis thaliana
cacaatgagaaaatggtaaattatgcaaactgaatccagttacatttttcaagaccattcgcattcgcattggctaatagaaagaagaagacaaaaacatagattcaaagagcatatacgtataaaactcattacctatgaattccatattgatgatcctcttcatcatcttcatcttcgtcttcatacatagacttcataaatggctcatgagcatcacgagtcatcttagcatcaccaccagcggattctagattgttacctgtaacaccggcgaccgctcccataacggttgttgcggcggctgctgtgactgcagcttgtcttttagtggcagagtattgttgaatgactaataccgaagcatgcattgtgaaattcgacgaagct

SEQ ID NO: 171686 - DNA, 216 bp, Arabidopsis thaliana
aagaaaagatttatatagtttcttaaaggaacaccaagcgaattacttgtgcatagtacaaagttacaaacattaacgtaccttaaaagcgaatcttcacatcatcttctttttatatgaagcaccttgtgattatcttagctaaaatattaatcataaaaaggatgcatcgtcctaggaaatgcctaacgaatttggcaagccaaaatattttta

SEQ ID NO: 171687 - DNA, 489 bp, Arabidopsis thaliana columbia
tccacgcgtccgcttctttatatgagcgaagaagatgcattctggttattaggtgcattactcaaaggagctgtccactccccaatagaaggattgtatcaggcagggcttcctcttgcacagcaatatctgttacagtttgaccagttggtaagagagctaatgcccaaactaggagaacatttcactcaagaaatgatcaatccgagtatgtatgcaagtcaatggttcataaccgtcttttcgtattcacttcctttccattcagcgctacgaatttgggatgagtttctagctgagggtgttaaaatcgcgttcaaagtcggtttagcattactgaagcatcgccatgacgatttgttgaaatcgccatttgaggaactcatgcatgctctgaggaatttccctgaagatgccatggatcctgatactttgcttccattggcttattccattaaggtatcaaagcgtttggaagaaatgaaacag

SEQ ID NO: 171688 - DNA, 126 bp, Arabidopsis thaliana
ggtggggctttattccattaaccggagcaccaacatgaaaagattacccttagtttttctgccttaaacaacgggagtgatctttctttattgggtaagcgacgacaccttttttttcatgatcta

SEQ ID NO: 171689 - DNA, 437 bp, Arabidopsis thaliana
atatatatgaagaaagttggtagagagggagagataactcatcacagtcaaaggcacattacaaattacatatggggtagatatatattatatacgatgataataatgatgatgatgatggatggtcatgatgatgatgatgatgatgccattggttcatacagagctagtttcggagaggccaaattcaagtccccaaagctcaaaagcacccttgacgaagtcatagtagcctcccttcaaagcaagtgttcccttcacaagtccttctctcacaaatggatatgtcaataggtttgctagtgaaacattcaccgcctcctgcatttatcaatacatttatattgttatatatgatcagctcatcgatcaacatgtgtttgtataccctttcacatcggccacattgatcttaaaggctgaatctccaagttctg

SEQ ID NO: 171690 - DNA, 340 bp, Arabidopsis thaliana
gaatcgggaaaaatgtttgagattcagctgtatatataaagttgtatcaagaaacaagtccatgaatccattaaagagtcttgtgaaactttcttgagtgcaaattgcaaactagcttgcaatttttccaaaacatctttagaaagataaagaatctgacactttctctggtttttattttaagaagggtgtatcttctctctgttcagttattgaaatataggaagatcaggcttagctggctcgggaccagcacttgtttctccaacagatacaatagtcttactactgcttgaagaagctccttgatcaatctctttcgtcatctttatgaaataac

SEQ ID NO: 171691 - DNA, 489 bp, Arabidopsis thaliana columbia
cttcattcgatttcaagaagtgaatcagacaggctcaaagcaaaacgtatgtttggctacttgttcaaaacctgaagttagggatcaggtcaaggcgaatgcaaggtcaggtggctttgtaatctctttagatgtatcagtcacagaggagattgatctcgaaaaatcagcatcaagtcatgatagagtaaatgattataatgcttccttgagacaagagtctagaaatcggttataccgagatggtggcaaaactcgtctgaaggacactgataatggagctgaatctcacttggcaacggaaaatcattcacaagagggtcatggcagtcctgaagacattgagtaatgatcgtgaatacagcaaaagcagagcatgcgcctctctgcagcagataaatgaagaggcaagtgatgacgtttctgatgattcgatggtggattctatatccagcatagatgtctctcccgatgatgttgtgggtatat

SEQ ID NO: 171692 - DNA, 492 bp, Arabidopsis thaliana columbia
ttgacgcgtccgcccacgcgtccgcccacgcgtccgcacaaccaaaaaaaagaaaacacaaaaacaaagattataatggcttcctcaaccatggctttgtcctcccctgccttcgccggaaaggctgtgaagcctgccgcatcagatgtcctcggaagcggccgcgtgaccatgaggaagactgccgccaagccaaagggtccatcaggcagcccatggtacggatctgaccgagtcaagtacttgggtccattctccggcgagcccccgagctaccttaccggtgagttccccggtgactacggatgggacaccgctggtctatccgccgacccagagaccttcgccaggaaccgtgagctagaagttatccacagcagatgggccatgctcggagccctaggctgcgttttccctgagctattggctaggaacggagtgaagttcggagaagcggtttggttcaaggccggttcacagatcttcagcgac

SEQ ID NO: 171693 - DNA, 448 bp, Arabidopsis thaliana
aaccaaaagcattgaacatcttgtgttccaggccgtaaatctatgagtaatgtagtagttgtttaatatgaaatccttgggatactgttcgacgttgttagtgttctcaccttaaatattgaacactcgtatcatgatgaaagaaaatatcaacctatttcctaacttcatatgtcttgcaggatgacatgagctgttcatgatgatgttatctttgactggtgaaacacttcagttcctacagaaatttctcgaggccataaaccagattcttgaggcgtaccacctttctgattgctaggagtaggccgggcattagggaccttacgtcaattatgtcatgtttaacagtgtaaacgtctcctggacttgagaagtagacttgtgtactagatggtagtcctggtagaaccatactgtgaacacgaaccccgtcttctccgattac

SEQ ID NO: 171694 - DNA, 358 bp, Arabidopsis thaliana
gatggggaacaaacaataaatcaagaagaatccattttatatacaaccacaaatataaaaaaccaacatttacttactacacaagaatctatactatagaaccctgtaaaaatgaatctaaactttactttcctaaaagctttatctacatattcacacaatgtactatggttatttacaaatagaggtaacacctctttcaagttttaagatcttatcaacccgaaattgacgaaagatctcgacttgaaaaccccgaaaagaaaccctgttggtgaatcttgaggactcggtttcgcgtctgtgtttccgcctttcacttgaagtttcgtctgaccgatgacttgtctaatggatt

SEQ ID NO: 171695 - DNA, 403 bp, Arabidopsis thaliana
catagcacgagccatgaaaggtaatgaaagaagaccagaattgggtacatcatcatcttccatagttttcagtgtcttctccctggctttcgctatcaatttagaaggagtatcctgatctgaaccacaactcaactcttcctcatcgtcgctctcatcactactacttccatcgttcgtggagttcatctttctggacaaagtagcattaatctgaagttgttcagatatagctgccctagttccatcatatctctcagtcagtccacggcttaacatgcgtttggcccattttcctgtgtttttgtgcttcaaagtcatccgttcctctactcgtctagtctcctgcttaatagcctcttctttagccatttctgggtccattaatgctcccatcgctgat

SEQ ID NO: 171696 - DNA, 493 bp, Arabidopsis thaliana
tcgggcaaaaaaaaaaaaaagcagaggcagccatgggagaaaagagaaaatctacttcgaaaaccctagctaagaacaagaagaggaaaggtcctcatttgcctaattcaatcctgaagactattgccaatgagaaacgtcctttgaactctgacgaagatgacgatgagatcgattccgacgatgaaaacgtcgatttgtatgagtatgaagaaggtgtgcctgaggaagagtctaagaaaaacaatcgctatgaccgcgtcgataactacgactacgagcttcccgaggatttcgaggatgaaaatgtggagtcagatgatgatgaagatggtggaaacagcgagaatgaggaaggtgaaggtgatgacgatagacacacacggatgttgcaaggtctcactggaatgccaagtgctgcctttcaagaagagagtaagaagagacctgtactctatactgaagcgtatccagagtctgaattcaatcctac

SEQ ID NO: 171697 - DNA, 271 bp, Arabidopsis thaliana
ggaaattggcgtttcatcattcatgcctgccatattatagttataggccacaagtaaccatattccttcacaatgcgactgatctacagtaaaaaggcgctactactacactactctaaaacaaacccacataatctatcaattgacgtcaaggagaagaagatccgaagaagtcaaccaaataagatgctaaagaataaccgtatgaatatgtcttttgttgagatgttcaaacatggctgccctgagtttacaatatcctttcctgaag

SEQ ID NO: 171698 - DNA, 402 bp, Arabidopsis thaliana
gtaatatatatttatgtacatgaacaataacccatgatggtgttacagagttgctagaatcaaagtgtgaaataatgtcaaattgttcatctgttggatattttccaccaagaaccaaaagaatattcaagttccctgaacttctggcaacattcatgttatatgtatcttcctaattcttcctttaaccttttgtaactcgaattacacagcaagttagtttcaggtctagagataagagaacactgagtgggcgtgtaaggtgcattctcctagtcagctccattgcatccaacatttgtgaatgacacaagttaacaatcctttgcaccatttctgggtgcatacatggaaacttcttcgattgaaacttcccacatgtgcaggtgcgttcgctgtcac

SEQ ID NO: 171699 - DNA, 373 bp, Arabidopsis thaliana
acgagacgggagaaatatataaaggtgcaacaaacataatagaaaggtacattaatattaaaactcaattgtggagaaactgatactctcacaaattatatgaccagagataaaccctaaaccatggaacttatcataatcacaagaaccaagcctagagaaatcactcccggagcaacggaaccggccaaattgcgaacagctgcggcgggccctggagccggcgcaagaacttctgaatgggagggatccactcccggagtaggcgctggcgatgacaaagccttatggaccggaataggcgctggcgataacaaagccttacggaccggagacgctgagggggaaggggaaggagagggatgaccaggag

SEQ ID NO: 171700 - DNA, 351 bp, Arabidopsis thaliana
ccggaaactgggttcttgggattgaacaaatcaaaaccgcttgcattattaagtaggataattcccggttataatacaccccggaaggggccggatatattttgataaacagggaaatgaaccccaaaaaatatcgaagctaagctcatgggggaaatgaccccacctaaaggcccttgttgccatcgcacataatgaaaaacagcttcccaaaaaacttgtttaggggcttgaactccaaaacggggcgttttttgaaaaaatggggggcaaggcctctcttgaggctcaagttctcgtctttgagggtctcaagggttaaaaaaagctgtctgaagacctttttttttt

SEQ ID NO: 171701 - DNA, 202 bp, Arabidopsis thaliana columbia
gaactgaacaaaccagtttgcatatcaatgtgtctgatgataatacagatgttgtacgaagataaaaattcacaatataaacagagagactagacaaactaaaaagagtattaaagaacaagaaagtgattacttggaaactttcttcttccctgtaatggcaattttcttgcctttaagggtccttggatgcgccttaccc

SEQ ID NO: 171702 - DNA, 202 bp, Arabidopsis thaliana columbia
ttgtatggcgcatccaaggacccttaaaggcaagaaaattgccattacagggaagaagaaagtttccaagtaatcactttcttgttctttaatactctttttagtttgtctagtctctctgtttatattgtgaatttttatcttcgtacaacatctgtattatcatcagacacattgatatgcaaactggtttgttcagttc

SEQ ID NO: 171703 - DNA, 268 bp, Arabidopsis thaliana
aatatacaacattaaagatataataattaataggaaaatctgagaatttttatggtttttgttatgagtagggttgatccttaaaaatactaaaaccatccgcacacagcaccaacattaaagggaaagataactaaggagaggagttaaaaaagagctgccacaagttaacaccagaggggagtcacagcacacggtcacattttaccattcacctttttttataactagtgaaagtaaggaggaggaggatgagcctggtactgat

SEQ ID NO: 171704 - DNA, 356 bp, Arabidopsis thaliana
ctagtaacaggggggacgacccctaataattgggggctgacccttatatttacgataaacataaactgaaaatagtccgtagcccatacaccgcgtcataaatcctagcatagactgagcacaacactttaaaacttcaacttattttcgttttacatgtacacaaaacacaattgcatagcaatacatttctaagacgatctcaagatcttgaagctgcggattgagctctaacctcaagttcttgtagaaactcagctactttttcgatctccggcgccacattcttcaccgtttcatctgacaataaccggtcggcccatttacaaagagaaggagtttttgattcgtctaaa

SEQ ID NO: 171705 - DNA, 458 bp, Arabidopsis thaliana columbia
attcggatttgtactccatactcatggaagcttcgatttcgtttctggggtcaacaaaacccaatatttccttgtttaacccttcttcaaacgtccttcctcgtagagatttccctcttcctgctttgaaattgaagaaagtttcagtgctgcctcgaatcttgcaccagaaacgactcatcagagctcagtgctctgatggattcaaaccagaggaagacgatgggtttgtcctagaagacgttcctcacttgaccaaatttctccctgatttaccgtcatatccaaatccattgaaagaaagccaagcatatgccattgttaagcgaacttttgtcagttccgaagatgtggttgcgcaaaatattgtagtccagaagggaagtaagcgaggagtacactttaggcgagcagggcctcgagaaagagtgtacttcagatcagatgaagtaaaagct

SEQ ID NO: 171706 - DNA, 185 bp, Arabidopsis thaliana
gggaaaaattccgggaaaaaaatcgaaaaaatttctcacaataaacagattctgttgcaaaagggggctaataagttcacccaaacccatgttcatgagaggttttaaaggttattgccctttttgccttttttccccttttccaagggggggggctaaattgtttttaaagaaaagcaacctgg

SEQ ID NO: 171707 - DNA, 318 bp, Arabidopsis thaliana
acccaaaatggtggaaccttaaagcttcgaaagaaacttggaagaggaaattaaatttaaaacatctaaagtctgataactagaagaaagcttccactttcatggacattgatacatcagcatatagggaaagagagaatgtccaaaaaaattgaaccctaacctccacattcacacatacacagctaaaagtctcacaatttatctcctgctgcttaatctataagaccaatcacgatcgcccctgtccctgtctctattgcaatctctgtccctgtccctatcccagtctttgtctctatccctatccctgttcct

SEQ ID NO: 171708 - DNA, 453 bp, Arabidopsis thaliana
caaattaatagctttttagaacaccagaaatagaagaatactctcagtcaaagccaccacaattactcaatgagctacaaaataggaacccttaaaatgtctccaatatcagagcattttagctaaaaaagactacatcccaagacagtgggatactttatactcctaaatcatatttatacaaatcgacaaagatttgttcattttccgaacatagaactgttaactcttgaattccttaagctacttattcttatggagggttttgtctttagttgagattgagtttggtcagatctagcaaattccagtccaagtgggacgaagctgtccttggagctacatttgaaccagcagaatatgacctcaccagcctgttactgttgttagtgctccctaagtatcccaatccagatttcaatctctgagcttccttcttcagtaactgatact

SEQ ID NO: 171709 - DNA, 465 bp, Arabidopsis thaliana
ttcctcttttgtttactgtttggggaaagtgaaagcttgtaaacgaaaggttgtaaactgtggccaaaggtttacttggactccttctgtttcactggaaactgttcatttgaatggtgagagtttgattctgatgcattagtaaattgtaaggaagagaggattgagcaaacatgggagaacaactagatccattttccgcttctaatcttccggatttcatatcttctcaaaaaattggtagaccggttaatttcgaaggacaaactaaccgtgggcatcctttttctggtcttaagaagagaggtcaatctagtcgttcttgggtgaaaattgatcaagatgggaactctgcggttttggagctcgacaaggcgactataatgaagcgttgttccttaccatccagggatttgagactccttgactctttgtttatctatccgtcgagtattttggggcgtg

SEQ ID NO: 171710 - DNA, 358 bp, Arabidopsis thaliana
gataacttgggggtaaaatgttcaaaatattcttccatgcttacagtttcttttttagattgaaaaaaaaacaaatatgttacaagaaaaaaaaaagggaaatagaagtttttatgaaccccatcataagtgatctggttaaaaaaaaaccaaagactttccattggctctgccaaaaaaaaaaaacaactgcaagcggataaaaaatcaataatatttgtattttccctatgacttggggtttaactcaccaccttcaccttattgcatattgaaccgacctaacaatgatatcaacgacggggcttcccctgatccatttgattttatgtctgcacctgaactttccattgatctt

SEQ ID NO: 171711 - DNA, 442 bp, Arabidopsis thaliana columbia
atcatcccctattactgcttttgttacgaaagacaaaaaaacaaaacaaaacaaaagtcagctcaggcgaagaacaggtatgatttgtttgtaattagatcaggggtttaggtctttccattactttttaatgttttttctgttactgtctccgcgatctgattttacgacaatagagtttcgggttttgtcccattccagtttgaaaataaaggtccgtcttttaagtttgctggatcgataaacctgtgaagattgagtctagtcgatttattggatgatccattcttcatcgtttttttcttgcttcgaagttctgtataaccagatttgtctgtgtgcgattgtcattacctagccgtgtatcgagaactagggttttcgagtcaattttgccccttttggttatatctggttcgataacgattcatctggattaggg

SEQ ID NO: 171712 - DNA, 371 bp, Arabidopsis thaliana
cgggctaaatttattttgagagtatattgaaatatgataaattgctttcacaacttattacaatgcatcttatcatgatttaacaaatgatacattgatattttggcctaaaaacccaattgatattaagcttattcgataccatgtctatgagaccacacttattgcatattacaagcttcaacgattaaactccaaagtaccatttaaattcattttgacatttttgcggttagctctctaacaaacttagccgcgaccattgccggcatgtcatcagcggtatcacgctgtggattgtactcaacaacatcagcccccaccaaatgtccctgaagggtgtgtaatatgttaaggacgtctcggaaaga

SEQ ID NO: 171713 - DNA, 219 bp, Arabidopsis thaliana
gggaaccaaagacaccttttttaattctaaaaagaggggggggccaacccaaaaatcatcctgggaaaaaccttggggggaagcacaaatttacccgacggggggggagaaacggttttacgcaaagccttggcggacccccgaaaatgggagcagcgatagggggcacacggggagaaaaacggggggccaagggggggggatgcttggattgaaacg

SEQ ID NO: 171714 - DNA, 275 bp, Arabidopsis thaliana
ccaaataaaccacatttgggggggaatgcaaacactttaaatcatacataccaaaaaaagaccacaaggataaatcagaaaagatcgaaaggactctctaaccataaaaatgacagtcaatctcaaccgggtaactatccatacagacgttccatggactggaagctgaaggcttaacggctcgcagagccacccatactgaactggtacacttaaaacctgaccccaaagcaatctgccaaagcctatctccttacttcatccttcctttagct

SEQ ID NO: 171715 - DNA, 118 bp, Arabidopsis thaliana
acgaaatagaccacaaatgggttggattgaaaactctttaaatccatcataggataaaaagtgaacgaaaataaatacgagacgatagattggactattgaaccatacggttaaatat

SEQ ID NO: 171716 - DNA, 170 bp, Arabidopsis thaliana
tgtagaagcgctggtatctccgattgagagtgggagatttgaaattcctttcgttgctaagctgaagttagtggaggagccgtccgacgatgaatctgagttctgtaattatgattgggacgatagctaaactttgtcagatgatcttttactgttagatgaagagtggg

SEQ ID NO: 171717 - DNA, 337 bp, Arabidopsis thaliana
cggacgcgtgctaaaaagcgttttttctatagaagctcgatttgcgggaaaaggttgcatctgcctcagaaaattatctggggagctttcaccaattagctcttattgtctctctctctctcttgggttaatgattctacagatcctctactcctaatttagagacgacaaaacgctataaacaacatctttacagtcatatggccatcatatgtctccgggtactgccgaggttgaggagatgagacctgagacgccggtggataatgataaggcgttcgatatttctgatgatgatcatgatgataagactgaaccggttattgtttctggtgaa

SEQ ID NO: 171718 - DNA, 388 bp, Arabidopsis thaliana columbia
gtcgggggaagattccttgtaaacaatcatgggtaaggtacacggttccttggctcgtgccggtaaggtgagaggtcagacaccgaaagtggcaaagcaggataagaagaagaagccacgtggccgtgctcacaaaaggttgcaacacaatcgccgtttcgtaaccgccgttgttggatttggcaagaagagaggacccaactcttctgagaagtagatgatgatgatgatcacacttcatgaagcttgaagttttactttctcgttagtatgaattctgcaatatccgctttgttatcgatatttgcttatttggtttttctatagacgatgtaattctcttgttcatttctccatcgaattgacttttgaccatactttttttgac

SEQ ID NO: 171719 - DNA, 346 bp, Arabidopsis thaliana
gggagagaatatcctcaaattattttgcctcttcactcactcacgatctctacattttgcaccccaacaaatatttgacgacaatcacaaaagaatgtataaaaaagaaacaacacagttaaatgtacaacaactcaaacaacactttcagctaatattattcaggatcaaaagaaaccccaaaacaaatgctgaaatttacattgaacattcacattacgtggttaaagtgtcaggaagagccatggaatgagctccaatgatcttaccaccaacatttgggaaggcctcgtaatcaggaagagggcttactttaccatcaacgtttacttgtagaggatacttt

SEQ ID NO: 171720 - DNA, 349 bp, Arabidopsis thaliana
ttctttttttttttttttttttttttttttttttttttttttttttaaccaatgcaaactttattcaataataatacattggattgttacatgggacatgtgcatataaataaatttaacaatgtaatagggatgacaaacttttacaagacctatttatctttaagaacaagtactagaccgttttgtaagctagctatatttttttttaattccgaagtgtatgtaatataaagggaatgtaatccaattccaaccaataaattaaaattatttttccttagggacctttatcccatattttttctttaagcatagctgcacatcccataggcgcacgatctccctt

SEQ ID NO: 171721 - DNA, 252 bp, Arabidopsis thaliana columbia
  unsure (1)..(252): unsure at all n locations
ccagattcttaatagaagaagaagaagaagaagaggaaaggagaaatctgccatggcgtcgccgagcaaacgtcgagagatggatatgatgaaactgatgatgagtgattacaaggtggatactgtcaacgacgatttgcaaatgttctatgtcacattccatggacccactgacagtctttatcagggngggtgtatggaagataaaagtggaacttcccgaagcttatccatacaaatctccatctgttg

SEQ ID NO: 171722 - DNA, 256 bp, Arabidopsis thaliana
tattttgatcagatccaagaaaccaaaagagtaaaacaaacacagagaagcttcttcttaaacgatgccgtactataccagagatgacaacgacgtcgacgatttcgatgagtttgatccaacgccgtacagtggtggttacgacatcacggtgatctacggccgtccgattccaccttccgatgagacttgttatcctctctcatctggtgtcgatgatgatttcgaatacgagagacctgaatttactcagatc

SEQ ID NO: 171723 - DNA, 190 bp, Arabidopsis thaliana columbia
ctaaattggggttttagccctttaaattttataatattgtttatttttctcctaatttaacccccttaaacttacaaatttatgttcaaaccctttatttttttttattgggacccctataaaacttatttctatttggaaacatcaaaaaacaaaaaccgaacatgcttgatatttcaacgaggattaa

SEQ ID NO: 171724 - DNA, 466 bp, Arabidopsis thaliana columbia
cccacgcgtccgagagaacatcccagttcctctaaaactggagactataaagaacaaaggacacgaacgattcctgcagcaaatcaggacaaacccaccatctcctcaatgcttctctgagaaccggacagctacattgaaacccttgaggaccaaacctacggaagtgttgaagagaaaggaagatgaagctgaagaaaaaaagaacagaaagagtggagaaagcaaagaagcaacaaggggattggacgttctctggttcttaaagccttgcactttagccaactagaaaaccttcaccaaattctttctatattgattcattcttttgttaatttcattttattcaactgtaactaacgagatgattatcttgctcagatatataattctgggcaaatttgattcaatctcttacttttacacatacaacgatttgtttaaaataaagataagattagaattc

SEQ ID NO: 171725 - DNA, 253 bp, Arabidopsis thaliana columbia
tggagactttgacttcttctgatgaactttcttctgcacttcttctcattaagcctccttgttaaaataatttgagatggcgataggaaacccagaagtagcaactatggggaaggagaacactgaagccgagtcctctaatggaaacgagtctcagttaagttctgacttaacgaagagtcttgatctggctgaagtgaaggaagacgaaaaggataataaccaagaagaagaagatggactgaaagctgag

SEQ ID NO: 171726 - DNA, 454 bp, Arabidopsis thaliana
ggatatcaaatacataaaattaaattattcacctaaccatttaccagtaatttgattcaacaatgtaattaaccgttaattaatctttctcacaagctcctcaagaacaactcttaagagctcacatttctctatttccagacctctttattcatagatcatttaatttctccggtgtaatctttttcttcagtgtgttgtgtgaatcataggcccaagaggacgtagtacaaaatagttactggtaaagatactatcatcccaaagataacgaatgtactgagtagggtctggatgcaaattgtactccctcgcaaacacaaatggtactatcccttgcggtagagcagcctgtacgatagcagcatgtaacctagaacctcttaatccgacaagaagggaagcaccagccatgaaaagaggacctgagatgaacctgatcaacatccccatt

SEQ ID NO: 171727 - DNA, 250 bp, Arabidopsis thaliana columbia
accaaaacaaagctcaatcatggctagtcggagagaagtacggtgccggtgcggcagacggatgtgggttcaaccagacgcccgtaccgtccaatgctcaacctgccacaccgtcacgcagctctactcgctagtggacatagctcgcggtgcaaaccgcataattcatgggtttcaacagctacttagacaacaccaaccgcaacatcatgaacaacaacaacaacaaatgatggctcaaccgccacca

SEQ ID NO: 171728 - DNA, 436 bp, Arabidopsis thaliana
ttctttttttttttttttttttttttttttaggcaaagaaattcatatactattccagctaaggcagattcagcaaatacatatcattgtttcagcttggttacaacagaatttataaggaatcttaagatactatattttagaaaagacatatagtttggttgaagttggcaccttcatgccacagcaggcatatccttgagccatgaatcaagcggtttaccaatggagtagacgatgaaaccgatctcacgcagcttcactgcatcaacaacattcctaccatcgaacacaaaagctggtttctgcatattgtcaaagattttcttgaagtccaaggatttaaactcatcccattcggttaagacacataggccgtgcgcatctttagttgcctcgtaagcatctgagacgacattcacttgctctgagatac

SEQ ID NO: 171729 - DNA, 477 bp, Arabidopsis thaliana
gtcagtttttcaaaatgcttgacagcttacatgcaccggggggtttattaaaagatataccgagtcccaacctgaaacatctaactctgctgaacaaagaacacaaaccggcaactaaaagcatagactcacaggatgaaaagttagaccaaggcattaaagtcatgaagattcaaactgtccactcaagcaagacatgcatcctcgaatattacaagttctatgagaatcttcaaaagatcatccaagaacggaaaagcaaacacctgcagatcaaaaaacagacattgttggacaatgcagacaaaggtgtaatgtcaaaaattaatcttgtgaaacctcaagagtctactacagcctcagaagatgcagcagcactaggagttgcggctgaagtgactaaagaatcgaaagtggtgaaagagaccaagttacctgtatagaaaaatgctgaagctactgcctgctgaaccaacc

SEQ ID NO: 171730 - DNA, 447 bp, Arabidopsis thaliana columbia
gcgtcataccacaccagcattgatagttccaaaatctctggtgaatgtccactcctgtgagaactggttaccgagaaaggcgatgagtgcaactagagtggccggcatattgcacgccttagaaggatgggaaatgcatgagtgtggcacatcccttcttctctcggatttggaccaagtatgggaagcctgtctcagccacggcttccagcctctcctccttccacatcattaaaactccaaccttggaagattttaggagaatgagagcgacacgctctgtgcttcttttccttatgatccagctcttccacgcacaaatgaactatgaaacatatataaagcgcacacatatatttatgcatatcaagcttttggtgattatggtattgatagagtcaaattaagctcggtgactatggtattaataagagtactatttccttt

SEQ ID NO: 171731 - DNA, 252 bp, Arabidopsis thaliana columbia
tagaaatggaaggcaaagaagaagatgtacgagtgggagctaacaagttcccggagaggcaacccatcggtacatcggctcagtccaccgacaaggactacaaagagccacctcctgcgccactgttcgagcccggcgagctcagctcatggtctttctacagagccggaatagctgagtttatcgctactttcttgtttctctacatcactgttttgactgtaatgggagttaagagagcaccaaacatgt

SEQ ID NO: 171732 - DNA, 251 bp, Arabidopsis thaliana columbia
cggacgcgtgggaaactcttccccaaaaatttgcaaattcaacgactcgtctcggcgatgatggaacgaacctacggccgccgtaagccggggattccgaggaccctatcggactctctaaacgactctgtttctcagactgagtatctctcttcctcttcgtcgccggacatcgagcccattgattactctctccttcctttctccagtcaagagtcttcctctctctggcattcttcttccaggtcaaa

SEQ ID NO: 171733 - DNA, 164 bp, Arabidopsis thaliana
tgttctcactgacgcgtggggaaacatgtaggagtagttaaaagaataaatgcaaaaaataccacgccatagatggttgctataaaacagagactaaaaaggctgttcaaacaagaaaataaataattgcacatgaacactaaaccagaacgataacaggaaac

SEQ ID NO: 171734 - DNA, 140 bp, Arabidopsis thaliana columbia
cccatttttatgtggtcaatgcaaatttaagaaattatttgccgacttaacagttgaggaactattgtttgaaagtgaaaatgttattcctatcagtttctctataattatagttatcatttcatttcatttttgccctt

SEQ ID NO: 171735 - DNA, 248 bp, Arabidopsis thaliana
aaaaacaaggaacacctcacccattggcaacatgactctacaggggaaaaacaagaccaaaactctcatcaaagagacaaaacgaacataatgaacggtgagctaatcaataacaagagccaagccccactaccgggcatccctgctagaccagttcccaaaccaaacacaactgcaaaaaccgcaataatgccaaaccctagacatacggggaaaaccggcaagcaatttcttctccatccactcaa

SEQ ID NO: 171736 - DNA, 295 bp, Arabidopsis thaliana columbia
  unsure (1)..(295): unsure at all n locations
gtcttggaccacatcgttaatcaatgttgtttgttgtttgatgtttactttttttttttactcagttttgaaaattcgataagtattctagctctagaattccatatctaggttttttgttttctcctagataggtctgaagaatcaattgtaatggtcctgtggaattacacggtaaacagntttttgttgtaataatggnnagcatcagttttctttggtttgaaagaaaaaatcataattttttttgactaaaacaaaaaaaaaaaaaaaaaaaaaaaaaaaagggccgggc

SEQ ID NO: 171737 - DNA, 216 bp, Arabidopsis thaliana columbia
ggagttagaatgctatgaattccaaaccagagaagattcaaataaaacagagactaaaaaggctgttcaaacagtaataattcttgcacatgaacactaaaccagaacgataacaggaaacaaagatacagtcagtactcagtagtttgagggcacctacggaaagcaagtaatactacagagggtagacgttccagtgcttaatgatgaaacatc

SEQ ID NO: 171738 - DNA, 248 bp, Arabidopsis thaliana columbia
cccacgcgtccgcccacgcgtccgcccacgcgtccgctaaacctagaaaaacgaaaacacacgcggagttgttgttcctcctctacggtaacgggaatatcgtagttattgtaattttggaaagctataatggcgaagagagagattagtagcactctgagaaatctaaagtttatgcaaaggtcttctctgaaagtagagaagaagaaggctgatgaagaagagcctaatgggagttttccttccct

SEQ ID NO: 171739 - DNA, 254 bp, Arabidopsis thaliana columbia
gagagggaggaactaaacgggtctggagaaatgtacgtgcaaaagtatccgaagttgaagataagactagtggacgggagcagcatggcagctacggtggttatcaacaatattccaaaggaagccacggaaattgtctttagaggaaatctcacaaaggtggcttcggctgttgtctttgctctgtgccaaaagggcgtcaaggtggctcgtgttacgcgaggaggaacacagcaaactcatcaaatctgggg

SEQ ID NO: 171740 - DNA, 241 bp, Arabidopsis thaliana
ctcggcctttctttttttctcccaatttctcggccggaggtacaaccacgccttactttggaaggtcaggtacaccgtgtatcatcaacacctactgacttctagaacttaacatcaccttacgttcaactgctgatgatctatatactatattcgcatagaatggtaaggacgatgatgtgtatatccccacagaccgaatgactggtgatccacgaggttttgcgtttgttcagcataa

SEQ ID NO: 171741 - DNA, 233 bp, Arabidopsis thaliana columbia
tcggataaactcaagaacttgtttgatgagactacattgtatgataagcaatggcaagcagcttggaaaaatgatgatgatgagtcattgggttctaagaagaagtgataacaaagattcttgctttctttttttgttgttgttgtaattaggagatgaacttaccaaatgtaatatcaagagatttgaacaatgtttcctcagattaccgttaatcatgtctagtctctact

SEQ ID NO: 171742 - DNA, 256 bp, Arabidopsis thaliana columbia
tctttcgttcccctttaactctgaacacatcaggtttggtttcgtgtttcaactttgagatacttctctagatttcaatcggagagtcttttgttccgccaaagtttcaatttttcaataccccacgacggcaaatagggttcatggaagatcaacccattaaccagtgctctagtagcaccaatgcgtctgagaaaactccagaatcaacccttgtgcttaacatcaaaacgttagactcgcggacgtatacttt

SEQ ID NO: 171743 - DNA, 247 bp, Arabidopsis thaliana columbia
gacagagaagatgggcatggcaatgaagtcagtttctaacttcgcaatctttttaatcctctttttggtcacctctgaaatatctgagatagaagcgaaagataaggaatgtctaaaaggatacattgatgcgcctttaagctattgtatggctaggatttatccgtcgttgtgttatcgaaattgtcgtttttacaagggcgcgaaaggtggaaaatgcgacggtcttaagtgcttctgcgacttc

SEQ ID NO: 171744 - DNA, 269 bp, Arabidopsis thaliana
gggaaaaaacatgatttgccttttggacaactggttttcaaacccccagggcccttggattttaaaagggccacccagaaaaaaggacccaggttttaacgaaaatttagatttgagaagacatcatcatttgcaagtccaagtcccaaaccttttagctcaaaaagagtcttttcacgttccacattccattttatttactcccccactgtttgggaccagaaacccatttaggacacttggggctgaaggcactttcaacaaccctt

SEQ ID NO: 171745 - DNA, 256 bp, Arabidopsis thaliana columbia
ttcgtccgaaattttccgccataagggggttggctgaggaagataagaccgcagaacatggagtacgtctgacgataccagactatccatttgcaaatgatggtctaatattgtgggatgcaattaaagaatgggtgacagactatgtgaaacattactatcctgatgaagaactgatcacatcggacgaggaactccaaggatggtggagtgaagtgcggaacataggccacggagacaagaaagacgaaccttg

SEQ ID NO: 171746 - DNA, 256 bp, Arabidopsis thaliana columbia
  unsure (1)..(256): unsure at all n locations
cggaaagtgaggaagatacactgaagcaaaagagcaagtcatggcggcgacatcttcctctgcttttctccttaatccgttgacttctcgccaccgtcctttcaaatactcgccagagctctcttctctctccttatcctctcgaaaggctgctgctttcgatgtttcctcagctgctttcacgctcaagagacagagccggagtgatgtntgtgtgcaagggctgtatctatcaagccagaagctggtgttgaag

SEQ ID NO: 171747 - DNA, 254 bp, Arabidopsis thaliana columbia
ttcgttcggtcccttcttccacatcagaacccatttgtctttgagtgagagaatcagctttcagagaaaaaagtatacctacagagagagttatggcggagagtggtggacgaaggatcggagtggcggtggatttctcggactgcagtaagaaggctctgagctgggcgatcgataacgtggttcgcgacggagatcatctgatcctaatcactattgctcacgatatgaattacgaggaaggcgagatgcag

SEQ ID NO: 171748 - DNA, 255 bp, Arabidopsis thaliana columbia
ttcgtccgctttttttgggttcttgtttagaagaagcaatggccacttcagcaatccaacactcttctttcgctggccaaacgaccctaaagccatccaacgatctcctccgcaaaatcggagcctccaatggcggtggccgcatcatcatgcgtcgtaccgtcaagtctactcctcagagcatctggtacggaccagaccgtcccaaatacctaggaccattttccgaaaacacaccatcatacctaaccggag

SEQ ID NO: 171749 - DNA, 135 bp, Arabidopsis thaliana columbia
cccacgcgtctttgtcgtttatgtctccaacgagtgcatgggcgttcagaccaagcccactgaacagtagcagtagcagcttaggagaggagcttcaggaagttgaactgtaagttgaaaaatctgtaatatcac

SEQ ID NO: 171750 - DNA, 368 bp, Arabidopsis thaliana
caccccaaaaacagatttataaaaattgggactttcatagaaccagaaccaagttccacgaaacttgttacaggtacctactttaaaactcaaaggaacagggagaatctaacttagacacaacaaagaccaaacctttaaactttcaaagggcattttcacccctaaaatactttccaatatcaggctggtgaagcacaacaataccctttggatccaatttcctacaatcctgggtactctttggaggaatcccaaaccctaacgggacatcagacattgagaacacaacaaccccatttgcaggaacaatactatgaggaatcctccctaatccacctttaaagacatgggtcccataaagaaac

SEQ ID NO: 171751 - DNA, 343 bp, Arabidopsis thaliana columbia
accgattactgttaagctaaaagtggttgacgttgatcctggccttcgcggtgatactgtgcaaggtggatcaaaaccggcgacaatggaaacgggtgcaatagttgctgtaccactctttattaacgtcggtgaagagatatttgtggacacaagaactggtgcatacatgaaccgagcgtgatccgggtctactacacctagttaattgggtcgttaacaacaaggcaatgatacatcttttttgtatatgagaatgttcgaatccggggacacatgtttgtttttctgaacatcgagagacaatttttcgattaaataaatttatatatatttaagtttg

SEQ ID NO: 171752 - DNA, 249 bp, Arabidopsis thaliana columbia
tcgcccacgcgtccgctcacgcttatcgccgcatctccgtcaaccttcatctacagaatggattctcagatcaagcacgctgtggtggttaaggtcatgggtaggactggttcaaggggtcaggttactcaggttcgagtgaagtttaccgactctgatcgttacatcatgaggaatgttaaaggaccagtgagggaaggtgatatcctcaccttgctcgagtctgagagagaagctaggagacttcgt

SEQ ID NO: 171753 - DNA, 249 bp, Arabidopsis thaliana columbia
aggagagatctgtgacattaatggcacctgtgtggctgctgcggaagatgagtctgtcaggttaacgacaaaagatgggaaattgacagtggacagagagacttttaggacaccaacagctgatttctcgccgatcttgcaattcgagcaagaccctgttcagattcttgatgctttgttgcctctgtatcttaacagtcagattcttagggcattacaggagtcattggctagtgagcttgcagctag

SEQ ID NO: 171754 - DNA, 212 bp, Arabidopsis thaliana
ttcctttttttttttttttttttggggcagcagagtttgattttataacggaggggggcaacccctacatatgctggatctttcttatgacttatgagatcaaattacagaagaaaacgtcaattgctcacacatggactaatgtagggcgccttaaatattggtgagaacagcaacaacctttctagttaccaccataagcagttctcctc

SEQ ID NO: 171755 - DNA, 171 bp, Arabidopsis thaliana
gggggggcccaactcaaacttgtatttgattgaagaaaaagattttgaagccaagatccaaattttgttggtgcatgcaaaaaattttattctacagagagggcttcaaagacttgacgatgttttcttcaatacaggcttaatccaaagaactggctgacaataattgcc

SEQ ID NO: 171756 - DNA, 356 bp, Arabidopsis thaliana
aactcaggatctgacatcatggaagctggagatgacttagatccttcaatccggttagcaatcacccaataacacatagtccctagtgttgaaaccatgatcaaagctccaatggcggttactccaaccgccaaaggcttctctttctctcccacgacaacaaaagacagtgatacgaacgctactgagatcataatgcaagccatccacatgagcttgttgattatagccatcatttgcttctttgctctcctctctataaccaccactgatgtctgaaccacaaccaccgctaaagagatgaaaagcgcgaaagaatcaaacacgacgaatatcaagaactcgggtcttggagc

SEQ ID NO: 171757 - DNA, 377 bp, Arabidopsis thaliana
gggaaaggctgcagattgcaatggcttgacattgtttctatccaatgaacaagattcttttgtttctacagggatccatgacataacaagctgaaaaggagaggcaccttataacttgcagtcatataatggccaaaagagtactcagggtataacaatctagcggcgtttgcaattggttgaaccagtcaaggaaagtttggggatgtgtctccagaccatggatcagagaagatgctgagactgctcagaagttgacctgagaatatgaggtttgctgaccacgaatagaccccccgaatcttgaaaatagtgagccaaaacagctctgtatactgtgaggtacagtggcccagtaatccatattcgggattaca

SEQ ID NO: 171758 - DNA, 348 bp, Arabidopsis thaliana columbia
caaccataagaaaacgaaatctttccaaaaaataaaagacagtagtaacataaaactggattggctaaaaccaagaaaattgaggtccaacatactaaaaacaaagcaacacttataatccacgacaaaaaggtaagatcttaaccgacaaaatctacttttcatcgaacaaaccgaaatcacctccatagtcttcttcgtgggactcttccttctcctttaccttagcagcagctggggcaccaccacctgcatcagcagacaccgcagctactgaagcaacagcaaacttgcttggatccttcaagtattccttgaccttctctgcttgagggaaggtgtactcag

SEQ ID NO: 171759 - DNA, 418 bp, Arabidopsis thaliana
gcataaccaaacagctttgattgagaaactataatttcatgattttccaaaaataggaaaacatgaagaatatcaaagttagcctaaaatgttaccaatgtttgcataagcagaagataggtcttacaaaaggaagaataagtctcatacatgtaaccaaagataatacaacagttcctacttcatgaccccttgggtcttgaatcttgatttaccagttgagtcaatcaacgaccatgttctttggcttctcttcttctttggcttcttccatttttacatcaacacttccactagcttcagcaatgttctcctctccctccaccacattcagatcgacgacgccacctcttaacggttttgtttcttcggccgtgtccttcatctcaacattgtttaggtctggcttggtgtcgtc

SEQ ID NO: 171760 - DNA, 317 bp, Arabidopsis thaliana
cctctgggaatcctcgtaattaactttaatctcaagattcccaaaccttccaaagtaccaaaacccaaaacacgtgaaacaacaacgcgttacaagctctaacaaatactaatagggaaagaaatccaaatcttaaatttctgctgccggggattttaaatacgccctttaatccagttggcaacgacttttccagatttcttaccttacctagtccgggtacccgtaaaaaactaaaaaacccaatttagaccagcccagtgtcagaccccccccccatttaaaatacccatatctctcacttcttcttcttcttc

SEQ ID NO: 171761 - DNA, 268 bp, Arabidopsis thaliana
aacctaataatgcaatctcaacaccgatacttcatttttagggaatgcaaaacacaaccccaatacaacaaaaattattctttctttttttataaaaaatttcttaaaagatttctttaaattaacttaattggatggtcactttctctcttcatctcttggggagatagtaatcgattgtacagcaggtaaatttagagtccacgttttcataccctggtttgtttttttaacctccaattcccagtcagttttgtaaataacataa

SEQ ID NO: 171762 - DNA, 399 bp, Arabidopsis thaliana columbia
aatattttttactctaaaactccttgtgaagactatgttgaagctgctgttaaacaggcaatgacgattcacataacaagcccacctggggacattctcatttttatgaccgggcaagatgagattgaggcagcgtgcttttcactaaaggagagaatggaacagctcgtatcatcttccagtagagaaataacgaacctactcattctcccaatatactctcagttacctgctgacttgcaagcaaagatattccagaaaccagaagatggagcccgtaaatgcattgttgccaccaatattgctgaaacatcattgacagtcgatggaatatattatgtgattgacactgggtatggaaagatgaaaggttttcaatcctagaatgggtatggatgc

SEQ ID NO: 171763 - DNA, 264 bp, Arabidopsis thaliana
gcaaattagattgtgtatatatattaggggggggtttacatagatctacactggcagaaaacagagctgtgcaacagtaaaagattgttaagaagttgacctgatgtcaaattattgaacaggaagtgacctactgtcaaaccgataaatggccgaggaaaaaaacgaaaaaaatgtgcgaagcttgtccgaaagaagagacaagaaacaaaaagaaaaaggacttgaatcatggggaaagaattctcagcatttgggcaagtc

SEQ ID NO: 171764 - DNA, 343 bp, Arabidopsis thaliana columbia
caatcttaaatatatataaatttatttaatcgaaaaattgtctctcgatgttcagaaaaacaaacatgtgtccccggattcgaacattctcatatacaaaaaagaggtatcattgccttgttgttaacgacccaattaactaggtgtagtagacccggatcacgctcggctcatgtatgcaccagttcttgtgtccacaaatatctcttcaccgacgttaataaagagtggtacagcaactattgcacccgtttccattgtcgccggttttgatccaccttgcacagtatcaccgcgaaggccaggatcaacgtcaaccacttttagcttaactgtaatcggt

SEQ ID NO: 171765 - DNA, 216 bp, Arabidopsis thaliana
ggatggaactgttttttctatgggtattacttttttatagggttatttgaaaatttacataatacagggttcgaagcaaactgttggggataaatctggctacggagttatgtccacattgtctaaatcagtaaggcaggccctttaactcgaagtagcaatatgcaataataaaatcttatgcagtttaaccaaatttatttacatagactgggt

SEQ ID NO: 171766 - DNA, 135 bp, Arabidopsis thaliana columbia
gtgttattacagatttttcaacttacagttcaactgcctgaagctcctctcctaagctgctactgctactgttcagtgggcttggtctgaatgttgatgcactcgttggagacataaacgacgcggacgcgtggg

SEQ ID NO: 171767 - DNA, 435 bp, Arabidopsis thaliana columbia
cggcttctgtgcttgatcagacatttgaggacgcaggtgtggatcgggatggaaagatggataagacagaatggagcaatttcgttatcaaaaacccatctttgcttaaaatcatgactcttccgtatctcagggatataacgacgacatttccgagtttcgtatttaactcggaggtggacgagattgcgacgtgaaagagacaagacaagctggtttatagagaccaagtcgtaggctggaccaagaataaaaagaagattgattccaacaatgttatatagcaggatcgagctctatttcctttggaatttttagtctattggatttcaatttcatgtattgcgattacttttggctctctttctttaacagttttgaatactcaagttgtagttctacgaaaagattaatataaaaccacaatttctgatt

SEQ ID NO: 171768 - DNA, 330 bp, Arabidopsis thaliana
ggggaaggtttatattttattgatcactggttgggtgggggaaacattttacttttcgccaagcctccaaattaaacttttttaactcaaacatttcaacatgagaacgtgttaaagcttttaaaaacattttttagggggtattttcataaaaatcaaaaacaaataccgagggtttgggtttggtatacagcaccggtttttctcatagtagaggttcagggggttccatctggttcgcacttttttggcccgactcaattttttgactttccacaaaatcaatcccgagaaggtgccatggccaacacgcatatttagctttgtttg

SEQ ID NO: 171769 - DNA, 217 bp, Arabidopsis thaliana
gcaaaagacaatttctgttggaatcagacgttttttgctggaaacaacacaacttggggttttagtcaaagaacagaagaagaaaaccccttttggaaagaatctactgttgaaagttggtcgttgaacaaacattttaggaaggggtgttagagccatctttttcatttgaatcttcttttttatcccaagaagactccgcagttttttcaaattc

SEQ ID NO: 171770 - DNA, 262 bp, Arabidopsis thaliana
gcaaaaaacaatttttgttggaatcaaacgtcttctggtgtaaacaacacaactgggggtttaagtcaacgaacagaagaggaaacccccctttggaaagaatctactgttgaaagttggtcgttgaacaaacatcttaggaaggggggttagagacatcttcttcatttgaattttcttttttatccgaagaagactccgcagttttctaaaattccaccattttctcaagggcctctatgtctccagcttcagcaagagc

SEQ ID NO: 171771 - DNA, 197 bp, Arabidopsis thaliana
ctgttcgcaccactaccttatctccgccagatgaaaccgaaacacatgtctattgccggcgaaccgccgaagaaaaaatcggagactgtcacggcgcccacaccggcagcgaataagaattcgagcgtggaggaggaaacagatgaggaagtacaggaagatatgccgtgagtgcaagagaaggcgttcgacctagg

SEQ ID NO: 171772 - DNA, 311 bp, Arabidopsis thaliana
aagaatagtttttattgcttaatggaagtggagagaaagtatagtagatatgattagtattatagagtagagatattcaaaggtgaatgtggggttttgcttcttacaacttcactacctatatatatacttgttgaagaacccacaagaaatgaccctttgtaaaaggttatcttggccccgaggggtaatcgttttcgataagggaattggaataggggatgagccagtcagtgccagcatgaggataggcttgatagttaaaatcatgtataggcatctcctccttttgccattcttcccatctctca

SEQ ID NO: 171773 - DNA, 229 bp, Arabidopsis thaliana
ggtggggaaaaacaattggtgcatttgttttcaccaaaacaccctcttttacatttttaatttagggggtagcaattttaaagaaccaacccccaaaaaaaagctttggagaccaaatcgaaatgattgctctagcctaaaggctgagaataattaaaggcaacgcgttgtttccctccgtaggacatttttgtttcgggcatgggactttggtttatcccaccctttt

SEQ ID NO: 171774 - DNA, 66 bp, Arabidopsis thaliana columbia
caccaactctttataccagcctctgtaacgttcgatcatcttgtatttcatttcaaccactcattg

SEQ ID NO: 171775 - DNA, 372 bp, Arabidopsis thaliana
ttttcttttttttttttttttttttttttattttttttttttttttttgaaacaaatcaaaggacttgttgccatataaacaagtaatagaattgttatctgctacatcttctagagagaattgttagactcaacctttatttttattgaatcataatgggagtatggggacaagtaccttgttgggaggaatttcttctttggtggtctcaatattcacctaggaattatcatctccaaatctatttgaaccaaacaaaagagactattgttatcctccctacacacattacagattttacttgcagcccaagaacctttggaacatccaaatctggcaggtctcaacgaatgttggaaagttctgagctg

SEQ ID NO: 171776 - DNA, 407 bp, Arabidopsis thaliana
  unsure (1)..(407): unsure at all n locations
cataanctgnttgcttaaaagagctgtaagttcaacaattaacaccatgtacttggtaagcaaataaaagagcgataggaaacaagaatccagaatactaatacatcatcgtaaaaatctaaacttgaattaggtaaataaaagcttaagcacgttctccacgaattcttctagccaattgaatgtccttaggcatgatcgtaaccctcttggcgtgaatagcgcagagattagtatcctcgaaaagtccaactaggtatgcctcagccgcctcttgaagagctaacaccgcgtgactctgaaacctcagatccgtctgcaaaatttaacctaattagtatacctaattccataacataacctaattgataagttttaatccgccgctaatgagtataaattttacc

SEQ ID NO: 171777 - DNA, 258 bp, Arabidopsis thaliana
gactctaaaaaattaactaatagcttgatgacagaatcagaatctcataacacaaaacaaaagagacaggtttgcttgacatagaacgaggaagactaatgtgatgggaattgaagggcaaaaaatatggcttggggaaagagaggatacacatcttgacccgagaacagtgatgactccaacttctccatgtgaggccatatttcgctcgcatattgccttggggacgccgtgagatagccaagtgttgataaacac

SEQ ID NO: 171778 - DNA, 198 bp, Arabidopsis thaliana
ggggaacaaaggagcctttgttttattcattttatcaagaaaaccgggatcccacaattttatgaaagcctttttgggaaaaaaattgcctagatcaaattgaaatcctttaggggaccccctttccgggaacaccatgctaaaaggggggcttaaaaagcttatacttaaaaaccccaggtccagctttttttttta

SEQ ID NO: 171779 - DNA, 151 bp, Arabidopsis thaliana
cttcaaacttgggttgatagctgaaaacttgcggttttaagagtgttaacaacaaccgcaccttaatagcattttaactttgaactttggaacaacaggggagactgatggatgtgcaaaaaacgactaacaccttgaggctttccttttg

SEQ ID NO: 171780 - DNA, 316 bp, Arabidopsis thaliana
cattagcagagagaaagtggagggagcggtgagggaagtgatggaaggagatttatagggacacaccgggattgaccgaactttgcgcaggatatatctcaaggccttgtggagcagtaattgtgaacaggcccgacgaactgttagaagtctgatatcggtactggggctggcttgtttgaggtcaagaaatttgcgagatgatttcttttttttcattgttgattgcaaaagaacccaatgcactgtactgtactcttaaggggaccaagtgaaagatttcatcaatgaagtggaaaggaaatttacaggatgc

SEQ ID NO: 171781 - DNA, 227 bp, Arabidopsis thaliana
gggagttaaaaggatgtttaaagccaggtccttggagtgaagttataaaaatgcaacatatggttgaaggtcttatcagattctatctcattaatataaggcacactctaagatcataatcactctctgaaaacccaaaaaaaaaaaaaaaacttgattggtaaaaagccacaaacaatagactcagagcgccctattgttattgttggctttggaggacctggttt

SEQ ID NO: 171782 - DNA, 263 bp, Arabidopsis thaliana
caacatatgcttttgaagctgatgggagatcgtcgaggggacgtatcaagtgagggaattaacttgtcatgaaaagtaaatcgacaagctatcaagtaaacttttcatgcaaaagttgtcttaaaaccgcaacttgcttggagctaattgatgtcgacacttcaatatacggaatccccctttataagtagaaaaagttggttttgcgttaacgtgtgatattattttgggaatttcatctgcaagaaaataatgtagaggac

SEQ ID NO: 171783 - DNA, 162 bp, Arabidopsis thaliana
gagagaaaattgaggatgattaatgacaaatcatacaaagtctggcacatttacatatgaaagcatcaatccataatgtacaaccttattcttctacttatgtcactcactcgaatgaaaaagactgagagaaaagcaaaatacacactgctaaaacttggc

SEQ ID NO: 171784 - DNA, 367 bp, Arabidopsis thaliana
aagttagtcaccaaaaaaaaaaaaaaacacaaaaagtttcaatggccgcctccacaatggctctctcctcccctgccttcgccggaaaggctgaaaacctttcccccgaggcatttgaagtcctcggaagcggccgtgtgacaatgaggaagactgttgccaagccaaaggggtccatcaggcaaccccatggtacggaatccgaccgagtcaagtacttggggtccattctctggcgagtcaccgagcctacctttaccggagagttccccggagactacggatgggacaccgctggaacttttcagctgatcccgagacattcgcaaggaaaccgtgagctagaagttatccacagcaggtgggc

SEQ ID NO: 171785 - DNA, 249 bp, Arabidopsis thaliana
gttcgtgacacccacaaggaagaaatcgatgggtgattatcgagttctccgaaacttccgcgacattgtcggaatactctagctacatctctttacgatcgcctctctggtcccatccgatgaacttcagaccgatgtgggtgaacgcggggagcttcaagtgactcctagtgaccaggtaaaaggttctcctggatcgaagccagatagaacctctctgtgcgagaggagtcatatgcatgcacttgg

SEQ ID NO: 171786 - DNA, 307 bp, Arabidopsis thaliana
aggttcgccaaatatgataaattttatcgaacaaaacaagttttacaaaaataatcaacaaactttatacatggatcatgcaactgagaagaagaaacttccaagtgaaaaaaaaaaatccaacttacaaaactcttgcaaggaaatgaaaactttggcttccttcaaagccaagacctgaaagcaaagcagcgagctttacgttttctctgcaagctcgagttcttacctttgtttaacatgccctgattttggcccggaaccccttctctcttctcttcttcactgaaatcgcttgatgactctt

SEQ ID NO: 171787 - DNA, 168 bp, Arabidopsis thaliana
ggggggggaataaaaaatagttcaggccgtcacacaaaattacaaattgtcaagaagaaaccatcaaaaatttgagcctgggatggctgccaccattagtaggggaaaaaagaacccgtgttcccgggctgccccaccgtagtaaggttttatcataatcggaaattt

SEQ ID NO: 171788 - DNA, 317 bp, Arabidopsis thaliana
acttaagagtgtttttctcattatcaaaatgcctggggaaagatttacaaaatctcatttgtttagcttagtgtagtttcttatctacactgattacaacaaaaggatttggtttttaaaattctgatctctctcaatctaaattatcacagacaggattgatcatcagagtctttctctgtcactatcttcttcttcttctttttataacttaaaaagtggaagcatagggacctatttagaaaggcaaaaaaaagttgtgaaataagttagaagagaagggaaagagctaaagaaactaacatgtcttttgtttt

SEQ ID NO: 171789 - DNA, 263 bp, Arabidopsis thaliana
gaggcaaaacagaaacaatcattttgagcaaaaaaaggttaaaacagcaaattgattcccgcaaaaatttgtcaatcaaagagggggattgagggggagggggtcaaagtaaaaaaaaaaactcgaacaaaagcttttcataaatgaccattgggggaaagggaagccaaaagatcacttggactcccacttttggggccttcacttccctgggaagatgggtggttcacgtttttcaacccatctaatgcctttgaaacttt

SEQ ID NO: 171790 - DNA, 449 bp, Arabidopsis thaliana columbia
aaggtatatttgatgaattgaccaaaacacaagtgtgtttaaaaatcttactgagtaacatacatatcctttcttttcttttcctgtgttttgacaggtttccagcatctctgtctgtctttacactagtaagtataattttttctatgagacttataatgttcaataattttatgatatttagagaattagtgacgtttatgatgatgttttggtggacgaagaaactcctccggttttctcaagatcccgttgtcttgctcgttccattttccgctttcgccattcttccaatgctttcaagctcgatgcatcgtttagcgcacggaaatccttcagtcgtttagagagatcaacggctgtagtctgcttcacatctttctgctgctcggtttcttgtcccgcaaatgcctcttgttcgatttctcggacctatcattcatttcaag

SEQ ID NO: 171791 - DNA, 392 bp, Arabidopsis thaliana
aaaacttcaattaagcgctattaagcagaccaaacgacgagattatgcagtgattaattagagcttaaacacaatttaagacaaaacaaacactaatccaaaaccttttaaaaacaataacaaggttcgtgtaagtgaagaagtcgaaaaaaacggctgctacggtagtaaaaagccgatctgagtcgcgaccaaacgacgcgtatcaatttcggagctgatcttaatcttgtcaacacaacttgttgcactctggaatcagatcttgaaactttctcagggaaactctgttctgtcgaatactggtagcttgtgagaaacaactggatcttatacatatactctccatatggtgcaccggagcagtcaccaccactagtgcttctgaacac

SEQ ID NO: 171792 - DNA, 281 bp, Arabidopsis thaliana
ttgttgtagagagagagagaaagtgaatgagcgagacaaagagtttaacacacgcttataaccaaactcttcgtaactacagaggcgactgaagcgttttcagatttcgatgagtgagaagcttgtgttcagaagcactagtggaggggactactacggtgcaccatatggagagtatatggagaagagacagttgtttctgataatctaccagttttcaagaaaacagagtttcgctgcgaaagtttcaagatctgttacgagagtgaaacgagttgtgt

SEQ ID NO: 171793 - DNA, 354 bp, Arabidopsis thaliana
acaataactcgagaatattttaaagttgacagaattgctccaagtcaagaaagtctacggaatgtacaaagaaacaaagctgttttcctctcttttttataagtgaaccgacacagaagagaaaaaaagaaaaagacaaaaagagtttagagatcagaaaggagccgagcttgtccgtcggagctgccgcttgggatcaggcggtggtacacttgggaggattttttccacctccttttgcttcctgagtctttcgttttcttcttctaaccgtgaaactttgatctctagctcatgagtgtaagcctgtttcctagctcgggaacgagcagcagactctctgttctttatcat

SEQ ID NO: 171794 - DNA, 420 bp, Arabidopsis thaliana
gaccaacttgtatcagtttctcatcaaagaattctatgtgtcagatgacccactgttcttaactccagagctacggcaagaccaatcaaaaggaggaatcgcatacggtccatttagtataccctcagccatcaatctgtacgcagcctcagtcatatgaacaccgtcccaagccacatactttgaaggatcatcacaactttcaactatatcagtcccacatttcctacctacggtatagttgtacggtcctcctgcgccgcaacaagcggacaaaggtctgttcatgaatccgaatttggctggttcttgataaaggtgaaacagcgcgttgtagtagtcagcgtatatgatgttaacatgagggtacaacttctggagtctgttgagttctgctctaagctgctcaccatggttttc

SEQ ID NO: 171795 - DNA, 265 bp, Arabidopsis thaliana columbia
caccgcatgtcggtacgctccaggcgtccttggctcggatttaggccaaccgcgtgcggtaacacacgggagaccagcttccgtcccgcatcagcaaaggatggtgagggacgacgatttgtgacacccaggcagacgtgccctcggccagaaggcttggggcgcaacttgcgttcaaagactcgatggttcacgggattctgcaattcacaccaagtatcgcatttcgctacgttcttcatcgatgcgagagccgagatatccg

SEQ ID NO: 171796 - DNA, 265 bp, Arabidopsis thaliana columbia
ttgttatctcggctctcgcatcgatgaagaacgtagcgaaatgcgatacttggtgtgaattgcagaatcccgtgaaccatcgagtctttgaacgcaagttgcgccccaagccttctggccgagggcacgtctgcctgggtgtcacaaatcgtcgtccctcaccatcctttgctgatgcgggacggaagctggtctcccgtgtgttaccgcacgcggttggcctaaatccgagccaaggacgcctggagcgtaccgacatgcggtg

SEQ ID NO: 171797 - DNA, 121 bp, Arabidopsis thaliana
  unsure (1)..(121): unsure at all n locations
atatcaangaaagggcaaaactagactgatagggttaaatatagcatacctagcagtcccaagcaccataataccaccattattatacatattagaaacagaacatgaacagatgtacaca

SEQ ID NO: 171798 - DNA, 152 bp, Arabidopsis thaliana
attgacggggaagaaccagtctaatatggcaaaattttgaaaaattagaagccccaagacccaaaattccacggttattatacatattggaaacagaacaggaacaggggtccacattcataccttttaagggaatcatccattgtttaaaa

SEQ ID NO: 171799 - DNA, 438 bp, Arabidopsis thaliana
gatgcagagtttttataaagagtaaatgaaactgtgctcaatgcacaacaaaacaatgaacccttttttttttgtcaaaattttgcaaagtagcttttaacaaaagaggtgagtctccggcttaagctgcccccaaaaaacttcgtagcagcaaagcaaagtaaaatcccattagcaaagcttcttctgaccaagctgatccgctagcactgcatcttcgttcttctgcatagctttcttggctagttcgtacccagcaaagttcatagcacctagaggagccacccagaagaacctcgggactgctcctttgaacaaacctagcggtccctcattacgcagaatcgatacaacaaccatagacattgagatcggtctccctggcgtggcagtcatcattctcgtcttatcacatcaaatggggttgttacaactgct

SEQ ID NO: 171800 - DNA, 411 bp, Arabidopsis thaliana
ttcttttttttttttggtataacatatagattgaattttccaaaaatttgaagagaagaatctatacaatccgtaagaggagaagaggaaagggacctgaagcaggcgactttggcatctcaacctcaacgtctttgtatctgttgtctgtaagttacaacaaaaacaaagctcagtttcagaatgttaaaccatgtgagctttttctttttaagttaactcatctctccttttccctttcactttcagtgttactgaatgtgttcataaccatataattactattatatctctttaaatagtgcggattgtaattatacttccggttcttctgctgcgtcctccagtagcaggctagtgccccaaatgcgcagcttgcaagtgctatggccaatgcagctcccactggca

SEQ ID NO: 171801 - DNA, 174 bp, Arabidopsis thaliana
ggaaaatgttattacgataggatctggtggcagtcaaataaatacagcggggccattacagattttactaccattttaaaggcacgtgacttttacataatctgacatcaaaagagcgaaaaataaaacaagaggtcggttcggctcggtttagccttatttgaaagtggaaac

SEQ ID NO: 171802 - DNA, 307 bp, Arabidopsis thaliana
tcgctgttttttgggttatgcctttaacacttcaggctacatcgatccttgagttcgccggccggtacggggacattgccgggaatgagtcacaggggacgagagggatattggaaggagggcgaaaccattctacccgaggaatttactacggctgcggtggtggcttgtttttgagggatccggcgggtttatgaatggtttgacgacgtttacaaacaccaagaaacacgcctatggtcaagcacttcaatgactagccattcccttgcaagaattcggtcaacggtaacatgacttagttttc

SEQ ID NO: 171803 - DNA, 279 bp, Arabidopsis thaliana
aagggatccaatgcttttaaagagtggcaacagttttgcttttgaacatggttttggaaaactgggaggttaccaaaggagaaccacctaaaaaattttaaaaggcccaggttcaagaatccaaatgaaaatttgcaaagccgttggtcccctttggccaaattggcatgggcagttgcaacacattgaaagggtccaaatcctccccaacaatgttcctggtaactccccaacaaattatttctaaaacatgattctttttagggcccatgtcccaaa

SEQ ID NO: 171804 - DNA, 301 bp, Arabidopsis thaliana
ctaaaattggataaaagcaggtatacactctggtattagctataaatagaaagacgattctcaaataagaatcttggaatgttataagacagagcttatatatatatataagccatgagactgtattttcacaagatgttttctcatgattcgtaacttaataacacttacaaattacagatgcatagacattaatatagtgcgaaacccgcttcttgtttgatcagtccacgcattttttcggcctgtaaaatgagcaaaaaaaggggagacaggacctcgatatgtctaaacagggatc

SEQ ID NO: 171805 - DNA, 380 bp, Arabidopsis thaliana
ataagaagatatagttcatctgttgcatatagtcatgatatgtttgcaacaagattgaattcatcatcgctcttggcttgataatctactataacattaccacttgtaaataaataaaaagttcgaataggcttagtgaagtatatttgcataaacttagttgaagctgtccttgtatccattcgtcctcttgttggacgcgatagagatccgctgatcctgcagcatgttcaggcttggggctaatagtcttgtgtatcgatcgaagtacagaagttgcttcaacagaagtgcaaactctctcgggaacttaagaccatatgattcgctaacacgcaccaggtcgaggaaaagagcattcatctgtctctcatccataa

SEQ ID NO: 171806 - DNA, 313 bp, Arabidopsis thaliana
ctaacaaataatggaccaatgcaatagttccagctctaaaagggtacaaaaatgcaaatgccaggacaaatgacgacgaatattcaatacatggggtggaacctaattctaaccctagaggtcggattgtacgctttattaattaactaatgtgacacggacaaaaaataaaaatatgtttttcttattacgttaccattacacaatcaaataaacccgaacccactagattgttgacccgagttcccaattccgataaccgggtcaacactaaaaccctgattagccgagacgtccgagttattattaaacc

SEQ ID NO: 171807 - DNA, 100 bp, Arabidopsis thaliana
cagtatccagccaaaaccaggtctctcggcctttgagttcagggcacttgcaatgactacagtgagatcccttttgatgttttatttgcctcttttggag

SEQ ID NO: 171808 - DNA, 400 bp, Arabidopsis thaliana
atatcacaaactctatttcttgtaatggttgggtacatacaattttgatgaagagaaagaaaatgtaaaaagcctgaagacattcctcttgtttcaccagttacaaactgtgaacaatctacaaaactcataaagcatataaccaacacacaaaaactattgtttcaatctcgcaaaccgaaagaaaagagaggttaacctcccagggaaaatacaggtaaaagaaagacacgaatgaatcaaatcctccatgaatctgataaattacagtatatgaaccagttaactctctggatagtatgtagtatataatatgcaaatgttacctatgtagaagtcttcatctttctatatagtgagggatgcatgcaggagaatatggatggctttgctctctttt

SEQ ID NO: 171809 - DNA, 415 bp, Arabidopsis thaliana
ctaacaggggagtttatcaaaagaaaaatggaaaacaacaaaatgttgcaaattcgagaaatatacaaaaggaattaaagttgaaagagaaatggagggtagtttcttttttcttcttataacctcactctttcttggataacaagtttaaaaaatgggttttaaattttaacactttacagccctagggcttgggattcccatgtatgccaagcgtggagacaccctcactttaggactaggccttggagatggaattggtccgtaagaattagctggtgaaaccctaggagacagactgacttgctccagtgcttgggcttgtagctccattggataatctttaacacacccaattctgggaccatatccactggtccatttacaagacagtttttttacaggatcaaacact

SEQ ID NO: 171810 - DNA, 193 bp, Arabidopsis thaliana
ccctggggatttggttcaaggggcaacctttttcatttggattacccaggcttatggtcatatcatttgtaagaggtctacttcaaaccaaatcctccggttttttttgggtttctgttttaccttttattatgttacaacactcaaaatcaacacaacccaaagaaaaatgttcaaatcaaaagaaatcaca

SEQ ID NO: 171811 - DNA, 163 bp, Arabidopsis thaliana
gagaaaatgtgggatgctaagaacatgatgtgtgctgctgacccaagacacggacgctacctaactgcttcagccatggaccgtggaaagatgagcaccaaggaggttgatgaacagaagctgaacgaacagaacaagaactccttctactttgtggaatgga

SEQ ID NO: 171812 - DNA, 212 bp, Arabidopsis thaliana
aggaagaacttacaaagaaggagttaataagataacacctcttttttgtgttccactttcactcaaaaaaaaaataacaggattaaatagacgaccccacctttttttatatctacattgcaacaccttccaaaagaataacatgatgtatgtaaatccttgttttcttttggggttcaatctaacaaggatcttaacacagtaaacaaaca

SEQ ID NO: 171813 - DNA, 339 bp, Arabidopsis thaliana
ctgaattgaattatcatattatcgatagaggagattacaagttacaaacatcatatgcataatcactgggccaaaaatacaagcatataggggaaattacaacaatgtgccttcgtgtctaaaagttggaatcagaccttctcctttgtttctcagggattccaatttttggcgtattagaggctcgaactcgatccctgcacttttttcaccaaaggagattatgtcacgatacatttggttcgagggttgaataccagcaccactcatccattctaaaacctcaatgtattttctccagtttccaacagctaaaagatgttccaacagtattgcata

SEQ ID NO: 171814 - DNA, 153 bp, Arabidopsis thaliana
gcgcccacgcgtagggcttgcgagaaaaattgattgtcatatggagtgagagtgtgtgaatgagagacattatgatattgatggttatgcatctgtataaaaaaaagattcaaaaatgtatgctaggtttagttgaattatgggatgattaac

SEQ ID NO: 171815 - DNA, 374 bp, Arabidopsis thaliana
caaactggaataatgtctgataattgagcacatactgatattgatggttccaaaaacactaatttccgaatccaaaatcaaaaaagagcggccgcccttttttttttttttttagaaaaaaatgaaggtaaggcaggacaaagatacaagaaatcttcttatactctatacacattttggagtaaaggagggacaatacatgaagtcctactagacacaatccaattcactgggggggaaaatcaatcaaattcccccaattttctggatttgggtttctgtaaaagaatcaactttttaaaactcaatgtaggggccctttcgggttcagagcccagttgaaaccaaaccatgcaaggttacaattccaatca

SEQ ID NO: 171816 - DNA, 133 bp, Arabidopsis thaliana columbia
tctcctttgccctcgttttttttcggttctcgtctttcgttcttcacttttagacaagcaaatatgagacccccagttacaggaggacgtggtggtggaggattcagaggtggaagagatggtggtggaagag

SEQ ID NO: 171817 - DNA, 307 bp, Arabidopsis thaliana
gattgaacatgccattatcatatatggcccatatcaacatcgatccactatttcaacaacatgcttcgttcgccttctgcttactttattgcttttaccattagcaaagttccaaaaaagataagaaaaccaaagattcttcttcttttccacgtcaaatgttttcctcaaagccgtccgtacaatgacaaaagatctctgagtctgtcagattcagtttcaagattatcaaagctcgttgaacttggaatcctccaaccccaattccccacctcaggggctggagggttcatcctggcagaacttc

SEQ ID NO: 171818 - DNA, 303 bp, Arabidopsis thaliana
gtggactgaattttgagtagtagataaattcgggaatgtttgttactacatatgttaaaataattcacgattgagcacgacgcgtaaactatttttacacgggatagaggccatacagctattaactaaagtctgttgagaggaaccctgagactgggttggggaggagttctgtttgttgtcctgtccacatgagatataacttgcggcattgtcatccccaccgatactatgatctctattccttctcggatcgataaatttggccttatgatttttttgctacttaccagaaacacattt

SEQ ID NO: 171819 - DNA, 210 bp, Arabidopsis thaliana
gactccagagcatggcgccctcctttttttttttttatggggttttttggagaaaagaactatactttatttgataggataaagggaacaattcgcattttacatcaaaatagaagagaaacagagcaatttatactgtacacacgacaggggctgataaaaatttctcctattgcttattctcaacactcatgaattaatcccactctt

SEQ ID NO: 171820 - DNA, 201 bp, Arabidopsis thaliana
ctagttctaagatcgcgagccggccgcccttttttttttttttttgcaagattgataaatatatcgtctgattgataatttcgatctgcatgactatatgaattggttatgtttgttttgatagttaatatctgttattttcatttttgtataacaaataatgttatgtttgcgaatgaattaagtttccattttcttact

SEQ ID NO: 171821 - DNA, 298 bp, Arabidopsis thaliana
gggagcaaaaacctggggtgttccactttgaataaaccccaatagtgcagaaacaagacattctgataccctttttctgtggggttaaaagggagtcaggagatttataacatccattttttccgcgtgtgtaatatgcacaacccaaacgcaggaatccaggaaaaattgggttttgacctttaaaacctccctcattctggattcctttggggcagttgggactccaacaacaacattggtcaccaacttcccgttttcataaacggacatggggttttctacaacaaccgtttgg

SEQ ID NO: 171822 - DNA, 236 bp, Arabidopsis thaliana
gagcctaataggtggttttataacgttatttcaaaattatcattacaagcgatagagagttacatatatgcgaatatagtcaagttacaagacaacatgatttatttgactacagatttattcatcttcttcaacaacaacaacaaagagacgaatctcagttgaactcaattgggttttctttataatgaacatgaccatgtgcaaagaccacactccattgttttgctgtgagc

SEQ ID NO: 171823 - DNA, 205 bp, Arabidopsis thaliana columbia
gtggagacatggatgattatctgaataagctttctcgtatacttactttctttttattttccgggaaacatgtaatcaataaggtgagaggcaaacgaatgaatctgcctataaaatgactgtttcttctacaatgtaataatagtaaaactcttgagtacaatagagtggagacatggatgaatatctgaataagctttctctc

SEQ ID NO: 171824 - DNA, 176 bp, Arabidopsis thaliana columbia
ttgttcgccctttttttttttttttggttttttaaagtctaaaatgagcatctgacagacattgtatcccccttttagttttgctaaaacttgtttctatctccgacaaactagatgctaaaatacttcaaaagaaaacgataaaacaataaagagactgaaaactttggtcttca

SEQ ID NO: 171825 - DNA, 348 bp, Arabidopsis thaliana
ccgaaaacttttcttgcaaaacatgtgaaactacatttgatccaaacatatgacacatttctgggtttctgccaccatatctgattttcctgatctttaaggcccagggatcaaaataggttcaaactaacatcacatctttgtggctgcatgcacaaagtcgaattttcatcctcgtgatgtttcaggtatggctaaaaaaaaaaatagattcgtcattcctcatcaagaatcacaggtctcgggggaatcctttccaatgctttgaaagattctttttcgtaagggggaggcaacaaacgttgtacatctgcaaatagatcttcacgtccagtcgcctttttgaca

SEQ ID NO: 171826 - DNA, 446 bp, Arabidopsis thaliana
aaaaacaactgaatttaacacattccttacatatgactggaaacaaatgaaatagcagaagagctagataaagaacaagataagtaagaaaactagagacatttccataaaagattcttctatgtggattcccagttgttatcactatgatttagaataaaacccgtcatggttcttagcagaaagccgtttcaagaactcgtaggtagtgatcatagttgttgcagacattgacattgaagcacatcttggtcccaatcctctataacaagccgtccatccaccttgtctaaccaagtttcttacagtctgtccaatactcggtccacgcttgccgttgttactactatcttccccatcaagaacctgcaatctcgtcttgattgtgtcgagtggcattgtaatcaaagcagaaacacttccagcaatcgcagcactaactcctt

SEQ ID NO: 171827 - DNA, 472 bp, Arabidopsis thaliana
attaaaagcttctctcgttggggacgttaattaaaattctctaatcaggcgaagtagactgatacgagagggatatcaacgtcagcatcattatcatcttcacaagcgactacaacatccacgtgacgtctataagcaggcaattcaaccccagccacgtctcttgcaagatccaccactcttctgttcatcctctctttatgccttgagaacatactgttgtacagtaaactgcttccgcaagatatgctgtatgcgtttagccctttctcttttagccagtctagcaactcccttagggtcgggtttcccctcatcacccaccggtcccaaacagtccagctttggtcttggtgcttcaccactttaggtggaaccggctcagccatggagaagagcggaagtgctaagttagcaaatgtgtttctgtagtcttctactttgtgtgacccgtctaagaccttgtacatct

SEQ ID NO: 171828 - DNA, 130 bp, Arabidopsis thaliana
cccacttttccgctcatctatttgtaccgctccgttgcgcctctctctgcttaccttcctctatctagcggaggaactacgtcgaccgccgacgggtaaaccggcgacagtggattctctaaactcttaa

SEQ ID NO: 171829 - DNA, 158 bp, Arabidopsis thaliana
attctcggaaattaggtgcatatattaatatcaaggaactttaaaaagaaagtactccatcattaataaaggataaaacactacatactggtgaaacactacttttttttcctgcttgcatctcctattacctgtacaaagaatgaccaatcttggga

SEQ ID NO: 171830 - DNA, 241 bp, Arabidopsis thaliana
aatatgcgaaatcggcaacgagagaaacaaaaagaagaaaaaaatgaagacatttatgataatcaagctggcgaattggagcatcttgattgtaggacgagtcgaggctaacgataacaagagaaaatagctactactcgatccaagcttgcgtcctaatgctccaccaggatgtcatcgtcagccatataaaccccgaactccggctaacgaatatagacgcggttgcaccacaatcaac

SEQ ID NO: 171831 - DNA, 399 bp, Arabidopsis thaliana
agattaaacatctgaatttataattaaaatgtttaagaacaaaaactttgttcaactttctcttcacctatgttctcattacatagatcatggtcaatacatatgcaacaataaaacaagaagtggaaacaaacaatgatcagaaagaagaatccacaagtgcatgatcatgttaaatgaacaatcttctcttcctcaagacacattcctaactttctacaagagtataaaaattagacgtttagtggtattcatctgcacaattgggaacacaactgctgaatcccagacggtatatcgttagagagcttgtacatctctgttttcccattcgtgatacatgtcaagttcatctgctgcccaatttggctcgactcacagtagacattttgagattta

SEQ ID NO: 171832 - DNA, 484 bp, Arabidopsis thaliana
gaaacccaaaaaactgtctttagcatttcagaagcaatctaagtaagtacaagtcagagggagagagatgtgggaatcaatctttttaataagtgtttaaatagacaaaagcagagaatcctaatgtaactacttacacacaagatttacatttggttcttttcttttcttgtcttttcgaatattcttgatcttaaatcaattttcttcctccaagttggtaggctcgcttagaacatacttaggtagctcatacttagcacctctctcgtcatagcagactgtgagatctgtgttctgaacaatgactcctgcactgtccacaattgcttgtgcaagagatatgtcagcttctgcagcagcgcgaagtgcgtcccatatctctgcgattaccaagtgtaaaacacaacatgttgacactaagatcagatgcaaccagccaaaacacataacaaagcatatcatctgacactaaagttatatg

SEQ ID NO: 171833 - DNA, 436 bp, Arabidopsis thaliana
acctcttctagtcgcacttgatgtttctgtagatcctccttacaaacagatttgatcccaggtagccaacagctcctgcaaaattttcacataacgaaggtttagtcaaatcaataacaccactcgctagtttgaagagagtgaagagagtgagctcaccgcaaaggattccaaggccaagacagaacatcatggtgtatccaaagtagaagcttgtctggaagaatccggacatcttggtctttacgtagtagtaatagatggagtataagtacacatagacagccgtcgaagcagcagagaaaaatgaagtccactgccagtgatagttctctgcattcagcaggaaatatgtacccacgattgtcacacacaccgtcactatgacgagaatcacaaaaaccagtaacatgaatccatacacatagtagacctt

SEQ ID NO: 171834 - DNA, 105 bp, Arabidopsis thaliana
cttgaaaaagtactaactaacatttacgtatttggtctccctacttggtgtagaacttaaatacatgatttgtatcattctttgggaaatgaatttccaaaacaa

SEQ ID NO: 171835 - DNA, 419 bp, Arabidopsis thaliana
aacgaacaatgtaatatatatttagtttgaagaaattaagaaggtttaaaattgtacatgagatgacagacaaaaaatgaacatatgaatataaatctttatgatggatttttaaagaatggttgagaagctttcaataggatcagactcttcaagcatagaagcagcttggaagcaatcagtagcatcagctatacgtccatcagatttatgaaccattcctaagtaataccaagcttttcggtttgttggatcgatcctcaatgcatcagagagcaaacttctagccacggggagagttggctgatgatctttccctctttcggacaataacgctccaaccgctactttgcaaggaaccgatgatccgtctagtaataaaccgtccaagaaagctgctagcgcgggtttgaactcct

SEQ ID NO: 171836 - DNA, 369 bp, Arabidopsis thaliana columbia
tctttgcgtccgcggacgcgtgggcgacactttctagaccaaaaaaacaatacgtatatagattgtaccataaataattaaaccatagtaagagatgtactttaagagaatttttttgaagttttcaaaattaatcgaaccaaacctaactagttagttattatgagtgtggctttttagtgactggatttgatgtcaagtgattttactataaattgatcttaaattggtttggaaaatcttaagcggactaatgggattttatctcagatttggagaattcatttttgaggcaattaagtttttctgatattagtatattgctgaaaaaatgaaaaacaatgattataaaaaaggaaactataagtt

SEQ ID NO: 171837 - DNA, 458 bp, Arabidopsis thaliana
attataaccttgtatatatataaccatcaaatatcataagagaccattacaagccttgaaaaagagaaaattgacagaagtgtaattctctctttgagttgaaatgattatttaaaagtgtatggaacatgctaagaaataggagctatatcgattagaagaatctgttgaggtatctatccaaaagctttgcaactataattctgtaagctttttcagtaggatgaaaactgtcccaaaacacataatcagatcttatgggacatacagaagctgtatagttgttgcatagcgcagtaacttctattaatccggttccgcaacatcctttattggccaccttaaatccatattgatgagggtttaaaatgagatcaagaagaggactatagatgtcaatatagattattgttgggtcttgtagagtccttgacaagacatcaatatttgcagagagc

SEQ ID NO: 171838 - DNA, 332 bp, Arabidopsis thaliana
cccacgcgtccgatgaatactcgcgagtatcaaacccttatgttgtaatatatattgtcggaatctagactcgaccctcgattcttgctacagatacttaacgtgagcacataacttgaatccaccaaaacgtcgtctgccggagcatttatggcgtcagcggtgacggcgtcaggcaaggtggagaaaggacatcagctatatagagacggcaagtataagggggcgcttctcttctataccgaggctcttactgctgctaaagctaaaccacagaagatcgctcttcacagcaaccgcgccgcttgttacttgaaattgcacgatttcat

SEQ ID NO: 171839 - DNA, 523 bp, Arabidopsis thaliana columbia
ccgatacaatattagatatataaatgacacattgtgaactcctaatcagggttcattttataaatttattatttagttattgcggataaagaacaataataatatggggatgtctaaaagtatcaaggttatcttatctcttgctctcgtagtgttcttggcccttgctgcaaccaaggttgaggccacaagatacataacttatcctgctatcgatcgtggagatcatgctgtacattgtgacaaagcccaccctaacacctgcaagaagaaagaagcaaatccttaccagagaggatgcgagaagatcaatcgttgccgtggtggataggtggaaaacagtgaattaaccaacccacccaagagcataaaatatacatcaatacattatctatatacacacttttgacatcctcatattcatttttaatgatattatttttagtctattattggctttgtaattgattgtaatcagaatgttatgatcaatcatatatataaatacttcagttattatccg

SEQ ID NO: 171840 - DNA, 489 bp, Arabidopsis thaliana columbia
tttcgaaagaaagaaaaatgtcaacgttagtatcgtaggttagctttgctctcttatgcagtgatcaattattcacataaatgttttgtcaaatatttaagtggacttcatgaattaaattagtgaagtgagcattgctcaaagttgtatatattaagccatgagctttcctcatgactcataatatctcagtaaaacaaaataacatacaaatggatagcatttggattctatcacttctcttcttcatcatctttcttcttctggccgccttcaaacgcaaaaatcatgggaaacatcgacgaataccatctcctcctggttttccaatcatcggaaacttacatcagctcggagaattacaacatcagtctctatggaagctctcaaagaagtatggccctgtgatgcttttgaagcttggaaaagtccccacacttatactttctttatcagaaacagcaaaacaagctctaagagactatgatc

SEQ ID NO: 171841 - DNA, 348 bp, Arabidopsis thaliana
gaaacaacatatattgacaaaacgtggtcgttggggatggtccaaccagggtcacctgtataatttcttgtacgctagacagaacacaatctcggttttgattctattcaggtgaccaaatttcaaaatttttaaaaccttagcaaatgcgaggctacaatcttagtttaatcaacttagaggatgtattcaaagacgctgaatctattctgtgtcaacatgaaaacaagatctgacttcattttgcttgagatttatcggtggctgaggactctgaatcctggatttgatctcccatgttggcatgttgagtcacattcgtattttcacgtgcccgagcgagtttct

SEQ ID NO: 171842 - DNA, 350 bp, Arabidopsis thaliana
accattgttttttatgaacctgtgtttaccttttctggtagaagagagaagaaggagagtcgactcgccagctcatcgaggctgtatttgtctatagttctcttgacgtgtaatcttttggtgttcttgaaaccactttttcttttgataattcctctgtttccttggaattgctttctgctttttcaagaagaaaaaaacgatgaatgtggtgcggagattaacgagtattgcctctggacgtaatttcggttcttctgatgacgaaggagaaactgagacgccgagatcaaagcctaaccagaatcgtgaagaaacagagtctacggaaactacgtcgtacgagaaag

SEQ ID NO: 171843 - DNA, 531 bp, Arabidopsis thaliana
ggttcacaacttgattcggatcgaaggcaccgttaagaagaagccgatcaatcatgtctagacaagtggcaaggcttatcggatctctgtcatcaaaagctcgccgttgttctaccggcggctcagaggtttttccgtcatgccagtctctcacttcgttgacccaatctcgctccttcgcgtcggatcctcatcctcctgcggcggttttcgttgacaaaaacacacgagtcctctgtcaaggcatcaccggaaagaacggcactttccacactgaacaagccattgagtacggcaccaaaatggtggcaggagtgacaccgaagaagggtggaacagaacacttgggtctcccagttttcaactctgttgctgaagctaaggctgacaccaaagccaatgcctctgtgatttatgttcctgctccttttgctgctgctgctattatggagggtattgaggctgagttagatcttattggtgtatcaccgaaggaatccctcaacatgacatggtacgtgtaaagcatgc

SEQ ID NO: 171844 - DNA, 99 bp, Arabidopsis thaliana
acagttaaagcggcataacagtagttattaggtgagaatcctgtaaacaagcattgacttgccagatagatgtagtttggagactataatttacctaaa

SEQ ID NO: 171845 - DNA, 457 bp, Arabidopsis thaliana
atcaaaaagtaacacgatactttctttaggtaaatgatagtaaaccttcgatgtcgtatcagtaaaccttcgatgtctcacacacaatgccacaactctttcaaggcgtttatcacgtactcctaatgaaagggaaaaaaagaaaagaaaggaaaatgattttgtggactaggacatgtttctttcgcgcattaaagattcaatcttttcgacatcatcgggtgtgtcaactccatgagcttcatgatctacctttataaccttcattttgtagccattctcaagaactttgagctgttctagatcctcttcttgctgcaatggcgttggttgaagctctgaatataccttcagaaacttcgaatcaaagctctgaattccaagatgaagcatgtacggaaaatctggattgactttaccactcttgttataaggaatcaaaccccttgagaaatag

SEQ ID NO: 171846 - DNA, 222 bp, Arabidopsis thaliana
gtttctttcttttgatctcagattattctcttccacgcagagaataagatctaaagatggcgtcattatcatattacacaagcgatattccttcatcattatcctatgctcagcctatcttgatcaccagctacggcaccggagattacgactttaaccggaaagctacttttatgtcaatgatacaacaacctaactgctcaggtccaccacccaagaaac

SEQ ID NO: 171847 - DNA, 443 bp, Arabidopsis thaliana
gtagacaaagaatttgaagtttttttattcacttgacacaattaaaatcataaagacttaagattactacaacacataacatacatagaattttaaagtaaaagccaaaccagtttatccacagacacatttgcaggtctattctcagcgaacaatggcagagacttcattcttgcaaagacggtctttctctggttcaaagatgaaaatcgattctagttcagctgcacaaccgtacggtgcaagcaacagtttgtgcccaatatttgagtctagcttttacatcatctggatcatcaccagggctagagatcttccaatttgcaattggagcggtcgtggtcggtggtggcgacgaatcatcttcctcctgggacttgtggtggttttgttgcttatcatctaagaacttctggctcatggagtaacaaagctctaacgca

SEQ ID NO: 171848 - DNA, 222 bp, Arabidopsis thaliana
gagataaaacaagttccatcccataaaattaagaagaccaagatttgtcctaaaaaccaaatgtacaatgaaaactgaagcccaaaagtgtataaacgtatccaacttcttcctctcagtcctcaattgtctgaatctctcccatcatgatccggttactaaccacattaaatcccagaaccgatgcgctcaagctaaccttcttccctttcttcgcctttt

SEQ ID NO: 171849 - DNA, 452 bp, Arabidopsis thaliana
aaaagaattctagtgttgacatataatttttcaaatcaatgcaaagtacgcaaaatgttgtcgttaacaaaagtgacggtttacataaccaaacaagattggttcaaccagaaccggttttcatgatagagaaacttggaccagagatgagctgatgttatcatttttcttctaatcttgataggtactaggatgttgttaccttgagtacaaagttgcctttaaaaaccattttatgaagaagaagaagagctctgcatccgttgttttaaccatgactccagatactgcagctcctcattactgattgagtgtccaagacccggataagccttgaattcacaagtcacacccgcttgttgaagaaaaggaagagctgcttgaccagcttcgaatagtacagttcttgtcatcaatgccatgagaccacaagattggtgtcttttagcatc

SEQ ID NO: 171850 - DNA, 309 bp, Arabidopsis thaliana columbia
gtggagagagagcatgtgaataaaaagcgtgaagctttttgatatctctttctcttcctcttcctttctcctccgatagatttcgccggcgatggcggtggactccttagaaacggagattgacacggcggtgcgtgttgtccacctcgcttcttctctctgtgttaaagttcaagagaagcttcatcttcctaacggtggtcacgttaagtctaaagacgatgattcccctgtcaccgtcgctgattttggtgtacaagcaattgtgagctgggttttagctgaagtgtttggtgaacaaaacctttc

SEQ ID NO: 171851 - DNA, 338 bp, Arabidopsis thaliana columbia
atcttaataatttttttcataacttaaaaaacgtaatagtttcgcagaaaagaccttcagaaagtgtaacaaaaaattataaaactaacaaaattcaaccaaagagaaacgaaagacagagatagcgaggctgaaggaccaggggtctttactagcccaacgaagggaactgagctgtgtctccaatcgccggagctgcagcttcttttgcatacctttggtttcctccttcaccacgaccaccgcgacctcctcttccgcgggagcctccacctctcccgttggacctctttccatcagccggcttcaagaactcattaatgctcaacgactttttg

SEQ ID NO: 171852 - DNA, 410 bp, Arabidopsis thaliana columbia
cagctctctaacaagaagaacaccgatgaagaaatcttcatcaagctgggatctgacaaggaaaaacgcaaagatgctactgagaaggccaaaaagtcgttgagcattaatgagttcttgaagccggctgatggaaagaggtacaacgggagaggtggaggctcccgcggaagaggaggtcgcggtggtcgtggtgaaggaggaaaccaaaggtatgcaaaagaagctgcagctccggcgattggagacacagctcagttcccttcgttgggctagtaaagacccctggtccttcagcctcgctatctctgtctttcgtttctctttggttgaattttgttagttttataattttttgttacactttctgaaggtcttttctgcgaaactattacgttttttaagttatg

SEQ ID NO: 171853 - DNA, 345 bp, Arabidopsis thaliana
aaacgaaatacacaaatttcatacaagaccccaccagagatcagtcgactttacattggaaaaccgcaacactttttttctttttttggctgatatcccaaaagtttcttcctttcttatcctttcctgatatatctcacctgccatttgcagcaagaaacgcttgagtctggctgttatcgcctttattcggtttcttatccacccgagctttgggaaccggtaactgaatctgcctttcatgttctttcaacatttcatctaagtttcctcctgcagaaaccaaaggccctgagcagggcattctttttttttttttaccggtaaccggtatagattctttgg

SEQ ID NO: 171854 - DNA, 371 bp, Arabidopsis thaliana
tgctgcttgaccataacaacaatctcaaaattggagatttcggtcttgccaatttttaccaaggtcaccagaagcagcctctcactagccgcgttgtaactttgtggtatcgtccacctgaactattacttggttcaacagactatggtgttacagtagatctgtggagcacaggatgcatactagctgaactctttactgggaaacctatcatgcccggtagaaccgaggtagaacaactacacaagatcttcaaactctgtggatcaccttctgaagagtattggaaaatatcaaaattgccacatgccaccatctttaaacctcaacaaccttacaagcggtgtgtagctgaaacatttaagagtctt

SEQ ID NO: 171855 - DNA, 396 bp, Arabidopsis thaliana
gttaaaataccatatgagagattatgaagatgggccttacataagaatatttgggtttatattagcctaaagagagattacacacataaacgatgaaagtagtagagtcgctacatatacaaacacatggcatatttgatcaaaagttgacgaagctctctaagcagctggtgtctctatgactctctccatgtctcataccctcattactattttaaaacgccctttttgagaatctaacaccaataattgttttgtattcatacattaacaaaaggatgttttgcaataacttaaaaagaaataaggaaaaatgagaaagatgactcactcattcattcactcactgtcttcctttcttagtgcagcaagaagggcatttgtattgcttgatgc

SEQ ID NO: 171856 - DNA, 491 bp, Arabidopsis thaliana
  unsure (1)..(491): unsure at all n locations
aggacaacggtttttatcacattttatgtaacaaataacaaagaatgcaacaaacaagtaaagacgagagcaacacagagctgaaacgattataaggtagttctttagaatccttcgctcgttgcacagcatatggaccgaactaaagatcccatgcagaccatnccgtccttagcaaagtttttnccccaaaaccatttcaaagaaatgaacccaggccccatnngctgtttacccatttcgcttttcattgatcctcaatccattcccactgttattttctctattatcgtcttcctcctctgcagcacgcttgcagctatcgcgtaaagcaacaaatcttctgtcggtggtgctcgtaaccggattctcccccatgtcgccttcgcaatcccagttcgtattgcagcttgatccgcccacattacttcccagagacacaacgtctgctcaaaggttagttctcgtctgaacagaactacaaccatacg

SEQ ID NO: 171857 - DNA, 241 bp, Arabidopsis thaliana
gaaagaaactaaccatttttatcatccatcctattttcacacaagagttttaagaaaacaacttacaagggtggaccccttcctaagggtcatttgatttagtcaaaaccaaaggggggcattacaaactagattggccttaaccctaaaatgctgtttttgtttcacaggatttgatagaataacctggcaagatcaacccacccaatgttttaagaacttatgaacttgggtttttggg

SEQ ID NO: 171858 - DNA, 309 bp, Arabidopsis thaliana
gggaagcaagatttgggactttgtataacttattcaacgggaattgcttgaatagctgaacacgatcgcaaaacaaagagggggccttactggggaaaagcccaccaagtttgggggtgggggcaaaatggttccacccccatcatacaaacgggttctttggtaactggttttaccacaaacgttctttggattcctggctcccattgcttcagaacaaggtttttccatagatcagacccataaggccgctcccaagaagatttggttatccccatcaaagcccctttagatgctaatccccggaaa

SEQ ID NO: 171859 - DNA, 415 bp, Arabidopsis thaliana
gggggattgcacatgttagtggaggcactcggcataggcttaaagagagtcactactcaaatctcttgatcattaaccgaaccgcaagtcctcttgcatgggtcgttgagtgcaaagatagaagcaatcgtagcgctgtcatgcttccttattcatttctccctaatatggcagctgcaaaattgagaaacgccgcagaaaagataaaagcacaacttggggattatgatgccatccacgttcgtcgtggggacaaactgaaaaccagaaaagacagatttggagttgaaaggattcagtttcctcatctagacagagatacgcgccctgagtttatccttcgcaggatagagaagcggatcccaagaggaaggactctatctattggttctaatgagaggaagcctggtttttt

SEQ ID NO: 171860 - DNA, 223 bp, Arabidopsis thaliana
  unsure (1)..(223): unsure at all n locations
attctacctctctcnaggcaaaaagttaaatggtgtaccttttaaagattttgggcagaagttacagaaaatacaagaacggattatagcacactacagaaaattaaaaacaacattactactcaaaaaacttcggattgcagctgagtaattatgactaagttgcgaagggaaacaccgatttcaagtccgtgaaacttggaaaattgtgtgattgccacaa

SEQ ID NO: 171861 - DNA, 272 bp, Arabidopsis thaliana
aatggcataacggatagcattaagggtatgggtttatttgatgttgacacaaggttcacagggaaacactgatgattttgatagagtggaaatatacaaacaacccgctttgccaacatccattgatgaaagatcacaggatccaggaaacattcagcctagatggaaaaattgcaagaagcagcatatataatacaaaagagcattgtccataaggaaccgacgctattatgagacaaagaaatgtctccaagggcgttcatttgaatacc

SEQ ID NO: 171862 - DNA, 138 bp, Arabidopsis thaliana
accccgagtattcctttctacattaggggggcccatgaaacaaaagtctgcccacgggggaaagggggatatactgaaaacaacgccggggtgagaaatataactggctttcaaaaggatttacaatctgaaccaaaa

SEQ ID NO: 171863 - DNA, 122 bp, Arabidopsis thaliana
  unsure (1)..(122): unsure at all n locations
aagaacacaaggaccatgttcataacaaatccagtaggaaaattcttatcggagaacagatgttcagattcgttntctatatgcaaagggatgatattctagctattcaaacggnaaaagat

SEQ ID NO: 171864 - DNA, 248 bp, Arabidopsis thaliana
gtaaaagctccgtaagcttctacgtcttgaggtccgattcgtacctccgttaatctgccgttacctattcaggtacaaatggttcaaaaccggtaaaaccgctagccagttcactttcgccggctatccttccaacagtgtttaattgacgccggcgtcgaattggggaatccggatagttccggagaggaaggcgtttgtgattgagcgattcggtaaatacgctacgacgttgccgtcggggattc

SEQ ID NO: 171865 - DNA, 481 bp, Arabidopsis thaliana
atccgaaaactacaatcttaaataacttgtatagatgacaggggaataagcaatacctacaatattcacataaatagagaagagcaagcaaaggagaagaaaaagacagaaaaaagaaaagaaaaactcttacatgatatctgtaatttgttgatatatattatatatgattgcgagatcctgcaaaggcatatgcttcaatgaaaaaactagctagcagatgcagtagtagtaggcagcaaaacttgtttcttgattcatcaaaacttcgattttatttcattctctgcttctccccattatatgcttttaattgtaatttcctgaattcgccacagggttgccagttctctcagattccgactgaaaccattcaagctagaacgagttcatttcaagacagtaagtccttcttttaaccagcatcttagcagccgtctcataaggctcctcaaaagccgaagacacccaagagatatca

SEQ ID NO: 171866 - DNA, 76 bp, Arabidopsis thaliana columbia
aaacatgaactgttatttattattaccaaacgacaataaataaatatttaggtaagaaaaaagaaaatttacattg

SEQ ID NO: 171867 - DNA, 144 bp, Arabidopsis thaliana
cacattttcaggatgtacttggggaagagcaaacttgatcatgagccatcatatgactctcaaaggcttgctgttttcacttccgggtttgtaggagctgacattgggaatgtctgcaacgaagcagctcttattgctgctaga

SEQ ID NO: 171868 - DNA, 131 bp, Arabidopsis thaliana
cggtcgcgtgggtacactataacttcttgccttttatctctctctcaacgaccaccaccatgcccggagttgccttatactgtgttcctgacttcgatctgggaatcttcatctgcgaatccaccaccttt

SEQ ID NO: 171869 - DNA, 243 bp, Arabidopsis thaliana
ggccaaacttttcttaaatttacatgggaaaagaaaacattgggcgaagcaatgggggtttacaatggcatattattggtcaacaaataacagtttccatgtatcaccccccaaagcaaaggggtaaaactaaaaaagcccaaaaagaggggggggcaaaacaaagggggtctttttttttaaggggaagcaaaaagcaaaccggggggagattttttttggttaaccaacaggggggccaag

SEQ ID NO: 171870 - DNA, 110 bp, Arabidopsis thaliana
ccctttcgtccgaaagaaaagggtatcaagattgcgaataaagattgggagaagctgcatctgcacatagcttctcataacaacttccctactgctgctggcttagcatc

SEQ ID NO: 171871 - DNA, 376 bp, Arabidopsis thaliana
caatagtcatttttttttttcattgaatgaaacaaacaagacattcaaaatagaacaaaagttctacagagatagagagagaaagagagcttttcttcatgggtggttctacaagcaaggatgagagaaacagtagtaagagacgcatcaaggtgaaagcaaatgaacagagaaggagagaaacaagaagagagcttgatgagaaagagagagtgattttggcgttgaagatggcagagacagagtggaggaaagagaggaagagactgagagaggaagtgaagaggctgagacagaagatggaagagaaggaagaaggaaaggcgaaacaacacgagtgggaatgggtcgtggaacagatgtgtttagagagagc

SEQ ID NO: 171872 - DNA, 375 bp, Arabidopsis thaliana
  unsure (1)..(375): unsure at all n locations
cccacgcgtccgagttagtcaccaaaaaaaaaaaaaaaaaacacaaaaagtttcaatggccgcctccacaatggctctctcctcccctgccttcgccggaaaggctgtgaacctttcccccgcggcatctgaagtcctcggaagcggccgtgtgacaatgaggaagactgttgccaagccaaagggtccatcaggcagtcccatggtacggatccgaccgagntcaagtacttgggttccattcttctggcgagtcaccgagctaccttaccggtagagtttccccggtagactacggatgggacaccgttggacttttagctgatcccgagacattcgcaaggaaccgtgagctagattatccacagcaggtgg

SEQ ID NO: 171873 - DNA, 308 bp, Arabidopsis thaliana
aaaggaaaataatgaaccatgtcgtgaaaggttacagagagcctcttgtaaaataaaatacaatcaccataaagacaaattcacaagaatgtggtttttaaaacaaattaaaggaaaatttgatcagctaaaatgtttcaaaacggattcttttccctttacttttgacctgatgcgttttgcttctttgattcaggcaattccttgggggatgggggaatcacaattgacatacacgatgaaactaaatgtgcattacacgagtgttagttcgtactcaccagccatggttatgtatctcacccatg

SEQ ID NO: 171874 - DNA, 432 bp, Arabidopsis thaliana
ttgttttgccacttatatgggtggaagcacaaatagaaagtcattcaagaagtcgtgttgagatgctcataaaagctagaagtcagttcaaggaacgaagcaccgcaacgaacgttgagattgagttgcctgtaccaaccgatgcatgtaaccccaccgttaggacatctctagggtctgcctcttatgctcctgaaaaagatgcgttagtctggaaaatcaaatctttcccggggaacaaggagtacatgttaagggcagagttccatcttccaagtatcactgcagaggaagcaactcctgagcgaaaggctcctatccgtgtcaaatttgagatcccttatttcactgtttcagggattcaggttcggcacctaaagattattgagaagagtgggttccaagcactttcatgggtgagatacataacca

SEQ ID NO: 171875 - DNA, 354 bp, Arabidopsis thaliana
gaaagagacaaaggcttctctttttgttttctcatttcatcatctcctttgacacaaaggttacagctttaacttaaattgcacacacaaacgtgatgattctatctcaatctaagcgcgtttttgccatgcatactgaattcttcgatcatttctcgcttttcggtttatttacaaagagactgatgtaatcatggataccggggttgttttctttcactggcgatgaccttctggtaaagctaccactttgtggaaaggtactgttctttgaggcaatgctccatcttcctcatcatcgtcgaattcaagcaaatactcgtcagacttcctctttcgtggggtacttactac

SEQ ID NO: 171876 - DNA, 145 bp, Arabidopsis thaliana columbia
gtcttgaccagcctcaagttccactgaggtgatcatcatctcatgtgtttttatgtctcttgtatcgtacaatatttccatctttcgctaccattggcttcttcgtattgtaacaccctgtgtaaacatattcgtgttttgtaag

SEQ ID NO: 171877 - DNA, 381 bp, Arabidopsis thaliana
acctgataaagaaatttattaagagacacatgcaggttccaaggaatacagattcggttccatgcatcttctaaatacattttatagataaagaatagtgaacacatcagacttgcacttaactcaaaccaagactatgggctccatcttttcttctttgaccttagcatctttaagataaactcgaggaacagcagcagggtctagctcaaaagagccagctgggactccttctttctcatctccagtcattttgaaagatggaactctatgagaaaacctaagcatttcatcacatgatatcatgatttcgacaagaccattttgcgcagcacgttcatacactgatgtgaatccttccactctccctagataagccac

SEQ ID NO: 171878 - DNA, 373 bp, Arabidopsis thaliana columbia
tcggaattcctgctcttccagctgctgcctcctcgcaacctcgtctccacgatgaaggagtgacacgtttggtgatctttgtcttgtctatgcttcttgtgatgcttctgtcatagtaccagaactaagccggatccagtcttctcttataccggtttactagtcaataggtgtgtttgtgtagatcaaactggtacagtcagctacaaaagtcggatgttgacatgaccggttcaagtgtatgagttgttgaggtataagtttcggaaagtctttttatctttattgatttatgattcttgaaaacctttttaatgtaaagaaaaggtcttgtagggtttataacgtaaggttataatatatttatttatag

SEQ ID NO: 171879 - DNA, 184 bp, Arabidopsis thaliana
cggaaggaagttttttctggggctttatatatgtatcgagggatttggatccctttgaccaaaaattcaaccgttttaaaattgcccacggaacccttcagggccaagaaagaacataacgcccaaaaacgaataagtccctagggggagagcttaaaaaccgggaggaagggttggggttgct

SEQ ID NO: 171880 - DNA, 290 bp, Arabidopsis thaliana
aaaaaacatggacttggcttattggggggtacccaaaaaacggtagagccaaggactcactacagtcataccatttgatgataggcaggggcataacaccagattacattacctttatcgggttactatttgcttgcagtcatgcaggtcttttaaaagatgctcaacgctactttgattcgatgagaacagtttatggaatcacaccaggaccggaacactatgcctgtatgattgatctttttggcagatctggggatttccgaaaagtagagcaattgctgcatcaa

SEQ ID NO: 171881 - DNA, 428 bp, Arabidopsis thaliana columbia
ttcgttcaagttacgccctttacttaaaaaaacgttgcccaagtccaacaccggacccgaacgccgtcttgtactcccgtaacgatcgtgagactccgatggttgtggacaacatgtattataagaacatcatggcccataaggggcttcttgtcattgatgatgagctagccaccgatcccaggaccgcaccgtttgtggccaagatggctgcggacaataattacttccatgagcagttctcacgtggcgtcaggctcttgtccgagaccaacccgctcacgggagaccaaggggagatcaggaaggattgtcgttatgtgaactaatattgatggtccttgcataaaggatatatattgtggaaaagtaataataataatatatatgtgatgaatgtctgtcaatgttttggattcaataagaag

SEQ ID NO: 171882 - DNA, 233 bp, Arabidopsis thaliana
ggaagaaaccgccggccatgttatgcgtagggaaaatagccgttcatacaaagtttttgtagaagggcaagccccattaagccccttttaaaaaaaaaacgtccgaagaacgtaaaaaaaaaggggggggggggggggaccattcatatgcccccttttagggggggggctcaggggcaattcctttgcgagaattaggaacgtcaaacaagacccttaagttctgcgggggg

SEQ ID NO: 171883 - DNA, 215 bp, Arabidopsis thaliana
tcttttttttaaagactcagtgacgaccctctactaaaggaacactcataaataaactcggtggagacgccggatccaaaaacagagttctaatggagaagaaagaaaatggtctctatggaaagcaattgggacggctcattaacggacccactaatccgatggacacacctctgcttaacgacctttaccaatttcatcatggcttatgctta

SEQ ID NO: 171884 - DNA, 444 bp, Arabidopsis thaliana
ctcaactcatacaattcaacagtttcagatcaaaatgagctcccctagaaccatgttactttacttacttcgctaacaaataaatcaagacgttgaaattttttaaatagcttgacagaaacgtaagtggaatagtaggttagggtttaggagcttgtcacaatctcaacgtctcctatgagatatatatattactcatcagctgaggtaggaggagaaggcggtggtggaccggtttcatgatttgacccaaccgtaaaatggtcgatgcatctcaattcttcatcatctccctctcttgatttcctctgttttcttccttttgagcctttcctctcataaacattgtacactgcccattctccagacaccttagccgacgcaaatcccgcaagacaatactctgtcatgctccatctagttttgttgcaataagaagaagac

SEQ ID NO: 171885 - DNA, 387 bp, Arabidopsis thaliana
gctctaatacttgattgacgatattaattaatttatgagcatgacgtgggacaaacaccgtacttagtacgtaatacaagtagttataacgtgggaacaaactagtaagtaacacatttaaataaggaaatagtaatagttgccgtagaagccaagcaagcataataatcatatcttctttgtgactgtgactttaagaccatgtttcatacggagaaggatagaaggaattggttcgaccttgtgaccttcaatgaccttaaagtcatagtttcgtatgatctccagagctaccatcttcatctgcaagagagctagatttttacccaagcaagttctcggaccagaattaaaagccatgaacttgtatgaaggttcatgtcttag

SEQ ID NO: 171886 - DNA, 425 bp, Arabidopsis thaliana
gaataatgtgataaagagaatcagcaaagattcctaaatacaaaaggtgaaaagagagaaagactgctcggccggagcactgatcaatacttgactgtgtttcttattgttctctaaatctatatctctaaatttgagttcttctagttgtagatgcactgcgggaaagaaaagatcgaagctttctattttcattcaccggctagctaaaatgctttttaatctcagattgttgctcggtggacttactttcaagctctccattcatattacagtaccatcttgaattgtcgccttttcgactatcacagtgattcctgatcgaatgtagaatccttcctctggcctatctgcttcttgtacatcgcctttgttcatgatgatcacgtttttaccgatcttagcattcttgtcaatgatgcatt

SEQ ID NO: 171887 - DNA, 321 bp, Arabidopsis thaliana
gggcaaaggccaaattatgtttatgcaatgataatagttttagccaattccaagttctaaaatccaaactacaaagccattacatagggagagagagacctcaaaacagaaaacatttgttgcttgcagacacatgaacattgaacaacaacttctgtatggtctgatatcaaattgggattcaacgcatgttctttttttttcggacatatctggtcttggcggggaacttgggttaatcattggttctctgggtcgttaactcaaggatctttctctgtctctctgggggacgttgaactatttctccattcacaaaca

SEQ ID NO: 171888 - DNA, 317 bp, Arabidopsis thaliana
gtaatgatgtgactttattttgacggggggcattgtggagaacattcagaaattatacagagggagaagcaacgagatgttggctcatcaaacttggagacgttcatagcataattacaagcattcttcaccacaacttagtaaaccatatttgataaaaccatcatctatcattttacatttcttcacatcttcgacattgagtagcccatcgcttccacgagaaaatctgcatcgtccttggtgaagcagagaggtggtgtgattctaaagacatttccaaagtagcctccttttccaatcaacacacccaattc

SEQ ID NO: 171889 - DNA, 224 bp, Arabidopsis thaliana
gaagcgaaagggcaaattcaataagctcgcaaggcattttgagcataagataactctcatgaactacaaagaaggtcgggagccaattgctaactccagtccatgatataagagtaaactgtagtagtggcgaaatgacaaaacttaaaatctcaaagcaactaaagcaatagaacatatgaaacgtaaaatgaaaggagacaactaatcgaacaagccgaaac

SEQ ID NO: 171890 - DNA, 433 bp, Arabidopsis thaliana
tctccctttttttttttttttttttttagacaacaaagttgctgctgtgaagaaacatgtatcatgttacattatgtatttggagactggaagtaacttacatatatgactttgacaaaatggattgatccatctttctcccctctattaaagtttaaagctcaaacactaagctttgggcagaaatctgaatttgcaaaaggagctgaaaactcgtcgaaacaagccatcctgatacgctctggagtggctggagtctccagagggaaccagttggtgagacctacctcgcttctagccgctttgattgcttcctttattgcaaagaaggctgatgctgcaagaaagaacggtggctcacccactgctttagatgaatgtattgcctttgcatttggattacccttgagaagagaaacattcagttggaacg

SEQ ID NO: 171891 - DNA, 230 bp, Arabidopsis thaliana
gaaaaaacaaaacattttggttttggaatttgaataccacaaaaatctttatcattttttactgggggggttcagctagaaaggggttgaatgtcaaaacaactccaagggccaaaaccccatttagtttaaagaatcccatttgggggccaggggaaaaagcacccccctggcgtttttcgcttcacaaaaaaaagattccgggtggtgggggacctatgggtttgaaa

SEQ ID NO: 171892 - DNA, 235 bp, Arabidopsis thaliana
cttaaagaaaaaaccccgcctaccattcaagaaggaatttcaatgtttttggcctaaagccaaaaacaaaaaaccaagggggccgggggcaaactctttttattagaaacgcccccaaagatacctgggggggtttacccccttttttaaaaacggaggagggtctcaagttttctacccccctacttcaaacagggggggctcaaacccagagggggccccaaatccagggggg

SEQ ID NO: 171893 - DNA, 301 bp, Arabidopsis thaliana
attattacttcattttttttttttaggggctgggttgtttttaaccaaaggagtaacataatccttttattcttcattggaaatgggcaaaactgaggacactaacacagccgccatggaatcacaaagataaaaacccaaaactaaatttagtaatcaggtttctagtcataagctgaactgcgaaatcttttgataggagaatcattaagtatgtcaagcataacagaattgggcgtacacctaggagtcttaaactggtttaagccaccgtattttccaacgcaccttttcgccactt

SEQ ID NO: 171894 - DNA, 134 bp, Arabidopsis thaliana
gaattggtttcctttctacaagaaatattgtatagggcgttgagctatcgaatgggatttctgacataaaatgaactacttgcagaattaagatcattcggaatttgttagggagcggcaagccatgtagagag

SEQ ID NO: 171895 - DNA, 308 bp, Arabidopsis thaliana
ttgttgccgcccgaaacatcggcagggtcgaagaacaagcctgcgtcgctcaagcacttgactttggttgatccagggaataagttcctaaactcatcgcagcgcaagattgctgctaaaccaccagcagagcatccggagagaagtgcctgattggcgtatcgcattccattcgccttcaaatcatctattgcggctctccagatacgctctcctctaaactgaagttgtgcagcctgattctggccatctccactgaaagaagcgccatcgcagtaacgaagcttaactctattccagttgaaaaa

SEQ ID NO: 171896 - DNA, 226 bp, Arabidopsis thaliana
aagttcggaattaacatgaacaagaaggtggttctctttactttagttagagataacaacacaacacaacacatcagaagaagaagaagcaacatgtttatgtattgacttaaacagctgtttcagctctggaagggatcttccttatgactgagatggtatcaccaactttgattgttttctttccttcgccttcagggttggttaagttccaattccaaaccat

SEQ ID NO: 171897 - DNA, 289 bp, Arabidopsis thaliana
aacttcagtaatatagcagaaaatggattcaaaacttacaatttcaagcatctatagagagagacaaacagtttggatcgatatgaaattgagaactaaagtctaaattgaggatttcagatatttaaagatagaaaccaaaatccttgatcagccttgtgatctatgaagcacgatagatagccatcaactcagtctccagctgcttgtcctcatgcctcttcacatacctgtttaagaacacctgatcggtacatacgaagacacgcgatatcgaagggagttcact

SEQ ID NO: 171898 - DNA, 263 bp, Arabidopsis thaliana
aatagtgaagactatttgaaattttaactttttcagagacctaacaccaaaagtctgatgttggtgttttgttataggaaagaggtgattacacatttgaacgagccaagagaactggttacttttaaataccaaatgctgacttaactcaagtctatgaacaatgttgggtttgaatttgaaaagccatgggttttggggggtgtactggcatattgtacaaagaaaaagctttttgggagttactctttgctggaatcagg

SEQ ID NO: 171899 - DNA, 144 bp, Arabidopsis thaliana
agagagaccagtcatcaccaaaaaatgattggcctgagagagtaaatcgaacagaacataaaaacagagagtacattgcttgtttgagcctaaatcaccgtcacaacaaacttataaagggattaaaatggagcaagaaaaaca

SEQ ID NO: 171900 - DNA, 355 bp, Arabidopsis thaliana
caagcaaccagttgttactactgaaggggatgaaaaagaaatagaagctacaatttggctgacaacaaaccgtcttcacatacatattcctcctttcttttcttcgcccaaagacaaaaatttctcaaacttggtgttacaccattataggctacagcagaaaacaacattcaacccaaaaccaaaaacagaaaaataaatctgaacttttctttcacattttcgaaaactactttaaaatcttgttctaattatcacgtctcggttgccttttgcgtggtgccgcggttacttcctttttctccgcctaatccccactttttgaactctccgctacttctggtttcttcttttc

SEQ ID NO: 171901 - DNA, 215 bp, Arabidopsis thaliana
ggccattcttgggtaaagaaacaacaaattctagcgttacacaccgccccacatctttgtccttattagaatcatccttccttcaacaaaagatctaacaaaaattcatggatatttgatactttctcacaattacatcccgtggtgttttttattgttcccccatgccccaaaaggtcccttaaaacggaatcgacccctcacaatattggttt

SEQ ID NO: 171902 - DNA, 257 bp, Arabidopsis thaliana
caggaggaataacggggaaggggttattaagaagacacctctcttgtgtggacaactttcactcaaaaaaaaaatatcaagtttgagatcaccaccccaccttttcctgtatttacattccagcaccttccgaaagaataacattaggtatctaaacccttcttttctttttgggttcaacctaacaaggatcttaacacaggaaacaaacaaaggggggagcgacactttcctttttacttacctatgtggaaaat

SEQ ID NO: 171903 - DNA, 162 bp, Arabidopsis thaliana
agcgaacttaaaccagatttaggggtgtgaatttaaagttgcaaacggggtgcatcaaacgggggaagaaacattaaaacattacaacactaaaaacaacatcaagttcggatgagtacgagaatcaattctgactcccaaattttatttgaaaatcccaac

SEQ ID NO: 171904 - DNA, 416 bp, Arabidopsis thaliana
ctctatagacgcggccgcttttttttttttttttttttagttttcacgcaaagaaaaagaaatagatgggtgaattttttaacataacatggggggttaaagaacattacattctaaaaattaaaacttctttatttttttccaagggatcattggatcatcatattatcacttccacatgaagtttctctaaagcaaatgatttctcttctcttttttaggtggctttcgaataaaacacctttttaaccaaaaagggcaagcaaaaagcagctgagtgaatctcagcgttttaataccttaagggacaatgtgatttgatagagctttcatcagtatcgattagactcactggctttttgaaatcgacttgtggtcctttaaatgaacaaagcatgaatccaatgactccactc

SEQ ID NO: 171905 - DNA, 191 bp, Arabidopsis thaliana
atgaacgtgaagatgactggcaaatgctctgaccatgatcatcgtcaaacattttaacaatctcaagctacaatttttttctttccttttgttaaccagttctttgttttttatatgtgttggtgtatattacattagatcagaacacaatgttgtactataaaattttttgggatttttaaacatagatt

SEQ ID NO: 171906 - DNA, 157 bp, Arabidopsis thaliana
attataaatcatattatatagcttaagttgaatgtgttatttttataacaatgtcacagtcaaccaaaaaacaatttatagtaaccggaatttcttactggatactacaaccataacatatatattttacaaacaacttttcatctttgatattaaa

SEQ ID NO: 171907 - DNA, 196 bp, Arabidopsis thaliana
aatcaaaaatgacttttgtatgtgaaaatatttcagacacaacctgcaaaccctgtggttgcttttacttttttgtttgctttgctctcgcaaagaaacacttcttgtggtgcttctgaggactcaatgtccgcattttctgactaaagccataaaaccaattccagcttctattggttccctagccttaacttcc

SEQ ID NO: 171908 - DNA, 285 bp, Arabidopsis thaliana
aacagtataaattggatttcttgatttatgtattctggaaccaattgaaccaaatggttacacagatgaggcgtatcgtaattatacaactctgtactagagtatagacaaaatcggatgctttgtgttgctttccataaaaaacacaggcaacaaaagagatgtggatgaaggaatgttacaaaacagaagaggttttattcactttcaggtgaagagtcctgatcaagattcgttcccacaacaggaaccgtgtctggcgcacgcccatgaaccctgaaccgg

SEQ ID NO: 171909 - DNA, 182 bp, Arabidopsis thaliana
gaattcagacacgggacgcgtcttctcatcctaccggcaattcaatattcgacgacaatatgccggactgacactcgacgaacaacaatgatcttgcgtatactcacttacgactagatgactacgtgaggttatggaactcatagagagagagattggggagagactcgatcaaacccttt

SEQ ID NO: 171910 - DNA, 194 bp, Arabidopsis thaliana
tctattttttttttgttttttttttatttgatgttttttttttttggatcgcgaccataagtattatataactgctgttacccaccgggccttgatgacaaacatgcatataccccttttgtggatttttggcagccgggcccttttggcgaattattgaagccgtacccttgggtgggtttttcgcagccgta

SEQ ID NO: 171911 - DNA, 295 bp, Arabidopsis thaliana
  unsure (1)..(295): unsure at all n locations
tntactttttctcttttttttttttttttttttttttttttttttttttttaaatttttttgtgtgtttttaaaaaaaaaaaaccccttttttaataatcgggaatcggaaaactaatgattttcccatacaaaaaacaaacatgctggatttctttttattaccaacggggctgggcccaaataacccaaaaaattagcgggccccaaacgaattaaacccccctcaaaatcaaggggggaacttgaaaattgttattttcccaacaactgaaaaactttcttttccccccccc

SEQ ID NO: 171912 - DNA, 99 bp, Arabidopsis thaliana columbia
aactacaaacgattttattatgcaaacagcaagttttacaactcaaaccacataaaacattacataatcaaactttattcccacccttttgtcgttttc

SEQ ID NO: 171913 - DNA, 264 bp, Arabidopsis thaliana
aaaaattaacccccattaaacccaatttggaagaacaaaagcctcggccatatattggatttggttatctaacccacaggggccaaaattttttcaacaaacagggggttgttacatttttatttttaaaagaccaagaagcttctcataacaaaaacccaagaccttaatcaattttgaaaatattagggggtttaaccaaaacccaaagtctaaacaggggcttgattaaaattggtctttttcaactttttaaaaactttc

SEQ ID NO: 171914 - DNA, 484 bp, Arabidopsis thaliana columbia
atcgagcttcgttttctccaacagccaagagaagcagaagcttgaagaatctctgtaatctaaaaaatgggaaaggtccacggttcattggctcgtgccggtaaggtgagaggtcagacacctaaagtggctaagcaggacaagaagaagaagcctcgtggtcgtgctcataagcgtctgcaacacaaccgccgtttcgtcaccgccgttgttggttttggcaagaagagaggaccaaactcatcagagaagtagatagaagaaggttttacccttttcagattttatgggatgtttttgatattgtgtcattagttggtccaaactcatcgatatcaaagtggtttaaccttggttatctacaaatcagtggatgttgtgtcaattttcttgtcaatttgatttttgtttctcctcagattagacttaagttcttgaattattgaacctctcttttgcagttatgtattcgtgtgtacccttt

SEQ ID NO: 171915 - DNA, 347 bp, Arabidopsis thaliana
cgaattcccatttgtaataattgtattcacattattcatattctccagctacaaggtgtctttgagtgtagatgtcaaacaaagacctaatctgtgtctgtctctgttttaagtgccagacgccataagatcttggcccagggaagactcgtcgtcctcaaccaccatccacggcaatataggtcccttcccttcccttatgaccttgggatatggtcctgtcatatccaccatggtggatggttcagccactcgtatacctccggctaccacaaaatccagaccctctggtccatatatgtcacctactggggttgggtcgaccatccattcattttctttaggcc

SEQ ID NO: 171916 - DNA, 459 bp, Arabidopsis thaliana
gaccaagactaaggggagaatttcacatgaacggaaatggagagttacagtaccatttgtaataggaattagaataggaaaaatgtttcaagcagatgttccagactggtcaggtccaacaatgagtgatacttcttttgtgggtgaaccattggaaattggccagtcagaatacatgcatgatctcaagaaggccaagaatagtaagaaacaatgttctgcagtgaattggcttcaatgcagagaagaagatactaatggagttatctgcggaaagtggcgtagggcccctcgttcagaggtacaaaccaaagactgggaatgcttctgctgcttctcttgggatccatcacgtgctgactgtgccgtccctcaggaactggagacaagtgaggtccttaaacaactcaagtacatcaagatgcttagacctcgatcagacgccaaaaagcgaaaact

SEQ ID NO: 171917 - DNA, 391 bp, Arabidopsis thaliana
gtccagaagtgtaaaatgattgacacaaacagtttggttcagagttcaggcctttataattctcactggtaaaaaagttcacgggatgacttggaattcataaactctgcttgaaacacaatgcataattctagaattttgcatacggtatgtaatgatcctaagacactgctcgcacttcttttcgtgttctcctcctcaattgcctcacatttgtagtgtcacaccctaatacactgctcgcacttcttttcttgtttgattgtccactcgtcgagctcttatctgctgctgcaacagtgttcagcaactcagataacaaagtgggacagctttgtttcaagtgcttgaacccttcggactttcattacagttcccaagtttgctggag

SEQ ID NO: 171918 - DNA, 283 bp, Arabidopsis thaliana
tctttttttttttttttttttttttttttcttctgtaaattctctttattagtttcatttagatcataaattcatttgaagatgaggagagatgcaaagagaggaaacgttattgcacagttttttgtttgcactctttgcttctgtcttcttcctcccatcctaagcagttgcggatacatcatgacaccaattacaaaacctttttgttaaaccaaaccgaaatccaaacaaatctgggccaagttcacacctaaagtttcactgtacacacttttcctgc

SEQ ID NO: 171919 - DNA, 260 bp, Arabidopsis thaliana
gggggaacaaagttttttttgattaatgacaaatcatacaaagtttttgaaaattaacatgtgaaagttttttccatccaccaaaaacacaagccttttttttttcctcctgtttttcactgaagttcaaaagattgaaagaaaagtaatttccaaccagatagaacttggttaattttcggggaacaaagttgggggaaagggcccaagggtttttggtgactggaccgcccaaatggtcaggagggttttttttgggc

SEQ ID NO: 171920 - DNA, 362 bp, Arabidopsis thaliana
gacccatttcttggcttacaacaacaaatcttaaacgttttactttgtgctgcactactcaacctcaatggccgcctcaacaatggctctctcctcccctgccttcgccggtaaggccgtcaagctttcccccgcggcatctgaagtccttggaagcggccgtgtgacaatgaggaagactgttgccaagccaaagggcccatcaggcagcccatggtacggatctgaccgtgtcaagtacttgggtccattctctggcgaatcaccgagctaccttaccggagagttccccggagactacggatgggacaccgccggactttcagctgaccccgagacattcgcaaggaaccgtgaactag

SEQ ID NO: 171921 - DNA, 793 bp, Arabidopsis thaliana
tgggcgaatgccagctcggtacccggggatcctctagagtcgacctgcaggcaaagcaaaccatcagcaacgcgactgcgtacgtgtctctaggcaatgacgacgacaggggtactagctacagtacagagcaacagagctctagtagctagcaatggaccatggcgtgcagcacagtaccgggcctagctacacgtactcccgagacctaggttgttgtgtctgtggcgctgtgctcagggtcaggcgaagagaaagagaccagagagtgcacgagcgagggcgtcgttcgggaccacggaatggcatgacctttgcgtggtctctcgctcgccatttataggcgacggcggcgcggccggccaacacccctgcgagcgggagcggccgtgggatatccgttggcagttgcttgccggccgcggtcacctacgcccacgggagagcttcccggccgcgagggacaaagagtacccgcccggtcgcccgcccagtgctttgacttgtacgcgccgcacacacacacgcacagctactttacacttgcctgctggccctctgcatattctactcccaggtgcggcgcccgcggttaggatgtacggcacctacgggcccgagacggactgcaaaatgcataggaaaggttgattaacccgggtcctggccttttttacttctactcctgggcacctggttttcgctttgggctggcagggccatggccgatgccttggggcttaatttttaaagaaggcgggctaccccaaccaggtaggctttgcgcccggga

SEQ ID NO: 171922 - DNA, 630 bp, Arabidopsis thaliana
actatagggcgaattcgagctcggtacccggggatcctctagagtcgacctgcagtggccgtggcgagtaggtgcgcgaggatcagcagtacgagaggcgacatttggggaccggtaaggttagcggtcgaggaataagacgggagtctggaccacacgcgataaaaggctgctcatttacttattataatttgccgctctcgagggagcaacgacggcatgatgatcccgaggaggaggaggaggcgacctcggccatccggggcttatcacggacacttggtcatgctccgccgacaacgtaagcgcgcgaggaaacaaacgggagcttttctttcggccacttgtatgcatcacagtacatgtgtatatataggattatttggtgacatatcgattcgaccacacactttaaggcgtgggtcatgaacatcttttaacaaagtcctaaaggatgtatatgggacattgattatatgggtggatgaaatttggggtaccaagggaggtgccatctggggggggcgtaccccttgggaaacggtttggcttggcgacaaaaacaccggaactgttttattggtgcgttacccacaagaagacatttttgtggggtccaacccacccccg

SEQ ID NO: 171923 - DNA, 678 bp, Arabidopsis thaliana
acgctcactatagggcgattcgagctcggtacccggggatcctctagagtcgacctgcagtggccgtggcgagtaggtgcgcgaggagcagcagcacgagaggcgacatttggggaccggtaaggttagcggtcgaggaagaagacgggagtcgtggaccacacgcgagaaaaggttgctcatttacttattataatttgccgctctcgagggagcaacgacggcatgatgatcccgatgaggaggaggaggcgacctcggccatccggggcttatcacggacacttggtcatgctccgccgacaacgtaagcgcgcgaggaaacaaacgggagctcttctttcggccacttgtatccatcacagtacatgtgtatatataggattatttggtgacatatcgattcgaccaacacactttaagcgatggtacatgaacatctctaaacaaagtcataaggatgtatatggacatgattatatggttgatgaatttcgttacaagtagtacatctgtgggtcgaccttagggatgttgttttggaaaaactgaattttatgggtacgaataaatttgggccacacacacacacacatcaagcaaccgacaacagggcggaacgaaagaattgatttgaattggtgtaagagttgcacaaccaacacgggcacattttaa

SEQ ID NO: 171924 - DNA, 755 bp, Arabidopsis thaliana columbia
aggggatctctagagtcgacctgcagtctgcaccccatcggccgaatccaaaaaagaatgtgaaacaaaagatcgaaagcagaagaagggtttcatgcgcgtgcacatttttcgtacttcttcttcttcgtcgtctttctaactcccttgatgggggtctcttcgttttcattcctttttcccgtaccaaacggaatggcgaataaaagcaggcagtggttggagaggagactcttgaacagatcacggccgtgtggtattttagtgtggcgaaattgcagcgtgagaagattgtgcaatggacgcaggagcagataactaatagtgcctttatcctcttgaattctgctagtacttgtctctgcacctgctagaccttgctacctaggaactgcatgctgtcatcagaagttgattgtacatacatacatacatacaaagagaattgaaaatataagattatatatagtaagaaagagtcatgtctcttagttttgttatagttaagtatgtttgaatgaactagagctaataattagctggctaaataattggtagtaaaattagctagctaaataatgggtagtaaaattagctagctaactattattccctctgtacccttggttctcttgattttgttatatctaacttttataagttaattgttagctctagtgcattcaaacaggatcttagagctacaacatccagtcttgaaagtattattctctgttactaaatgcctgggacaa

SEQ ID NO: 171925 - DNA, 789 bp, Arabidopsis thaliana
cctctagagtccacctgcagcgacttgaggtactcgatcgcctcgtcaagcattgacgccttgtccgtctgctcacgtaatgcaataacaagattcttgttactatactgtttagtttactatatatgtaaagggagagctcttgtccagtgcagtctaacgaaccttgttgcagtgaggtatgagctcttgcagggctctcatcttctcgtttatcctgtctcgtctcctctgcaacattgttgggaccaaacaaaaaacatccatgtcagagaccgtcgtcgactgttcaacgaggcaacagctagcaacaagttgtcgtcgtcagagtcacacgcacccgctccgacaggttgtgcacttcggcggcgcggctcctccgcgccgtcgtcatcttctgcgggggcttgcgcgccaacatcgcggcggaccccgactccgcgttctgcaccaccgtagcattgccggcggcccaggcccgttattgctagtattaaacaacagtgatagacggatcgacgaggcactgatcgtaaagttcaaagggcgagacctcggtggggctctccgagtcctcggggtcgagccgtttgcgcttgctggttccgttgctggtgctcccgggctccggggtgggggtggaggttgcaaccactcacacacagcagggagcgggccccccctagccgtccttatcgatttcctcctgcctccacccgcatacttagaacggatgggcgcagcccaatgctggccaaatccgtctctgctaccgctgcccccctacac

SEQ ID NO: 171926 - DNA, 758 bp, Arabidopsis thaliana
ggggatctctagagtcgacctgcagcgacttgaggtactcgatcgcctcgtcaagcattgacgccttgtccgtctgctcacgtaatgcaataacaagattcttgttactatactgtttagtttactatatatgtaaagggagagctcttgtccagtgcagtctaacgaaccttgttgcagtgaggtaagagctcttgcagggctctcatcttctcgtttatcctgtctcgtgtcctctgcaacattgttgggaccaaacaagaaacatccatgtcagagaccgtcgtcgactgttcaacgaggcaacagctagcaacaagttgtcgtcgtcagagtcacacgcacccgctccgacaggttgtgcacttcggcggcgcggctcctccggcgtcgtcatcttctgcggcggcttgcgcgccaacatcgcggcggaccccgactccgcgtcctgcaccaccgtagcattgccggcggcccaggcccgttattgctagtattaaacaacagtgatagacggatcgacgaggcactgatcgtaaaagttcaaagggcgaaaactcgctggggctcttcgagtcctcggtgtcgaaccgcttgcgcttgctgctccggttgctggtgctcgcgggctccgtggtggtggtggtagttgtggtaacgccgaaacagcagtagttggaccgccccgacgaagacgcctcgtgggccctgccggccgccacaggttcgcgttcgggttgccaaccgcgaaggaaccc

SEQ ID NO: 171927 - DNA, 228 bp, Arabidopsis thaliana
ggatactgatcattattctttcttaagtacataaaacacacaatgtatgcatacatagatccaaaaatccgtagacattgatcacaaaatgtttcaagttgcattttgaaatattcttatcattctttctctgcttcttcacaacaaactccatagatcatatttatatcaagcttccattaacaaccaaaagtcggggtttatttacaaacgcggtaaggacggatt

SEQ ID NO: 171928 - DNA, 237 bp, Arabidopsis thaliana
aaggtaaatgagatcttacaatacttgagaaggatcagctccaaattttttaaattgtgacgaaattgaagaatacaacacaacaatgcatctttagatctaacacttacagatcttcatcgaatctatacttaaaacataactaaaaaccctgagaatccaggtttcgtttgttctctaggatcagaatcatcaaattcgagctttttaaacttgtcctgtaacaacagaagcagc

SEQ ID NO: 171929 - DNA, 327 bp, Arabidopsis thaliana
gcaaaagtgagttatgtttattgagagattcacaaatcacaacaatacaattggattgagaaacatagagaacataagtcatgactcatgagtatctctaatggaaaaatgaaaacacataaatataacttcatctttacattcactttttttccaatctagccaggatcgactctgcgaaactctgttgcttgcgttcactatgcttggggcttggtctcgaatacttcaagtatccatcccaagggacctttttgagacccgcccgaagagatattatgtctctgaccctttttgcaaattcaattcctgtttcaccgggcctta

SEQ ID NO: 171930 - DNA, 278 bp, Arabidopsis thaliana
tctttttgattatgctgcgccagactatcccgtagttaaaatcgaaaacttacgtgagagctaacatttttggaagctttcctgataaagacggtttaccagcaatcaagcaaaataatgattgtcacatacacaacttacagacaatgctgtaactgggacctgtccactcacactcacatttgggtcaattccagatggtgagggcagttttggcttcatatgagttggcggattgtgcttgagtttcgtgagcgcttgacgcatacgagacagat

SEQ ID NO: 171931 - DNA, 284 bp, Arabidopsis thaliana
cttcttctgcaatgcctcttgcctcgcgttatgaaggtccttgaatgcttcctctgctgccttttgcctaccactctcagttttgttccgcgcctgcgagctgagtctgtatcgtcctactaagccgatgtaatatggaattagcgccaccaaccggacaatatcatccatatgtttagcatcaggtaaagaaaacttgaaaagcatcatcttcttttgcatagtttttgcagcctttttcttcgtcatagcaaacacaacatgatccatagtttcttcattca

SEQ ID NO: 171932 - DNA, 160 bp, Arabidopsis thaliana
gtggaaaaaaatgggataattaaaaaccttgggagttactggagcaacgccatggaatctcaaatggaaacaaatagaattatcattttaagctgcacccataaggggggacaattggcttaaagattttacaaaacaactacccgttttgaattggggg

SEQ ID NO: 171933 - DNA, 139 bp, Arabidopsis thaliana
agaaagaaaagacgtgttaactagttatttctcataaaacgtgagaaaagagacaaaagcgatgatgttattggaggcaaaaacgatgatgttattgttgggggtagaaagagacaactgaatcaatgaactttaaata

SEQ ID NO: 171934 - DNA, 208 bp, Arabidopsis thaliana
agagactaatgccgaatattattcccttatatgatgttcttctcaaaataagtaagaaatacatattatgaatttaactttcttagcccaagaagcccatataaatagttgtataaatccccagctgcttagcttttttcttcaagggtgaaaacaaaatgaataaacccatctcacaggcgaaactaaagaggcacaaggcgcctaa

SEQ ID NO: 171935 - DNA, 389 bp, Arabidopsis thaliana columbia; identical to SEQ ID NO: 134771

SEQ ID NO: 171936 - DNA, 209 bp, Arabidopsis thaliana
ttttttttttttttttttttttttttttttttttttttttttttttgttttttaggaaaaaaatggaaacttaattcattcgcaaacataacattttttggtttcccaaaatgaaaataaccgattttaacttttaaaacaaacataacccattcatattgtcatgccgatcgaaattatcaatcagaccatttatttatcaatcttgc

SEQ ID NO: 171937 - DNA, 203 bp, Arabidopsis thaliana
tttgttttagattttttgcaatcaaaaattcaattaacatatataaaacatatgactacctgttggatgcacatacaagtgaagatagattgactattgtttgaagataccgaccaatacattgcataatgtaccacaaaagctaatgaaagggctctaaatgaaaacaaagccacttgatatattgatcaacatactatgga

SEQ ID NO: 171938 - DNA, 108 bp, Arabidopsis thaliana
cggggctaagcgacctgccgaagctgggggatgtcaaaatgcatcggtaggggagcgttccgccttagggggaagcaaccgcgcgagcggcgagcggacgaagctctc

SEQ ID NO: 171939 - DNA, 216 bp, Arabidopsis thaliana
ggagggaaaaactttggaccctttgtttcaaaggggcatttccaaaatagcggccacaacagtttgggaccatatagctaactattactactggattttacgaaaaattgggtgaacaaaagggaaaaaagaatcaagttacggggtaaattacaaattgtgggttttttgtttaatacagggaaacaaagcattttcaaaaatcgggttgaacca

SEQ ID NO: 171940 - DNA, 341 bp, Arabidopsis thaliana
tttttgccgccctttttttttttttttttgtaggtggatcatctaaaatgacagaggagagctaattatttataaacttacaaaataaaaattgttctttttttgaccaccaaccctcccaggatacctttaagaaaaagaaccctagatttacagtaatttcttgtaaataagttttgagatagagagacagagaattacacagttaacaaaaatataatttaagaaggaagaaccttcttgacaatgtcttcactaagagcagcaatctgagaatccaaagctttaatggtttcttctttctgactctccaagctcgccaaagcttcttttagctcttc

SEQ ID NO: 171941 - DNA, 206 bp, Arabidopsis thaliana
ttttggccgccctttttttttttttttttttgggggacaaaccaaaaactttggggtcaataatacaagaaaaaagaaacagagggatttgattattggtccatggtagatgtttaaagtgaaaagacagatgaaacataaaatcaagtttaagcttgaggtttgtcccacttgagtggcttcacgaccttccaggtgaagtcagg

SEQ ID NO: 171942 - DNA, 306 bp, Arabidopsis thaliana
tgtgtcgcccttttttttttttttttttttttttggcggaaaagtgtatcacaaaacacaaaatgtaaacaagtttgaatagtttatgatcttttcttacaaaatgactcttctattatacagcacttgaccgatcttcattgtaccgtagcgttaacgaagagtttgacttaacttggggtgaacacagaggcaaaatcttcagtggaggaaaaatgttgtcactctcactagaccgggtttccgggtcgggttttaaatccaagaaagaatatttgttcggaagaatcgacttgcagcttaaac

SEQ ID NO: 171943 - DNA, 369 bp, Arabidopsis thaliana
agtaataattttctgatttcactgaatccaagtaaatgcctagaggaacaacaacgacgattctttccagctggaatattaatccgaagcacgaggcactgtaacggtccaaaaattccagctggattgcataactactcttaaaggcgcactctaacctactcctacttcactctactgttaacctacgcctctgtcagcgtactctagcatgacagttataatttcatcggcggcgaggttttattcgattttatctgcctttcgatcagttataacagaaacgcgactcgcaatattttaattggaagtaaacaaatcgacatgcgatgcgacgaataaaaattaagattgcgattgctagaagtc

SEQ ID NO: 171944 - DNA, 143 bp, Arabidopsis thaliana
cacgagctcttttaacttaaacaattggggatctttagaatataatctatccatgggaccgcaacaccacgggaatgaccatacagacagaacggcaaacgatctactaaaacatatgaaccgatgtaactaatagcatatag

SEQ ID NO: 171945 - DNA, 250 bp, Arabidopsis thaliana
ctaaattaagtaaacaaatcctaaacacaaacactctcacattgtcaccatacacaaaaatttcaaaacacttaagaaaaaacaaatttaaacagaagaatatatatcacaaaaccaaataaacattcagtctttaaatttcccacggcggagataaacaatctccgatactcttttcatcaatgccgatagcgaaaccgatcaaccaaaacactactgttccatatccaccacaacattacagtaaacc

SEQ ID NO: 171946 - DNA, 244 bp, Arabidopsis thaliana
tttccgcccttttttttttttttttttttgtttggttttttttttttttttgtgtgtttttttttaagaaaaaacttgggagaagagctttattttcaaatgggattcaacccatccgtttctcaacgaatcaagaaagagttaacattggtcaaaaacagacacataaaactcttacttgaacaaacacacttatgacaaattaaattaccaatcggcaaaacatttaatcagtatgtatttt

SEQ ID NO: 171947 - DNA, 110 bp, Arabidopsis thaliana
atataggtttgactcgttgatcaacgggggttttaaaaagaggtgaaagatgacggcgacgatagatcggaggttatcaacgctgaatccaaacgcgccggtgtttgatc

SEQ ID NO: 171948 - DNA, 218 bp, Arabidopsis thaliana
ggggaaacaaaagatatctaggggtgaaagaataccccagcccttaactttaagctaaggaagacttcaaagttaaaaacatgtttttttaaacttcgccactgggaagcttaagtggccccgttggtttgggggccctcaaaagggccctgaaaaccaaagggttccagctttacggggggggaaaccaggggggtcacagttttttcccttgaaaa

SEQ ID NO: 171949 - DNA, 370 bp, Arabidopsis thaliana columbia
ttttttatcgattctacaacatattttgtttaccagatttgatagattttggaagatgacattagggttgttattcgggattggaagaacattccgaagaaagagagcttcttcgcttgatattctctctcccaaacgagctcccagagacttttacaagggaaaaaactgtaaacctcctggtttccacactcgtaaagctgaaaccatatgtatctcagtgccctttagacgtcaacaaaacaaacgagtcaactgaagcttccaagtgacgaagttagaagaaacatgtttttaactttgaagtcttcattagcttaaagttaaggactgtgttattctatcatccttagatatcttttgttactca

SEQ ID NO: 171950 - DNA, 402 bp, Arabidopsis thaliana
cctcttggtttgaagctaaccacaaagtcagttaaagagtttccttttttttctcagttgcaaaatcaaaccaattatacagagaaataggcccaagctgttatggccaataacgagctaaaagactagccaaataaagacagatcgagggtagtgagagttgtcactacaggctattctctacaatacaacatttttaagctcgagctcttttgttgctgcatgaagggcacttgtattgtttgatatgctcagctctagctggagtgatcttcacacacttgccatggaaccacttctcacaaaggtcacagcagatccagaattcatcagcaccatcactgtctccacaggctgcacaaagggtttccccggggtcatcctcatcatcttcatctattt

SEQ ID NO: 171951 - DNA, 442 bp, Arabidopsis thaliana
gacccaataatatggtcatgtaaaaatgtgccaatgggctttacaaaagagttttatcaattcatattttctctatatatatccttacaccttaatttcaaatcctctttgaataataatcatttagtagcttttagagatgcgaggcattgctctattgctttgtctctcatcgtaaagccttaaaaccactggcgcagtttcctcaattgcactctctgtcacttcaatcactggccaagtcggattctctgcaaagattttcttggcaagctcaagctcttctttaacagaacctaactcagagtacttagtcttaaaactcgaaccaagtccaagactcttggctctagcctctcttatcccttgcaacaccaatggattaatcatcaaaccaaaaacctttctcgggtcgatctcaaacaaagtcttgggaagatca

SEQ ID NO: 171952 - DNA, 105 bp, Arabidopsis thaliana
tgttttttgctcagagaagcaggagagacggtgacagtaaccatgtgccgtctctctggtcactgccttcaccgttctctcactctgtttacacacttcaacatc

SEQ ID NO: 171953 - DNA, 350 bp, Arabidopsis thaliana
aagattatctatatttacgtataattatgatataacctcagattcatgaataacaatacaaggttcataatcgctatactgctaaataacaaacaaactccaaaagagcagaatatacaaaaccttcattcttctgcttggactccaaaatagatgtggagccgatcacaagctattatttacttgtttcagacttatggagctgcagaagtaatgaatttgaaacgacaaagatcgagctcaatgccattagtccaccagataacgaaggtgtcatggcgaaatcatactgaggaagcaagacacctgcagctatagggattgagatgacattatacgcaattgcccac

SEQ ID NO: 171954 - DNA, 154 bp, Arabidopsis thaliana
tcttttacctttaccaaaggtgggcttctatactctttttcatcgcacagagataatggagttggatcttacacctaaactgcccaagaaggttcacggaggagatgggggatcttactctggctgctgcccagaggagtggccaatgctcaaa

SEQ ID NO: 171955 - DNA, 457 bp, Arabidopsis thaliana
aggagttagagcaaatgctctttgaaatactaatccgaccctttccattgatcgcattgacaagtcacatgctaaatggaagcgagctgacattcttgtctttaacactggacattggtgggttcatggaaagaccgccagaggtgcaggaaaaactactacaaagaaggtgactacatctacccgaaatttgatgctactgaagcatacagaaggtcgttgaagacttgggcaaaatggatcgatcagaatgtgaatcccaaaaagcagcttgtattttatcgcggatactcctctgcccattttcggggaggtgagtgggactcgggagggtcatgcaacggggaggtagaacctgtgaagaagggttcaatcatcgattcctatcctttgaaaatgaagatagtccaggaagccataaaggagatgcaagttcctgtgattctttaaacgtgac

SEQ ID NO: 171956 - DNA, 169 bp, Arabidopsis thaliana
attattaaagtggggagtgagagccagtcatatttatcaaccttaaaaattgtcgcatagattatccaaaatccaaagggaaataaaatcctaactgtgtaaatatatgaccaaaacaacataagatcacctggtccagaaagaaagtacctccattaccactatatat

SEQ ID NO: 171957 - DNA, 265 bp, Arabidopsis thaliana
  unsure (1)..(265): unsure at all n locations
taatagtatatatatagttgccaaactataaatttagtgtaacaagaatcacatgatgagaggatccgaacacaattttgtaacatatcatacaaacccaaatagcatcagaaaatgaatagccgatcggtatctaattatctatgccatggacctctttgcttctgaataaaagttgatcaactatgcccttgtaatgttggaggaagctgtggccttttcagcttgaaagttggagtaatanagatctctttcaatatcaaaa

SEQ ID NO: 171958 - DNA, 373 bp, Arabidopsis thaliana
gttctcaaagagtatctgtatatattccaaccatataacaaaagagagttaaaaaaataacaagaagttttccctcatgtattgtactatcgttatgatttattcatctagaacgcatttatttgtgataatgtttatttgtagtactgtgttctaatttggtccttagctagggtccttggtcaaaaggccttattgtcattagactttccggacatcacagagctcatccacaccgcctcctctctcaaacacagcggctgctcccattcccgaacctatacacattgacactacgccaaaacgacagtctttaccacgtcgtttcatctcatgcagcagcgtcgcaacgcatctggctcctgtagcgccc

SEQ ID NO: 171959 - DNA, 376 bp, Arabidopsis thaliana
gaagaaactgaaaattgattggttttattccgtgttctagttctatggtacaaagtacaaacattaaacatattacaggcgtgtgaaaaaacaaatgaaaaaatttctctatggactatagaagtctgacttactatcctgcaggataactagtaagtagtaaaatcctttggtggcagaaatgtacaaaaggaacataaaaaaggaacaactggtttccttttttcttcagggcataaacgaatcgaaaaatgaggtctcctcgtttggttcttcctttgctctagagaatccaccaccaacaaagttttgttgcgtttgaaggttgctgttgttgttattgttgttcatggcgtaaccaaaaggcccggtatta

SEQ ID NO: 171960 - DNA, 523 bp, Arabidopsis thaliana
cgcgtacgtaagcttggatcctctagagcggttgccctttggggttggggccctttaaaagaagtaaaatattacaaacaaaaaaacacattatatccaattttatgaaactccaaccacaaaactttcacaaaggatcattgtttaaaagaaaaatctttgtcttacaagtcttggttggcagcccacttttcttttttcagggggggggggtttttaatctcgcggcgtatgtctaaaaaaaattctttgttctacaggcgagttcgcgtttattcaccttccggggctgttttccatttgcttgattacactttttattgagctttgatcgttgtcttacttttaagtatcatcatccctccttttttttcctgagtggtttctcttacgccgctcgtaatatttactcagtggctactatttacgttttttactctttgaagttttaattcggtttattgcgcattgataatattttttccctctttttgcccacgacccctgcctcgccccccccccg

SEQ ID NO: 171961 - DNA, 516 bp, Arabidopsis thaliana
  unsure (1)..(516): unsure at all n locations
ggtgacctatagnagagctatgacgtcgcatgcacgcgtacgctagcttggatcctctagagcggccgccccttttgttttttttttttttttttttttttttttttttttttttaattgccattttttttttttttttttataagttcccttttctcctttccccctttttttgggggcccaccataagctttttattctacttaaccccccaaaacttttaaattttgcgcggaaaaaccccccccaattgataaactatagggggccaccctaacccaaaaccccccttttttttccccccccccccccatattgtaaaccccccccccccccccaaaaaaaaaaaaaaatggaacccccccccccccaaaaaaaaaaaaatgcccgccctaaaaacccccccacaaaccgcggggggaccttgttttccccctggggaaagccccgggttgggtcacaataaaaaaaaacaccttggttggctccagaaaaaaaaaaaaacccgagggatcc

SEQ ID NO: 171962 - DNA, 481 bp, Arabidopsis thaliana
gcctgcaggtaccggtccggaattcccgggtctgacccacgcgtgcgggtcacttttctcaaactacgaaaactatggcttgaaaatccgtcggggttatgctctttctcgctctcatagcttcatcaggcataggttaagctccaggaccagctccaacaagatctcctgttccatcccctggtcaacctattttttttcggcgggggcggctccttcaagggacaccaagctccaacctccaagatcctattggggtacctgccaacggccgggttccgggtatgttcctgccggctggtatcaccgacttgccctctctcccggtttcaacacccgcagggcggcccaactttattattacttcctgggggggagccccctgtccgcttgggtcccaccagggatccacttccgcgtgcgatgaccgacacaccgccggccactatgcgctagttggatgccttaggccggggtaagg

SEQ ID NO: 171963 - DNA, 487 bp, Arabidopsis thaliana
gcgcctgcaggtaccggtccggaattcccgggttgacccacgcgttcggggattggtgttgataatttcttcactggaaggaaagagaacgttatgcaccatttcagtaaccctaactttgagatgatcccgcacgatgtggttgagccgaatctttttgagggtgatcagatctaccatttgggttggccttctttttctgggggttaccaaatcaatcccggccagactattaagaagaatggggctggaacattgaacatggttgggttggctaaacgagggggggctagatttcttttggccgaggtccaggggaggttatggggaatctctggagggttctcagggtgggaattacttggggccactttaaatccattggtggcccttagctcccaccatagaaggaaaaacaaccggcgaaaatacgagcctgggctttcagcccggggccacagggacgagtcttaattccatggaactt

SEQ ID NO: 171964 - DNA, 510 bp, Arabidopsis thaliana
gaaagctagtacgcctgcaggtaccggtccggaattcccgggtcgacccacgcgtccggttttaaagggtcaataaaaagcaacttatggaacagatttgatgagatgaccaaacagaaaggaacgagcaaggaggatttgcacttataattacgctttaaagattcaatttcacaacaaacgggcatgatggtccattgattgaataaatgcataactttaaattgggggggaagagaatacatgcctaagtggattttagttaataggactgacaattgaaagatctgccaaagttccgaaaaatttgatgaagctattaacttgttcttggaaatgagatattttgattttgtattacatacaattgattaaaatacaggaggcttcaaaacagacttaaaattgaaagatgtgaagaagctttggattttttaagaaaaaaagcatctgattggattagaaaagaagttcagacttacaaagctgttcgtcgaagatatcgcaaac

SEQ ID NO: 171965 - DNA, 492 bp, Arabidopsis thaliana
agctggcacgcctgcaggtaccgggcccgaattcccgggttgacccacgcgtccgagggttgggagaagacgacagaaggggactacgacgtaccttctgttccccgttaccttctgagagtttttagtagtcttcctttggaacaatgagtgacgttgtttgatggatatgagcgacaatactgtaagctctcggggagtttttcaaagaagtgttcctctggtatttgggttgatggacaacaaaagaagcaaagttgcgtgaaataaatcccggctggcaaaaggaaaaaggctgattacgaaaatggatatatgagctaggacccttgcccctaatcaaaagatctgagctgctgcctaatttgtcaaataaacacagtgacggggagatctgaagaatggaagactgagaatgagaagagtgacatctggccagttgaacgctgatgctcgtgatgaggtgctagaagcttgtatgactgacacaaa

SEQ ID NO: 171966 - DNA, 349 bp, Arabidopsis thaliana
gagctggtacgcctgcaggtaccggtccggaattcccgggtcgacccacgcgtacgcaattatttttcttatcttctacgggatttaaatattgagacataaatagtgagccccaacttttcttttgcagaagaaagaagcaagggttgataatgaagggaccaaggtaccaaggcttgcattaaaaaaggtgcaaagggaactttttttcctggggattctatccgcaaaagaatcaaaaaacaatagtaaggtctcttaaccttaagttcgggattttgggccgcgtggtaatagcttcagggtctttctccattgcaaaatcttgtacctcggaactggggtctta

SEQ ID NO: 171967 - DNA, 487 bp, Arabidopsis thaliana
  unsure (1)..(487): unsure at all n locations
gctctaatacgactcactatagggaaagctggtacgcctgcaggtaccggtcccggattcccgggctttctcnnattcctcatccttactctcttncagggtangatcttataatgaatgattttgctagaggactataagtctcggtgatccggggaattcgatattggaggaaagatgaaccaaaaggggagaatcaatccaggaacctgataagggctggggtttcactttaaaaaaattgggcccactttacctccatcctttggggaaaaaaggggaaaaaattttaaattaaaaaaaatttttaccccaaaaaccccaaaaccggggaaaaaaacctctttttcaaaaaaaaaaaaccacaaaaacccctcttgggaaaggggcccccttgagaaaaattggggggggagaaaggggttaaaaaacccccaaaagggggagaattgttgaccccccccccgggggttttgggggggggggg

SEQ ID NO: 171968 - DNA, 480 bp, Arabidopsis thaliana
ggaaaggtggtacgccttcaggtaccggtaccgaattaccgggtcgacccacgcgttcgatggtgcctgaggagaatatggtctttgtgaaaaggaaaccgttaacgtgagggatgttgtaccggtttgcccaattgggttggttattgggaaagggggtcaaggtatccaaaattttggttaccacacccaaggttaaaatcgtggtatcaaagatcatcttccaggttgggccttggcttttaaacattaagaagcttttttggttattggaaaatccttggttgtttgaaaaactttttaaccaggttgtttaatggttgattattattctttaagaatttaacaattacttctggcttttttaaggtttttcaatgcttaaccttggggcatggtaatggttggaggaattgccgacttttaccagaacttacgttgggctcatggttttagcaaatgcagaaaacttttgggttg

SEQ ID NO: 171969 - DNA, 528 bp, Arabidopsis thaliana
accactcactatgggggagctggccgcctgcagtaccggtcccgattcccgggttgacccacgcgtgcgccccgcgttcgttaaagagagcaaattaattttggtttgaataaaaatttcaatttcattatggaatataattatattagcatctaccatatgggtagcttgaaataagtgttatttgttttggtgattttgaacccactaaatttgtttttcttttaggataactcatatgaagtcatggggtgtaaaataatttattaataaatatataattaaaggttcaattagcatgtcaatatgacatattacatttttactttcacaaaaaataatatctactcaagatattggttttttaactgacaaaattgatatatctgggtaaggcctgattttcaaaatcaactgaccacctttatgttattgaaaaacctaaatgaactccctaccttttaatttcacacttttctttggttacaccataatcatcatctattggttgaaaaaaaagccaaattt

SEQ ID NO: 171970 - DNA, 535 bp, Arabidopsis thaliana
  unsure (1)..(535): unsure at all n locations
agctctatacgactcatatatggaaagctggtacgcctgcaggtaccggtccggaattcccgggtccgcccacgcgtcccgggaccgcgtcggccacgcgtnccgccacgccgtccgggacgccgtccgccacgcgtaccaataaaacttattttttttaatctttttggccctggcaaaagaattggatgggaaccaaaatggaccaaccgcggggaaagattccagggttccgcttccggaacatttttcgacctggaagaacttaagaaatgggccgtttatagaaccggccttagtgaagttggaagcaacattttggttcttttccgtttaattcctgactgtaatccggttacaaagttcaaaccgatgcacccgccgtaggagtggatggtggcggcgtaggattatggggtattgcgtgggctttcggtggatgatctttgttctcgtttactgtaccgacggaatctccggtggcatataaatccggctgtgacggtgggactattcctggctcgtaaagtgtcat

SEQ ID NO: 171971 - DNA, 447 bp, Arabidopsis thaliana
cgactcactttagggaaggctactacgcctgccggtaccgggccggaattaccgggttgacccacgcgttcggccacgcgttcggccacgccttcggccaagcgttcggccacgcggtcagccacgagttcgtccaagccggcggagttctttggacctttttgtttaccctggtttttggacctgaattacccaaccctaacttggtcttttgtttattatttaggaggggggggttggttggtttttgggaatgaagaaaaatcaccaaaagggtgggttaatatttccattgggattaaatcggtcgaaaatgaagcagtcctttgggaattttggttaggctaagtatgaacaacaccatcgattttgggaaggccgaactgtgcggctgtaacgcaccatttaatattctggattagaaggaaatcaggctggagataaccg

SEQ ID NO: 171972 - DNA, 429 bp, Arabidopsis thaliana
  unsure (1)..(429): unsure at all n locations
ccgcctgcaggacaccggtccggatattccggggtcgacccaggcgtcgcgttactttttttaaaactacgaaaactatggttggaaaagcctgggtggcttggttctgcctggactaatagcgggtcagaatagctcagctcaggaccgtccaacagatctgcttgctctcctggtacctcctttacgcggggggcaactccttgaatcacaccaactacaactccaacaccatccgatactcccacggaggctccagtttctcctccgggtgggacaccagttccgtgctgcgtttcaccacccgttcctacaacttttctaactcctgatggtgcacctgtagctggtcccactggatcccctcccgtggaaaacaacaacgccggcaattttagctgttggatccnttagcccggattcgtattg

SEQ ID NO: 171973 - DNA, 533 bp, Arabidopsis thaliana
gattaggtgacactatagaagaactatgacgtcgcatgcacgcgtacggaagcttggaatcttttaagcgggccggcccttttttttttttttcccaaatcaatggcctttaaattaaccttagcctttcgggggaaatttggaaccttagggagtcttaaatccgattccactttcgaccaatttaaaatcctttcaagaataagcctggtcctaatcttctccttcactccaataagctaaatatggaatctcataaagattaccttctctatgtgggaatggtatttcgttatccgcaatttcactcatttggccaccaaatggagtgagtatgatctttgcaagccgagcctcgggcgcctcgaatcgtctccaaagatactgaatcgcggttttaggtatcggttcttcgatgaaatcatcttttcccttgaaagatcttgacgttcgtttccgtttcgcaagaatttccattgattctccttttataaaccagagaacagactcaatccaactcatttctctacaat

SEQ ID NO: 171974 - DNA, 539 bp, Arabidopsis thaliana
gcacgcgtacgtaagctgggatcctctagagcggccgccctttgggacggctactcactaaaaaactacacacccacgcaaaaaagaaaactcagcacaaacaactacaccaccgaacgaacatcccaaaccggagtttctcaaaaaaaaaaaaatccaaaagcccccgaaaaacaaaaacaaaacaggagggggggaaacgcaaaaatttttttctcgcgggggaaagcgaacaaaaccacagcttccaaccccaagaggaaaaacacgacgacagcacacggccgcgacacgaaaaggcaccccatctacaaaaacgacaaaggaaaaacaacgctcaacaagcgcaagacccaaaccccagcaacctaaacgggaacaacacacagaccccacccgaagcgccgcaggccgcaccacaaagggacgcgccaacagccaaaaaagcactgacccgaaaaaacacagcacagcgcggcaaaaccgcaccaacacgcaacaccacacagaccggcaaaccacacaagggcccaacaagg

SEQ ID NO: 171975 - DNA, 430 bp, Arabidopsis thaliana
  unsure (1)..(430): unsure at all n locations
gagagccaagcacgcctgcaggaaccgggcccgaacacccgggccgtcccacgcggccggcactcagctcacaacgagagaacaggccaaaggaaagaatgagagatcccaccgatgcataacccgaaaacagcaccgtccccaaacctcggccacccgccacagagagccatgagaacctcagccggaaaagccgccccccaccctctcctgataagcggggggaaacncgggcacggaaccccgaatccccgctaccaaggccccaccagaggcggaatccaccgggaccgccagaaagaacatccagaccaaaaacccaccgaagcacgagccgccatgccggacccaacgcaccgaaacccccgaagggacccacccccccggaccaaagccctccggcaaaccccgcgcacagagcgggaaaccg

SEQ ID NO: 171976 - DNA, 492 bp, Arabidopsis thaliana
tccttataaaggggccgacctttttttttttttttggacttggaaaaaccataacctaacttataataccatatgtcactggttatatgctcccttccttatccaggtatatgggggaaaagtcctgaacagcttggggtattagaaagtggtgccaggtggaattatgtgttttttaactccgaagtttttggttcctgtctctgggggattcaacatttgggcttgcccaaccttatgcccgaagaaatgaaatttgaggcccattccaaaactggtagtagtccgtgaaccaggaaaggagactcccagaccccaatgacagactttaggggacaatgctgtttccaacatgaaagccaccgtacctgggagtttacaaggggccctttgcatttactgaaccaatggcccgcttttacgtggtagtatcttggaccataaaggggaaaaccggatataagagaacttcccccgacggggaaaaaatcc

SEQ ID NO: 171977 - DNA, 361 bp, Arabidopsis thaliana
acgccgtgcggtagaaagaaagatccagaggattattatctaagctaaaaatgacaaaggccaatctcttcgccaaaaacagaccttaccggatcgagatcggtcctcgccttgtgatcttagttttcttcctacgtttacgtatgtttgcatcgatcaaagacccataccctatctggcttatctcagtcatcttcgagaactggctcgctctctcttggatactcgatcaagtcccagaatgggtcccgataaccgaaaacctaactgaccgttctttatagatttgaccggatgggaaatgacaacttgctccgttgattgctgtaaaccgtgatcgttacgaactccatatcaaagc

SEQ ID NO: 171978 - DNA, 458 bp, Arabidopsis thaliana
gacgtcgcatgcacgcgtacgtaagcttggatcctctagagcggccgcccttttttttttttttttttttggttaaaaaaaataatatatattcaaaacacttttaatgcgcccagactgtacccacaatatagtaaagcttcttttgaaagatgggttggttgagcccagcttcttaaccatctctcttgtggaagaaacacttgagaatcctaaattggtggatcattccttccaaactttttccggggggtaaaaaacaaaaaccaattaaatggttgctaaacgagaaggccttggcataaacacaacacccccgacggtctgcgtacccgggtttaaaccacagccactccgtcttcccaacccagccccaactcttttgctctttttctgacaaaagcctgatgaagaaactcccccccgtgacacggcactggggattgccaccttagccc

SEQ ID NO: 171979 - DNA, 483 bp, Arabidopsis thaliana
ccatgcacgcgtacgtaagcttggatcctctagagcggccgccctatttattcggttgtttgaagcgtcgatccacgtgcctaacttggtccggaggccacacgaaaaaaccccgatacgtttgttggctccccctccctggggcttaacaacgagtcaagaaactgcgagggatctttcttcaacgtttatagatttacttcgcaaagatgcttctctgatttgggcgccctaattcccgttgattccctccgctatcaacttttcctccacatgctatgctattgatttcgcaagtatccacaaacccacaaaacgaccgatatacatgtaacatccgtatcgattattaatacactgttaatcgtttaggtcactgcgtggttccaatgcttgtttcctatctgcacttgcatcgctattccaacgacacaccgcactctatcctacatacgctaatcaacatcaccccaacacaagaga

SEQ ID NO: 171980 - DNA, 424 bp, Arabidopsis thaliana
gaaagctggtacgcctgcaggtaccggtccggaattcacgggtcgacccacgcgtccgagcatagtcgagaggaaatgaatcgacagatacaaggcgctattggcgagaatattgaacacttacttgtatcagatacatcctgacacagctcagtagagactgtgaagatcatctatgagaagctatatactatctacacacttgtgttgtattgatcatctagtatgatacaagctgctgcttctctaaagcgtaacgtgctatgatggtgatggggtcactgcatgctacacactgtaggatcaacgtgtatcgctcgctgatcccagaatgatgagtcattactgccatgttgatcattgtgcagtaactgagctgagatcgatgcatagctgatctcaaactagcatgtgaagtatacgg

SEQ ID NO: 171981 - DNA, 482 bp, Arabidopsis thaliana
tgacgtcgcatgcacgcgtacgtaagcttggatcctctagagcggccgcccttttttttttttttttatgcttgtaagacacaaacactcgccatactatgatttttgcctcggagtgaataaggtatgcaacacaacccttttcgtgtataagtttttgttggcttcaaacacttgacaccatgtagatctaaacacggaaacgcctgttttggtttaaaagacgcctttaacaagcgtcaaaaacaacaggttggctctattaagttggcacaagcaactcaagatcacagtctttaaaatggtgtctgcggccgatttgaaatattcaacggaaccttcaccaaatagtatcccctgcctttgttaactattgttccccaaatagtcccctttcccgaatgtttggacaggaactatactaatttgttccacaaaagcaaaaaatgccttcaagttattttttttttttcccagctgga

SEQ ID NO: 171982 - DNA, 565 bp, Arabidopsis thaliana
tacccctcaccccacccccgccaaaacccccccccccgtttccacaaatgattggccattttagaagaagttatgacgccgcatgcacgcgtacgtaagctgggatcctttaaagcggccgccctttttttctcttttttctccttttctctcctcccttcaaaaaggaacactgatttctatcttgcttacgttgaagggttcatttcgctaacatttccaccgccaacacaaaaaacaatttctcactcccccggaattttttactgtaaccaccaccctatcttattcatcttacaaaactttccatcttcgatattaacccgatgcaccatttccatcttctgatccttaacccgaccccccccggacgatcattacgaaccggattcaaccctaaacaccttttttgttagaaggcaaaacaagtactgggtcatttcccacttcacatccgttaacccctttcttttcctgaaaaaaccctcttcccccgacctcttacccattgatttacccccccaccaaaatctccctccttcaccgctacgtccccaccaatcaa

SEQ ID NO: 171983 - DNA, 220 bp, Arabidopsis thaliana
cgattgattaggtgaactatagagagctatgacgcgatgcacgcgtacgtagcttggatcctctagagcggccgccctttttttttttttttcaaaagctcattctatgaatcacaaactcacatgctttgatcgcgtttcatacatttcttgaccaacacgatgcgtcaccaaaacgaaatctctttgtacttttgactactatactaacttcctttct

SEQ ID NO: 171984 - DNA, 527 bp, Arabidopsis thaliana
  unsure (1)..(527): unsure at all n locations
gacgnggcatgcacgcgtacgtaagcttggatcctctagagcgggccgctcttttttttttttttttttatggagttggccctaatccccttcttaaactaatatatgaggaattttggaaaatactggaaactttttgttttacaatttgccattccctatttaacccccgacccagatagatgttttatgcctccttttaaagtttcctaatccttttttagaaaaaggaaaaaatcacatttcaccttatgttcctttccttttggttttcccaaggggttggttttttgtaaacagggcccattcggaaaattttttaattccggtggcggtttggttgataattgacccaattaaacacccggcattcgttgcttactctttgtaaaggcaatattttgcccccctcttagttacaggtacgccccgggcagaagtttcatttttttttgtgggtccctttccgcggggatcggtgcttggaacttggcctccctaaggggtcccaaattgtgggccttgtt

SEQ ID NO: 171985 - DNA, 547 bp, Arabidopsis thaliana
tcacgactcacgttagggaaagctggtacgcctgcaggtacctgtccggacttcccgggtcgacccacgcgtgcgtacggctggagaagaccacagaaggcgaacgcgagatctttattagagagacgccttgctaaaagggtctctgtatttactaattaaagtcttcaatcttgattctgtaaattacggatatttctgagagacaagcaaagatgagttttttttctgcgggtctgcaactaccatctaagatgaacccagtctactcagacaaactgagcactaacttactctgtagcaccactcaaccatctaccatgagaacacatctatagtacgtgtccaacacggttcgactccaccttccggatcctccaaatttcactggtctcttgaccacataatactactacccgcttccaccgctttcattatttacctactcctctccatgtcataccgtttacttaccaattcctctcccccatccattttattcctcgttactgtcacaccatcaaatttccctttagagtatctcttt

SEQ ID NO: 171986 - DNA, 689 bp, Arabidopsis thaliana
ggagagcagccacgcctgcaggtaccgggccggaatacccgggtctacccacgcgtccgagaacctggagatgatgagatcatcgcttactctgatcatatatctacatgtggatgaacctatctctttcacattcgcctccgacttcagctcaaaggaccaaccatgaaaactggctcacctgtctatatcacccacacacaccaatattttgtcagggagggatacactccatcagacgacccctgccgagtctctgcatctccgaactccttccctacccagaccccacgaagcctgtgaccctccagacaccctaaaccaccactcactccatcactccgcggcgaacgctaccagatcgcgcaagctacaatcacaacaccgcctgcctcaccggtctaccgcaggaaacacatggacacgagccacagatatccgacgggcaaccaaccgcaacaagagccagcccgcccgcccaccctggggcccacgaacaggcgaatccagccctccacaccccagaatcggtcccctaggccccaccccccaacccccgccgagcaacgcagggagccagagccggcgcagggaccacctccacttcaccgccgcctgcaccgcgcgtggcaccgtgaaactacccacagcgccgggaccgccactcgttaaaaaacccccactacacc

SEQ ID NO: 171987 - DNA, 440 bp, Arabidopsis thaliana
ccgccttccttagcctggattcttttaaaggggccgccctttttttttttttttttcattctttatatataggataccactttattaaattccattccataccttatttttggaccgaccatatttaaaataaatggtagtctttctactcccttaaaagaacctggtcaacgaccatttgaaaatttagttccgacgaaccataaataggcttggtcgtttcctaagccaagcgctgccatttttgggcctttggcctcattttctttccttggcccccgcccatgagttttttaacaaactcctaaacctcctcctttctaaaatgttcaccgatctccatccccactttccatttatcaaaacaatatttacaattggtgttgctgttcccgcaaagaacggccaacaccccttgggaactccaccgggagagactt

SEQ ID NO: 171988 - DNA, 556 bp, Arabidopsis thaliana
acactcatagaatagctatgacgtcccatgcacgcgtacgtaagcttggatcctctagagcggccgcgctttttttttttttttaaacctaaagttttaaactcatcagctaaaactctctttacatatatattcttacacaagagtgcgtcgtcgatgttacaagctgctgacattaaaatacctcatgggtctctttccaaaatagggtttcacttgggggttctaacaaggcttgagttttttttattaaggttatcatttccaatctactgggtaaccctgggtatcctccataaagatttttttttaagggggaatctggaaattagcttggatgaaactttggccctcggtcttgtgaaattgattctaaaaacccccccgttttcccaaggtgaggttttaaactggagaggcgtttccattagttctgcctaattacgggttttgcgcaaagagtggtggtttattaaagggccaagaagttcctctgggaatcttccggaatcgggaccaaaaaaaattcttcacaagggaaaaaataagttttggg

SEQ ID NO: 171989 - DNA, 446 bp, Arabidopsis thaliana
tacgactttatatagggaacgctggtacgcctgcaggtaccggtccggaattcccgggtcgagccaggcgtgcgcccacacgtccggacctctcaattcgaagccgctctaaaggaactgaattttgtttcatcatctgacgcagagagtaggctcaacaaatatgctgaagatgtggaggttcattttgcatctagaaagaagatagaagggggggcaaaagcaagaaatttgctgttgcaaagtaactttacgattccccaggatattggtatgaggaatgccaagcacatcggctgcttacttttctcctctgaaaggggggggggtatctgaagctgcatctcaacttatgaatttggtgcataagacccctccagggtggcttggttttttttgcaggggttggttcagagttctacaaccctgctagagattctattcct

SEQ ID NO: 171990 - DNA, 464 bp, Arabidopsis thaliana
gtccgtaagctggaatcctcaaaagcggccgcccttttttttttttttccaattatcctcaacactttttctctttgaactatctccaggcctgctagatctgccaacacttttttacggctctttctccttccgtacaccgcccttttttcttctacgttcaaagtaacgctggacatcatcatcactctcttcattgcccacctctcttgacctttccttttcccggttcctcctactacccctttttttctaacgctctctcctatccttatttccactttcccgttcccgcctttttttttctttaacattctccttttcccggtcttaccgttcccggtctctccatctatttatccttataccttgctctgactttatccttcctctcttcccttgcttatacctttaccaacattagccctacctctctcaggatctaaagccctctttcattgtta

SEQ ID NO: 171991 - DNA, 583 bp, Arabidopsis thaliana
gacactatagatttactatgacgccgcatgcacgcgtacgtaagcttggatcctctagagcggccgcgctttttttttttttttttttttcagacaaacatagaaatatttctacttccaaatctttacggatttgtcatgacttgcagacgcaaccactcccgtggaaggggactgagccaaggcagagatcacacactcgtggcctgctaccggggggcatttgttctccattgggttccacaaatatatagcctgatagccaccgatgaccaagagatcgggatagctagggtgaaaaacaacagagggggaccttggttccactgttgctaaacctcgaggatgcaatctcctgaactcaaggaccataattttacagggggttactaacagacgccccaactctccggttggggctcaacaaacagaaggacatttgaggaatgggccttaaaaaaggtgacccggtggttttattttcaatttaaaaaatgacacattttttctgacccttgagctaaaaacttgcctgttcttggtggaaaacaaactgggtgctaaccccttacaaaacaaaagg

SEQ ID NO: 171992 - DNA, 455 bp, Arabidopsis thaliana
tatagggaacagctggtacgcctgcaggtaccggggccggaattcccggggggagccaggcgtgcggccacgcgttcccccacacgttccaccactcgttccgccacacgtgcggatttactcttaacttacaggtgattaccattcactgggaacctctcaagaaccctagaatcttttttttccttttcaaattggaaccggcagagggggcttgatctttaaatttactgaaaaaaagaagaccgaagtaggggcctgacccacttgatatttaatgggggggggggtttttttccagcagcgccaattttgggcttaaagttttggttcaaagaaaatggggaaagcccaacaaaagcttcaagggttaccataaatggataatttgggggaagaaagaaacctcattaaaaccggcgaacccgtttattacgtgagagggggggggtcct

SEQ ID NO: 171993 - DNA, 398 bp, Arabidopsis thaliana
ccgatttatatagggaacgctggtccgcctgcaggtaccggtccggaattccccggtcgggccaggcgtcccacaatatccgctctgaacagaaaaaagggattctgatgtctggaaaaaccggttacagagaatcccagacagctatcatgatcatcgggatttacctccggagagacttttctccttggccctccatgtgtggggcctccaccaccctgttttgtaaaaaatcttcccataccgggagggggaaatcagaaggcaggatgctgaaatccaaagggttttgagggaatatcatgggctagcttgacaacccaatgggttctgagagagaactcctttcttgtaaagaaaactttcccgaatgaaaccgaggaattctgatcttcgcg

SEQ ID NO: 171994 - DNA, 416 bp, Arabidopsis thaliana
  unsure (1)..(416): unsure at all n locations
ctactatagggaaagctggtacgcctgcaggtaccggtccggaattcccgggtcgacccacgcgtccgactgagcaacacaaaatctggtgaaccaacggtgactgctgactaagaagaccggcaataggccgagtatcactacgaatgtcctcagaaataaccacgaactactgcacngagctcagagatgttatctcctgcggaggtacagactatgtgctaccaccagcaattctcgaacagtgtgngtctgatgcatgacgtaatgttaccctatgagagagagccgaacncttatgcatcatgcgacantggacgatgaggtcatagagagagaaatgagngaagttctctgtggctcctccaccattgattaccgaatcagatgtgactaaagaatgtgatagctcaatg

SEQ ID NO: 171995 - DNA, 398 bp, Arabidopsis thaliana
tcgactcagttagggagagctggtacgcctgcaggtaccggtccggaattacggggtcgacccacgcggtcggtaaaatcatatgaagaagttatcggagaaaaatggcggagaacctcgtcgtgaccgaagatgattgatatagtatcgacctttgctactttctgaaagacgtcgattctaaggactattggatacgcaagagcaggacggcgtacgcgcgggatcttttttgtatgggggggctcagagagccttcaatggaggagcgtgttacgggctcttctgaactgctttggagctttcctcttctacttcattgtgcagcacgtcaatgtaccatgggaactggggcttcatgcccacttttatggaagatcgtacgccatggaagggta

SEQ ID NO: 171996 - DNA, 572 bp, Arabidopsis thaliana
  unsure (1)..(572): unsure at all n locations
cgtctaatttaggcgaactatangattagcttgacgtcccatgcacgcgtacgtaagcttggatcctctagagcggccggccttgtttttttttttttttcatcattatatatatgataacactttattaaatttcaatacataacataattttgtaacgatcatatctaaaataaattggaggctctctacttccctaaaagaaccttgtgcacgaccattttgaaattgagggcggacgaccataaataggcttcgggagttcctcagacagggggctgcacttcttggccttttggctcatttcttttctttgcctcggccatggagttttaaccaattcctaaactcctccctctcaacaattcaccggcttcaatcccatttccattcatcacaaaatatttacaatttggttggtggttcccgaaaaaacggccaaacccccttgggacctccccgggaagactcttcacaggggaattcccatcactttgggtgaaaaaaccctccactggcggaggaaaaaaaaactttttttgggggaccacaactggtaggttctttggtag

SEQ ID NO: 171997 - DNA, 218 bp, Arabidopsis thaliana
  unsure (1)..(218): unsure at all n locations
atgatactccagctctatacactcactataggggagctggtacgcctgcaggtaccggtccggaattcccggtcgacccaccgtcgcggacgcggggtcgcccacgcgtccgcccacgcgtccgccacgcgtcgctttttgtttttggcatacaagaaaagaaaatggcgtctcatgctgttacaagcngacaaaacacacgtagtttgatacctttc

SEQ ID NO: 171998 - DNA, 642 bp, Arabidopsis thaliana
  unsure (1)..(642): unsure at all n locations
ttaggacgaactatagaattactatgacgtcccatgcacgcgtacgtaagcttggatcctctatagcggccgggctttgtttttttttttcttttttttggtgtttggtttggaaatgtgagatatcatatatatctatgcggtttactctgtatatgtttgataccaaacttgtattctttgataaacaatttaatgaactgtgttaaactttttataaaaagagggggggnnaaaaaaangaaaaacccaaaattatttgcccgcgattgtgcttttgtttgaataaccgggtcctgtgggcccccggccttgttgcaaaacaaaaggaggtgtggggggggggggggggcgcggtttcttttttttttttttcgtggcggcgccgccgcgaaaagaacaagagagggaggcagaggggggggggtgtggtggttggtggcgtgcgcccgcgccgcaccccgcgataagaaacggaagaaagaagaggaaaagatggggggcgagtgtggcgctttgttttgttctttttggtcgcacgcggggacgagaaaacaagagggaggagttggttgtgtcgtgggtgtgttagagggcattaagaaaacgcaaagaaagatagttcttatttgtgcttgtaga

SEQ ID NO: 171999 - DNA, 479 bp, Arabidopsis thaliana
  unsure (1)..(479): unsure at all n locations
cgccttccttaggcttnattcttttagaggggccgcccttttttttttttttcttttttttgggggttgggttggaaaaggggaaatatattatatatctatgcgtttaactctgaatatgttggataccaaactggtattcttggataaacaatttattgaactgtattaaacttttaaaaaaaaaaaaaaaantaaaaaaaaaaaaaaaaaaaaaggggggannnnctaaattattattttttaaataaantggttttttaaattttaaaacttttttctaaaaaaaagagnnnnnnggggnnggggggggggtggttttctttttttttttttttctgtgcgaccctccccctaaagaaaaaaagaatgcccaaatgggggttggttttttgaagccctgggcttcccccccccttaaaaaaaattaagataaattgataaaagaattgggagcgggctttgcgctttcttttttt

SEQ ID NO: 172000 - DNA, 511 bp, Arabidopsis thaliana
  unsure (1)..(511): unsure at all n locations
tatagggaacgctggtacgcctgcaggtaccggtccggaattccccggtcgggcacgcgtccgggcgggattaccccctgagtttaagcctatcaataagcgggaggaaaagaaactaacaaggatttcccttatttaacgggcggagccgaaaccgcgggaaagaggccccacactttgaaaaaatccgaacgctctttcngcctttttctaattaggaggtatgaagggaaacgntccctcaggggaccggaaccttttatataaatgttcccctcggaaaggggggcccccaaaaaagcggggagagccccccccccctccccggaaccctcttgtgaacccacagaggcggactttataaacaaattcggggttgtgtttggggaattggcagccccccaaatcagggccgggggaaaattcgcgcccccaaggcgtaaaatgccggggcgaaaaaaacccaaagggcaaacaaaatcccccgggagggggaaaaaattaaaaaagg

SEQ ID NO: 172001 - DNA, 345 bp, Arabidopsis thaliana
aagctggcacgcctgcaggtaccggtccggaattaccgggtcgacccacgctgtccgagatacatctaatcacagacacactcgataagtctaaactcatcacccatggcttcgcaagtcagacctctccttcaggaccactcaaagatacctaggagcatcctgttcaacgaccctctgtggccctagcgacgacaataatattttaatggagtggcaccattaccaggcgctcctgacactctctcagaaggaggcactctcaaacgcgaatatgacattctcgcgaaaccatccacaaaatcccagccaccgtgaagactacctacggattatgacgacctc

SEQ ID NO: 172002 - DNA, 575 bp, Arabidopsis thaliana
acactatagaagtgctatgacgtaccatgcacgcgtacgtaagcttggatcctctagagcggccgcgctttttttttttttttggtagaaagccatatttaacaaaaaaagcaaaaccttaagatcctcattacaggaagaaagggacccaggttcaagatttgtctacatttaaggcaattcacaactgcataaaaaggaagggtcatcatatcatgtgagatcaatctcccatttcttgagctcatgccatccgaggagtcttcttattgtctagtcccaacttttgccttttgtaacacactgtccattcattcccaaaaagatttgttatcggtggcctatatcctcatccggattctggttattctccgagaaaattggtcaaagctggggccccctccaagttttaatttttttccgggtttacctaaggttcaccttggcccaagcctaactttttaaaaaaggaaaactgccccttggaaccttgtaaaaaataagcgtttggaaaccctggccttttcgcggttaaggagccccggaattatcgtttttcaaaaaaaattattttg

SEQ ID NO: 172003 - DNA, 441 bp, Arabidopsis thaliana
gacggcgcaggcacgcgtacgtaagcttggatcctctagagcggccgccctttctttttttatcctaatttttttcttcttgccacgccgaagggtccaaaatgagccaaggaatcaccctcctctttagtcactccaaaattgaatacctatgactttttgcattgacaagcaggagaggtacactacgctattgtctgtacacatcacgtaacgcgcttttcgaatcgtgaggggttattttatttatttagatatgttgaccctgatcaaattatatacggagctggactttcttcggttcttcagtgcattgatccaaaagggtaaacgatgtgtgttgctctatacattcccgccttcgaaggtacttaattcgactgtcctttcttcttgctacgcgcgaaacactgccttttcttggctgcccaacgaaatgtg

SEQ ID NO: 172004 - DNA, 504 bp, Arabidopsis thaliana
ctttgacgtcccatgcacccgtccgtaagctggaatcctttaaagcggccgccctttttttttttttttaaaagagagacattgggaacaaatcaggggcggacaatcacgacagagattatatccattatggctcgccttgttccccaccgggaactagcttactgcacctgttgcaacaaatcaccatggccaaagatctgctatggccatcaataattgcctttacactttcccacatatgttctcgattgcttaaaacaataccattggagcccaaaaaaaatataactaccattcaacttcgattcttggtgtaaccttagtaccgaaatgcccagtattctggaaataaaattttcattctgttatttaccatcaagtaaacttcccgccccaaagttgggaaaactgacccgcactaacctcagaactggccatccttcgagaacaaataacacaaatctgatacatgtaccaatagacaatttggtaaatcgatga

SEQ ID NO: 172005 - DNA, 479 bp, Arabidopsis thaliana
  unsure (1)..(479): unsure at all n locations
cacgcgtccgtaagcctgggatcctttaaagcggccgccctttttttttttttttttggaaggtacctgatcgaccgaaatcaataatccggtaagggggggttcattattaagtatatacacggttattgtcctttagtttttgagaccaaaaatagagaagctaagctattaaatccaaaagatgaatggtttttattgaatccagtagaagaactcttgcctgagccaattatagcctcaaagttcaccatcaaactcaaagagtcaccgaactaaggtgtttgtatttagaaaagattcaccaatattctcctccacctacaaacgacgacaagctcgagtcatcctcaatctccaaatatgcctcttcatcttcgncttcttcttgttcgtcttcgctttcaccttcactttcaccttcagcttcaccttcacctttaactggccaggagaggtaagtttcaagctcactttga

SEQ ID NO: 172006 - DNA, 397 bp, Arabidopsis thaliana
  unsure (1)..(397): unsure at all n locations
gaaagctggtacgcctgcaggtaccggtccggtatatccgggtcgacccacgcgtcctgcaaaactgtagagatgcacagagatgctacataagttgagtagaacgattgttcgtgatgaatgctatggaaattctggacactgcctgttcttgatggatgctgaggatgttagtgatgtgtttaccgatgataccggcacagatactgtgctaggtatagatcnttaacacattggcaatcaacggtgcattgtctgtatatgattcatcattccaacgtatgcataatctccactttcttacagattccgagaataggcggcggtggagtggtgaaggcatattgcctctacctcagggtctcaattatgtgccctacaactgagactactacac

SEQ ID NO: 172007 - DNA, 295 bp, Arabidopsis thaliana
  unsure (1)..(295): unsure at all n locations
tcatttaggcgccctctagaatactatgacgtcccatgcacgcgtacgtaagcttggatcctctagagcggccgcgctttttttttttttttacataggagtcaccgaaatatgcaaaagtgaatgggtgtaaaatgatggtttgaataatagngggtgggattaatatatatatacttagcctaaaataaaagagaggttaatttattgaatgaatttcaatgagtagggggtcctccccaaataagcttaatcttaagagcgaacttcttttgcctcccaacaccatggggat

SEQ ID NO: 172008 - DNA, 483 bp, Arabidopsis thaliana
gtggctggcccccttccgtaagctggaatcctttaaagcggccgccctttttttttttttttacataggagtcaccgaattatgcaaaagtgaatgggtataaaatgatggttggaataataggggttggtattaatatatatatacttagcttaaaataaagaagggttaatttattgaatgaagttgaggagtagtggatctgcgccaaatgagctcaagctcacgagcgaactccttctgcctcccaacaacaatggtgatgtggtctttgtcggggacgacgtggatccttgcacgtggcactttcctcttgacgccgtagctgcactccacggggatcagctcgtccctaccgccgtggaagactgcgacctcacagtccacgttgtcacggacatggtccaaataagcctctactttgctccccgatccgaaaatgatgttgtgtagtgtgtgccatgacgcgttatgtgtgtgaca

SEQ ID NO: 172009 - DNA, 589 bp, Arabidopsis thaliana
  unsure (1)..(589): unsure at all n locations
acactatagnaatagctatgacgtaccatgcacgcgtacgtaagcttggatcctctatagcggccggccttttttttttttttttttgtaaaaaagacagaagcataaactagaagcaacagaagctgattacaagtacgatccgggtgaaagacaaacaaaataaaataaaaagactaaaaaaaaaaaggcgaaccaaaattaaaaacattaactaagggggggaaagaaccattgattgatccaaagatcgacaaactacaaaaacctaaaagaaggaaaactttaaataaacaacaacaacaaaggtggattaaagaaaatctctaacataatgcttgaattaattcatatgaacactgattaaaaagtaattggtgggggttgtgggtccttacaattgtcttagttgtaatgatccaaaacttagaaacttggtttttacttccatctgcccgaaaaatctttaagcctttctttggtttggttgggtaaccctcaaccctagtttttcggaaaagacaaatatcttctctttaatccggggaaacttggtccgaattttttttaaaaaaacataaaaaaccct

SEQ ID NO: 172010 - DNA, 456 bp, Arabidopsis thaliana
acgactcactatatggaaagctggtacgcctgcaggtaccggtccggaattcccgggtcgacccacgcgttcgcggacgctgtgggcggagttagagagagagagaaagatatagagagaacacagagaggcgagagcgacgtatggttggtgtttcgtacggattttcttggtcaatcttagattcttcgtcgagagattgcttttaaggaatcattattgtgagaaagagaagacggatgctccatctgaaggaggtgaatgttctgggtctcgtgaagattgtcattcttagggggaggacgtgtttacagcgaggtgttttaaagcagggaggaggacaccacaaaggtggaaggtgttatactccgtaactctaacaagaaagggcgatggtgtttatgtatttggtcgtccaccatatcggtatcatgagttttgttgacccaagagttc

SEQ ID NO: 172011 - DNA, 490 bp, Arabidopsis thaliana
  unsure (1)..(490): unsure at all n locations
ttactatgacgtcgcatgcacgcgtacctaagcttggatcctctanaccgccggcctttttttttttttttaaacaaaatttcaatgcccattcttgaaaccaacgcacaaggattcatctaaaaaatcgaacaatcatataccccttaatgattctaaattacccaaacggaaattaanaagacattaaaacttataatcaagggtggagaaaatttcaagagagaaaaaaaaaaataattcacttatcctctggttggatctcctcctttgtgggttcataagaaaacttcgtaattaatccaaccaatccaccccccaccaaaagtcccgcccaataaaaccctaaggttggtccctttcacacttaccacccgttgtctccaaaccaccgggcgaattcattgaaggctccaaaaaaaagctccttccacctaataattttttctccaccaattaaacccatttcgataggaacaaattgtcccaa

SEQ ID NO: 172012 - DNA, 455 bp, Arabidopsis thaliana
ctcacagttaggagaagctggtacgcctgcaggtaccggtccggaattcccgggtcgacccacgcgtccgtggacgcgtgagatggcccatgggggtctggcatgagagaagataaatataacgcctaggatctggcgcggcaaatacataagactgggccgaacatattgaaccgctcgtacttgtgccttaaacgcggagttgggtgcgatatttgttctacgatctttggagcccgatcgtgatgctcatccttggatggcaacaagctcactagaagctgagactctactccttgtaggcctcgaagctgctcggcagtgctctggctatgctttctaagacactagactagatgaggccaacattttagtaagacacagaaaccgtgaatgcactttcggtgcttttaatggtggttacatcactattgtctgtgtatgctttactagat

SEQ ID NO: 172013 - DNA, 482 bp, Arabidopsis thaliana
gtgacactatagaagagctatgacgtcgcatgcacgcgtacgtaagcttggattctcttaagcgggccggccctttttttttttttttttttttttttttttttttttttttttttggaaaaaaaaaaaaaaaccaaatgggttattacttaatgggcttaaaaaagggtttccaccccagcaaaaaggtcattgtccttaatttacccttaattttcccaatccattcttttcaacgtttaatattccttgaagggaccaaccggaaaaaaattaaagcccctccatttttttgataaccttttttttgcccaaaggtgctggaaccactgttcttgaaccactggaacttttccttcgggctttttttttttttttcaaatcgttcacagttcaaatgatacccatcgttttgtatattggttttggaaatggcctgtgtttaacaatgcgcttaacctcaaaaagatccttgtcccggt

SEQ ID NO: 172014 - DNA, 500 bp, Arabidopsis thaliana
gggcacactatagaatagctatgacgtcccatgcacgcgtacgtaagcttggatcctctatagcggccggcccggggcctttttttttttttttttttttttttttttttctttttttttttgtttttttctttttctcgggtttttttttttttttttttctgtcgggggtacccacccttttggaaggaactttttagggggggccctttctccccggagggggaggggaattaattttccacccctttataaaaaaacacaacgaagggcgcctttttctttttcccccccccccgatagggggccggagaagaaaaaactttttctttaaaaaaaaaaaaaaagagagtgggccaaaagaaaaagcgcccccacccccccgggggggggtttttttctaccctgggaataccccacccacccctctccgcccaaaaattttgtgacgccctttttttaggcccgggacatatcggggggggctctcttttgggttt

SEQ ID NO: 172015 - DNA, 472 bp, Arabidopsis thaliana
  unsure (1)..(472): unsure at all n locations
aaggccggcggccgcgggcgcgcggggggggggnggtagttacgcggacctccccgactttattagggaacgctggtacgcctgcaggtaccggtccggaattcccgggtcgagccacgcgtccgccccaacaaaaaattaaggttcttttttgctttttaaataaggaatatatatatatatatatatatatatatatatatatatataagagtgagatattctctgggttgcttcttctttaccctttttttgtttccagtcganagctctaaaggttgggtctttgttataaaatttctgaaagagggattttgtttggggtgggggtagagaaagaatcggaaacagcaagtgaaacctagaagaaggtaaatattaaggtggaagaacatttggaaaaagaacgttcgctaaaattaaatttgctaaaaaacttaaaactggaaaaccctgtggttctcaagatttt

SEQ ID NO: 172016 - DNA, 494 bp, Arabidopsis thaliana
aaggccccaggcccccttccgtaggctgggttcctttaaagcggccgcccttttttttttttttttggaggcctggacccacggcccaatatgcctcgagggccacacaaaaaattcttggttcatgtattcgtgccccagtcggggttaaacactactgctaaggtggcatgtttcatttaattcttaggaatacatgggaatttttttttaagcgaagatattaattttagatattccttgctagtccattggatacgaggatgagtgtggtggctaatgatggtacccaagagcaaaactcctgaggtgaagctaaagtccgtcttgaagatcaccgtatacctatgccggctctatttttgcgaccaagttcttcactcaaaatccttccattagtgaccatatctaatagccttttacaattgctccttgattgactgctcttaccaaaagcatgaatatggactttgtgctttttgaactttgccaag

SEQ ID NO: 172017 - DNA, 438 bp, Arabidopsis thaliana
  unsure (1)..(438): unsure at all n locations
gactttatataggggacgctggtgcgcctgcaggtaccgggcccnaattcccnggtgggggccgggggtgcgctttcctacnaaaactcaaagagacagtggccatcaaatccatatttatcatcatcatcatcagcatcatcacatcaatatctgaactttatgctttggatccttcggttcttcggctttcgacctctctccaagggtggggggttcctcaagagggtggggttggaacaacttcgagggcttatcagagggaaggggcacccaacgttgatggaagagaaccaagcgtatgggatacgtttactaaacaatatccagaaaagatttcaaatgggagcaatggcgacgttgcaaaccaatttattaccggttaagggggggcggggcacatatgaaagaaaaaggggtggcctcatttaggggttc

SEQ ID NO: 172018 - DNA, 348 bp, Arabidopsis thaliana
  unsure (1)..(348): unsure at all n locations
atagnnagactttgacggcgcatgcacgcgtacgtaagcttggatcctctagagcggcctgcccttttttttttttttttagaagatacaaccacggnctactatgttgagctgtacagatccttgcgagttaccaccagtgtccataccttcttaagtcaggattgacagatttgtctcggttggcttgtatcagacaaaaggataagtctgacctgtccctaatttttttttagagtaagggagctactccattaacagcctcattttaaatgtatacttacgatgttgacaaggggtagaaaaaccttattactttaataaattattttggtgggtttcgtttta

SEQ ID NO: 172019 - DNA, 590 bp, Arabidopsis thaliana
  unsure (1)..(590): unsure at all n locations
acgactcacatctagggagagctggcacgcctgcaggtaccggtcacggaatacccgggtcgtcccacgcgtccgcgtttttgctgcccaagagcacaaaggaactagcgtcctctttaaagtcctctcggctttcgctatcagagacatcagcctgaccaagatcgagtcccggtctcaccataatcgaccgcttaaggttgttggtgacaggagctatgttttttttgaagaagctncgactacantgttataagtggtatttagaggtcatcgacgagctgaacccagcgtgcacagaaaagccgnttttgcttgggttaaaagatgaccgcgcgtttcttagggaggccgggaattacccccaatggtttaaaacccaaggcccttgggcttcccataaaaagggggaaccccacagcctaaaaaaaaacaccccctaattttttaaactttccccgcgccttcgggttccggggaaatacggtgaaccccttaaaaaaaacccaaaaatgtaggcgcaatttttagcggggcgtatggcaaaaaaaccaattaacttggtgggggcccctttgcccattccctta

SEQ ID NO: 172020 - DNA, 415 bp, Arabidopsis thaliana
  unsure (1)..(415): unsure at all n locations
agggaacgctggtacgcctgcaggtaccggtccggaattcccgggtcgggccgggcgggcgattttctccctcaaaaggctctgttttttttcctttttccggcgaagctctatttagcttgattccggcgtttaacacgcgttttaatcgaaacagacatttgagatccaattaattntgnaccgggctctctcttggggagggatggananagattttctccggaaaaagatcaaaaaattctccgatcactggaaggggggaacccaggaaagctctanagattcacctccccaacgaggaaaggaactgggctttctcaaacaaaggatcagcgttcttcttctgcagttctatccttcaggccaactcaagagaaaaacctaggaagggtggaaatatcatcttcctcac

SEQ ID NO: 172021 - DNA, 465 bp, Arabidopsis thaliana
  unsure (1)..(465): unsure at all n locations
gcccgcctcctaagcttgtatcctctatagcggccgggcttggtttttttttttttttaaattgagcttactcaaaaattttatcctgtaaaaattgacccttgaatttgcggaacaaaatttttaaacaaaaatttggaaaactcgctttttcccaaatggaatgaagaatcctggggaaacatatcaggggtgggtggctctcncggccccaaaaaaaaattttnaactttcttactttttttttgcattcaccggacccgttttctcgcgacccctggagcaaacccttcgccccacccaaaaattccaaactttccttcaggagtaccaattttcctataaaaaagcctaattaaaccttgcccaaaccattggcatcacctcttctctgtggaaatttttattcccccccaatccccccaaaacatcgacgccgaatctctaaattaaaagccccggctc

SEQ ID NO: 172022 - DNA, 449 bp, Arabidopsis thaliana
  unsure (1)..(449): unsure at all n locations
gacttatatagggaacgctggtacgcctgcaggtacccgggtccggaattacccgggtcggggccagggcgtgcgcccacacgttcncggaaagccggtaccggtcaatgcagatgagagtgaacaaagttcaaaagcattttctgtggcatgctaagccagagaagtatgatatgtttcacatgattcttcattcaattttttataaccggggggtggcgatttctgtttaaaaattttagtaaacaattcaatgtacattttttacagataaaaattctgagtgaactccctttacaaaaaaaaaaaaaaaaggggcggccgtttagaggatccaagcttacgtaccggggcttgcgacgtaataaattcttcttttggggcacctaaattacattccattgggcgggggtttacaacggcgggactgggaaaaccctgggctttcc

SEQ ID NO: 172023 - DNA, 416 bp, Arabidopsis thaliana
  unsure (1)..(416): unsure at all n locations
ggtgcactattgaagagctatgacgtcgcatgcacgcgtacgtaagcttggatcctttagagcgggcgccctttntttttttttttttttttttttttttttttttttttttttttttttttttttnnaaagagggcccctggaaattttttttttacattaacctttcttggtttttcacggtggtaccggaaggtggccaaaaaaaagggcattcccaagcccaccttaaggggggccttttcttttcttttctttttcccttcaaacccttgtttttaccaaccccttcctacatttttttgagcctccgctatttttttactttgtgacccacacaatgtttttaaaaggggaaaaatgtggaaacgggggttaacttgggttcatttttaaaacctttaaagcttccttaa

SEQ ID NO: 172024 - DNA, 535 bp, Arabidopsis thaliana
  unsure (1)..(535): unsure at all n locations
acaaaatttatgacgtcgcacgcacgcctacctaaacttggatcctatacagcgctccctcatgggttcgagctgttttaaaaatattacaacaagcgatttctaatggaatcctaataaagtttacaaaacacttaacaaaaacccaaaatatctcactaaatcctacattacttaaacaaatacttctaattaaccaacaaccacttcnaaaattttttttggtgttgtgaacccaacacaggtatctttttaaaaaaaaaaaccaaaactctggaggggggaaaacacccctcttttagcttttctcccttctcctccatagaatactaatagcatttctaaattccattattggccccctggttcattaatttaaccacttctcaaggattaaataccacctttaaccttaactatcactattttttaaatatggagaaagacttctctttccccttatatatttaatgggggaaaaacccccccttctccttcctctatcaaattgcaagaacacccccccctttccccc

SEQ ID NO: 172025 - DNA, 284 bp, Arabidopsis thaliana
  unsure (1)..(284): unsure at all n locations
taagcttggatcctctagagcggctgctccattgggtcgggcgctcttaaatacttttccgaaatcatgatttattcatataactattaattcaaaatttcagcttcacattacacattctattgttcaaaatcattacactctcaagctaaagtaatccccttcaatattaacctatctcctcttaatctccggggggtganttntccattgacttcaacctcataaaacattctctttacctcgggaaccaaaacctttnctntcttctcaatacctatgga

SEQ ID NO: 172026 - DNA, 516 bp, Arabidopsis thaliana
  unsure (1)..(516): unsure at all n locations
acgtggcatcgccgcgtacgtaagcttggatcctatanagcggtctcctttttgtgggttgtggttttatgaatcaaaaatcttattaaacaaanatnaaaactacactaattttaacaacataaataaccaatatntgatgtgcattgcaaatgcaaaaattataaaggcacagctggtaaagttttggaaatacatacaacaaactcactcccgggggggggtctaaaanacagggcaagaatttaaagaacctctggatcattttaatttccacatttaccaagagttcatatgcggggaggaccctcacatgggacttcaaactcacaggcatttacaggacaaaaccaatggttcaaattgaaatggtgcgactggaaataatttacaaaaaacgagggtgccgtttcaatattaccttagatgaggggccccccgatttaaagatctcgcgtgatggtaaagatcattccttccccacaaagatgcaaatattatgggccagaagaaaac

SEQ ID NO: 172027 - DNA, 370 bp, Arabidopsis thaliana
  unsure (1)..(370): unsure at all n locations
atttttctaaactattaacatctttattaacagagaaaccttgttctaacaaaaccattttttaaacacaatagaccacttaatcaaccttcaaagagagacaatgaataactgaaaaaatgcctcataatctctttgnagggtgcaaacccaaattttatctatctccattaaaaaacccctccaataatgattttctnntntcccctanctctaccaattcttcttaacaatcttanacttttaaaatataaaccttccctccttttacttttttaaattctaaaaaaaccccttcctattttcaacccaattnttcntaaccaccaacacaatttttatccccccccnctttttcaccccttaaaaa

SEQ ID NO: 172028 - DNA, 510 bp, Arabidopsis thaliana
tgacgtcgcacgcacgcctacgtaagcttggatcctctagagcggtcgctccattgttgtcgggttattacaaaaatttttaaataaaattttttttttaaaaccacaaaccatttttttattcaaacacttggtttttccactaaaacctctttaaacattacataatcaaactttattcccacccttttttctttttcccaactctttggtgggggggggaattcccaaccggtaccttcaaacaaacaaaatttccttttattggagacggattacaccttttccaaatcatggccactactttttcctgtgggaaattgtatacccttaccatttcccaaaatttaccgcccggaaaacataaacttttataggcggggtggcctaaaagaggaaaccaaccccccattaatttgcctgcccaaacttcccccttttaaaatgggaaaaccctccccccccactttcattaaaaaaaccccccccgccccggaaaaatccccttcc

SEQ ID NO: 172029 - DNA, 479 bp, Arabidopsis thaliana
gtggcatcgcacgcgtacgtaaccttggatcctctagagcggtcgctccatgggttcgggccgttgttataatacatacaaacactggaagtgttataaattcaaagtgtgtgtgagttttacaacattagagagagtgggaacaacgctgatacctttatggaaacatgattccacatgctctaacaactttaagatttactgtaccaaagggggggggttcaccacaggaagagcaccttcgacaagaattccggcgagagttaccacccaaattgccaatccggtgactcctttcttggacacgtgaccactggggtgaccactcgttctcgttggaaataggactgtgtccatcgacgttagctccatactggacgacggtctgtgaaacaccggatcctttagccttattggcagaggggacgacgcctcccctaaagtccatgctgccattaattgcgaaaggcttgtcggat

SEQ ID NO: 172030 - DNA, 415 bp, Arabidopsis thaliana
gacgtcgcatcgcacgcgtacgtaagcttggatcctctagagcggttgcttatgtgtttgtggttttttttatttttttcaacaaacaacaccctacactgtaggaagaaaaaccccctaaaactatttaacgggctggtattttttatccttacaaatggtgggttggtcttctagggggggtgggcatgttaaattttattttcaatggggggggttttcatagggggggtatttgtttattttttttcttggaggggagccttctgggctgtttttaaatttttgctttttatgaccctgggggtggcggccatttcattaggctgtgtgcttgcacgcttgttctaatcttaaaaactctttgttttcttatgcaacaccatatttaaatttactgcttggggagggtggg

SEQ ID NO: 172031 - DNA, 486 bp, Arabidopsis thaliana
  unsure (1)..(486): unsure at all n locations
tgacgtggctctgcacgcgtacgtaagcttggatcctctagagcggtcgctctattgttttgggcttttttaataacattccttacaaaacacgaatgtgttacacagggtgtttcaataccaataacccaatggtggtgaaagatggaaatttttggcgatacaagagacttaaaaacacatggagatgttgatcacctcancttattttgtggggggggaacaccttttttttgacccgttcacacaaatgttcatccangttggtgtggggtgcctcacaggacaatagtccttttattaaaaaacctggggtggctacaattgtcaatctacgggtctagacacttttgagtttcaactccttgaggagtttttattatttgcaaagccaaaaaggggtgaaaaaagggctcccccgttaaggggttttaccccaacagggaaatgtttgttttaccggagaaaatggtgtttttactaaga

SEQ ID NO: 172032 - DNA, 490 bp, Arabidopsis thaliana
ggtaacacttagaagagtatgacgtcgcacgcacgcgtacgtaagcttggatcctctagagcggccgctctatggggttgtttcttttttctttcttgttgaaaagaattatcccttgtgtcggcttctagcagacgaacccttgtgtcgtgtgtcacaagcctacccttgtgtactgttgtcagaagcctacccttgtgtactgttgtcacaaccctacccttatgtactgttgtgggaagcctacccttggtgtctgttctcacaagcctacccttctgtcgtgttgtcacaaccctacccttgtgtcggcttctcagaagacgacctttgtgtcggcttctagaagacgacccttgtgacgtgttctagcagacgacccttgtgtcggcttctagagaccacaccctggtgtcgttttctagaaaccacacacttgttaattcttctcgcaacactacggacgcttgggcggacgcatggggccacc

SEQ ID NO: 172033 - DNA, 507 bp, Arabidopsis thaliana
  unsure (1)..(507): unsure at all n locations
gcacgcctacataagcttggatcctatacagcgttcgcccttttgtttgggctttattaacacaacacaatncaaactaattcatttcttcttattttctcaaagggtcatatctacatctattggtattgactgaatcacctaaacagattaaacaaaaacctgaactatgaaaatcttaaatacccncccttatttatggggtggtgggccaaaatctctctttaatttacaataaaataattccacttttgggccagattctccctaattccaagatattgcctttttctacacctgtgcggatgggacccctcacctgatgcgaactgtaaaccccattccttcatcctaatctgatgaccctcccgggctgttagatgacagattggggtattaaatatgcgtcgcacacatttgcgcgttcgctcccaagggccggccctagaatatttactgccacaatgcccagagggcggttcccaaagacgacccccctcgttcacc

SEQ ID NO: 172034 - DNA, 242 bp, Arabidopsis thaliana
ctctatacgactcactatagtggaagctggtacgcctgcaggtaccggtccggaattcccgggtcgacccacgcgtccgtcttcttgtagaagtcagaaaagacaactgtgatgtcctcctgctgtgatcgccccttttgctatacctgcgtacatgtgttgcttgcgctatgtgcggcggggatcgcactgaattcgacgagactactctgctcgaatgctgtctgagcaggacttctgtt

SEQ ID NO: 172035 - DNA, 510 bp, Arabidopsis thaliana
ggcacgcacgcgtgcgtgagcttggatcctatagagcggtcgacctatgtgttttgtgtttaaaaatcttgaaatttcggatttaacaaacaacaatgtttgtccttacacacatgtttggtagacgaccatgcggggacacaattgcgcaccttaaagatagcctgagcgtagaattccgcggtttgacatgtatggctattctgaacaggggctgtgttgagtaggacactaatgcggtcactgagactacatgatgaggagcttggaaaaactacgggtttagggcgaaggttgtcttcaataagatctggatttgggacacggaatcacccttaaaagcaggttgcataccggatacagataaaacgcatggaccataccttccggatacatttaccaggcctgtgaaggcttcaggttgtctccacatgctatataatattgggagctgataccacccattgtgactaaagtagggtggatgtcccatgaacgacatgtgtgcaa

SEQ ID NO: 172036 - DNA, 526 bp, Arabidopsis thaliana
  unsure (1)..(526): unsure at all n locations
aggtgcactctagaagactatgacgtcgcctgcacgcgtacgtaagcttggatcctctagagcggccgcccttttgttttttttttaaaaattacaaattaactctactatgttaaccagagataatcagagcaatacataagagagactcaaaaaaaaactatgtccatggattctagagtttctgagtaatgtaatcatcaatcctggaatctctggtgggtgttgctgcctggagagggcanatacaagtttggggatttgagagactcttcttccttcctttggattttttaggatctcattgctttggctctgacgcagctagtttacgctctactactcggcttcttggcgaaagattcaataaaggggaacatccaacgatctaacattgctggcaaagcaaatgtaccgactaatacagtgcaaagacgagcgattaagtggagaaaactacggcgttcctccttgatggccacacggttgggtgaaagatcatcttagaagtaaacagctggccatg

SEQ ID NO: 172037 - DNA, 440 bp, Arabidopsis thaliana
gacgtcgcatccacgcgtacgtaagcttggatcctctagagcggccgcccttgtgttttttttttttttttttttttttcttttctttttttgaaagctttgtttttttcattttttctttttgattttttattgatgtcaaacaaaattgtttttcccactttggggaaaagatttttgtcccctgttaaaattttttcattttttaaagaggggagggacccactcatgggctttaaaccttttcatttttaaaggttttttttttccaaccaaccttccccaaatgggaaaccccttttaactaatctttcttagcctggaaattttttattgaagaaacatattttttaacccctcccaaaggtgtttgtttaaaaataaaaacttttaaaccccccacttattttttttcttagaccggccccttttttttttta

SEQ ID NO: 172038 - DNA, 406 bp, Arabidopsis thaliana
ctctcacaagaatttatgacgacggcacgcacgcgtacgtaaccttggatcctatagagcggtcgacctatgggtttggtctttttaataataattttctgatttccctgaatccaagtaaatgcctagaggaacaacaacgaccattctttctaggtgggatattaatgcgaagcacgaggtactgttaccgtccaaaaatttcagttggattgcataactactctaaaagggggagtttaacctactcctactttactatactgtaaacctacacctctgtcagcgtactatagcatgacagttataactaaatcggcggagaggatttatgcgatcttatctgcctttcgatcagttataacataaacgcgactcgcactattttaataggaagtaaacaaat

SEQ ID NO: 172039 - DNA, 519 bp, Arabidopsis thaliana
tgacgtcgcacgcacgcgtacgtaagcttggatcctctagagcggccgccctttgggttttgtttttttttttttttttttttgttgcagtttcgcacagtaatactgtatttgatgagtttcattaaaaaaaaaaaatagtaaactaggggaatcctcccatggccgttgccttgggtgcctccgggggtggtgaaggtaaaacggttaacgcgggggtccactaatcgccgctgcaattgctgcaacgataaacgccggtaagtttccaccgccgaacaaggcgtctaaaggtccacctcctagtgagactatcattggtgggatcacaatcgccaaatttaaaactcctaaggaaagtccttggcctgcaccggagcagattgagaatatggctgctagagcaaacggagttctgaaagtaatggctaaggggataccaagaacacgaaagagacttaaagctccagctttaacactagcgctgggaccggttaaaacaccggcggttttccgggg

SEQ ID NO: 172040 - DNA, 554 bp, Arabidopsis thaliana
  unsure (1)..(554): unsure at all n locations
aggtgcactatagaagagctatgacgtcgcatcgcacgcgtacgtaagcttggatcctctangagcggcctgccctttgtgtgtttgttttttaggcatcatgtatatagacattaagaccacaggtttctcatgtatatgtcatatttacaactatgttgagtacgcagatgagattataataagtgatcagatctctctttgggctatggtcacaaagggtttttgttgtacaagccggggtggtggtttcactggctatgagttagctgcaaaatgattgaatatggtctcaagtgtggattgacttatactgtattcagctattcccagccgattccgggttctttcaagatgtccaaaggcatccgcaagtgacaatcctccttctccaaatggcaactggtacttgatactcagtccattgcagcttttgaatgttgcaccgggaaacgaagattgtctgaaagaatccaatgctgagaacttttctttggttagccaccactcggaaaatattggaagtggaataccaccatctcgaaacagctgct

SEQ ID NO: 172041 - DNA, 417 bp, Arabidopsis thaliana
  unsure (1)..(417): unsure at all n locations
gacgtcgcatcgcacgcgtacgtaagcttggatcctctagagcggttgcccttttgtttggtgttagnaacanacccatttaataagaaaaatcagctactttttttatatgaccttaacccttaaaaaaccccgaggaccacttagggggctttttttcaacggggggggggttttatttttttcaaaaataaaaaaaaccccccttttaaaaaaagacccccccccatttttcccaaaactttttttatttttggggggggggggggccaaaaaaaaaaaaaagggggggagtctcccttttgaaaaaagaagagggttttttttttggtttatgaaggggggggggtagcctcctcaaaacaaaacctaaccgggtgggcggccgccgaccgaaaaagggaccttcaaagagaa

SEQ ID NO: 172042 - DNA, 541 bp, Arabidopsis thaliana
  unsure (1)..(541): unsure at all n locations
ccccccccagattgtttcaggtggcgntcagcagagctangacgtcgcatccacgcgtgacgtagcttggatcctctagagcggccgccctatgtgtttgtggtctcttattttctattttgtggtggtttctacccgatcaagaattattgttctacagcacttttctatgccatgaggagcgatgatttctcgtcattgtgtgggcctgtgatcnangaagacaagcaaataagcgttcgtaaaccatttttgagggggggggctattacaagagaatgcatcttgtggaattcttttattttccttaaacagaatttgagggcccgtagaataatatagaaacgagaaggggaataaacccccgctcaaaaaacaagagttaaggggtaatatcacgctatgggcctaaacctatcttgtataaaaaagaaagagaagggcaaagacacgtttggtatataaaaaggccccaccccctcttaatttttattggagagtacaaaacctacacccccggtggtttcctatgtaactgggg

SEQ ID NO: 172043 - DNA, 478 bp, Arabidopsis thaliana
  unsure (1)..(478): unsure at all n locations
caggnacccggnccggaannnccggggtttgacccacgcggggcgatcacacacaaactaaaccggaagggccaccggcgacgaattttccgactaagatacatcaatcgatagaagaagaccggcttaacgttaacaaacacctgcgaaccaatactatcgagcttggacatccagagacgccgttgaaggctttttactcggggtggtcgtacactcatccccttaagcacccgtattaggtcccgaacctcacccggtgggaatgacttcgaagcatggtggaggtgggtccattatctatgtgccatgaattgggccaaggggtttttcataacccgttttggtgactcccgtgtgccgttccgcccttgggacgtgtggaacgccggttacgctcacaggaatatgcatcgtgcgttatatgttttcagctgtaggctttatttttaccttataagacttggatacttgcggg

SEQ ID NO: 172044 - DNA, 485 bp, Arabidopsis thaliana
acgtcgcatcgcacgcgtacgtaagcttggatcctctagagcggtcgccctttgggggtggttctttatttttttaaaaccccatcgatgttgttggggacatcaaaagaaaatattattgcaatttggtcggaacacaacgtcagttaacatgggaaatctggcggtcgcaaatttagatattgggccgcttgctaagttttacggtaaaaaatgggtgggtctaaacggattttccatgttcaaacttttttgagcttatttcatcgggaccatcccagcgctaataagtttttgaatcttggtcataaccattggattttgcatgtgcttttgggctgcgcttggattctcttgaagatcaggcagtacctgttatattacaggatctggggggaatttatggattactgggtttgggattccctttgccggtctttattaaaattcctaagggggtagggctcccggggtggcctttttga

SEQ ID NO: 172045 - DNA, 509 bp, Arabidopsis thaliana
gcgtggctacgcacgcgtacgtaagcttggatcctatagagcggtcgccctatggggtcgagttttatcgattctacaacattatttttgtttaccagatttgatagattttggaagatgacattatggtttggggggaacaaaaggtatatcatggtgatgaaagagagcatctcctatcgttaagctatgtaagactcgagatctaaaagactggggggtggaaaatactgcttggaagttttaatcacactcgtagagttgaagccatataaagggcactgccattcatatgggaacaaattaaacggggggaaaaccgcttgcgtttcacttttttccctgaaacaagtttttagcgtgcaagtctggagaaggttaaagatgaggacagggtttttttatcaggaatggatttccaacggcgcttaaaaaccttaatgggttcttccaaaaattttgaaaatctgggaaaaaaaattgtgtgggaaatttaaaaaaatgggggg

SEQ ID NO: 172046 - DNA, 395 bp, Arabidopsis thaliana
acgtcgcatcgcacgcgtacgtaagcttggatcctctagagcggccgcccttttgtttggtctctttcaccttaaaaactcctttaaaccttttttttcttaaaatgtctattttttggctcgcaaagaaaaacggcgccccataggggggattcagcgcctaaccaaaactttttatatgaacactctcctttcaaataaaaaccttccttagggggtggaataacggagggaagatttgggccaaacccacaaccgaaaaaccgcggggccgggttattccaaatggaacaaaaccccttgtgcccaatcaactttgcatactaccaatatgcgggcaaccctgacttctctccctttgtatgaacacaatatgatctttgagaaactggtta

SEQ ID NO: 172047 - DNA, 526 bp, Arabidopsis thaliana
  unsure (1)..(526): unsure at all n locations
ggtgcactactagcagactangacgtcgcatcgccgcgtacgtaagcttggatcctctagagcggccgcccttgtgtgtggggcctttttttaaatcttaaaaaaaacgggaccagattttatttcccgttaaagcatttttaaactgtttaaatttaatacacaaaaacactacaaacaaccactaggaagttgcaatgcttataagggatcactcaagtggattgatgttgggggggcaataanccaacacaccaaatatanctccggttagctggaaaattgagcaaaccaaactgggtggttaatgtcaggcatctccccaagcattttcccgttgtttctgtcttgagacaatccggtttttccgggcagggttttgggctcgctctttagacccaaatacagaagcggggagcttaaatcccatgctgtaagcaatcaacccgggggctggtatcactggtgtctttgggcttttaaaccggggggtcccaatttttttccaaaaattgggcccaaaagg

SEQ ID NO: 172048 - DNA, 472 bp, Arabidopsis thaliana
acgtcgctcgccgcgtacgtaagcttggatcctctagagcggcctccctttgtgtttgggctcttttattcttcttctcctcctttttatccttactttttttttccatatctttttcttcttcaacaaaaaaaaaaacttttttttccccaattaaccacataaaaaatttttttaaaaaaaaaaaaaagcgggggcactttttttttaactggggggccaaaaaattttaagggcccttttaaccaagatttttttcctatggggggggtgtgaaaacaaatctctgctcccatgaacccaaccgcgttccgcggaaacactaacacacctagggggaaatttgtaaaaataatttttttctcctgaaaatttaaagaacgcggcccccttctttcttaaggtgctggggcctaaattttactttcaccggcttctatctttcttacccccaccaagggtactcgggaga

SEQ ID NO: 172049 - DNA, 521 bp, Arabidopsis thaliana
attgatccaggtgacagtctagtagagctttgacgtcgcatgcacgcgtacgtaagcttggatcctctagagcggcctccctatgggttcggggctatttaattatcactcttttttcttttaaagagattttgcatatatttctataccagcaggggaaacaattatttggaaaacattttggtgattttattttgggacgacccctttttgtttttccaaaataactggaaaattcattgtgggggggggccacatcttctttgtacacccatttattaatgggctccgggttttaaaaatatagtttacactcgttagaaccctttttggttgacaattcccaacaaactttcggtgaagtggtggggggtcccaatacaactggggtctaaacagttgtttgcgggggtgctaaaatcccccccaagggcgtgaattttatttgggaggggcgcaaggttaaaaccaaaaaattacttttctcctggaatgggcctgccacacctaggaccccttca

SEQ ID NO: 172050 - DNA, 493 bp, Arabidopsis thaliana
  unsure (1)..(493): unsure at all n locations
ccccccccccgattattantaggntgacagtctcacaagagctatgacgtcgcatcgcacgcgtacgtaagcttggatcctctagagcggtctcccttttgttttttttttgcaaatggtgtgtatatttaaattaaaattgtatttacattttttccaacttgtaaatgtttgtttctatggttaaacatttgtatatatcaaaaacagtgacaaataacaaatcaaaaatgaagaaggtgggatataaaaaggatcagggggggattcctcttcttttctggacgactacttgaactgctccaacaaaacagaaaaggatgagttccgatcaacgggggagattgctccgaccagaattcttcatcttattgttcctcttctttcttcctaacaatctaacctgtggcctctgtttcaacaccgaagggacttacttttgggtcatctttctttctgagtctatccaactattgatggaggggataactct

SEQ ID NO: 172051 - DNA, 522 bp, Arabidopsis thaliana
  unsure (1)..(522): unsure at all n locations
acgtcgcatccacgcgtacgtaagcttggatcctctagagcggcttccctttttttttttttttttttataataagaaactgttcaatattcaaatcggaagggtgaagaagagagctaaaaattctatttactattgctaaccaacaaacacattacaattttatcataatatttcaagatcctttaagtatgattctcctaatcttatgttggggtgtaccaattnatttgaaacaatgcaatcataaaaccaatgtcattttgggcaccctatttcttcttctccatgacgcagtatgatttaggccaaaaaaacttaaaactacactcatactaccctgttaatccctggatttcttgccaaattcctctaaagggaaccccctccaaaataattttttttttgacccggccaaaaaaatctgtcaattatccccaatcctttcgcttttcgcccacccatgaataatggccttctcattacggagctaaaggttcaacggaattccccctcttcttt

SEQ ID NO: 172052 - DNA, 486 bp, Arabidopsis thaliana
  unsure (1)..(486): unsure at all n locations
acgccngcaggtaccgggccggaattcccgggtcgacccacgcgtgcgggccagggtaccttaggtaacgtgatgagtaattgcccggattacgggagtggtgcaaatcacgtcgagaatactctggttcctccgtcttggaattgttctccaaattctgcgtgtacattccaatttggggcagtagaggatgattttcttacggggggggggccatcaaactcggatggggcctcagttaaaatccctgtcgacccgttgtttctgcttgcttccttatcggttagatggttttctcatattgacgggttggttccagatgaacggtcccggaatgtggggctgcatactggaggtttcccggagttcgctcagccctgcggagagcatcttcaggcttgttagcccgcgcggtgggatctttggtctagcatgaggtgttcgcggagtcgagtgaattaggtatgcgaggtgtgtgatattcga

SEQ ID NO: 172053 - DNA, 301 bp, Arabidopsis thaliana
  unsure (1)..(301): unsure at all n locations
cgtaagcttggatcctctanagcggcctccctttttgttttggttcctgcaacataanattcannattnacaaanagaataaacaacaagatgagagcttttgtctttgttgagtgagtcacaatctacaaccacagaagggacgaagctaatatgtccacacagttacaagcctaaaagaagctatacccttgtgggggtggganaaaaaatgggggggctntactaaaaaacacccccccaatgccgggggcgcggctgattttatctagtccttcccatttcccgtggattctaactc

SEQ ID NO: 172054 - DNA, 155 bp, Arabidopsis thaliana
  unsure (1)..(155): unsure at all n locations
gaaagcnggccacgcctgcaggnaccggnccggaatacccgggttgacccacgcgtccggacacgcgaaacgataatccattgtactggtctaagatgtcagggcgacatttaactcatgagccctccttacaagcttacttacaagaacaaaag

SEQ ID NO: 172055 - DNA, 516 bp, Arabidopsis thaliana
  unsure (1)..(516): unsure at all n locations
acgtcgcatcgacgcgtacgtaagcttggatcctctagagcgggctccctttgtgtttgggttctnggaacctaatatattatcaaaccaattttcaaaaancttacaatatttnataacccaagggacataattaccaacaggaaccaaacctaaaaaaacacaaggaaaaaaaaagtgcgaaaaccaaaaaaaacaaaccatcgatttttagggcttgttgggcaacacatatggggaaacctttttaaaaaaaccccaaaaaaannnnnaaaggcggcttccgccccccgttaagtttgttagttagggacacaccaaaatttactttgacccatggggccattggcccaacaaaggatttaacaacaaacccaatcctcgtgggttttataccttcaaccacaaaaaataccgaaaaaaacagagggcgcgataaaacagattcataaatatcccccaaaaaaaaagggtgtggaactggcaccccccgcggaaaatttctgaacccggggg

SEQ ID NO: 172056 - DNA, 494 bp, Arabidopsis thaliana
  unsure (1)..(494): unsure at all n locations
ggatcctatagagcggttccccttttgttttttttttttttataagttcaggccaantattnaaaccttaaaccaaaacacataagagttgtccaatttaattaacatctcattttaacaaaacaacacctaagagtcttatcaaacaggatcataaaccacaaccatgtacccctaattgttatggggtgggtcctaaaaccttccccctaatataaaaaaacaaaccccccttacaaaaaccaattctcctccctaaaaacccccattactttaccatanncccatattttaaatccaccctcntcttttcctttacttcttaagggttgggaccccccaatcataacaatcccacttgaacttccccaattttggcaaaaatttttttttttgggctaaaaatcaagtccctcattccccatattttggaatatccccccttcccccgggggtttaacattccttaaaaacccctcccatagccccaaggc

SEQ ID NO: 172057 - DNA, 530 bp, Arabidopsis thaliana
taggtgcaacttagaagatctatgacgtcgcatgcacgcgtacgtaagcttggatcctctagagcggccgcttttttgttttttttttttttttttttttttagagaaaaacctttacttactctaaatgtcatcgactcattgaaacacttggttcttacaaaaaagtaatcttgcccaatttctcgtttggttcgaatcttgaaaaaacacccttgaatattcctctcagtttagcgaagcagatgtcatcaaagtttccttgccgatctggcatgatactcatgtttcaggaggttggctcttaacagcatcgccctgacatctctatcgaattcgtttcccatctgaagtaccttttggaaagttgcattcctctgatccgcgtgtcttgcatagaggattctgttgtgtgaatcaatccttgcctgaatctggttgtctgagatcaaggcttcaagttctttctctaggccagagacgctagtcttgaatgcatccgccatcctgctcaatcaacagagacaaat

SEQ ID NO: 172058 - DNA, 440 bp, Arabidopsis thaliana
taggtacaactatagaagagttatgacgtcgcatgcacgcgtacgtaagcttggatcctctagagcggtcgctttatggttttggtttatttttttttttttaacaaaaatccatcagaaattagaacacactaaaagatatcagtgcaaagacaaaacacaacaaccagacagaaacacatgaacatataaacatctcatgtttatctactaactgaatccatacatatatgtagatggggaggaaagtatcgtaagcacaaacacaagaaactggtaagagaaccactaatcactgagttgcagaaatcccaaactcgggaagggtccaaccattgtccatggcatgactagcatacagctcaaacttctctttcgcgttcggatatcaagcgacaaggcatcgaggctgtcgttaacacgaccaaaccctttcgtca

SEQ ID NO: 172059 - DNA, 505 bp, Arabidopsis thaliana
tatagcagagttatgacgtcgcctgcacgcgtacgtaagcttggatcctctagagcggccgctctttttgtttttttttttttttttttttttttttgggtgaaaggaacacaatgaggtatatatctcttccattgcttttttttcttttgtttagacttttttttctttatctttgggggcaggtcttttctttttttagggaagggaaaaaagggtttttaccgagtgctcacccccttcttgagggtggtcataagggagccatgagcccaatgggggggccccccccaactttttttcattttgcatttggaaaaaaaaaattttctttctcaggggaagaaagttctttaatcccaatttaaaaaggaaccccccttggcctggcaaattggtggggctcatctgggaccaacaactaatatctagggccgcgtgaagcaatccggagtcaccccaatttccaaggggttcccattggggcgtcttgcaaaaaaaaaaa

SEQ ID NO: 172060 - DNA, 529 bp, Arabidopsis thaliana
ctatagaagactatgacgtcgcatgcacgcgtacgtaagcttggatcctctagagcggccgccctttgtgtttgttctttttttttttgttactttttatttcttgctgtactgatcagaagaaaaaactttgaaggaggtaaaaaaggaacatcctttatttaaatcgccaaggggtgataagaccgctggattgggaacattgcatgttcccataaaagcttttcccctataacccacacccttatccataagggtgctgggcacatgggcctttttttaggggagcaccgacaagaaaaaaacctgattgcaacttgtggattggggaaaatgggccccatatggactccattctgaataaccaaaagacccttttttccatggaacccaaggacctttgtaccgatttttttaagcgcaaaatgttccccagcaagaattcacaacgggtgacacggtctctgtgttgttttgaacattgacacagttcccacttcaggttaaagaccggaagttttttcttttc

SEQ ID NO: 172061 - DNA, 408 bp, Arabidopsis thaliana
actatagaagagctatgacgtcgcactgccgcgtacgtaagcttggatcctctagagcggccgccctttgggtttttttttttttagcaacttattgtttgtagatgaacagacaaagcaaaagatccaattgacttcagaatggaaaaacagctctttaaacaatggctcggagcagggtgagagaggatccagctgtttcctaccaagaacttcggtgcttaagcctatctgagggagaccagagaacatttcgttagaccttgaatgcacgaatctttgggtggcctatagcttgctcaaactagcttcccttatgcctaacatatggcttagggatacatgtgggcacaccaggagcaggttctaaatgcttgactgcgtcacgcgagctctttggacctctaa

SEQ ID NO: 172062 - DNA, 498 bp, Arabidopsis thaliana
gaggaacgcacgcgtgcgtgagcttggatcctctagagcggttgcccttttgggtttttttttttataacaacgtttgatttgattagtactcctcatcacatatctgaaaaagccatctggtgaggaaagatcaattctctaacaaatgacaaacacaccaatggcgtggtgagtgtgtccacatatctgcactcatcctttttttgaaaggggcatagaagctccagtcctcgaccctaaagaacttctcattcattcttgagaacgtaaatgatcttagagtgctcccatcaggctgcacacagttatctctaatttgccttactgccatctaatcaaatcttatcgttagcattgctaccagtcacaatatattgaccacttcttcgaaacatacatgtatgctgactacataatcccttatgggtgcaaagatattttgaaagtattgcactttttgccatatccaacccggggattcagagagcagccccat

SEQ ID NO: 172063 - DNA, 532 bp, Arabidopsis thaliana
aggtacactctagaagactatgacgtcgcacgcacgcgtacgtaagcttggatcctctagagcggccgccctttggggtgttttcttttttttttttttttttttttttttcttttttcttttttttttttttcttttctttttctcaaaaaaaaaaaaccaaatctttttttggggggtgcgccccccaaataaacatttttactaaaaatgccccaaccccctggcatttttaaaggggagagggcccctctttaaaaaataaccccacattggttttttatttaaaccaatttacacccttggctttccccggggttttaacgggtttttctttaccaccggaaaccccaattccccgcgaaaaacactttcactttccggggagtaaccccctccctaaaactttttaaccttttttgctaggataaattgccccgggccggccacattttttgccccggccagattccagggacattaccgaaggggttttttacactccggtcccccggttttttccgtttcccct

SEQ ID NO: 172064 - DNA, 511 bp, Arabidopsis thaliana
ctatagtagagttatgacgtcgcatgcacgcgtacgtaagcttggatcctctagagcggccgcccttgggtttggtttttttttattattgtttttttttcatttaatacatgttttaagatttatggaatttgtaatgttttttttttaagtttgatattgattttgttttgggggaattaaggctatacaatagggaaaattttggggggccttttttttggggggggggggcacattttggaaaagggaattttaaaaatgggtatgccccccaggggggggttgtggggcaaaaaaaacggcggggggaaccacaaaatacacaagggggggggggcgctttcccccccggggggtgttttggctccgcctccttggggggggggcgggcccccaaaaaaatttgaataaaagcctctgtgggcaccaaattgatgagtgggggaactggcgaaaaagctttttcccttacaccaggggaaagaggggaaagggggggggtttatcc

SEQ ID NO: 172065 - DNA, 523 bp, Arabidopsis thaliana
taggtgcaactctagaagatctatgacgtcgcacgcacgcgtacgtaagcttggatcctctagagcggccgccctttttgtttttttttcatattccagcaaaacaatgttgcatagtatatatcatatatgtgaacattatctcattgtggcttgagattctaatctgctttttaaaattcattgcgactaacaaacatacctgacatttttcacatttgaccccacaacatttggaatgattaataatataacacaacttgcttatttatcagatcaaacctagacttctacactgatctttagcaggttaacacagttacagacacacatacataaggcaacagaaacaaaaaaaaaaatggcgagttagtcttaagtgatagagagatttctgattctactgaacaaaagggtatcgagcaacgtaaaattctcttacacgtgaagccccgtctctagcaagtataccttcaagatctccaatatttctagccagccaaatctccaagtttctctgaac

SEQ ID NO: 172066 - DNA, 484 bp, Arabidopsis thaliana
ctatagtagagttatgacgtcgcatgcacgcgtacgtaagcttggatcctctagagcggccgccctttgggtttgttttttttttctttttttttattgttatctttttcctagcttttgttttttgttttcttagaaaagggacttaggaccttttatacaggaattttttcaaaaaccatgaatgaaaaaactttggggcctaacaaaaaaaagagcaattttaattggggggctgttctgcggcctccccgttaaaaaaagtggaatttccggtaacaggtgtgttttcaggggggggttttaatattttcacaccactttttgaccaccacttttactttgaattttacggagcttattgagaatttttttttttttcgacttttgagtttaaatccttttttggattattttgctttaaagaaccgggccaaaaaatttttgccatcgttgggcatggtgaaacacccccagaaggggg

SEQ ID NO: 172067 - DNA, 434 bp, Arabidopsis thaliana
taggtacaactatagaagagttatgacgtcgcctgcacgcgtacgtaagcttggatcctctagagcggccgccctttgtgtttttttttttatgcatagctgataaatttatcttacccctgtatagaaaagctgctgattaatttaagggacacaaagaggccagaacaatataataaggctctatttaaaaatatccaactgtgatatgaactttgtacatagaatataaaactttggtggatgaccatatcagctcactctttaaatagagaagcttcttcttcagggatgtacttcagcggacagtcagttcctcttctgttgaggatggctgcataccttactatgtagacttatccgatcagatcgtgctggatacatccgtaaacttgaaccagcaagttcatatcctatgcccaacacactgccct

SEQ ID NO: 172068 - DNA, 508 bp, Arabidopsis thaliana
atgacgtcgcctgcacgcgtacgtgagcttggatcctctagagcggccgccctttggttttactcatttcttattgatgcctatttatccatagaatcttggagcattgctcatatgatgaggagactcattgtttaattagatgaaatattggaatctgcgggcgctctcgctcatgatcgggggggcacccccccccctcaacatgttctggagagagggaagcccgatgaaaggagacagatcattgagaagttgacagggaatggtgttcagatcaaacaaaacaaatactcatctaacgccgaagagaagtgtttggaacactctgtttgttcccaaagagagttcctgattgaagacaaaatgggcaaatccgaggaagacattcacttgcttgcgaggatgaaggatcaccctgcaaatgaaaagagccatatagtcttggaaatcaataaagatcattttggggacactctggagcaaaagatgaaccttcatcttcaaa

SEQ ID NO: 172069 - DNA, 506 bp, Arabidopsis thaliana
tgacgtcgcacgcacgcgtacgtaagcttggatcctctagagcggtcgccctttttttttttttttattaactcttttcgtatttttgattctctttgaaggggaaatttccccaaagagcaatttaaagttacaagaaagccgctaaaccctattaagtgaaattggatgcatattaagaaagaaagaaaaaagtgatggatcataatgagaatgggcttaagagagactcgtcaagttctttaaaacctgcgtatacaccattcggcttgttcggtggcagaactagtctcctaacctctgtcatatacctgtttgcagcgtttgcaatcttattacgtgccccttggttaagagcagctttgttctctagcgcaaactagccgactagtttcagagaagacctggttggactcgaccccattctgtctgacaatacagacattgcccattcacggagtaccactagaactgaacgaaggaggcggattcttatatttggggat

SEQ ID NO: 172070 - DNA, 513 bp, Arabidopsis thaliana
tctagaagataatgacgtcgcacgcacgcgtacgtaagcttggatcctctagagcggtcgccctttgttttttttctttgttttttctatttttttttatgctgaaaaattttgaaaacaaataaggaaatgtgtggagagcgtattttacactttagtgagtgcaaattggggggaacaacacattattcatcaaaaggggaagaaaatcccacactttggtagctcggccttctaatactgatgccctttaacccgacccacaacctgtgaacttgggatctttgtagccctgactggggacaagctgctgtgatcaataacagcgacttgttcctgttgagcatattggccttggtagctgcgcaaaacatctacgatcttggttaaggccggagacaacacaaaaggggcaggtgcacctgtcccggtaccttcaaagggagggttgggtccccttgggtccctgaacatctgcctagcaactttagggggggctggtacaaatggtcc

SEQ ID NO: 172071 - DNA, 531 bp, Arabidopsis thaliana
agaagagctatgacgtcgcatcgccgcgtacgtaagcttggatcctctagagcggccgccctttgggttttgttttttttttttttttttttgtttttgcgaaattttttgaaataaaaaaaaaagtttgcttgaaagcagatctcatcaaggccagaggtgtttacagaggccatgtgagattggatctgcctaacaaaggaaggtccaaccaggtaagggaatctcgtgtttttgtgggggggcaaagaacaaaaccggtctgacgaggatttatatggtttaacgaaccttgtaaaaaaaacgccctcttctaaagaataaaaggctggtttgtgctatagaatagcgatgtttagattaaaaatcaaacgcctacctcttgctttccctcggaagggagttgaaaccaaagcagttttttttccccaacgttggttccgactgggcctggagcttccaaagtggggtggggaatcggccgtgtcgttcagaccaccaccggaacggggtcagagctgaggggatggg

SEQ ID NO: 172072 - DNA, 533 bp, Arabidopsis thaliana
taggtacactctagaagactatgacgtcgcacgcacgcgtacgtaagcttggatcctctagagcggccgccctttgggtttttttttttttttttttttttttttttttttgtctattttttcttttttttttctttcttgtttttttgaaggcccccaaaaaaaaaattcacttgggaggggggagcaaaatttttcccaatttacaacaaacattatcccactggcttttttctttggtggttggaaaaaccctttctgtttttcgaaaaaccttcttttttcctttttccccaccttttttttttttttactccaaaccaagaactctttacaggtgcatttttgctaattccttctccagaacccccacgtggttttgattttgttttaaaacaccccaaacttttaattgttttcttagaaggccctgctaattttacccaattgtgccttggactctgggtggcctttttaacaaatcctaaacccgttgtgttactttgggctttctcaacgaaccagtaatcttt

SEQ ID NO: 172073 - DNA, 519 bp, Arabidopsis thaliana
actatagcaagattatgacgtcgcctgcacgcgtacgtaagcttggatcctctagagcggccgccctttgtgttttgtttttaatctttcttcaatatttcatttaaacaactttgccttttaataataacaagaacaagagacataaaggaaactgtcctcttcagtctcaacttttataaaagacacaagacccaaaaagtagtatctgtttactagttaggagagggggtggttttcttgcggttccttggcggcttaacaaccaactcacttgaagtccaagaccggttaatctcggtagcatcctcatccgacttccagcaacatagtcgcccatcttcacccccagtccatccaaataaccctgcagctcctccatactcgcctggcatctgcagaacgctccttactacatctatgtgacctccaccaagaatagcttcagcggtaccgattgatccaggctgtttgtagttcaccggaaaataaccaacgggtcctgcgcacgttccaccg

SEQ ID NO: 172074 - DNA, 516 bp, Arabidopsis thaliana
agaagagttatgacgtcgcacgcacgcgtacgtaagcttggatcctctagagcggtcgccctttgggttttttttttagccatacacagtaatagaagtcgaaagtttttggtctacataataattcaataagattccagattcttggaatgaacaagaacaaagaattagctttctcacccagaacctgattatcaatcgactacaacaatgcattataccgagggggtttgtctaagtgcgtcatcaggcagcaaaactctaaacactgcataatgatggttcaaactcttttccccttgaagtctatgaacactcccgagaccacctgccgtggtgtttggaaaagcatagaaaatccgttttattctttgatgcacaagcgccatagcacacattggacaaggctccaacaggaggaaaatgtcataaccagtgcagaggtacggcctatccattgaaggatctttaacagtctcttgtctgctggcattttggacgggtggactctgactg

SEQ ID NO: 172075 - DNA, 517 bp, Arabidopsis thaliana
acgtcgcacgcacgcgtacgtgagcttggatcctctagagcggccgccctttgggtttgtttttttttttttatttctttctttttgacattttttattgttttgagttttgctgagggcagccacctagggaaagataacacaggagccctaagatgaacgcaactataacagaaacatcccctggaacaaaaggaaaaaagctcgttttttttctggggggacgccgagtgcgaaccgtgaaagcggggggtatctaccctcgggcgtggggaatactaagctaaaggagggacctagggaccacaaggataactgggtgggggaagacaaggggcatggcgacattgctgtttgatcctcggatgtaggctctaacgatgattgtgaaacacaattcaccaagagttggatccgccacgctcattaacggaacgcgagctcggattagaccgtccaaagacatgttaggaataccctatgatactagcggggcgagagtaatataacctaaaac

SEQ ID NO: 172076 - DNA, 443 bp, Arabidopsis thaliana
atgacgtcgcatgcacgcgtacgtaagcttggatcctctagagcggccgccctttgggtttgtttttttttttttttttttttttttttttttatttttttttttttattttttttttgttttttttttttttttttatgtttatttttgttgagggaaaaaaccaaaatggtaaaaaaaatatgggaaaacccaaaaattaaaattttttttggggggggttggaatatactaaaaaaaactatttttataaaggtaaaaaaaaggaggggtacctttaaaaaaggaaatcatattgatgggtgccctcctaaaaaaaattttttcgtgtacaaaggggtaccctccacaaagatgtctggctaatcaaagttgcggctgtatatagcattctagcatataaatttaagaatatggttgcttcttaaaaattggtttatact

SEQ ID NO: 172077 - DNA, 512 bp, Arabidopsis thaliana
gacgtcgcacgcacgcgtacgtaagcttggatcctctagagcggccgccctttgggtttgttttttttttctttattttttttattaacctattttcaccttttaaggttttttttttgtctttattgatctgagatgatgtatttgggtcagaacaagacccacaccgaaaaaggagttgcaccaactgattaaaaaaagcatgtttctcagggggtgttcgacaagaaaaacacaaacctttttttgtctagcgagaagaaggagcgctacctttaccaagctgatctgatggatgggggtggcaaaaaaaaagcttttgtgatctacgtttcattcacgcccccgaaagttgtccgcaagattcatctgcggctggttagagagctcgacaaaaaaatcactggaaaagatgtgacccctaaagcgacgagaaggatcatttctccaccaaagaaaggggagaggatacataccacgcatcagatctctgacaaaagaacattatttct

SEQ ID NO: 172078 - DNA, 482 bp, Arabidopsis thaliana
ccgcgtacgtaagcttggatcctctagagcggtcgacctatctgggttcgtgctctctttggctgactctttgggctgactcacaaaaatcggtggatgatgctctatacttaccttatacgtggcctagtctgtaaaagagaggagtctagggcttgctctccggcttaccaaaagcacaaccaaggagcttatttttgtgtgggggaccagacttttcgaaggaatgatatgcactagaaaggccattcttgggatgaagcgggccaaagcctggtcaaattctttctccagatcaaatatctcctcgcgatgcctcttattcatggcttccatcttcttctcttgatcttttatcaggatgtgcctcttttccacaaactcctccatttcttttttttgaaactcgatgaagcttgacacttccttagctttctttggggaatctgcaatgctagagggattaaaggtctgctggtgtt

SEQ ID NO: 172079 - DNA, 177 bp, Arabidopsis thaliana
  unsure (1)..(177): unsure at all n locations
aggaaaaacagatggaagacntgcactatgacacaaaccattattntactcgtagactggggaaaacgggttttttgggggggtgggannatccttatataggagttagaataatggtgagcatttctctgtcctttttagggatgaagaactgggacaagtttaagaggaactttc

SEQ ID NO: 172080 - DNA, 332 bp, Arabidopsis thaliana
  unsure (1)..(332): unsure at all n locations
cacgcgtgcgtgagctgggatcctttagagcggtcgctccgggggtgagagcggntgananaanacnaaagtaaaggatctggtgcatttgttggaattagtggaacttttacacgtggacagtcaaatgttttaaaagggtaaaagaaaatcacacattctacgggatgatgtgtctgaacgattttctacatttcttgcactggtgggacaatgagttcttcagtggcgcagtggagcgtggaattccgaaccgtaagagcatccaagctatcatccatggaagacaatcgtgagcggcggcctctgagcacaaattatagatgtaaccg

SEQ ID NO: 172081 - DNA, 463 bp, Arabidopsis thaliana
  unsure (1)..(463): unsure at all n locations
tgcacgcgtacgtaagcttggatcctctagagcgtccgctccacggtntggggcggttaaaaatacnacaaaaacaacaatttggagttagaaaaattacaaccctttagctttacatattgtcgtaaaatgtgtggaagaaaaggaaaataactgaaccattatacttatatatcattttggattgaagcaaccttttaaacggggggtgcacatataaaccggttaaaggggaaataggcggcttacaactacatgagcatggactgggatttgggggtacttataaaatactccatgactagcaactacctcaaatttaccagacccattaccattcaaaatgtggcttctcatttcaacactaccacaataatctaccacgtacttaaggggcggctttgaaggggctgtaaaatggaacacctactggtcccaaatgagtgagctagagcaagttctc

SEQ ID NO: 172082 - DNA, 483 bp, Arabidopsis thaliana
  unsure (1)..(483): unsure at all n locations
gccgcggcggagctgggatcctctagagctttcgtggtgggttaggctgtttttatattattatagaaggggatttttgttgaggaaaacgagtctgttatcataggtacacaagtgatgccgcaaagggaacatcatcttgattggtgtgaaaagctgaggttcattttccatttttttcaagagactttttaaggggggtggganagccttgttaccttgtgttggtttcacttaagcaacactggaggaaggggctggcctctcgacaaatttgctggatcccttgaaccaccttttgtttccagcttgggcttgggggatggaaagctttcctccattcacgggtggttgggtcagggtgaggcttcccaactttgagtacattagccgggtttgtgaaaacaaagaagtaatagtgggggttcccaccaatttcttgggatgataactccaaactggtagttgtggccactggctttg

SEQ ID NO: 172083 - DNA, 421 bp, Arabidopsis thaliana
gcacgcgtacgtaagcttggatcctctagagcgtccgctctagggtttggtgctattactacatattgagcttataaaaaccctgtcgttggttaattgtataaattctctaacaattatataaattcaaaacctgaaagattcatttttaagcgcaaatgaaaacaattggaatttcacatataccacaaaaaggtctaagaggggttgcatttttcgaaaggatcacatggagaatcgaaaaacacactccctatcccttacatacttaatagaaaaccaacagcagaccaacttcttatgtaactttgggttttctccacaatgggaagttagcagatttggcagcgagtctttaaaacttgttggataaccacgggcgggacctgctcctgtgttgccacccatcttacccattgaa

SEQ ID NO: 172084 - DNA, 503 bp, Arabidopsis thaliana
  unsure (1)..(503): unsure at all n locations
gacgtcgcctgcacgcgtacgtaagcttggatcctctagagcggtcgctttttgggtttgtgctttttttttttttttttttatattactactttttgttttttttattcttttttgtttattacttgttgggggagaaacaaccaaccgggtatttttttttcaaaaaaatttgtttttttaagaaagacaagggatttaacatttcttttcgggggggccttttgtnntttttttaaaaccaaaaaaacccttggggggacccgggggtcccccctgaaatttcggaccggtccctgggggggtaccaattttcccttttggggggtcgtttaaaccttggggaaataatgggcataggtttttcctgggggaaattggtatcccctcacaattccccaaaaaattggggcgcgaagaaaaaagggtaaaccctggggggcgcaatgagggagggacccccacttaattgggttgcactaaatggccggtttaaaggggga

SEQ ID NO: 172085 - DNA, 453 bp, Arabidopsis thaliana
  unsure (1)..(453): unsure at all n locations
cgcacgcgtacgtaagcttggatcctctagagcggtcgctccagtgtttcggtgcctcttttcttactgaacgccccaataaacatatatttaaactgggggccgcatctacctgtaacgcgtgtaccaagacttgaaaacaagagcttattttaacgaataatacgatatctgactatttaaatcaggctagactttttttacaggggggtgacttncgcttggcctggaactcacaagagagcgcccacccgagagggagtaccacctcaaatttacccccggttaatggggcacagcgtctccacttggatactagttccccctcgagcctgaaattctggggagcccaccagcggggggaagtgtgggttcttccggaccttgggcttaataccaagggcttggatctacaacggccacactgggtaaagccttcaattcgtacagtac

SEQ ID NO: 172086 - DNA, 415 bp, Arabidopsis thaliana
  unsure (1)..(415): unsure at all n locations
gtaagcnnggatcctctagagcgttcgctcgaagtttaggggcggntaaaanaaanananacaaacactggagggcttataaattcaaaggatggctgagttttacaacattagagaggaagagaacaacacagaaacttttgtggaaacatgattacacatgcgctaacaactttaaaatttttttaggggagtggcgtcnctcccacacaataataccacctagagaaanacttccggggaggagtaccggccaaattgccaatgcggtgactcctcccttggacacttcaccaacgcggtaacgcattcatctcggtggaaataggggcggggccatcggacttaagtccatacttggcagacgtagtggaaacaccgggtgccctggccttttttgcaggagggagcaagc

SEQ ID NO: 172087 - DNA, 369 bp, Arabidopsis thaliana
ggggggggggggtagtactgccaggctacatcccactcacttaggggaagctcgtacccctgcaggtaccggtccggaattcccgggttctacccacgcgtgtcggccgggtgaatataaaaattataagaggggagaagatactcgacagaagaatcttttgggttctccttgtggaaaacaaaatagggcggcttcaggcatgccctcctttcgaagacacttgaacaccacccgtgttccacgggccgcaaaaaaactgtttttttttaggaggcagcgggggctctacctctaggcgggctccttcataaaaaaaatataccccaccgtggcggggcggagattgccactcccccgcccgcccgc

SEQ ID NO: 172088 - DNA, 494 bp, Arabidopsis thaliana
  unsure (1)..(494): unsure at all n locations
aagctnggatcctctagagcgtttgcncctggggtttagggccacatgcgaaactactactgttagcattgggcaataattcatagatcaaagggcgataacaatgtaaaagacatatacatattgggcgtgtctcgtatactactttaatgtgcaacagtgcgctctacacactatatgagttttttctgcggggggtactcggctcgccctactgaagtatatagcctgtttcgcatgagcagggcgcatatcggacttgtggttctatgtatacgactggtggcgaggaaccctgtcctttcttaggcttagaagaaaacccatttaagtcttgggcaaaagcagtaaatgtggttggagaatttcactaggttccttaacaaacttaacatgcacgactgagaatgggtgagctcataaagggctaaagttgaactttatgatgcatcgctgacttggatatatgaaactcatttgcacaattaggacaa

SEQ ID NO: 172089 - DNA, 492 bp, Arabidopsis thaliana
ctatagaagactatgacgtcgcacgcacgcgtacgtaagcttggatcctctagagcggtcgccctttgtgtttgtgtttttttttttttttttttttttttttgtttttttctttttttttttttttttttttttttgttcttgagaaacaaatttccccttttttttacctaagtttttgaaactttcccccttgatcaaattttagggctccaataataactgaaaacgggggagggggaaccagaaaaaattttttaataccgattaaactttgggtgggatggggacactttttttccgaggaagggtggcggaaaaaatttgggggtgttcctaagggggtccctttttttttttaacctaaccgggcgtttttcaagctccaaaaacggttgttggtccattggggcttttttaaaaagggcttcccacaaaaacaaaaaccgggttggaacctgttttttcctaaaaaccggggaattctttttg

SEQ ID NO: 172090 - DNA, 541 bp, Arabidopsis thaliana
  unsure (1)..(541): unsure at all n locations
caagctctaatacgactcaccttagggaaagctcgtacgcctgccggtaccggtccggaattcccgggtctacccacacgcgcagagagatttctataaancaaacttttatcatcccctgcatctgcggnaatgggtaaaggaacagggagctttggtaagaggaggaacaagtcacacaccctctgtgtgagatgtggtcccccgacctttcactccaaaaaaattttttttctgggggggcgggttatccatcctggggagaaagagacataaaactggagcgggaagcggataagatcaagccccccggacctgggacatagagtttctcccttaagaccttaaaggctcaaaactctctttaaggaaggcgcccaggcctcccaagaaagaaggtccgggcttcgccccccaagcattgatcaaggcgcggccccccttcccttgtttcctatgcagttttctttcttaatcgggtggcatacctttttggcctgggccccaccttgcggggacgccgttttggtgcagggggagc

SEQ ID NO: 172091 - DNA, 526 bp, Arabidopsis thaliana
  unsure (1)..(526): unsure at all n locations
cagctctaatacgactgactataggaaagctcgtgcccctgcaggtaccggtccggaattcccgggtcnacccacgggttcgggatncttataataatactaanctttttcttgaaaaaatacctananacatctaccctnccgaaccagaatggaaaataattcttctgagggacttcaatccgggtggacctcacgagaggggaaaaattggaaaagatccatatttcctgggggggggtctcatcccttatntcccacaatgaaaaaaattnaacactcccctcgccctcactggttgtcgacatgattatccctacctggtggggcgcgcggttagaaacctccttcctttgggggatttaacagacgggcctggggcttcccttaaacaaattgtcttaaactcaaagttggggtggccggttaataacggggggcccgggcaggaactttttgcttaaaaatgctttcttttttagaaaaaggtttccggaaaaaaactcccttccaggtctggcgagag

SEQ ID NO: 172092 - DNA, 494 bp, Arabidopsis thaliana
tcataagcttggatccttaagcgtttcgcctctgtttaggccctccctttacaaatgctctgataaaattgggttttaaaagtgttgactcctgaaaaactgacatggcatagatggacttaaaaggcttaaaagagacaacctctgttttttctactataagatccacaaatataaaacccctttaaggggggcgttgcactgcttgaccaaaagagtttcttcaactaatgcatctgactaaaccaaagtctgtctgagaagcatcatcaaaggccgaggttactcagaagctgactccatgttgggagtctcctcatgaaaaatgtatggtacaggagaaactagtaccccacttcctaccaccggtctcaggtgctgcacagactcataaaacgctatttttgggccacatatcacaatggcatagaactcaatggttacttttccatctcgtttacaataaactggacttattggtgggtccctgcaac

SEQ ID NO: 172093 - DNA, 516 bp, Arabidopsis thaliana
  unsure (1)..(516): unsure at all n locations
tatagtagagttatgacgtcgcctgcacgcgtcntaagcttggatccttagagcggcgccttggggttgaacttatttttataattttcgacntggcctaaccaaaaaaagagcacagcgtttacatacacataactggtttgaaccttaacgtgactgctaaaggcattttctcttgggcaggactacactcagaagaggcgaggtgggttttgactatacgggggttgtcttaacacagccgaaacagtgggaatgtatgccctttggaaacgaactactatcaatgggagtgccatgaaactggcaatttttgtttataataaaaacccctatatctgggagggtgttcttggttcctcacctaacctttacctttggaagaacaccgcggcatctggtccaccaggattatgaacagccccgtcatatgtttacagatttttcaacgcggcaactctgagttttgttatagaaacccgagggaaaataagaacggggtggaaaaaaaagggg

SEQ ID NO: 172094 - DNA, 527 bp, Arabidopsis thaliana
ctctagaagagttatgacgtggcactgccgcgtacgtaagcttggatcctctagagcggtcgccctttgggttttgtttttttttttgtgataacctcatacaagaggattatatatcagatcaaagaaaaatattgcaatcacagttgcattttccaaccaccgaggatggaaactgaaaggttttagttttgttacatagaatcagaaacacacagctttcatgagggggggggaattccataaaaggagagtttttaagcttgaagaaatagaggaaagaagtccaaaagagagataaagaggggatgaatacctttcacctgagattcctaaccatgggatggtcaactggtttgggtgattggtttaagaagaacctaaagggacccaaattttctcccaagagggaaaaattcatgccaagggaagaacccccacattccataaatgggggtgggtcaagatttaaggagaaatctaaatttgagatctaaaaaggacctaaaccaaggttgctcaagggg

SEQ ID NO: 172095 - DNA, 558 bp, Arabidopsis thaliana
  unsure (1)..(558): unsure at all n locations
aatacgactcaccttagggaaagctcgtacgcctgcaggtaccggtccggaattcccgggtcgacccacagatccgtgtcctctctatcanacnagatttcctcttcatctcaagagaaatggctgaatccaaggtagtggttccagagtctgtgctaaagaagatcaagaggcaagaggaatgggccttggccaagaaagatgaagctgtagctgctaataataagaggggggggggcccctaacttatcttcaaaaaaactaaacattctnccaaataatacgcttaannaagataaccccgttgatcccgattgaaggcgggaggctaagtgtgaaaggagggtttctaccgttgacccctgaggtctaagttggctctttattatttcggatccggggggtatcaatggccttggaccccaaaaaaccaaagaagattcctgcagcctcctcgcgtctgaggcacagatccttaaatggggggggtttcttaagggggaaccaagggccacacgtgaacattgcggggcccgagcttaacccattactgaactt

SEQ ID NO: 172096 - DNA, 501 bp, Arabidopsis thaliana
acgcgtgcgtgagctgggatcctctagagcggtcgacctgtgggtttaagcttccgaagattactttaccggtgaaaaatgtggtcccttgttatacacactagaggcttcttatactaacatggacatattccctggattactttttggaagattttctttttgtctagatgctgcatatgatctatgcacaggcaaagagggggaccgcttcattataggcgttacttactttggcctagcggattttaaaccagcgtcaatggtggaacttgtcgagacagaggaaaagcatccaatgttaccatcatctgttgaagatcttgatggagataaagaagcttaatgatcagttgaaacttccttccacagattcaatgctctattaatagtttctgtaacactttgcaccttatcaaattttctactctcaagagccgtggtgcaagtgttcttatactgcgacgccaaatgttacgacgtcggaatttacccaacgcc

SEQ ID NO: 172097 - DNA, 485 bp, Arabidopsis thaliana
  unsure (1)..(485): unsure at all n locations
aatcccactgacttttagggaaagctcggtgcccctgcaggtaccggtccggaattcccggttcgacccaggggggcggggggcgcgataataaataatccaccttggtgttgttctgatagggattttcattttccaggttgggagcgccaaatttacatggaggagagatgttgaatggaataacaccaacccaaccgggggcttgggggcctcaaaaaaatattaaaacctaatttttctttgaggggggggggggaaacantcnccgggggggcgcgcgccaataaaaaaagacccccaagttttcgcgggcggggtgcttggccacctgattagggtcttctcctaaggggcgcccggaacgttcaggggcgggggggggggcgtcgtacacattggtggggcgtggggtaaaacccttggtggggcctccacagcttacggcgggcgtgcacgacaagtgccggctggggggctggtgg

SEQ ID NO: 172098 - DNA, 481 bp, Arabidopsis thaliana
ggggggggtaatactgccaactgcaatacgactcacttagggaaagctgcgtcccctgcaggtaccggtcccgaattcccgggtctacccacgcgcggcggggtggatttaactaagggggattgtcttatgggatttccctaagttttatccaagctccccaaaggagtacgggaggcctgtggataaagagggtcttggcctcccactgcttggggaccgtcaatatctccttacccctgatgaggaaaattgggcttttctttaaagaccatttgtttgaaaaaggggggagggagtacctcaatctgcggaccccataaagaataacactccacccaaaaggttgtgcaatcgtgggaatggaggcctctgcccgggagcgtgccgtgtagcggcgagggtcgcttgaggcacctctgtttcgatcacgacagcgcagacgctcgtggtcggccttcttccttcaccgagcgcgttg

SEQ ID NO: 172099 - DNA, 563 bp, Arabidopsis thaliana
  unsure (1)..(563): unsure at all n locations
caagctccaatacgactcaccttagggaaagctgctacgcctgcaggtacccgtccggaattcccgggtctacccacgcgctgcggggacgcctaaattcccancttcctccttttcgtttgccactttttgatcaaacgaaactccaaaacacanacccatgcccccccaatttttgacccgaaccagatccgtcgatgtgttccctccctgttaaccggacaaagaactgggatttctccaggggggggagctccaaaaaatcgggccctctctatactaaaaccaaaaaaaaatcctgataaagacttttcgaaaacaaacccgcacaaaaatggaaacgtcttttcttctccccctgaaaagctgaccgttttaaaaatttcctcaatctaagggtacccccggcttccctcctccctcccacctctccccacttcaagcctttcaacgacccaccacaaaccccttaaaaaacgtaaaaactttttcactctccctctctcttccttcttcgtcgttccatctacacttctcatattcctcagtcctaacatctttac

SEQ ID NO: 172100 - DNA, 487 bp, Arabidopsis thaliana
gcgcgcgtgagctgggatcctttagagcggttcgccgggggtttaggcttttgagataaactgatattatcataagtgataatctgatgtcagagaatccattccagaaatatggaatacgaattgtgtccttcacagtcacactataccattagggaaagagagaatcttaaaagaattcttagaaacattttttggggggggaggaaaagcccaaggagattgatttccttaagcatttcttcttggggggggcagttctctttcactagccagatgctctcctttgacaggcgtcggggacccaatttttatgtggccgaacatgctgatttttgggtagcttgagatgttcccggaccttggtcgaattggtggtggtgatttgttggggctaaggtggtgctggggttctggaagtgtttggttaatgtttgtggcatagagaagaggacttgcttaacgtgtaggtggggtggggctggtt

SEQ ID NO: 172101 - DNA, 490 bp, Arabidopsis thaliana
cagctacaatacgactcactttagggaaagctcgtacgcctgcaggtaccggtccggaattcccgggtcgacccacggctccggccaatcgggggaagaaaaaaattcaacggcccgtctggttactgtcttgcttgcttccgacgatctatcttccccgagtagatttgaaatggctgctcctcctgctagagctcgtgctgattacgattacctcattaaacttctgctgatcggaggcagcggtgttggtaagagttgccttctcttacatttctcagatggctcgtttaccaccagtttcattacaactattgggattgattttaagatacggactattgagctcgatgggaagagaattaagctgcaaatctgggatactgccggacaggagcggttccgcacaatcacaactgcgtactaccggggagccatggggattttgcttgtgtatgatgggactgatgaatcatctttcaacaacatg

SEQ ID NO: 172102 - DNA, 530 bp, Arabidopsis thaliana
cagctacaatacgactgactttagggaaagctcgtgcgcctgcaggtaccggtccggaattcccgggtcgacccacagatacaggtcttttaatatttatttatggaggaggagaggagactgtcttaatcgtttccgggtctcttattctgatccattcttctctcaagatctaagatttacctgttttgaaggggagaagaaattagttgtctcaacaaaccccactataaaggggggggagtctttcttcttaaacccttcaaaatacaaaccccacctcctaaaaatttctcctttaaacgacacaaaaccttatttaaagttaaagaaaactctcctggagataagccttccccagtccttatcaccctgtggtaacaaatgcaggttcctctatttgcggggggtgtaaggcaaagggcttcccttggcaaggagtttcctgggtagttggcacccctatttgtcgggttaagcctcggaactaccagggcgcgcgttggctttgtggagaaaaacgttatcct

SEQ ID NO: 172103 - DNA, 496 bp, Arabidopsis thaliana
  unsure (1)..(496): unsure at all n locations
gcgtgagcngggatcctctagagcgtcgcccgcggggttaagcgngnattactnaaccatgtcatataaatgagataaataaatacatgacgacatgtcaacatgtaaaataaaaaggatttcattcactaggttcagaaaaccgtttgtttggccttcaaaggatcgaactggtcttgcttgctttgtatgcggggggagccggcactccaggaaatgcagcagcaggtactgaagcaataacggccgaggtggtatgatcctttagtgctgaaactacgcagatcgtatcaaatctgtttcgatgccgatatatatttgaagccaaaagttttccaacaatcatatgggctttgtggaagatatctttaacatgattatcatcacccgaagcatctgtaaatttggagatcaaatcttcagtcacaagctcaactccacgttctttagctttcattgcggggtgccacgatgtagagaaaccgtaaaccctgta

SEQ ID NO: 172104 - DNA, 495 bp, Arabidopsis thaliana
  unsure (1)..(495): unsure at all n locations
agctccaataccactcaccttanggaaagctggtgcccctgcaggtaccggtcccgaattcccggctcacccacggcgcccgaagancaatataacaacaannacaanaaaacataaaaaaaaccctggctgccttgtcggataagttagcggatccctaccacaaccgaaggcccaaatatcccatcgattggttccaccaaacttgctgctcaaaccgggtatcttttatgggggggggggtttttttactggcaaccctaaaaaaaaaaatttctccttcaaatttttcaaaaaatcccccccccctatttaaccaaatccactttaaaccacccctcaaaccccaaaacctcctttcccctcccccctccacaaaaatcttcccaaaacacatggcgccctttaccgccccaaaaactctccctccccccaagccggcccccaccgcccctccacttcctttcatccccccccctcctaccacctcccaca

SEQ ID NO: 172105 - DNA, 521 bp, Arabidopsis thaliana
  unsure (1)..(521): unsure at all n locations
atgacgtcgcatgcacgcgtaccgtagcttggatcctctagagcggccgcccttcgggttttttttttttttttttttttttttatatttatctttctttattcttgtttttttttttttcttttcattataggcaaatttgtggagatgtatattttatattcttatgagaaccnnggcgggggggccaaaaaggcttaaaaaaaaaaaatatctacggggggggttcaagagggcccaccccaaaaaaaaaattctcgcttttttttaccgccccagggggggccacccccccccacgatttagggggcggagaaataacaccccccactttttgtggaaccctggaaaaaaatttttgcttccgaggaaacaaagcaccccccagaagcccggggatccccccccctttattcggaaaaccacccccccccagaaaaaaaccgcgaaaaaaatttcctccttcctccctacaagggggggggaaaaaccagtgggcttgaaaaaaaaaaaaaaaaaaa

SEQ ID NO: 172106 - DNA, 523 bp, Arabidopsis thaliana
  unsure (1)..(523): unsure at all n locations
cagctacaatacgactcaccttagggaaagctggtacgcctgcaggtaccggtccggaattcccgggtcgacccacgcgtcncggggacgcgtagattanntntaaataaaatcgggcatgagtactgtaatcttcgtttccttttcattagagggaaatatggtggagatgtataaaagagatcctcatgagaacccagacattaaacctataaggggtggtgtcatatgtccgggggtggggggtgaanatctaggacttcnaaaagttaataatgggggatggctacggggtaagggtctataaccgggtgggacgattcaaggaaagggagaaatggcttgggctactggtggagaagccctgaaagggggtggggggttttgaggaaccaaagcagagggcttaatatcccctatggaggggggggagggcaggaacaaaggtaggggtgggatgccaacactggtgtgggggggcctgggcccaaaggcggggggtggcttatggataaaaaaggct

SEQ ID NO: 172107 - DNA, 434 bp, Arabidopsis thaliana
  unsure (1)..(434): unsure at all n locations
caagctacaatacgactgactttagggaaagctcgtacccctgcaggtacccgtccggaattcccgggtccacccacggtgcgggagattgaaattctcngttttccattcaagaaagacaccggtgacacaagggaaactccagccctcgatgtgtgcaagggtctttttaaaagacaaagcaagggtaatcctttaccacccacaagggactgaggatcacactcattttttttgggggggggacaacttctagtggggaccctcctaaaaaattggcccccaatgggcccaacacccgcgacccccgtccccgtttcttgggacccttacaaagcacttaagggccctcactgttttctcactttctaccgagtggcatcacgttaacacccttgattcccaagacatttttcaccccatgcagaaaccct

SEQ ID NO: 172108 - DNA, 496 bp, Arabidopsis thaliana
cacgcgtacgtaagcttggatcctctagagcggtcgccctttgggtttgtgcttttaaacaaatgccaatcattgcctgatcaagaaaacagaaagaaaaaaaactttccttgcgtaaaactctacctgattattaacaatatcagaaatcaaagaagaaaagtaactttgaaattagaaacgcgtagattctttaaccctagggggcaatgcttcaaatggctaagtttctgctacttctgccttctcactctttcttcttactctaccaaccgcagttgttccgcgtattctttcttcgcaagtctatcactccgttactcttccctcatgatatcatcaaagttggcttccatgcacctatcatcatagtcttcgtcacgccctgcaaaacgatcagtcttgcacatctttctaaccatttgcgaggccaaatcatcttctgacattttcacaggctttgtcttcactcgcttcaatggtggtttgctaatca

SEQ ID NO: 172109 - DNA, 489 bp, Arabidopsis thaliana
gcacgcgtacgtaagcttggatcctctagagcggtcgccctttgggtttggttcttttttaaaaaaaaagccaacggtggggatgcgataacatcatgaagcctcacatagcagaataaaaaacttacgccacagcgataaagatggtctaccaacgtgcctaaaccctaacttccttaccagccataatcattattagattgcaggggtgagaaccagccatgcttaattagacagggccacgccacgataatcgatgaggcgagaccaacattccttggaacagccttggactttaacggatccttcatgtccatagacagcttgagaactttaaggagcataactggcaagatccctttaccgattcaaaattgtgaattagtgggccaatccagaggtgaacaggagctacacccattggtttaccgggacaaaccagacgaccggatcccaatggagccaatctaagatccgagcgcatgatgc

SEQ ID NO: 172110 - DNA, 525 bp, Arabidopsis thaliana
ctatacaagattatgacgtcgcctgcacgcgtacgtaagcttggatcctctagagcggtcgccctttgggtttttttttttgaagagtaaaagtaaaaggattatgaattgctacaaagtgtgatgtatgtaccacataagggaaatccacaaataataaattcttctctcagacattaaaagtttaattatgggttaaccttttctgaagtccagcacttctctgcaggtccagtagccatggaagaaaagaaaagcctctgattagttttcagattcaagtaatcaaccttttctggctctagaagcagcaggcagtattcaggaactggaccacttgaaggatctaatttaacttgttggcttgattgctcgctgttgcaaggactaccgggagtaggacagacgtagataagccttgaccttaaagaattagcaaaccaagctttctctctttgctatatataaatcaaagccattaaaataaacaaagtgtttcttccttttcaaatactaatattaaat

SEQ ID NO: 172111 - DNA, 495 bp, Arabidopsis thaliana
  unsure (1)..(495): unsure at all n locations
cagctacaatacgactcactttagggaaagctgctgcccctgcaggtaccggtcccgaattcccggcttcacccacgggtgcgggcttggcttcaattttancaaaggatctgctcaatggccagaatattgggggtgtccggtcccaggagatttgtctctcccggggactttttcctcagaagatgaagtacactgaggttcctccgtaagcgtatgaacactaaacctttttggggggggggttgcacttncctaggtgcttccaaaataataataggcttccctgtcggggggttgattccccaccaccactaaacggtggagcctaatgccccttgccccgctggaaaggtcttttgaagggattcccctactcccttatgaacacgatccacaaggtcggtctgtctcctgaaccctcctcaaggcccttgagggtggcagcgctcgccaccaatccctgggggggggggccgcctctcctctgaacgt

SEQ ID NO: 172112 - DNA, 472 bp, Arabidopsis thaliana
  unsure (1)..(472): unsure at all n locations
cgccgcggagcngggacctctagagcggtgccctcggggtcgagccgcaaaccccattctatgaacacagtcttacctccttcatcggagtgcataccgcgatacccaacaggaggctcaccaagactaatctctcggtgtttctctattgagctattctttcttggagacaccaagtttcatacatttgtgagggggggagatagagcagagttaaaaagacccgactttgcgaccccgaaggaaggtacaagattgggtcataaccggggatcatcggaggccatgtcattggacgggaatcacatgccgcattagaaagggatgctccgtagacgacactaccatttgatgtctccggctataatatctacggtggctgaccctacggattctgacgtatgcgaacactcagtaacatcactctttctcaaaacattatcagtggtacgatagattctgctgctctatc

SEQ ID NO: 172113 - DNA, 466 bp, Arabidopsis thaliana
  unsure (1)..(466): unsure at all n locations
aagcttggatcctatagagcgttcgcctttgggttaagccaagtattccatgattcttaaacaaaatttggcttgcaaggaaaaacatatttattcgatatgaatactaatgggatggtttcaggtctttctttatttacttctctatacttttgttgagtttcgcagcgagtcaactttttttgaggaggtgcagnaagcactagactgaatggtgatcattgggttaaccccaacaggtgatggcaatatacttccatcacaaacaaacaacccctgtgcttcccagatctgaccattcttattcaaacgaccttcctccgcggtgactaccatcctacaactacccatgtggtgagccgagaagtacgtcgtccaatactctacttttgtggcaaccccaccaacaggatgaactttcgtgtagaaacttttccatgggttctttaggaatgggctcacactt

SEQ ID NO: 172114 - DNA, 456 bp, Arabidopsis thaliana
gcgtacgtaagcttggatcctctagagcggtcgccctttgggtttggttttttacctcaaaaatcactctttcaactacaaaggcaaaccaaaaataaaaatgacatttatatccaacaatcggttgtctgtaaatcaaaagacaagatccttttgtttggttcttacagcattctattcctgaagatcacttttttatagtgagggggggaggttcccagctggatctttggttgcttaggtaacttagcaatagatgacttattttgctggccttggaaagaaattcggtttattgaaatcccttggagtgataacgatggttgaaatatctggttccctggccataaaaaatagaacttgggagtaggtggtgaaccccgcaaccttttgaagggtatcctttggagcaaagaacgggaattccgtttgtggttttccaaagaagaggcgcga

SEQ ID NO: 172115 - DNA, 540 bp, Arabidopsis thaliana
taggtgcaactatagaagagctatgacgtcgcatcgccgcgtacgtaagcttggatcctctagagcggccgccctttttttttttttttttaaaattttcttagtacaaaatagaaattactttacttcagtgacttcacctgctctacatacaccaacattgatccataatgtattattcctctttgtttgtaatactctgcaacagtttcttctaggtgatctgttccataggtgaggatcgggttttttgtagacgactatagtgttgatctcctctgggttagccatatcccatcgacaagccggttgcggaacccgatgtctcgtgtattcgctaaccgtcgtgttcaactgcgggtcaaattttgcactcgacatgtgaaaaacaaacggtttttggcaatgattgcgactcacgggcctagtattgaatgcgtaggcggtgtaatccgctcttttgtacaattcaagaaagttctagatggcatttccatttcccggggagagaatgatccacggaacacctggaccggaaat

SEQ ID NO: 172116 - DNA, 508 bp, Arabidopsis thaliana
  unsure (1)..(508): unsure at all n locations
aggtgcaactactagagagttatgacgtcgcatgcacgcgtacgtaagcttggatcctctagagcggccgcccttggggtttgttttttttttttttttttttattttcatctactttttattttttttatctttctttcgttttttttttttatcnattttgggggcaaaaaaagggccatttttttgaatggggttttccggcacaaggtttttcaaacaagggtttaaaatttggggggtttctaaaaaaccttgggggggcctttttttaacagataaaggccattgggaatcaacctttttctttttcccttttgggatttaaggggttaaaaagaagttccccttgggttttgcgtacctttttaaaggttgggggggtcacttttggatttcaaaccttgaaaaaaaaaactttttttcaccctttatgaaaatccccccgccgggggtattttttgtgggatgcgaacccaagtttttttttcccctttaaggggggggt

SEQ ID NO: 172117 - DNA, 536 bp, Arabidopsis thaliana
aggtgcactatagtagagttatgacgtcgcatgcacgccgtacgtagcttggatcctctagagcggccgcccttggggtttgtgttttatttttatttttttttttttagatggagagttttttttttttgtgcggagcttcttaacctttcggttttcatcggtttactaaaccgaactgctcaatagaaaggatacgagcaaaaaggtgtcctacaaataaaaacccctgaaagggggggggcaactttcatgcgacccgaaaaaaaaagaacttccgggaccgatcgatgaacaagatctactcggtgacggtactatttccagattaagctcccagaggaaagaattttgtgtattagagaagtcctgaaaaaaaatagacctggttgaaatagaaaaaacactactgacccatcataatacgaaaaaatgtcgctttttctaggaataatctcctacaaggatcctaatttgaaataggaggcgccccgaaggattaacttaaatctgttcggtgcgaagggtcaaaaaag

SEQ ID NO: 172118 - DNA, 495 bp, Arabidopsis thaliana
  unsure (1)..(495): unsure at all n locations
cgaacgcacgcgtacgtaagcttggatcctctagagcggtcgccctttggggttgggtttatttattttttttatttttaaactttttattttttttctaaatggcaatggatatattttttgtatttgattaaccaactcaaggtctctttttgaaaggaggccaagctcacctccgtcgacgagggcaaaaacaaaactttccgggggggggacatcccaggaggctatcccanaactagatgcttcagatgcctaccttcgttgccgaaactgcaaaggaaaacttctacgaggaatcgagtttctgatctgagtcttctgtggaaatcaggaacgcacgagtgataatcctactgatccaaaaaatatacttccacttaagaaacaaatggtttctcacctctgtaaataaagatggatccggaaaaagtcgtacctccctcactaatttgaatcacttgtttaactagctgagcgcgtataactcagatg

SEQ ID NO: 172119 - DNA, 460 bp, Arabidopsis thaliana
  unsure (1)..(460): unsure at all n locations
ggaaagctgcggcgcctgccggtaccgggccggaattcccgggttcaccccggggccgggcgggtgcganaanaccacanaaggggaccaaaagaatatatccctcccagctcaaacgcgttttccagatgttccacaagaacggggacgggcgaatcacaaaagaagagctcaccccctcgcttgagatcttgggatctacctacccagggggggagctgcctcaatgatgccccaaaacacaaacattaccggatgggttccgtcaacctaaaacaagtttggattccgtcttccaccctcgttggggggtggaccttcacaaccggtgggggaacccgagggaggaggggtttgaaagatggcctttaacgtttttaacccacaaacgagaatgggttttttctttggggggggagttgaaaatttggggttgtgtttcctttgggacttaaggcgg

SEQ ID NO: 172120 - DNA, 415 bp, Arabidopsis thaliana
atagaagattatgacgtggcacgcacgcgtacgtaagcttggatcctctagagcggtcgccctttgttttttttttttttttttttaattctttgattattttttgccgccaaaaaccctaatgccattttaaaaccaagaataccttgctatataattcgacccgccaaacaaaaccactattttaaggggttcctcattgacaagtttaacccttttaaccggcgggggagacaaataacaaacaagtaaaccttccgacaaaagaaattaagggcttttaacaggcgctcactattaaatccaaaaaaaacccatttttttgttattcacattaacttgttcgggattctgaacaaattttttgttttttttttaaataacatttcacttttttttttttttgattgaaaaa

SEQ ID NO: 172121 - DNA, 537 bp, Arabidopsis thaliana
  unsure (1)..(537): unsure at all n locations
gcctgcaggnnaccggnccggaattnccgggtttacccacgggtncggaggcatcatacgagaagccgaggaagattcacggcggatcatccaagaaaggtattaagattctcggtgttccatgcaacccccgtttcattcttcaaccagattcctttattctccgagggtcacggggaatgacatgggaaaaattttttttccgggggggtgggctttatccacacggtgttattgggggaacaaatttaaccgcacaggcggctactaaaagccgtggggtgaaagaataaaccgcgccgaaaaccgtgctcgatttttcctccaacctggattacgtctcctacgaacacaacatgaccctcccgcgtcaaagtggtcccccaattccatccactacacatcgtcaaaaccgccgcgaacacaaaaaaagcgatggaacttttcttcccagaacccaccccctttttttcgaactctcacctttcccccacctgcgatgaagcccaacagcccggcagcgaaaaaaataaaaag

SEQ ID NO: 172122 - DNA, 315 bp, Arabidopsis thaliana
  unsure (1)..(315): unsure at all n locations
ggtaccgggcccgaattccccggcttctaactgggganagggggcatcttccacaccanttccttcccttgcttcgtgggggaagaccacggagaaatacaaaggtggctcttcacactccgggtccggaaacagcttctactcgaggactatcctctgggaaaatctctcaaaaatccttaccttttttgctggggggagccaaacttaacgggggggttcccttaccataacccgccctttttaccggggaaggagtttacccctcaaaaaatctcttatcagcccggggcgcggacttcacggatccctccc

SEQ ID NO: 172123 - DNA, 420 bp, Arabidopsis thaliana
gaggaacgcacgcgtacgtaagctgggatcctctagagcggtcgacctttgggtttgtctatttttttggttaacaaataaaacactcatttcatgcttacaataagttcataacccaaatgaaaattataacaattaggaagaggagaggctgcgagaagagaaggccttactaaggcgattctaggtcccaaagccaattttttttcccagggtgggggcgggggacccttcttgtgcaaaacaagtgttgtattagatcactacataaagatcggtggaagtagctcaccgtgccattgatccaggaacagccctaagtgatgggggtgcacgtagcctattgcgccaccgaaaaaagtagagaaggagacagtcggataataaggagggccacacatagaaaaaaaacgagaaaac

SEQ ID NO: 172124 - DNA, 504 bp, Arabidopsis thaliana
  unsure (1)..(504): unsure at all n locations
cactcactatgggaaagctggtacccctgcaggtaccgggcccgaattccccggtccacccacgggggncgggtntaatatcaaattcattactccatatggggcgaggtggggcctctaaacgctcaagttatattaaacgcttctgggattcatatttacttttaaatattggggactttttttccttcgggattaatttagcgcgatggggaagcaaaattgggggggtgggatacattaaagggttggataataaatggagcatgagaattgccaataccactcgctgccccacacgcagttccggaccaactactcccttttgatggccttggatgactacatctaccggcgcaatggatgaaagcacggatacctttntacaaaaaactctagaagggggggatgatattgggggacgggggggcctttaactcacctgacggccgccaaaatccatataccattttggggctttgggttgggccttcttttgccctc

SEQ ID NO: 172125 - DNA, 416 bp, Arabidopsis thaliana
actctagaagattatgacgtcgcactgccgcgtacgtaagcttggatcctctagagcggccgccctttggtttttttttttttaaaatcaattaaatcgatattatttctaaagacaatacaacacagtgtaaaacaggggacaaaacagaacattctaatctatatactaatcgatgaaaaagcttgggactttgacacgtattaagctatcatcatcagactcttatgtttgttcttcttgttcaaccacttggtttctgaatagagtttcgtagtaaggtaaaatctttggaagcacatgtgacatccgcatgtttatactcatcatatcaaaggcaatgcatgtattgcgcatatgtgattcgtgaatcaccgggatctttgggtatctctgggtaaaaggtgtcagcacgg

SEQ ID NO: 172126 - DNA, 423 bp, Arabidopsis thaliana
gctccaatacgactcacttttagggaaagctgctacgcctgcaggtaccggtccggaattcccgggtcgacccacgcgtccgggggctctggaatggacaacacaacacgatgatgatcgaagagccatggctgggtgaaagcactgttccaagctgtcttgaaaacattataagagacgacatggagatagttcttttggacactggttcctcccaaccctcaaaatctcgaaatggggcggcaatttacatagacctattctctagaggcagtattctcttggattgcggggaaggtaccttaggccagcttaaacgaggatgtggtttagaaggagctgatgaagcagtcagaaccttgagatggatatgggtctctcacatgcatgctgatcaccattcgggggcttgcaagaatcctt

SEQ ID NO: 172127 - DNA, 394 bp, Arabidopsis thaliana
ccgcgtgcgtaagcttggatcctctagagcggtcgccctttggtttttttcttaaacaaaaaggcgcaattattgtctgatatgcaatcttgacagaaaaaagaccagtcttgtcgcggtttttcaacagtggcttaacgggatgagagagccctttccaaaatccaatcccgagacccaaacccgaaagatttttttatccgcagggggcgggtgccaattgggtgtgactactgcctgtagagcagattcagtcagtgctctaactacactgcccagtgtcgtacttacatcccttggatcaaaacaaaatccttcccttggaactcccgcggtctcacatcagggggagtttatattcactcaccagaaattccattaagcgtggccctgt

SEQ ID NO: 172128 - DNA, 503 bp, Arabidopsis thaliana
  unsure (1)..(503): unsure at all n locations
aagatttccagctctcatcgatcactttgggaaagctggtacgcctgcaggtaccggtcccgaattcccgggtcgacccacggcgncgggttttccanatctcaacattnaaattcaaactcaaagctagagagggagagagatanatagatagagggggaanaanaanaccaacacggagctgaaacaatgattacgatcccataccttaccggtgtatcaacggatttcaactacggctgggggttcncgtttgggcagcttcccaatactatcgcctaatgttgagtgggggggcaccaacaatctgcaggggtaccctcccatctggtgggggcatgaggatttctacatccgacgatggatcatcgggatcaggactgtgtttgacctcccattttaagggcacctgatgccttgattgatgggggtaaaaaaatctctgacaataacaacagacgttaaagggaactacaaagactggggggggccttaattggggg

SEQ ID NO: 172129 - DNA, 488 bp, Arabidopsis thaliana
  unsure (1)..(488): unsure at all n locations
agctctcatacgcactcactatagggaaagctggtacccctgcaggtaccggtcccgaattccccggtcnacccacgggggcgggtgtcttaaattaacatctcttctaaaaccctactcnancttnanctnnacaacnaaaatanccacnatanctacaaactttnaaggtgtnaaaacagtanatgaagctgacgtgggcatctcctgttttatctcccacctccctggcttccggggggggctcaaacaaaggtggcccnactttataaaataatgaagtanatatgggtgggtaatgggggtcatttgacatccttggaccttccctcctgaatggctgggaagggggaggataaaaccaaaaggttggataatgaccccaaaattatccttctgggagtgagtctttaaatctatttccagggtactgaggcaaagcgtttggaaatatttatcaatccagtcccctcaggaactggaggggg

SEQ ID NO: 172130 - DNA, 506 bp, Arabidopsis thaliana
  unsure (1)..(506): unsure at all n locations
tctaatacccactcactattanggaaagctgccacgcctgcaggtaccggtccggaattccccggtctacccacggtcncggggatttaattaaantttatncttactacaacgaananatcatccccttcttaattttctattgcttgttttgggtgctggggggcccttttgatttctaaattctttctccttcttattcaggaactggatttccgtctctaatattacttgggggggaggacaccccctatgtacganatgtctaaaaaagggccaatgacaaagatgccaaattgttccggattgccaatgtcaagcctgaaatactcagtgtggccccctcaaaatatttggctccatgactttctcaggccgaggggatggaataccctaaaacaatcccccgcctccccttaaaatttccccttgtgttgaggaaaaaccccggaagggagttaaaggggcctgaggccaacctccaaatgttcctaacttaataaaaa

SEQ ID NO: 172131 - DNA, 483 bp, Arabidopsis thaliana
ctacaagagctatgacgtaggcacgcacgcgtgcgtgagcttggatcctctagagcggccgccctttgtctgtttgtttttttttaacaaaagttgacttgccactgcaccgaaagaaaaaaagagaatttttgaaaccgtaagcgaaaaacattggaaacggttccttgattcaaaagaaaaagctcgttctgacctagagacttaccacgcccagacttgtttatcgcgggtgtggactctgccgctcgctcctggcctccaattttatgaacttattgacgaaaaagcttcgaaaaccacaaggtgttgtaccatcactgagtcccgggttaagtatccgggacggagcgcgcaaacgattttattttattatcattacgcaggtgtcaaacgactgagctgtcgcttcaccctgcggattgctacctcgggagaagagggactaaggtgaactcttgagttcttggaaaggctcagggg

SEQ ID NO: 172132 - DNA, 348 bp, Arabidopsis thaliana
actcactatagggaaagctactacgcctgcaggtaccggtccggaattcccgggtctacccacgcgtccgagaggaccctttttttacaattatacccttctccttcccagttctctcattatcctcctaacatttcttctctagatctgagaaatcaccatgggagtcgctgttcttcatcctcatgattctataatcaatcatttctccacaaacttgtgccgtggggtgcggcataaaaaaccgatcaccaattcaacactcccggagtccgtcaagtcaccaatccccagatctctcattctcctccctgctgctcataacccacaccaatcatgttccaaatt

SEQ ID NO: 172133 - DNA, 424 bp, Arabidopsis thaliana
  unsure (1)..(424): unsure at all n locations
actcacttagggaaagctgctgcccctgcaggtaccgggccggaattcccgggtcnacccacgggtccgggggtatataccatacttcnantgacatcattcatcacnaaaagaaactatagtgaatgcttgcgctctgttgttactgcacataaaaaagagaaaaaaagatgctgcaaaaacctacaaactatatgtggttgtggagactgtgacaatctnagtggggtgggatcacggnccctggtgctacanatgacatataagttctacatacgatttctaagaatttgcttcggtcattgtgcttgggtaagggcttctcacctgctttaaaaagatggatttggcagtgcgatttactgagcatatatcgagtccttcctcactgcaaaacgcaagttatttgaatcttcaattttat

SEQ ID NO: 172134 - DNA, 470 bp, Arabidopsis thaliana
  unsure (1)..(470): unsure at all n locations
aattcccggggtttacccacgcgtccgggggcgcgtaggcaacacatnaataacgcctggtggtctaaaaagcatgctcaanttacctcaacccatgaccttcaacttctgttcgggaatctcccccccctccgtccacaattgggagcacgctcacttttagaaatattaactctttacgggggggggatcacccctaagagtgtggaccatccaaaaaacccttccgggattgttttaactccttccacttctttttgcttacccttctcaccacaacgtatttttaaattttttccggaaccaaccggtttaaatccaatagggttttctttccaacggcgtccccatcaggaatccccccttttccccaaggtaaatattcaggggttttttttgttccccttccatgcaatgaaaccccaataaaatttttttccttttttttccccgaaaccttcctttacccc

SEQ ID NO: 172135 - DNA, 360 bp, Arabidopsis thaliana
  unsure (1)..(360): unsure at all n locations
ttttactctccacagaaagaaaaaaaaaacctcctcttcttttntgatcctttaangaaaaagacnaaatggcaacggaatcntacgaaaccgccattaaaggactcaatgatcttctcattaccaaagcttatctcgggggcggtccccccnccaagatcaaancnttaacaaacangactaaaggagcttgactcaancaattcacacgcaatttaacgaatcaagacctgttttactcaattcaaaacccagaaatattttaaaaatagtactttgttcaatcatcttgccaaaactcaaaccccaaaatttctggtttttcctttctctgattctccaatttttccatctacattt

SEQ ID NO: 172136 - DNA, 491 bp, Arabidopsis thaliana
agaagactatgacgtcgcacgcacgcgtacgtaagcttggatcctctagagcggccgcccttttttttttttttttttttttatttttttttgtttttttattttttattttttttttttttttttttttaagaacccatttggtgaattttttttcccgagggaccaaacaaaaacttccaaagggggcggggctttttattttttgcgaaacctttttttttgagcttttgccaattactggggaaaacatatttgaatcctcctttttccaaataattttgtgggaaataaagttccaacaatttcaaatgaccagcctgattctttcgtttgatctggcacccgttttttcattaatgttgtgacccaggcactgaagagttttttacacaaattttttgagtcatttcccgactgtacccggggtatccggtgaaaatacactttattggcaaagaaggcgccaaaacccccacacaatttgtgat

SEQ ID NO: 172137 - DNA, 486 bp, Arabidopsis thaliana
gcctgcaggtaccgggccggaattcccggggtgacccacgcgtgcgcgctgctgaggcatacaagaccctaacctcattgaagggtgtgactgcctttggatttgatttggttcgtggcaccaagacccttgatttggtcaaggcaggtttccctgagggaaagtacctctttgctggtgttgttgatggaatgaacatgggggggcaccacttttctgcgtccctaaacaccttacagggccttgaagggattgggtggtaaagacacccttttgggtctcaacctcctgctctcttttccacacccgtgttgatcttatcaatgagactaagcttggttatgaaatcaagtcatggttggcggttgctgcccaaaagggcgttgaaatgaacgctttggccaagggtttggttggtaaaaggacgaaggttttttttttgcaatgctggggctttgggttaaagggaattttccccagagtaac

SEQ ID NO: 172138 - DNA, 363 bp, Arabidopsis thaliana
ttctcttcttcttcacatagatatccattactctactcctgtaaaatcttatccctcgggggtgaaattcccctttccctccttcttcaaaaaaaaacaactaccacaaccttggaaaaaaaaaactctaaatccacccgggaattaccccttttctagaaaaaatctttttcctccccgaaagtttttttaattaaccataaattaaaaaaaacctaaaaacctcttaaaggattttccttatttccaaaaccttaattcctacatccattgttgttcccacttttaaaacataaaaaaatatgattcaaacccgtccttcttttgccctaactcatttccgaaaatccaatttttttaccc

SEQ ID NO: 172139 - DNA, 447 bp, Arabidopsis thaliana
  unsure (1)..(447): unsure at all n locations
ctgcgggggccgggccggagttcccgggtttacccacgggtccggtgcgcaatgatnatatccanngaactgctggtgttncactggctggactattgggaactgtaagagctcaagggcggccgtatccgactttgtgaccaaaagaagttgtggtggggctggaagggctgggcttggggttacttataggggggggggggcancttcccaaaatggcattatcaaaaanggtcaaccacacgggggttttaccctgttgataaagatgggcttggcaccgcggggggggcaaaacttgagccaggagctttcctttttgccaaaattcaagtgagatacgggaggggacaagtatcgttggaggggggaaaaggggggccccttgttctcctggggtatgtgggggtgggggggtcttttatggaggaagttttaggggggtgg

SEQ ID NO: 172140 - DNA, 194 bp, Arabidopsis thaliana
  unsure (1)..(194): unsure at all n locations
ccaccatgggctattttaatttctggatcacatgaatattataactacaggcgtcaggctgacatatgccacgcgtatcanatactacaaaaaggctgtttaaaagataaaaacatcattgtgcttatgttatgagggggtggcnttttcctcggagaatcctctgccaaaaaattatcatttataaaccagat

SEQ ID NO: 172141 - DNA, 343 bp, Arabidopsis thaliana
gtggggatagttatgtatttgtgctcttctgggtttaatgaacatagagggtatgctaataaatatgagttcttggaatcaaaaccccttggctctcaatatttctggggggggtggcctcaactttgggggctgttctaaaaaaaaagcttccatctgaatggggggttccttttatcaaatatttttaaagtgggaatccggcaaacggaaataaatttattgagatttcctttcagcttcgcctaatgaggaaaacgccgctaaccttttgcttatttttgctcctttaaaggagaccagttaaaccacttttccgaaaaaaaaacccttctaaggggtt

SEQ ID NO: 172142 - DNA, 495 bp, Arabidopsis thaliana
  unsure (1)..(495): unsure at all n locations
gaaagcgaccccgcctgcaggtaccgggccggaattcccgggtttacccacgcgtccgagaactaagtgaccaggaaaaanatnagtnngaagaaccataccgccaccgtatctgctcgtatcgccgccattatcgccgccaagaaacgtcgcaagtctggcaaacgcagcatgtgtcagggaatgtgttttactcttcctacactttaagaggggtggaatgaaaggcaaggtaaancttatattactaaaaagaaaaagaaaaggagaaaggtgaaaagtananaagacaanaaaccatctcctatgtctattgaaggtgttgaaaagatggatggtccaccaaagtttctgatgttaaactgggatgagattgagagctcatttcgtaaagattttacataccagggaacaacatgataagtctttggttactaatagtgcggggatttagttctcgaaatgttactcatctgggaattgattttttggccc

SEQ ID NO: 172143 - DNA, 182 bp, Arabidopsis thaliana
  unsure (1)..(182): unsure at all n locations
ccgggcccgaattcccgggttgacccacgcggccggggctgagttaaaaaaaactcnatnccattttnctttnaaagtcatggataaagcgtctcttgaggaccggaagaaggttaatccagctcanacccgagagggatattctccaactattgggatcatcccgtttctacccacattgg

SEQ ID NO: 172144 - DNA, 424 bp, Arabidopsis thaliana
  unsure (1)..(424): unsure at all n locations
tacttaatttnacactcttctttnnnttttctcttccaccttctttttcgggatatcattcaacaaaattctctcttcatttctttattttcttnntttttttattatttttnaaatcttttttaggggggggggccctttccaaaagaaaattataaaaaaaaaaacctcctcttacggaggggggtggggtttcctctttcatttagcttttgcgacggctgcaaactttgcgccaggggcagcggccaagctggcttggggttttgggaggaaaggggtaaaaacccttttttttaaaagggggagtgtttggtttggggggttggggtgggggataatgccggggtttgggtctaaagcgcaggttggcgcggaggtgggcgtgaagatgcgggaagaggcgggggatttgggtgaaggg

SEQ ID NO: 172145 - DNA, 470 bp, Arabidopsis thaliana
cgcgtgcgtgagcttggatcctctagagcggtcgccctggtggtttattcttaacaagatcatagctaccttcaacaccacaagtcatatctacacagtttcggcactttccatcttactgataattaccaccagaaagagcttaaatagtataaaatgccccaacaatcaaatcttcttcatggctcgcatgcataaaggtggtgactaaagcgctgctcgatggtccaatcagctccttgacctcttttgcttttgctgtatgaagcggacactgtgcttcccaagttcaaatgtcttgatgcttccatcatctagagaaaccgacaatgtggatgtgtctccagaaacgtctgtcactgttcccttacgccatgagttttgagatccatggacttcgactctctttcctattgaatctttacccaactttttcaaaatccagttagcatccatcatctaggcggtcc

SEQ ID NO: 172146 - DNA, 500 bp, Arabidopsis thaliana
  unsure (1)..(500): unsure at all n locations
acgtaagctcggaattcggctactagttttcgnctctggggtagggcgcccaatatctccgccggcgggaaaaccatgtcgcacttcggaaggtcaggtccaccggatatcagcgacacctactcacttctcgtccttaacatcaccttccgtacgactgctgatgatctctatcctctattcacatagtcngttagaagtgggggacgcccccatccccaaagatcgaaggactggtgactcgcgtggttttgccgttgttccctataattataaagaccaagctcacaaagcatgtgaaaagggctaattggaaaatatttttttatggccaaacaaatacctggttaggtttgcgaaatactgggccaccatgctggaaaaaatttccaaaaggaagagtttgtggcacccacccgcccaagccaccgaaaacctaaaaagcccgttagcctatggcgggaggcgccctcctagggagggggcccccacccccccta

SEQ ID NO: 172147 - DNA, 491 bp, Arabidopsis thaliana
  unsure (1)..(491): unsure at all n locations
gcaggtaccggtccggaattaattcttgggtcgaggggcaagcggtcngaggcacaacctttttttttttttggggaggtagaatgctatgaattccaaaccagagaagattcaaataaaacagagacttaaaaggctgttcaaacagtaataattcttgcacatgaacactaaaccaaaactatcttgggtataggagtgtgcanncancactcagtattttgagggcacctaccgcaagcaagggatactacgggggggtacactttccagggcttaatggggaaacatcatcacggcaagcgagcgtgttttttatgatacaccggatcacttttacaggggggtggagtcattccgcagcataagggagtagactttaaaaaagcggagtcaacctttggccagagggaggagggttcccagagagggggggcctctatttgcttcgcctttcaggagaaagcttcttaaagggggaggccttttgc

SEQ ID NO: 172148 - DNA, 233 bp, Arabidopsis thaliana
  unsure (1)..(233): unsure at all n locations
gcgttagcngggaccctctagagcggtttccccggggggncgaaggcgngcaacgaaganaagacagaganngggggaaggcanaagnnaagaaaagagagacaanaccggaagaaaagggcaagaaagtatattatgcatctaaaaatagaaagacacgcatagcatttgtggtatcaaaaattctttttctcgagagaggaaaagncccnganagcaagngaggagacagg

SEQ ID NO: 172149 - DNA, 487 bp, Arabidopsis thaliana
atgacgtcgcatgcacgcgtacgtaagcttggatcctctagagcggccgcccttttgggttgggggttttttttttttttttttttttttttttttttttttttttttttttttatttttttttttataattaaattttttttggaaaagaaaaaaggaatacccggggattaaaagccccaacgggaaaagaaaaacccctagccaattggtcatggggggggaaaacaaccgtgttccggttttttcccaaggttgaaaccctctgcccgggggggggttcgctccccaatggccaggaaacgaaatccgctaaacctttggaaaaccaaaaaaccggttttaaaaaaagaggggggctggcccattaaaaggagaaagggccctttaatttttgttaaaaacacgagttccttttcaaaaaggtggatccgatcccacggtagaaaaccaaaggcttaaaaaattaagtgccatgggaaaaaat

SEQ ID NO: 172150 - DNA, 521 bp, Arabidopsis thaliana
actacgactcacttttaggggaagctgctacgcctgcaggtaccggtccggaattcccgggtcgacccacgcgtccgcccacgcgtccgcccacgcgtccgccgcagccgctttagccgccgcttcaatcgtttttagaaaacgcgatcctgcttattccagacttctacttgaccgtgccactagggtattcgcgtttgctaacagatatcgcggcgcgtctttaacagtctgtaccacgcggtttgtcctttttactgtgatttcaacggttaccaggatgagttactgtggggagcggcatggctacacaaagcctcgaggaaacgagcgtacagagaattcattgtgaagaacgaggtcattcttaaggctggagataccattaatgagtttggttgggacaataagcatgctgggattaatgtcttaatctccaaggaagtgttaatgggaaaagcagagtatgttgagtctttcaagcagaacgcagatgggtttatctgttctatattgcctgg

SEQ ID NO: 172151 - DNA, 536 bp, Arabidopsis thaliana
cagctctcatacgactcactattagggaagcttgtacccctgccggtaccggtcccgaattcccgggtcgacccaagccttccggactttgcaaccagctcgaaccattctgaacccgctggaaccaccgcttaggtcaaggtcgtgtcttttgaatcccaaaccaggttcccgattctttcacttccaaagaacaaaagaaactgcgaaagaaaaccaatttggggtaagccagttcttttttttcttccggagttaatggatttgggtaccctggtaaaggaaaaaggcccaaaacccacctccaatggttaagcccttcgtaccgtccaaaacaggcctgaaccacacaaaaaatcaccaccttttgaaggaagaagaagataatttatggaaaaattaccttggaggagtgtgcttgatacggaacctggacacaacccctctttaaccacaaacacttggttttttaacctcaggaccggtaccaccaccacttggaacctaataataacctatctctctccccaaataaa

SEQ ID NO: 172152 - DNA, 509 bp, Arabidopsis thaliana
  unsure (1)..(509): unsure at all n locations
cttacaagactatgacgtctgcatgcacgcgtacgtaagcttggatcctctagagcggccgcccttggtgtttgagctttttttttttttttntaaaaaaaaaagagagcattattctatttttcgccatgcttaacgatcaagaattttagctctctctactttcattttccccctcatcaaaatttctcgatgttgtttcgtttccaccataatatggacttacttgtctgagtatatatatatatgctaatttatttctctgccccgattatttatgcctaattattttatttacccccaatcccccatatatatatatataaactcatcagtagaagaactccggctaagtcactagaactccggtggagaaaatttggccggcggtgtaaggagaggttganaattttgatctacatctctctttcctttcatcatttgctatatgactcgatcgacactctgtgctgcaaaatgctttttctcctctgtaaataaatatgtca

SEQ ID NO: 172153 - DNA, 440 bp, Arabidopsis thaliana
tgacgtcgcatgcacgcgtacgtaagcttggatcctctagagcggccgccctttttttttttttttgggagaggaaataaaacttttattgcttaagaaaatggatccactggacattataagtttaaagaacaatgttttcaactgatgctgagaagttgtgttgcagaccaagactgtcccggctctagcttgacatccccaagcttttttttgtggacgcacacaaagactctgtaacaagcctccatctgagtatgcgggttccacaagaccgcattcgaccaatttgggtttttgatgattattttatcacccaagccattatcaaactggaattcattgggagcatcaagatagacggtttccacaaatccaggaaaagagactgcctacctgtcttctttaccctctattgggttcttaggggctggatcctt

SEQ ID NO: 172154 - DNA, 351 bp, Arabidopsis thaliana
  unsure (1)..(351): unsure at all n locations
ganccactagagcgtttcccgggggtttatgcgaaanacgcccngnncaacgaacggataggagggggttttttattagaaacttggagaaaatccagaattttacccggggatttttttctttatcaccacacctaaaaatggaagtgtctttccaaaagcacttaaaactatttttttagggnggggaagggaaaaaaaaaaaaaaagaagcgagggagnccncccccaagagcggcggggggggggagcccaagagccgncccccggcaacaaaaccnangacaggggggcgcgaaaggaacaacaaaacaccacggggggncggccagggacacggaaaaaggggac

SEQ ID NO: 172155 - DNA, 476 bp, Arabidopsis thaliana
  unsure (1)..(476): unsure at all n locations
tccggnccggaattcttgttgacccacgcggccagggcgaaaggcacatctctgcgccttttctacaagaaattcaccaaaaaagcttgaatatttatcggaatcaaagcttgggtttttaatcctggtaaagccatgtcacatatggtgtgtcagagcgttgtcgctcccaaactcttaaatcgggggaggagcccgnnnacctatccctcggccactaagaactctcccttgtaagctccggcggggcttccatagagcttcttcctcctcgtttcttggcgatgattcagtttcaggactcgagcgtgtgttacagttaccttctggagttgagttagggcccttttcctctggctctttcttctgaagtacttagatgtgtcctgggaggaaaggcaaatttgggtcggtaggagctgttactttggaaaaggggaacttgtttgacccacaaaattctgagaccacccctg

SEQ ID NO: 172156 - DNA, 501 bp, Arabidopsis thaliana
  unsure (1)..(501): unsure at all n locations
cgcctccaggtaccgggccggaattccctggtttacccacgcgtgcgaggcgcgtacacgattcaccaggggtggttggactttgatttttccttgtagcatacttacaacagatgacatcggtggtctcaatgttggagatgggtttgtacagagtaaagctatgttcaacatcctcattgcggcnntctttctaaagggggagggagancnggatccacgagttctagaagactcccttgctcttgcaagacatatgcccagtcaagaaggtaaataaactcttcttttggtctgtaatttgggttgctctttccggtaacaatctctaaacagactacacccaagctataaacatctgctttgtctgttaaagaacctctcattgcatactctggagccatgtaccctctgcatcaatgaaatattaaggcgggaagtgttaaccctttcgcaaaaaaaaagaaagcgaaaagagacagccgggcggggtgcgctatg

SEQ ID NO: 172157 - DNA, 532 bp, Arabidopsis thaliana
cagctctatacgactcactatagggaagctggtacgcctgcaggtaccggtccggattcccggtcgaccacgcgtccggtcaagctctcatgatttcacaccatgctttcacttgaccagaattcgggcatgctatgggaccaaaacacgtgggaagttgcaaatgaccgaatggcatttcaaacgcttctcataacggacgaccttttcaggatttctgacgtgaaaacaaggaagaagtatgtgaatttggtggagtcggtaaaagtttcgggaggagatgcttttatattttcggcgatgcatgtgtcaggagaacaattggcacagctgactggatagcagctcttctcaggttccctttaccagaactcgaagacattgagatgtaaaaaaatcttcggcttatagaaaacaatacaacaaatcatacacatctctcataatttatagtttatttgtactcagtgtcataaaaagagatttgtaactcattacaaattataagataaccattcgttgctgttttgtt

SEQ ID NO: 172158 - DNA, 500 bp, Arabidopsis thaliana
  unsure (1)..(500): unsure at all n locations
gtaccggnccggaattcccttttttacccacgggggcgagggcgcaanaacaaacnccnnnnnncnncaaaaaaaccnctcctttatctccggaaaaattcactcactggtgcttttgattcatatcacaacacactacactctaatggctcgggcgacggaatttcaaggcgcatccctgagtttttaatagggtgcgggcgaataanatcgggtccatgggtggaaatcaccacccagagctcgaagaactcgagtatttccaaaaacacgtagccgaacggttcctcggatttaatcacatgtccatctccggctccttcctcctcctgttccggcgggttttaagcgggtgatcccattctctcgacccctgggtgccgaaacctttaaatgttttaatggcccgggagcagagtcaaggggggggtagaccccacccaaactcgaaatcgcctcttaaaaagggttttccggaaagcctaaaccggttttaaggg

SEQ ID NO: 172159 - DNA, 522 bp, Arabidopsis thaliana
gaatccattagggtgacacttattagagagctatgacgtcgcatgcacgcgtacgtaagcttggatcctctagagcggccgccctttttttttttttttgtcaaacaagatcttcattcattcaatcctcaaaagaaggaggttcatacacaaagacataagataatacaatgaaattaaagataggggcttcatgagtttttcaaagagatgtgtacttttaaaaaaagcttacaaggattgaaagattcgaccatgaagtcgggcttggcgaaatccttgcaaacaatgcatccgagcttttgatcatgtgctccacggaggaggatgttgggttggtgaggttgaaaaggaaacggtaaccaactctaaaagacatggtcataatgccgtacttttccaaacaaacagaaggttgcaaattatccaagcaaaagattaatacatgactgaccttgataattggtgtatgggtagatagagagttgtagaggcttcggtaacacctactccgtagaaata

SEQ ID NO: 172160 - DNA, 443 bp, Arabidopsis thaliana
  unsure (1)..(443): unsure at all n locations
caggtaccggccggattccttttaccccggggcgggggcggtattgaaacaaancatgganncaggggtcggntagctaatccaaatgaagattatatatccccacatagagaagcaaatattatctcactgaagattggtaaagtccagcaagaaaatgagataaaagagaaacccccctcgtcggaagtgggaggngcccagagccgcggcgcaggacgagaggcccccccagcgggggggggcgagcaacaaaaagaaccancncgccacagaaaggggacaaaacacagggggggagcacacccggaagaaaaaacagaaggccacgggaagggcccccccccggggccccgaaggaggcccaagaggacgggggagaggaannncaaaaggaagaagcccgccccggcagaaggcacccgaaagggaaaaggcccccc

SEQ ID NO: 172161 - DNA, 413 bp, Arabidopsis thaliana
  unsure (1)..(413): unsure at all n locations
ccgcaggtaccggnccggaattccctggttgacccacgcggccggtggccaatggcgacatggacaccaagctctctgcagctcagaattgccctaaatcacggtatcttcaaagctccggagagagcgaagatgaccaagctcagtcgtcgtctccgtatatcatggccgtcgcgcgagaacnngcagagccanttttnntgaggggggggtnngagagannnacgggtcnnggatcgtttttcggaggggtgggctcgcattcggggagacgagtgagaacaatctctcgcgggtggcgagttggtttaaagggaaccccttgttatctggagtgtgctgggaatgggttttgtttcggtggggcttaacttaccgcaggcttttatctttccaaaacggcaatggtctta

SEQ ID NO: 172162 - DNA, 476 bp, Arabidopsis thaliana
  unsure (1)..(476): unsure at all n locations
gacgtcgaacgcacgcgtacgtaagcttggatcctctagagcggtctccctttttgttttttttttttaaaagtaaagcgatacataacaggtcggcccagataagtattacatcgtgcaactgactattactgccagaatctatcaaaaaacaagacacggactttgataaagattgtataaagaaaggattaaaccgtagctcattttttctgggacanaacagatataaacagactcactcaggttcttcctcgtcatcagtgtcacctacaaacatggaagccattttcatcgctaaatttgcagctatttccctcctctggaaatcaggcatcaatcgcaagttgtcccggatgtttcctatttctgacatcaactgttccacatcttcaaactcgtaacatttttcattttctgtgcccaaaggtttttcatctgttactattgctctgtcagtgtcattttgcagctct

SEQ ID NO: 172163 - DNA, 504 bp, Arabidopsis thaliana
  unsure (1)..(504): unsure at all n locations
gtaagcngggatcctctagagcggttgccctggggggttgatgcgttttttatatttttnaaaacaaggggaggggcttcaatgaatgagtacaaggagataaatatcatacatagaatcttgtaattgtgtatggaagattacaatttgcacttgaaaaaacagaggtncactctgcctcggatcctcgttctnagatgaaccccaagcccacgcgaaacagcaccgagggggccggcgcaacagtggggctccctggaccttaaactagaccctttggaaaccccaaaggccctgggatggagagtctacgtttgccaacagctttcatactcaagaatccttcattaagtccttttgatcccctggccagagccaacgagaaaggggctaccggattttatttcccgcggaccccgggggtcccccccgaaaattccggaccggggccctgggggcggaccacgctttcccttatagggaggtggaattaaaagcttgggg

SEQ ID NO: 172164 - DNA, 450 bp, Arabidopsis thaliana
  unsure (1)..(450): unsure at all n locations
gcctgcaggtaccggtccggaattccctggttgacccacgcgtccgagcgaaataaatacggnagacctttctcgttggctctggccaggtgatcaaaggacttgatgaaggaatcttgagtatgaaagctggtggcaaacgtagactctacatcccagggcctttggcgtttccaaagggnctagtttcactcccagggagtgcgagagnngcgccaaacagcccggtgatattagacgccagcttagagttcataccaggtctcgattcagaggaagagtgaaactctgttttttcaagtgcagattgtaatcttccatacacaattacaagattctatgtatgatatttatctcattggactcattcattgaagaacatcacattgnttttaaaaaaaaaagaagagaaaagnngggggggccgccggtctaaaggatccaagctta

SEQ ID NO: 172165 - DNA, 471 bp, Arabidopsis thaliana
  unsure (1)..(471): unsure at all n locations
gacctctagagcggcttccccggggggnaaaagtcccttaannaaccaaaacgaaganctgaggggcnnacagaaagagcnacagaccgcccatnnccagagcgccaaagggaacttttttacattagagactcgagatattccgcgggaaggcggcgaacatcaccaaagcttgccttaaaagaagctggggcccgccccnggggagacaagctgcgggagaaagacccccaaaaggggcggggggagccacacaccccctgggcaagcgnncccacgccccaaaaaacccccggggcaacaggggggnanggcaaaaaaacaagaggaaccccgggccccgcccagggaacaccccacaaaagacccaccagcgccccccggggccccacgcgaggcccccccgagaacaccccaaaccccgaaaaaggaacggcaaagaaaccaaccccgaggaccccccaaagagcc

SEQ ID NO: 172166 - DNA, 390 bp, Arabidopsis thaliana
  unsure (1)..(390): unsure at all n locations
accaacccaaagcaagcgcggggancancccgnncacgagaaaanacagggggcaacagaaatattatcccaagttctaaatcagagagaaaccacacatatacaaccgnattncggaggaagacaaaacccctttcatanagtttggccnaaccccaaggaggccgaagcgaaaggaggcccccgaaacagagggcggggcccaccaccgactagagcagcnnaaaccccggggaaaaagagggggacccaaaagnccgaaaaagacccaaaacggccagaacaccgaaaaaaaaaagcgccgggcccaaaaaaaagaaccccaacacccacaggaaccacaaaaaaaaacncagaacccccaaccgccggcaaacaagaaccgggggg

SEQ ID NO: 172167 - DNA, 487 bp, Arabidopsis thaliana
gacgtcgcatgcacgcgtacgtaagcttggatcctctagagcggccgccctttttgtttttttttttttttttttttttttttttttttttttttttttttttttttttttttttttttttttttttttttcccaaaagcccaggcttgaaaaatttacccaaaaaaaaagaaccccagggtttttaaaacccaaagaaaagtgcctttttgttgggggggccccaaaccagaatttaagggactgaaccacccaaaaatttttaaaaaatttccccgcccggcaaaaccagtaaaaaaaagatacccggcgcctacccaattgggcagggaaacgaacaaaagggggcctaaccaatggagcattgccacaggaatcctagaatttgacgggtttacccaaaaaacaaacatttgggttgggttgggaaaaaaaagaacagttggggaaaaacttgggaaaaggaaaaatggggcagctctcgaaa

SEQ ID NO: 172168 - DNA, 635 bp, Arabidopsis thaliana
  unsure (1)..(635): unsure at all n locations
tacgactcactattagtggaaagctggtaccgcnctgcagggtacncgggtcccgnggaatttcccggggctaaggattctagggtgcggnctggtttagcccaacaaacngtanattcaccttggtgtnntcaccatttggtggttggtttggtcatttctttgtgtgtcccaattccttggttcccaatcattgaccaaagtttcctttcacgggagacaaaccgagcctggatgacacaatagaaggacctcttgtccaaaacgagattttctataaccagactgcaaacacctgatctaatctttgaagtgaagtggaaagatgaagaaagcccaaaaggatgtaggaatttggcttccctggccttcaacgagagaacataaagaagaatttgccgcattttgcaagcaccagctaattgcagggcaggtngcaggaagggggccggttccgggtggaatagacnggagaagggcccgcataagaaggggaaggattttcacttctaacgccagggcacttgggtgaaagnccgactttctgggctcatttttcttctcctttgcttgcttggttctgggttcggggttggacagttaattgacaattcttggtcagattgagtcagtct

SEQ ID NO: 172169 - DNA, 163 bp, Arabidopsis thaliana
  unsure (1)..(163): unsure at all n locations
cggtccggccggaattcctttttacccgggccgagtcnnttcaagaagnatgggctgggaatgtcttaggagcaacatgttgtaagtctctattattgctcaatggaattttctttatcaaattgggatggtagctgaatctccagaagataagaaaacaggc

SEQ ID NO: 172170 - DNA, 439 bp, Arabidopsis thaliana
  unsure (1)..(439): unsure at all n locations
gaccctaagcgtcgccggggggaggcgnaacaccaaaaacacaacaagggacaangagcngccaccaaaaaaagacccggaccaaaacaaaaaaccaacaggaaccaacccaaaacccnnnancacacggcaaagccatttttttgggggggccgacagnaggctggtagtttctcctgatggcgcatcctcctgagagtgagcaggaatcttgactgatgaagctctctccatttccctctcaagctcttcctcagacatgagagtggtaaactgcccctccagcgatttagctgctgctaaccatgcagggactataccgagcaggatgactccaaggtaaggcgtggaattggcgagtgagccgaatgtaaggatcatgaactgctggattagagcaccgcctgatttccccaatgggttgcagaccacaataatt

SEQ ID NO: 172171 - DNA, 513 bp, Arabidopsis thaliana
ctttaggtgaacacttattagagagctatgacgtcgcatgcacgcgtacgtaagcttggatcctctagagcggccgcccttttttttttttttttttttgacgaggcaaagaattattactgatacaaaaaacacagatgtttttttctataaactgagagatttcaaacaatgaaacaagtgaagttttctcaaggcaaaaaattaaaagaaaaacaaaaatgtggtggatctaatctaaaagtggcacaagtaaagtaatagtacaactccttctcactgctttcacctgcacacataatacaaaaactgttttgttaaaaagaaaagaacattttcagaatttgaaatacataaaatctcatttaaccaattttgatcgagaaaaaaagatggtatagcaaatgaataaatcctagcattctgctttcaaaatgctctgatcaattgtttggtgtatgcggttccagttacggttggttccagttacggttatggctattttgggtaacc

SEQ ID NO: 172172 - DNA, 440 bp, Arabidopsis thaliana
  unsure (1)..(440): unsure at all n locations
gtgccggnccggaatnncttttttacccacgggggcggggcggttaacaaanaacctaaaanannatggttntctggactaccttaaaagaagggccccaacttcctttaagcctagaggtcttgaaagcacatgggtctgactccgagaagcttcctatgcattacaaagggcaacattttttttggggggtgggaacaanncnccaaccaannnnttataaggagacgccccccttatggaaaacacaggcccagaggggattctcaggaactcatcacaaagcccccgctttcatcttcagggcgccctcacatacaaaaaaaaccccacatttgaactgcgaacaggagccttctggatgacaccaccaaacctttcggggagaaccccccttggggaaactgggatgccgggggaagggcctttccccagggccc

SEQ ID NO: 172173 - DNA, 469 bp, Arabidopsis thaliana
  unsure (1)..(469): unsure at all n locations
ccggaccgganaacccgggtcgaccgcgcgngncattgcggatcacagcnngaacaccccggacggggggganggaaccgcncgcgccaagccngggcgcgagagccaaacggagacggatgtttcggnttcgacgccagtgacacgtcagaaagctgctgcagcaaaacaaaacattcctcctaggaagtaaggnacacaccgggcgggcacgaacgaaagaagacccccccggaggggggggggagagcacaacaagcggggggggcccccgaggaacaagacgagacgaggggggacccggcccgccgagaaaccgaggagaggaaaccccagagacgaaaacaggggagaggggaccacgagccgcggaccagaaaagcaaaggggcccggggggaggagaaccacggagaccagacccacagccgcaggcacgcacccaaaaaaaggaaaaaaaccggcaggcc

SEQ ID NO: 172174 - DNA, 219 bp, Arabidopsis thaliana
  unsure (1)..(219): unsure at all n locations
tgcaggtaccggaccggaattcccgggttgacccacgcgtccattgcaacttacctatctntacattcaatatgaggagtttgataatgctgcaaccactgttatgaatcattctcctgaagcatgggagctcatgcaattcaaagacattgttgccaaggttgcgaatgttgagccccacaanatggctcctcacggngtgcgggcaagagcacccgg

SEQ ID NO: 172175 - DNA, 497 bp, Arabidopsis thaliana
ctatagaagagttatgacgtcgcatgcacgcgtacgtaagcttggatcctctagagcggtcgccctttggggttgggggtttttttttttattttttttttttttttttgttttttttttttgtttttttttttttttttttttattttttggttttttttttttttttgaaaaccccggtttccggtttttttaaaggggggggttcgggggcagcctttaactcatggggggggaggaaaaaccaaaagggtgttgcccacaaaagggaaagaacttgctgggggaaccctggtaaaaaaaaaaaaaaatgttttttaaaaacaaaaagtgaatttgatgggtttccccaaaaaattttttggggggatttttttgttattaacgtggccttgggggggaaaaaatttcaaaggggagctttgggggctcttttttaaaagggggtttaagagggaggccccctttaggggaaaaaaactcctggcccggtttta

SEQ ID NO: 172176 - DNA, 466 bp, Arabidopsis thaliana
  unsure (1)..(466): unsure at all n locations
gcaggtaccgggccggaattcccgggtttacccacgggggcaggggcaaggaggaagatatcntnacggtatctgataattctttgactgtgcatgagcccanagtgaaggtggatttgactgcttatgtggaaaagcatgagttctgctttgatgctggtctagatgaggatgtttcaaatgactattttgatggccggcagaattnacccaataattcccattattttacaagagactaaagctccatgctttgcatatggccaaacagggatgggtaagacatttacaagggaacccttacctatcgaagcaggtgaagatcttatgaagggtgttgggcaacccgataccggaatcagagggttaaatggggggcgtaactttttttgaaatatagggggggaaaggctggtccatcttcttaagggagaaaaaagaaacttttgctggcaagagaatgggt

SEQ ID NO: 172177 - DNA, 179 bp, Arabidopsis thaliana
  unsure (1)..(179): unsure at all n locations
gtccggaccggaanacccgggtttacccacgggggcgaagactntggacaaacagggcggccgnnncgggcgctngncnngagaaaangaagagagagagacangggaagaggcagggcccanctttagaggatagagaacaagatcaataggcaagttactttctcaaagagaaggcc

SEQ ID NO: 172178 - DNA, 529 bp, Arabidopsis thaliana
  unsure (1)..(529): unsure at all n locations
cagctctctacgactcactttanggaaagctggtacgcctgcaggtaccggtccggaattcccgggtcgacccacgcgtccgaaaaaccgagagttgcaattaatgcgactaatggaccatccaaatgtggtttccttgaagcattgtttcttctctacaacgactagagatgagctcttcctcaatctcgttatggagtatgtaccagagacattgtaccgggttttgaagcactatactagttcaaaccagcggatgcctatcttctatgtcaaactttacacataccaaatcttcagaggcttggcttatatccatactgctcctggtgtctgccacagagatgtgaaaccacaaaatcttttggttgatcccctcacccatcagtgtaagctctgtgattttggaagtgcaaaagtactggtgaaaggtgaagcaaacatatcatatatctgctctcggtattaccgagctccagaactcatctttggtgccacagagtatacatcatccattgatatatggtct

SEQ ID NO: 172179 - DNA, 482 bp, Arabidopsis thaliana
  unsure (1)..(482): unsure at all n locations
cgcctgcaggtaccgggccggaattccctggttacccacggggcggaggcgcgtacgtgacaattaaccttgacctaaagagaggaggaaacggaaggttcttgaaaactgcggcttacggacactttggaagagacgaccctgacttcacctgggaaggcgtcaagccactcaagtgggacaaacctcatntttaaaggntgtcggcgncnggnncnggggtcattccacaaaccaattatctgctcactttggtattgctctggttctgagggttatgggggttatggatcattggacttgagctatttcaatgggggtgtgtggttttatggcgaccttttaaaaacaaaacccacgcagatgacgcccgacccaccccccccgggggcccccggttnaagggggcggggcgggggggggccgccttgcaaggccccacctttcctggcggggggccctgaaataaaataacccgtcca

SEQ ID NO: 172180 - DNA, 329 bp, Arabidopsis thaliana
  unsure (1)..(329): unsure at all n locations
gacgtcgcacgcgcgcgtacgtaagcttggatcctctanagcgggcgcccttttgttttggttttttagtgaacataacaacttatatgtttgattaaacgtaacaagatcctcaacttcacaattatatgtttgattaaacgggacaacttagtgaacttacaaataaaaattaggaaactatataattcaatanatacattttgttntgagggggggtaatcaaatcttcgggtgcaacaaaacaaaataaaacaattgggtccaagggtcgggaagaccccggaaacaccaatggctacaatcagatgaacgggcaggattttttt

SEQ ID NO: 172181 - DNA, 333 bp, Arabidopsis thaliana
  unsure (1)..(333): unsure at all n locations
acgcgtacgtaagcttggatcctctagagcgtccgcccttgggttgggcgttttaaaaaaaaaaaaatntatgtgatattttccagtttccacactagtacaagcgcttttgacacctaaagagattgctttgtaagaaggcaactggatctccattctaatagtacaagataatgaagcaacatattctcccagggggtgggtacctttaaacgttcacccacacaaaaaactcaacaccanntttctacttacctatncttnnntaaaattnncaaatcaacaaacatcatatttcctctctacacctcactggaagacccactccttaca

SEQ ID NO: 172182 - DNA, 299 bp, Arabidopsis thaliana
  unsure (1)..(299): unsure at all n locations
tgattcgccagcttaatcgactatataggaaactggtcgcctgcggtaccggccggaattccggtcacccacggtccgggtgcgtgaaggaattatannatnttnatgggtggagaggaggattatgaagtgcttaagaggtctaatactcctcacatgttttgcaaaacccttactgcgtctgatacaagcacccatggggggttctctgttcctcccccagctgctgaggatgggggcctnctctggactatagccagngcccgacttctcaggagcttcttgctaaggatcttcat

SEQ ID NO: 172183 - DNA, 399 bp, Arabidopsis thaliana
  unsure (1)..(399): unsure at all n locations
gtttttttatataaatttttnnnnnaacgggttattactaataattttcggcccactaataaagttcattccttcccgccaaaaaactatctattataaaatctatcactatacctttcgtgaacaagctaagatccttccattccctataaaaaggggggttaatttagacgatttcaattataaaattttggacctcgtttcccaacttgtccctaacctgtngctctctctcatttctccacattgaacatcctaccaaaaattttcctaatcaaaatcaacttccccgattcctaaaaaataactttaacgggcccaccaacctttgcctaaatataatcccctaccccctcttaaaaaattataatttccctttaacaaaaagttgccaaaaaa

SEQ ID NO: 172184 - DNA, 500 bp, Arabidopsis thaliana
ctatgacgtcgcctgcacgcctacctaagcttggatcctctagagcggccgcccccgcgcttttggttttttttttttaattttaataatcttttaaacccctatttttttttcttcctttattttttttaaatctaaccttttggaaagggggtggagttcacctttttttaacaaaacttccccccctttgttcgattttaaacaaaaagtttaaattgtgtttttttacaaatcgaaaaaaatttgagaaaaaacaacctaccctcccctaagttttaactaacccaattgctcccaaccccaaatttctctttaaattccagctcctcggtgtttcatttaaaaaataaacactcttcctttaaaattgaaaaaaaatcccccccctttttcttataaaagaaagtttttcccttttcttaaaaaaaaaaaaaaccaactccctttcataaaaaacccccctctcaccccaaaagtttttttaatccttttaaaaa

SEQ ID NO: 172185 - DNA, 355 bp, Arabidopsis thaliana
tttttttaaccataaaatcatctctttaaattaccatccctgttcttcaattacacaagtgattccaattccaatcaaaccacaaaccctaaagatcaacacaaacctaatactctttgatcattcctttaaaccccttctttaattttttctaatgaaggggggacttttcctaggtgttattattttaacacaataaaattatttatccaacttttcccacaacgggataacattctcccagtatcggaattttcaatcctctaacccaaattattcccaagaatcttcctcctccccttaccctttaaaccctcaatataaaatctctctaacccaaaaacccctttgcttt

SEQ ID NO: 172186 - DNA, 519 bp, Arabidopsis thaliana
  unsure (1)..(519): unsure at all n locations
tctgacgtcgcctgcacgcgtacctaaacttggatcctctaaagcgggccncctttagttttgggtgttttaacaaaatattattggtttatataatatatctaacacacacgaaaataccaaccctaaaagctacatttagatttaaaccagaccattgattcttctataaatgggtcggggggatcccttaaaaactctttacccttttatcaggaggggggattttttcttaggtacgggaaaaaaataaggggtatgaggaaaactgtggtcctttcggtaaaataacagggggccttaccccttcaaatgggggagtgggccccttaaagaaaaggacccaagcccggtgccctcccccgggtggccccaccaagaacaggttggtttttgttggggctttggaaagggcccaacacaacgaccgcaggtgaagcatcttttgtggttttggccaaaacctcaatgcccacaaaaaaacgcgcaaagcccccgcgagaacgggaagctttttcc

SEQ ID NO: 172187 - DNA, 165 bp, Arabidopsis thaliana
  unsure (1)..(165): unsure at all n locations
tggtttttttaaataaaacctcaagagagagccagcctctaataagaaaaaggtgaanatcccggcttacatattatttaataaccactctctcaaggacctaggaataacaaataatccttggaatggttatcaaatattatctanttaataacaagggggggg

SEQ ID NO: 172188 - DNA, 568 bp, Arabidopsis thaliana
  unsure (1)..(568): unsure at all n locations
gtgcactctagaagagcttgacgtcgcatgcacgcctacctaagcttggatcctctagagcgggcgccctctgagcgggggggtttttaattatttttttttttttacccgggaggggagggaggacaaaccactacacttttttcttgttccttgggcaacgagaaacaaaaaccttctactttttttcatcaggccttttcctctttgttctctaaacttaaaattttgaggggggggggtactttccttagggcgtatcaaacaaaaaaatcttaaaaacgtcaaattttggccatctcccctccacagagccccaacgacgtcctccgaggacaccctggaccctttacccaaagaccccctcgcgcttttacactctccaaacccctgccccgcgcgacggagccagggccataaaggtctattacggctcttttggtttttcccatccccaacctaagttcgtganatctagagccatctaaacgggctaacaccctcaaaatcctagagacgtcgacctccccttcggcaccgcctctttttgtctttccacactattgct

SEQ ID NO: 172189 - DNA, 540 bp, Arabidopsis thaliana
  unsure (1)..(540): unsure at all n locations
atgacgtcgcctgcacgcgtacgtaagcttggatcctctagagcgggcgcccctcgcgcgttggggttttttaattttttttttatttttttcctttcgttttgattttcatacttttccccctcttccccccccnacaaaccccnnccnaaaaaccccaaaaaaatgaaattttaaagccgccctttttaacccccccttttaacccctcctcgagggggggtgttaaaaaaaccgcgccccanaaaaaaaaatttttcatcacccccgtggaaagggaggggggcaaaggggtggggggggcatacgcttttagcgttaggggatcgaggggccgggccacctccgggggggcgggttattgcccccccttatgtgggaatttctttggggaggcggggggtcaaaaaggggttgtctttgaagggggtgcaaggggggggggggcgccctgggggggggggacgacgttcttttagacaaagcggggtggggaactttaagggggcgacccgcggggacccccaacgtggggggggg

SEQ ID NO: 172190 - DNA, 458 bp, Arabidopsis thaliana
  unsure (1)..(458): unsure at all n locations
cccctttagtttttttttttttaaacataaaaagacatgcaaatttatttattcaagcgacggttctataaaactgtaaaatatcacaaacacctgcaaagataaaccaggattagaaaccccctaccaaagcacaatgtaagaaacattcccaccttcacactccattgggggctanattnaactcaatgaccattttccaaaataccctttnaaacacctgtttgcccgaaaacaaagtatgtttgcatttttacaaaagggtattcctggacaccctcttaaaccagggatccctttgttcctgggcttcctcttgtgccccaaggtcttttttccttatgccggacccccggaataggaaggggaaagcgcccccggcaaaccccctaaaaaatttcatctttattttccccccggaattccggacccgtccctccaagcctaccctctttccc

SEQ ID NO: 172191 - DNA, 426 bp, Arabidopsis thaliana
  unsure (1)..(426): unsure at all n locations
aaaaactttttcttttcttttccaaagggcttaccacacacatacataaggttaagaacctttaattgcccgccaaatttattggggatgaaccataaaactatactactaattgccatttgattgggctgtatttccaacaaggggggggggganaaatatggggggtgcagcaaaagaaaaagaaccggcggctcgttatggaccaaaaccttaacagctaagctcttaacgaccccacgacaaggggccgcaaaccttttgtagaactttaaacggggggactgctcaattcaattcggtgctttgtgggcgagggaaaaaaatccaagcgtttggcatggcctgagtgaacgtccccgtatgccgttgggggacaaaagttggaatgttttgaaaatttgatgggggggagggggggatttc

SEQ ID NO: 172192 - DNA, 527 bp, Arabidopsis thaliana
  unsure (1)..(527): unsure at all n locations
ttaggtgcactctacaagactttgacgtcgcatgcacgcgtacctaagcttggatcctctagagcggccgcccttaagctgtgggttttttaaattaaacatatattttatatccatttaaaaagtgtgaaaaaactcttttcacaaaataaaactatacaaattgcccaatgggggctaatttttataatacccaagacaaacgttgatataattttttggttgattccttcaccaaggggggggacaccctttcaagagttgcctgttttaaaaagccttcacactggaggggctctttcttggactacgaccctctaataaagctaaccctnccatggggggcaacttttttcctaagggcctcctggacaatgggcccaaccaataccttttttcccttacaaaacccttgtaaagtttgtttccccaccaacgcggtttggccaggtaacttaatgtttccaatacaccctcaatttgttggggggttacaagacgcccccctttttgcgtgccttttgaga

SEQ ID NO: 172193 - DNA, 567 bp, Arabidopsis thaliana
ggtgacactctagaaagactatgacgtcgcatgcacgcgtacgtaagcttggatcctctagagcggccgcccttgaggttggggggttttttatataaattttttttttttttgtttatttttgggagaaaaaaaaattatgtttttttttaaacaattaaaacgggaggtgggattcaatgtgaagagggagatttcaactttcaaccaaacccaaaaatgagacctcctttccaaggagggggaggaaccctccggggtgcgcactccaaaaaaagagttttttgacttctctgtgagagatacaaaaaatcgccccgttatatagcctggcgcaggcgttttattacaccggtggaaacttctccgactctctcctctccctagaaacggatctttcgggccgggtgaacaagatgggcttgagaaagccttttcttcaagtgtgggaaagaccgtgtagtgaagtcttgtaaacacgccgtgtaaaaacaggttcgcgagaggtgtggtaacaacagtgaccggccgctgttgtgtggatccttcacaaatggggttgtcgtg

SEQ ID NO: 172194 - DNA, 463 bp, Arabidopsis thaliana
  unsure (1)..(463): unsure at all n locations
gatcctctanagcggcccccctttcgtttttttttttncaaacaatatattcattccattcaagagagtaaaatcccctccctacaanacaatantcacagtacttacatataaactcttgcaaatttatacttaaacatattttcagaaagataaaaccatttgaagattatcttattttcacgaggaacctgatcaaatgatttctcaaagaatataccataacaattctctctaaacaatacttccttcttaaaaatctacctttggtccgacttctctaactaatattccatgtccggacaaagaccaccaaaaaccgaattaccctccttccttaatctggcattatcaaaaaaaacctctggcagcatcttccttactaaatggtctgttcacaatcccttctaattttaacttaacctttcccctccctttaaaaaaccctggtctaacaattaaa

SEQ ID NO: 172195 - DNA, 516 bp, Arabidopsis thaliana
  unsure (1)..(516): unsure at all n locations
ctatgacgttgcatgcacgcctacctaagcttggatcctctaaagcggcnccccttacgttttgggtttttttatttaattttnnctntaaataaatcaattaatcaacaggtgtttgtcagagcaaaatcagaagaaaggaaaaaaaccaaaaaaaccgctgccacaagataaggaagaaagaagaaaaagccgaggaaaggtccataatctttctagggggggaagttccacctactatgatcctcaaaaaagcggggggaaggaccctcaaaaagactaatctttgggcttttttgagcttttcccatgggtaacttccaaaacaaatgttagttttcaaaaaataccgatgcacactttactggtgccataaacaagcaaaaacagagtggatttttgtggcccctttttcactcctttggacaaaggaagttggaaacattttctccccatttcctaaaagtggaagcaaaccccctctaccggggccacaaaccaaagggacaccaatga

SEQ ID NO: 172196 - DNA, 534 bp, Arabidopsis thaliana
  unsure (1)..(534): unsure at all n locations
ggtccactctacaagatctatgacgtggctatgcacgcgtacgtaagcttggatcctctanagcggtcgacctttagttccgggtttgatttaaaaacaatatttatctatcacaaactgatgatgcgacttattgtgcgatacgtataacaattcaaggggacatgtaatatgttttattcgctggtctgaaactacgaacccttagggtgactttggctactttatcatggggggggggataaatttttggggggtgacattaaaacaattaaaggggactctgcagaggaaggtatctcagtagctggaggccactctatttgcagggggggagtgttctttttccttaagtacttagaaacttaccccacagttgatgctgggtctacaggagttgcttctgaatgtctgggaggcacctggtgaaactgtaccggttggttatcccatctggccgaccgttacgccaagtcaccgtgcatttgcgttctcacgggctgatgcgggaagtgggctgtgtgacacaaccgg

SEQ ID NO: 172197 - DNA, 498 bp, Arabidopsis thaliana
  unsure (1)..(498): unsure at all n locations
gacgtggcctgcacgcgtacgtaagcttggatcctctagagcggtcccccttgagttttgggttttcnataatnaattatanntnaatatattactggggcgtgaaaatatttagtaacactaagtcgaccaaaaaaaagatgagagacgagaaagtctaaagaaagtgtaataagttagattgctggagtttacacatctatgctctttctcctgggggggccaccaacaggggaggtgggaacataacagtagatgttttgtcgggcaccaaattggatccgggggggtcccgagcattgaaactttaaaaattaagctggtaattggagctttttgttgtcttcccgcttaggaaatataatagaagaagtcgggatagagcgaggtttgaacaaaccctgcgatcctggtatgcaatgaacaagtgcgggtcatgggaatgacggtagatccagtgggggtgtttattccacggggccccccagggggaatttg

SEQ ID NO: 172198 - DNA, 547 bp, Arabidopsis thaliana
  unsure (1)..(547): unsure at all n locations
agtgcactctacaaaatcttgacgtcgcctgcacgcctacctaagcttggatcctctagagcggccgcccttgcgcgggggggggtttaaaataattactttttttctcctcggcccccaggcccccgccggggggaaaatttttatcaggcccatagactagattttacttttaacccaaaagccaaaaaacccgaccccccccccttggcccgccccaaactagggggggggttttttttttagatccaacccccaaaaaccatccctcttatttttaagaaccccactcttcccaatccttaaggggtcgttagagaactcccacccctcaatctcaccggccgctcttaaacttccaggcgccttgaaaaaatacctttgttggcccccccacaaaccccttnttccacgccactcgtggataccaagaaagagaagaacattctttggggccccactcccccgcgaaccgcgcgggggccgtcaccccacgaaatattcccgaaccccgggcccgctggtggggggaccccaatgttcgccc

SEQ ID NO: 172199 - DNA, 498 bp, Arabidopsis thaliana
  unsure (1)..(498): unsure at all n locations
taggtgcactctacaaaaactatgacgtcgcatgcacgcctacctaagcttggatcctctaaagcggccnccctttagtttttgtttttagaaataaaataaatcttatttttggtgcaatcctaaccctaaatcaaaaccactacataaggcgagggtttcaataataagtggtagggaataataataatggataggatatgagtactaaggcagagaggaaacaaaaaaccccctcctgggggggggctctcctcaggggtcaaccaaataaaaaaaccacactgggaaagcttgtttaagcctggatgggaaatgtcctgatgggtgtaaacaatttcattgggtccgggaaaacttggcctttcctctaattatcctttggggggaaagaattctttcaccccggattggacccgagacttggatcctggcccgggtttacccccacctttggaccaagtccaatgggaaaccatttgaaaattgtgggctggg

SEQ ID NO: 172200 - DNA, 316 bp, Arabidopsis thaliana
  unsure (1)..(316): unsure at all n locations
gctggggggggtggnnnnggggggggggatctatttagtggcactctcaaaaaactctgacgtcgccttcacgcctacctaagcttggatcctctanagcgggcccccttaagtttggggtttttaatttatacnctactttatattcatgaggcatgggaagaattacttcaacattattgggggtgatttgggtttcactatacccaggaaataacaattgtattggcttaccaaacatgagggtagtggttactacatttggcccttataggggggaggggtaaaaccanaggggggggtaccttgggaaaat

SEQ ID NO: 172201 - DNA, 488 bp, Arabidopsis thaliana
  unsure (1)..(488): unsure at all n locations
tctatgacgtcgcatgcacgcgtacgtaagcttggatcctctagagcgggcgccctctagcgtggggttttttaaataaaattttcnaggaggaatcattcccatttatcaaaatgtgtgcagaattacaatggaaaaaaaataatgcaaatcaatcccaatataaatatatatttactctaatttacaagatagaactccaaaaaaaaaaaaaaaaaaaggggggggcccaaaaataagataaaattcaactataaataaagctgtgtggggggagttttctttcattcatttcgaataagaaaagcgggctttcattctggaaagcaaacgcttcaacttggtttttaacctcacttttgtttttggtgggggcataaatttttaaaaaacttccttgggggaactttccatgcttctttttgagaacgattttttttatttaacccctttttataaaaaaaatcgccctttggtttaaaaataaa

SEQ ID NO: 172202 - DNA, 256 bp, Arabidopsis thaliana
  unsure (1)..(256): unsure at all n locations
ttttgggtggatatgcctgtttagagttatattatagtttattcatggatggggatacgtttgtaatctcntgccatatctttgggttgtcaaagagagggtgttcttaatgtcaattgggggggggggcgcaantttccaacttattctcttaaaaataatacccggcttctctnatttttttaagggggaaattccctaacctgtcaattactttttttttttttttaacattctaaattttgttgggttgggg

SEQ ID NO: 172203 - DNA, 472 bp, Arabidopsis thaliana
  unsure (1)..(472): unsure at all n locations
aatacgactcacttagggaaagctcgtacgcctgcaggtaccggtccggaattcccgggtcgacccacgcgtccgcgcgcgttactgtgaattaatcnagagatctaaatatccgccatggacagagcacaattgatcttgttaggtctacctatattcttgttttgttcggatctcttcaacctcttcactcctccggctcctaaacctcagcctcaccgtcctcatgagggccgcatattcctcaccagcatcgtcctaatgcgatcatccccgaaaccctagactttccttcacagaagacaagtggcttangaggagcaattggatatggaaatacagtaaagatcaacttctgcgtctcctgttcttacaagggaactgcagtcaccatgaagaaaatgttagagacggcttttccccgtttaaatgtgattctcgcaaattacccaccaccagcaccaaaacgcct

SEQ ID NO: 172204 - DNA, 518 bp, Arabidopsis thaliana columbia
  unsure (1)..(518): unsure at all n locations
atgatctccagctctatacgactcatatagggaaagctggtacgcctgcaggtaccggtccggaattcccgggatccacaaacaagtttgactcagttgacaaaaacagaccaggggatcaaagtcatatcgtcccatggggaggaattcgtggcagatgtcgtcctatttgctactggcagaagtcctaataccaaaagattgaatttagaagctgttggtgttgaacttgatcaggctgggaggtgtgaaggttgaccagtattcacnaactaatatacctagcatatgggctgtaggagatgccacaaaccgaattaaccttacacctgttgcgttaatggaggccacctgttttgcgaacactgcttttggtggaaagcctactaaagcagaatacagcaatgtcgcctgtgctgtattttgcataccaccactagctgtagtgggtctcagcgaagaagaaacagtaaaacaagcaaccggtgatattctggtcttcacctcaggctttaatc

SEQ ID NO: 172205 - DNA, 502 bp, Arabidopsis thaliana
  unsure (1)..(502): unsure at all n locations
atacgactcactttagggaaagctcgtacgcctgcaggtaccggtccggaattcccgggtcgacccacgcgtccggggtagttatgtttgttggaaacaaggtgctggaaagacnacaacttgtactaagtatgcttattatcatcagaagaaaggatacaaaccagctttggtttgtgcggatactttcagggctggtgcgttcgatcagctgaaacagaatgctaggggggctaanatccccttttatggaagctacacagaatccgatcctgtgaaaattgctgttgagggagtanatacgtttaagaaagaaaactgggatctcattattggtgataccaggggtcgccataaacaagaagcttctctctttgaagaaatgcgtcaagttgctgaagcaacgaaaccagatcttgttatatttgttatggatagcagtattggtcaagctgcatttgatcaagctcaagcctttaagcgagtgttgctgttggagctt

SEQ ID NO: 172206 - DNA, 182 bp, Arabidopsis thaliana
  unsure (1)..(182): unsure at all n locations
gacgtcgcatgcacgcgtacgtaagcttggatcctctagagcggccgccctttttttttttttttaatggagaattaggtcttgtttctaatacttctcgtcatatacgaagtattgtatacaaatgcatacanttgactatgtataactgtcttatagtgaaacaaatgtntcagcattag

SEQ ID NO: 172207 - DNA, 628 bp, Arabidopsis thaliana
  unsure (1)..(628): unsure at all n locations
atgacgtcgcatgcacgcgtacgtaagcttggatcctctagagcggccgccctttntttttttttttttttttttttttttttttattatgtttttttttttgggactacaaactagggaccccaaactaggtttaaatttgttgtttgaaaaaaaatttgggaactcaactgggggagctcaaccagcgagttgaaaggaactagctgtttttgaatggttggcggacaattttgtaagttcaaactaatgaggttcccctccgggggggggcttccatatcgggatttgttgagctagattggttggactaggatttttggcctgcattttttttcctaaatttttcttactaaagttaggggcgttccaagtggggaatttcaaatttcgagttttgactttggttttgggactttgtacactggtttttggaacctggttttttttatccacacccatttctcctccccccgggttttttcattttaccttttttattcaaagaagtttcactttggaccttttctttggatctttgacatctcttttttcttgggaagggtaagaagcgacacttaagaaattacccgttggcttttttgagaacccttgcttgaggacgggt

SEQ ID NO: 172208 - DNA, 641 bp, Arabidopsis thaliana
  unsure (1)..(641): unsure at all n locations
taaagagctatgacgtncatgcacgcgtacgtaagctggatcctctaagcggcgccttttttttttttttaacaaatttggatccttatactagtaaatcaccccgttatataatttatgggtgatattcggccatcaaggtaaggttatattcatttcattttcacaaaaaatggaaaagcaattgattccagacatcaggaactccatgtacacaccaatgagtacagtcagaatacgatgccgggtttttcaaccggtcttcatttagaggttcccagaatttccggtacaccgatggatgaccatcttttcgatactcagacaactgagtgatgtttataactgagacctttggtcccaatctctccaaaactctcttcaccatcctcattgtcggaatgtccgacccacttccccaataactctcttcctctattggtttcttctccccgtagcagtttccttcgcttcccgggttccattctcggctccattgatgtgtaggagacattgtaacgaagaaaactcgctttttgtttggatcgacattgttagcaacccaatcaccccaactatccattgccatctncattccctcggcgctcttcacctnctcgcatgaccctttttcttcactg

SEQ ID NO: 172209 - DNA, 647 bp, Arabidopsis thaliana
  unsure (1)..(647): unsure at all n locations
atgacgtcgcatgcacgcgtacgtaagcttggatcctctagagcggcccgccttttttttttttttttttaaacaaacactntttgttcttgggttatataaaatggacaatatttaaaagcctgtaatttgaattatacattgtttactataagaaaaacgaatagattgtcatgaatcttatacatttacatatatttatcgatatggtgataattttcaaagattataataaaacattgtaggaaataaggaattagctaggcaaggcctttcgctatctgatagacaataggtttagatattacttcgtaggctttctgggaagggtgagcaaagtcatagaagacgtatttatctggatggaagcatggtattattgcattcggcatacaacaacaagcttttttcgcttctgtaaacccataggccataggatttttgacaagatccataagagtaccgtatatgtcgacgtaaacaaactttgcatctttgaaatcatattctactgcgtaacttgtaagacctttctgcaatttcatgttgaagtcctccgtaattctattcaagaggaagttacccattcgaatacccaccgaatgaggctcgatggataggcaaacatcccacaggcatcactccca

SEQ ID NO: 172210 - DNA, 440 bp, Arabidopsis thaliana
acgtcgcacgcacgcgtacgtaagcttggatcctctagagcggcctgccttttttttttttttttttttttttttagttcatcacaggttcaaaccaaagtctactaaacataagaagagtcttcccatccgttctacattaaaaataacaaaccaaactcaacagagtactcaacttttgtccgcactgagctaaattcctaagagcttgctacgaaaacaatgacctgaaattcccaagaaccagcaagatcacttgttattattcgctgcaagtttagctgcaacttgctcctctgacaagggtaagtaatatatcctggggatcgcttttgtcttcttaatagatcatcaagagtgacaatgggaggttcttgttcctcaggggctataggaggagggggaggcagaggaagacgttctacaccgtgaggtgggtt

SEQ ID NO: 172211 - DNA, 452 bp, Arabidopsis thaliana
acgtcgcatgcacgcgtacgtaagcttggatcctctagagcggccgccctttgttttttgtggctatttatttatttttttttcaaagccaccagtgttgtgtgaaaagccgataccctacagacattgagattatcactcactaacgggggtttttacaaaaggagacggaaaaaaccaacaagcgccaaaagattagaacccacccttaatcataagaaagcaaaaataaacacatccaaaaaatgatcacccaacttccggttgcttgggtcaaaacgatatcaaacgcgcaaaaaacccaccaaggggtcccgagcattgtggaggtttaccttattgggggccaatgcccggaataaaacgccacacacatgaattgcgatctagaacacatgaatcacacttgccaaccgggaaccattcgggcgagcggggaccctaccaacctc

SEQ ID NO: 172212 - DNA, 307 bp, Arabidopsis thaliana
  unsure (1)..(307): unsure at all n locations
acgtcgcatgcacgcgtacgtaagcttggatcctctagagcggccgccctttntttttttttgttttttttttttttttttttttttttttttttttttttttttttttttttgttgccacaaatacaacaaaggttgaaactcacaatgctttacaattttactagtttctcagcgatatagggaagtagcccaaattgctgatactctggtagagggcccttccaaactacaaacttttaagtacagtttctaaaacttgcaagtctcaaatacagaataaacctagtttagtgaaaatcactct

SEQ ID NO: 172213 - DNA, 474 bp, Arabidopsis thaliana
  unsure (1)..(474): unsure at all n locations
gcaccacgcgtacgtaagcttggatcctctagagcggccgccccttgggtttgtgggctcttttttttttttttttttttttttttgcggttctttttttacgggactaacctactttttggtgacagggaaaacccactcccaattttaaaagaaacggtcaacccgaagatcctggggcccaccgagggggaaaaccttgcgtcctggggggaggatccgccgggaaacaagcaccataaccgaggggggatgcacaattgcaacaagagggccagggccaagagggacccaagggggaggaaaaagagggccccacagnaggggaaccccgggatattacaagcggccgcccttgtaataaatggggccccccaagaatgtcctaccgagaaagggcaggacaccgagtccccaaacagggtgcgtaccaagatacccaccacagatcgggagaggaattgggctgccttt

SEQ ID NO: 172214 - DNA, 642 bp, Arabidopsis thaliana
  unsure (1)..(642): unsure at all n locations
actatagaagagtttgacgtcgcatgcacgcgtacgtaagcttggatcctctagagcggcctgccttttttttttttttttttttataaaggaaatttaaaaactaaactcataatttaactgattgttacaataaggttcatcgtttttttttcttttacatgtatatagtaaatataaactataacaagagagtactattacacacaatgacacaacgtatttttttgggatatgnggnatgtgcagtattatacttcacatgccgatcaaactcgctaataatccaaacaaaggaataacgatcgaagtcagcattttcacgtcatggatgctaggaaaatctgattttggctggctaatcggactgctgactggaggaggagcggtaagagtatgatcagcaagacgagaactattttgatcactattgttatgactattttggtcactattgttgtgactgctagggcaagaaattgaaaggtatgtgtgattatttcgaggagaatcgtcgtcgacagtacttggagattgtagtataccggtcattccatgacatttgatagaacctaagctacatatggtggcggcttattatcttgacgttattgaaaagtagtttgatcttcaacattggag

SEQ ID NO: 172215 - DNA, 605 bp, Arabidopsis thaliana
  unsure (1)..(605): unsure at all n locations
cgcgtacgtaagcttggatcctctagagcggccgtcctttgtgtttttaaggcatacttcagaacctgatgattaaacatatcaagaacatagtaacactaatttacaaagacagtaaccacccaccaacattatgcacaccaaaaaggggtattaccgtgattaggacattttctgtttacgacataaacgaccaattagatccaccgaatnntaaagccgntatataaactaagttccatacttatatatagatagatagatgaaagtagcctaaagagaagccaagagcttctaagagactcaaaaacctcactcaaatcttcatattaatacttacagatttttttgtgaagttcagtagttgtctcttcacgcagtggacagaacttccagctctgcccaccagagtggtgaaagttttgggatagtgtcgtctggtgaaatccagtgatctctcgtaatctccctgtgacttccttcattatcggtctctgtttcgcgtctgctcttatgcagcttttgatcacttcacctatattctcaatcttctcgtcaaagctttcaattgtcggatccaccatctnccttaatgtctntcctct

SEQ ID NO: 172216 - DNA, 623 bp, Arabidopsis thaliana
  unsure (1)..(623): unsure at all n locations
cgcgtacgtaagcttggatcctctagagcggcctcnccttgtggtttggggcttttttcatcctagaaaaatgtagatacatatataaatatataacagtgtaaatttggacaaaagagtccagataagaagaagacctgtactgtactaagaagagagacacaaagatcaaaactaaagaaggaagttttttattagacagactnnnnggncngcacagngaccataaaacaatacaaaaatgaacccgaccgcagatnngnngatgganccagnnnnaagactcangaggctggggnnnggcaaannncattcaatctattgagagcctagagatattgcatcttcttcttcctagtattcaggactgtacaggcttaccaaatgttcttcgttcatgctctttctcgagtcgtaccatcttacatgttctgaagaagcttgttgttgttcctcttctcttgtgccatggagtatcattgtccctgtgagcacagtgatgaatccacataactcagaggctacgctggctgcgtcttgcccagaccagtccttgaacattattgcactagcaacaattgtgagggttgtgaacattacataggatactggagaaacaatgg

SEQ ID NO: 172217 - DNA, 524 bp, Arabidopsis thaliana
acgactcactataggggaaagctggtacgcctgcaggtaccgggccggaattcccgggtccacccagggctggggttactggtgactatagattccaccctcttggtctttcaaacccagaagggactggaggattcattgagcccagatgggtagcatacggagagatcatcaacggacgggtcgccatgttgggcgcagctggggctattgcttttccgagggggggggaggctgttctgagtccaccaaaaacaggtcttccttggctccaaacgggggtgaaccccccagcagggacatacacttactggggagacaataacacactgttttgttctccaaaacgcttctgaggggagctcgctgacccccggaaggccacaggactgggcacaaccccggaattcacgggaaaaccgcgatttcttgggggaaagagcagggtgtacgcgcgggtcagggaaccccgggttaccccggggggaactttattctaaacccttcttgggtatccggaaaaa

SEQ ID NO: 172218 - DNA, 449 bp, Arabidopsis thaliana
  unsure (1)..(449): unsure at all n locations
cagcactaatccactcacttagggaaagctggtacgcctgcaggtaccggtccggaattcccgggtcgacccacaggtgcgcccacgcgtaccatggagccatctccaatgtgactctccgccagtctgccacatccggtggaactgttacatatgaggggagatttgagattctgtctttatcgggatctttccatttgctggagaacactggtcaaagaatcatgacggggggggtgagcctntcattatcaattccggatggaaatgtcctccgtggcagggtaactggtctttttatagcaacatcacctgttcaaatggttgttgggagtttcttaccagacggggaaaaagaaccaaaacagcttgtggggacaatggggactgtcctcaccccttttaccgggtggtggccccaaccgcaggggctggatgactccaagtag

SEQ ID NO: 172219 - DNA, 584 bp, Arabidopsis thaliana
gtcgagcccccgacgtccgccggccccgggggggtagtattggccgctctaaacgactcatatagggaaagctggtacgcctgcaggtaccggtccggaattcccttttccacccaggggtgcggggaaaggaacctccaactcacagaaattgagagaagagagaagaatcatgggacaaggaccatctgggaggattgaatcggcaaggagatcggaaacctgatgggtggagatagaaagagaacaagtttgagcccgggggcccacctggtggggggggggaggaaccaagggaagccataaaggggcaaagggcggcagcaaaacttcccaacggggactccggttactagggggaaggctccggttactgagattggaacgggtccacgatttattcggttggtggaggaacgacgtttggcgcccaccccaaaagaggctgcgaaacctaggggaagagaaagcttgtgggacgatcgagtctaaggcgtgagtgaccctcccgcgccccgcttggaggggttgcaaatttcggagcggggtgattgggcgaaaccccgcccatttggtgtcttttt

SEQ ID NO: 172220 - DNA, 443 bp, Arabidopsis thaliana
gatcatttagggaaagctggtacgcctgcaggtaccggtccggaattaccgggtccacccaggggtggggggagagtataaacactgtggtaaaaaaaaatatagacttttatatatgggtgagtaaaataacattaggggttaactctattttccaggtatttcatatcaacagatgctgggaatggatcatttccttggcttttgggttttttttattagggggggggactggcacagcaattttttctgaattttatgaagggggatttgtggccttatgggggggaggttacgcatgagaaggggcgacaggaacaattttgaactggaagaagtttcttttgatatagctcgtcaaggggttagggcaaaaagaaaaatttttccggcttttcggaaagtgggtacaatttttcagagggacccttaaaagtgggggt

SEQ ID NO: 172221 - DNA, 333 bp, Arabidopsis thaliana
  unsure (1)..(333): unsure at all n locations
cgcctgcacgcgtacctaagcttggatcctctagagcgggggggctgggttttttttttttntaataattttattttaaaaatatgattaatatagtttttacaataaccaaaaatgttctacagcccgctgctgtttaacaaagcagggctggctccatataattggacatattttcttgtttaccttgggaggggttttcnttngaaggattanagctcaaataacatcctctatgaaaacagggccccgttctaaaggtaccttttccttttccgaaattggttttcataatcaattccaaagggggctgaatcaatagattttccttta

SEQ ID NO: 172222 - DNA, 516 bp, Arabidopsis thaliana
  unsure (1)..(516): unsure at all n locations
ccttattaattaccccatcacctactaacttgatctctaacgcggggccttggggtttaaanaaatttttttttttttttttaaaagctgaatttttctaattaataaataaaatttggagcccataatttacattgctatatctctctatagctcctggcttcgaaaaaattttatcatcctccacacaaaaaggggctatttcnattttgccaactactaataaaataggaaccactgtgcccatttttcttttctataagaaaactaaatcagcccgtgttttcttttacaattacatcctccagtgtaacacacaacgccaaaattttaaccccatttgaaaaaaaaatccaccacctctttcaagtgaaaatattaatcccgtttaattttttccttgacaaaaaattattcaaattttttttaaactccggttccttcccaaaaaccctgttatttgttctggcctacgcttaaaaaaaaaaaagaacccccattattccccaaaaaacc

SEQ ID NO: 172223 - DNA, 298 bp, Arabidopsis thaliana
  unsure (1)..(298): unsure at all n locations
atttaacatgacactactattaaaactatgacctcgcatgcacgcgtacgtaagcttggatcctctaaagcggcggcgctgtgtttttttttttttgggcaaacttaaagataacaacatttccggttttttttcaaattattacaaatcaaactgatatattagacacaacaccgattaccacgtgatgaaaaaagaaaaagataaaaagataaattaagggatcgggggtgtttngcctgggttaatgagattaaaaaaaaagcttttccttaaaagaatgcctttttaaaccggg

SEQ ID NO: 172224 - DNA, 475 bp, Arabidopsis thaliana
  unsure (1)..(475): unsure at all n locations
aatttacgtgcactatataanactatgacctcgcatgcacgcgtacgtaagcttggatcctctagagcgggggcgctgcggggtttatataattattttttttttttttttttttttttttccaaaccaaaccaaatttttttttttttttgggaaaaaacaaaatcttttttttatttgtttggcccccaaccctaaaaaggggtgttccaaactatttgggggggtggtcccttcgcgggggaaatttatatataaactttggtgccccccaaattatttttttcttgaaaaagggggttgggtttaaacccccctggggggaacacaaaccccctaaaagcctcattttttaaaaaacaaagagggtgggttttaattttctgaaaccccaacagggaggtgttccgtggcccacccaggaaaaaaaatttttaagggttttttccaccccctttccttttaaaaggggggg

SEQ ID NO: 172225 - DNA, 549 bp, Arabidopsis thaliana
agcactaatacgactcactttagggaaagctcgtacgcctgcaggtaccggtccggaattcccgtgtcgacccactggtccgaaaaccacaagaagatgtgtctgacaacttcagagccaccattcccagacactgacacaccaactatgagatctgcttcgtaccatatcaaacataaatctaagacacaaacccatcttcgtatccttaatctcaccacgatttttatattcgggggggaacacaaggagatggagatgaagaactaaaaacttttcttaaagaatcaaagcctcataccagagaatgaacctttaaaaaagaaaactctttcttcttcaccattaaaaacaatgctctgtttggctctgctttaacccaaaaaaactcccctgtttcaaacctcctttgtttaaatgatccttggggaacctttggttaattgaatttttcttcgggtttctttctcttcctttttccaacccttttaatgggccctaaaaataaaaatcaaaacttactgaattttttggggggaaatttacctc

SEQ ID NO: 172226 - DNA, 472 bp, Arabidopsis thaliana
ctatgacctcgcatgcacgcgtacgtaagcttggatcctctaaagcgggggggctgtttttttttttttgataaaaaacacatcaaagtctcaaaacttgagaagcaaatcgttttaacttccaaaaaagtaacaaactaaaagcaaaagaaaactccataacattgtttaaaggataacatctcctgatataagtagcagggggaggaccaaacatgaggctttctaagaagaattgggataaaacaactcttacttcgtgacacggttgtaaaacctcatcttctcaagggaggtctggaagcgaccatgtccaaaaatggagggggggtcaataaacttgagtttgatcccctccaaggcagacgggaagtttgattgagaagtgacttgtttaaaattacaaatccggacgcgggggtcaccccgaaattccggaccggaccttcaggcgaacaacttttctataggg

SEQ ID NO: 172227 - DNA, 544 bp, Arabidopsis thaliana
atttagctgacactatagttaaagctatgacgccgcatgcacgcgtacgtaagcttggatcctctagagcgggcgcgctgtggttttttttttttttttttttttttttttttccaaaataaaacgttatttctgccattcaaaaaaaaacatccgttgggggacaactaaaacatgagttaacatttcacattattttaatattttttcccccaatggcaagtccggggggggtcaccttggcccttattctcttccctttgggcagcctctccaggaagatccttgccccctacagacttgttttcgggttcctgtgcttttgagttcgggttatgctcttagcttttcttccaaattcttggccacattcacggttgggggggggttttactctctcaggaatcacaggcaaacctcctctggggggattgggtattctaaactctggattctgttaacagaacaccgggggcccgagtttaaaatacggggggctttccttaatttccactttttttctggtgcccttaagacccaaaat

SEQ ID NO: 172228 - DNA, 469 bp, Arabidopsis thaliana
ctatgacctcgcatgcacgcgtacgtaagcttggatcctctagagcgggggcccttgttttttttttttttacattcaagctaacaaatttatctataacaatataatatttatacagtcacacttgacaaaatcaaccgaccaaatttaccgtcatttcgcaaggacgacctacaaaagattcggaaccttttctaaagggggtttatatctccaagagacaaccagctaaaacgtggccttcatatttatcatgtgtttccagttttaaccatcgagaattgctcatatcccaattataccctacacttggttcgccgtaccgaaccgaaccgatcacaaccaggtttccaaacctccttatcgccacgtaagatacattgcacacgtcagcaggtagattcccaactttataccaccgtttcatctttcatcatcatcagatcacggggacaacaagcatataaat

SEQ ID NO: 172229 - DNA, 540 bp, Arabidopsis thaliana
  unsure (1)..(540): unsure at all n locations
atttaactgcactatattaaactatgacctcgcatgcacgcgtacgtaagcttggatcctctagagcgggggggctgggttntttattatattttattttttttttctttttctctccctcgaaaaaattatgtgttaaggagttgaaccaaaacttacctggttatattcggggtttggtggtggtttacaaaattatacaanattgatttctcagggggggggtgggggccccactggtgttctttttataaaaaactcggttttacctattctattaaagggtggtaagggggggactttttttcttggatttcaccttaagcccaccaaccatatgagcgcgttaaaaagggaacacaaaccgggcggtttttgttaacgcgggccatttttaaacccacttaaaacaaaaccaacggggttttttattttgaataaatggcatttttttctctaacaaaaccttggcccggtttaaaaaccgggaattgtagggattataggttaaaaaccgggggggttcctccgggtaaaaaa

SEQ ID NO: 172230 - DNA, 331 bp, Arabidopsis thaliana
  unsure (1)..(331): unsure at all n locations
atgcacgcgtacgtaagcttggatcctctagagcggcgcggcttttttttttttttttaaagcaacggacaaagatgaattaaaccaaattaaactatgaaaatgaataaatccgattacatcaaattaaaacacacaaatatctctcattaagcacacaaaanaaaagatctcaattttttctaagaagggggatgaatcatcaattggggtggggttactacaagaatgaaaccaaagcctttgattggctgcagctctcaaaatatattgatggtatgctgcgtgttgctaatgctcccacgaatggtccaccccaaaagatcccatg

SEQ ID NO: 172231 - DNA, 573 bp, Arabidopsis thaliana
  unsure (1)..(573): unsure at all n locations
gatttagctgacactatattaagactatgacgtcgcatgcacgcgtacgtaagcttggatcctctagagcgggcgggctgtgttttttttttttaacccaacacacaaaaacaacaatatcttacttttaacagtacacaagctcatttaacttgggaacttaataagtagagatcagcctctatacacacacatcctagctcggataagtattttcttggtcgggggactccnatagatgacggaagattcccggaaccaaggcttctctttcgcagacgctctgcaatgatgaatgcaagctccagagactgagatgcgttgagtcttgggtcacagggagggggggagcgtgagcttacatcgttgtaagggatggggcgtgaccctccgacacattctgggacgtgttgaccagtcatttctaaatgaaccccggcaggggaactcccttcttgatcatggagcgcgaaaaacgctctcaattcccccctgattgcattaaaagaaccaggttttacgccaccaggagccatgattgggtttcccgggcttgtgataactaacccaagg

SEQ ID NO: 172232 - DNA, 543 bp, Arabidopsis thaliana
atttacctgacactatattaaactatgacgtcgcatgcacgcgtacgtaagcttggatcctctagagcgggcggcctgtgtttttttttttttttttttttttttttttttttgttttttttttttttttgttaagccaagtaaaaaacctggggttaaaatcaaaataaaacaaaaaattgttccaaggtacaactttcattaaacatattttttcccggggggggcttcaaattaaccccaaaagaataaaatttttgggggtgctggacaaaaacataaccatttttctttttaaaattttttttttttttcctaaaagaaccccaaaaccgggatgcccccccccaagggagggggtttttgatggggtggtcataatacctaacgaagagccttggtttctaaccccctgatcttcttttttgggactggagattttttattctttgggtgaggaaaaaatttttgccccggaacaatcccttactggttttggaaaaaaccggggcgaattcaaaaaagcgttggggcttttattaa

SEQ ID NO: 172233 - DNA, 443 bp, Arabidopsis thaliana
  unsure (1)..(443): unsure at all n locations
ggggagcgtaaattacaacctatggggcttccanagactttatgtgggttaccattgtatatgggcccagagatcatgcaactccagaagtatgatgcaaaggcagatctctggaggggtggcgctattttatttcaactttttacaggcagggggggttttacaggaaacagggcaattccgtttaatccacaacatttataagatcacccgaattccttttttcaaggggactggaaaaaatttaacgttggactggatagacctgggggagaaatttactgcgccctaatccaggggaaccgttgacttttgaagagtttttaattaccccttttctttggaaggggggaatataatttctccaggaggaatgggggtaaaaaacagggagggttttttttcgtttggaagcggcccttcaaaaaaagggaaaaaatttt

SEQ ID NO: 172234 - DNA, 344 bp, Arabidopsis thaliana
aactatgacgtcgcatgcgcgcgtacgtgagcttggatcctctaaagcgggggggctgggttttttttttttttttttgcaacagggaactttttgtttgtttggttgatacaaacttaattacatgagaaagagtatgtgaagcaaatcaatatattatatattataccaagaaaaaaagatttaataataaatgccacggggggaggaaaaaaaaaggggggtatcttttaggaactcctcccgtgcgggcggggtgttggagacaacgggacaactttccgacaaaggggttgactggcggcataaattggcggggtgcggagggggagaattccgacaaa

SEQ ID NO: 172235 - DNA, 307 bp, Arabidopsis thaliana
gacgtcgcatgcacgcgtacgtaagcttggatcctctagagcggggcggcttggttttttttttttaaaactttgtttatatacattctccttgtaataaatagaaatgtatccaacacttttcttggtagagaagggaacattacaataactgacctcacaattgttactggaaactctgtaagcttttcattttaggggggtggttaatataggggggcctatttaataaatatgagcgaggggcttccgtttgaagaaactcctgaacaaagcaaaaaaacttgttaaagattggaacaaacca

SEQ ID NO: 172236 - DNA, 310 bp, Arabidopsis thaliana
  unsure (1)..(310): unsure at all n locations
cttgacgccgcatgcacgcgtacgtaagcttggatcctctagagcggggggcgcgggggttttatcaatattttnttttttatttttttattcttttttttntttttcccgggaagccttcttttatacccctcccgcggggggaagacttctctattaaagaattccgagggggcaaccccccgggcgtattcttctcccggggggggggnacacccgggggggtggttcccttacaaaataaaagcccccccccgcgccccgctngtttaagagggggtgccttttacccccggccccaaaaagaaaa

SEQ ID NO: 172237 - DNA, 486 bp, Arabidopsis thaliana
  unsure (1)..(486): unsure at all n locations
agggaaagctgtgcccctgcagtaccggtccggaattccccgtccacccgcgggttcggagacttaaccaaaatccatctcttcnttaaaaatgtaataattgggcccgggcgggttggatcactcccataggcggagcttacatcggtgactcatacatggggcgcttctggacttttactggctcctctctcatctacgtccggggggggattctctttacaggggcggaaacaaaaaaatccctacgacccacatgcaaaaacggggtttccaaaagggcctcctcgttacaaggaacatttttctacatatccctctattcctaggttttgggacccgggaaacaaaacctaccatttccacatttggaggggaccaattccacagttttggctttaaaaaaaaaaaccaaagggttcctttctttaattggggggagtgtaacctttttcttaggccgctggttccaacattggggctcgg

SEQ ID NO: 172238 - DNA, 562 bp, Arabidopsis thaliana
ttgatttaactgacactatagttaaagctatgacgtcgcatgcacgcgtacgtaagcttggatcctctagagcggccgggctggggtttttttttatttttttttttttttggggaactaaaacagataccaagattaggctcttaagggacaaaatactgtttgattgtgagacagaggagttcaaagaggttctaatgattataaaaaccttgaggttgcctactggggatgggaatgcgtggtgtacaacataaacaaccactgaggattgaagatctcgatctaccttgaaatgcgcgtggaaaaacctccttacctgtttcattgccaacaaaacaaaaaatttcgcccatgagtgcataaaacaaatgaagtccgagatgaatgaaaaaaaaaagaaggaagggagggtgttcttgtttctaacttgcctctttaaaggaatggtggatcatgaaatctctgagttttgtttcttctgatgcaaacaatacaatatgactaggcgggtctgaccagtttctagctaactttgatgcaaacctaaagggtttactaa

SEQ ID NO: 172239 - DNA, 559 bp, Arabidopsis thaliana
gcactatattagactatgacgtcgcatgcacgcgtacgtaagcttggatcctctagagcgggcgggcttggttttttttttttttttaacaaagggaattctattgaggaactctctctcctggtgcaagtgccttcctacgtagaccaagagatctatacgctactttgctctctttaagattatttcttagacacaatacgtaattaaagcggggaggacacctaagtgggggcttataaataccctaaggggacagcttgatcaagcctttacaacttgaacagggtgcatacgtagaatagggcaaaaaccatgggctttgatgtcagccgctttaagtaccccatcctgaaaatggaacgaggatactttttttctctgagggccttggacctgaataacctgtcccaatttaaagggcaagacataaacaccttggcaaaaaagttcttgctcaaggcccttaaacggtgggaatataactttaatgatttactatcccgtggacaatattaaaacttttattgacattagcggtccataaaaaaaaagggcc

SEQ ID NO: 172240 - DNA, 540 bp, Arabidopsis thaliana
  unsure (1)..(540): unsure at all n locations
aatttagctgacactctactaanagctatgacgtcgcatgcacgcgtacgtaagcttggatcctctagagcgggcgcgctgtgttttttttttttccaaaaaaaaatgtactaaattgattgaaggtctcctcaaatataaagaggcacggttttgtatattttctccgacgagaagaatagtctctcttctactctaatgcgggaaacaaaagtaagttcattgggggggttgatcaaaacagagacttggcacttgtgatattagctaatcgctctggtaaagcatgaatcctaatacaattgagagtaaaagtacgaaaatcccgaccaaaatcgggacatttgatgcagtacttgcgttactcggtctcttggtttcgtcttcaccatccgttgtcctttccacattccctcctaggcagaagctggaagcagatgtcgcaggagatatcacgtcccacattgattccgggatcaataaagacggttcgggttccacttctgaaatctttgattcgctatagaaaaatggtccctg

SEQ ID NO: 172241 - DNA, 411 bp, Arabidopsis thaliana
  unsure (1)..(411): unsure at all n locations
ttattaaactatgacgccccatgcacgcctacgtaagcttggatcctctaaagcgggggggccggggttttatttatattttcttccctatcaaaacgaaaaaaaaaaaaaggctaggccacttcgcaagtagccccttgcaataaatcaaatcaacatacaagttttttttttctctcaaaaatacactcatgatcaacacactgggggtggttctccaagggatgccatacacaaaaaaattcacccaatatcacagggccttgtgtttaattattatatcaaccttacatagctgcaacggaaaagggantactaatggggttaaaaaaacttggatttgccaatgccattgcaaacattaaagccggaccaaacaaatgtacggcaaaaaagggttntaaaaaaaaa

SEQ ID NO: 172242 - DNA, 566 bp, Arabidopsis thaliana
  unsure (1)..(566): unsure at all n locations
ctatgacgtcgcatgcacgcgtacgtaagcttggatcctctagagcgggcgccctgggggtttttttatttttcttttttttttttttttttttcaanaaggaaatattttttttttttttcatcaaccnnccttttttggaaaaaaaaaggttttttttgaccggggaattttaatttacccatgggtttttctttataaaggggaaaaaaaggggacaataaagcaaaaaaaccctttctctttttcccggggggggaatatttccccccagggggccctttgggttaaaccctgttttttttgcggggtttttttttcttaaaatggtggaaaacggggttctttttttatttttatggcggggataaaagtttttacccaccgggttcctcccccctttggaaacgggggggttttttttgtgggtttttttttccaaaaaaatttcccgggcccaggtgggcactttttttttttcccaaaacacctgggcgaggggggcctccgaaaaggaaatttttttaatttttttgtgttaaaaaaaagatttttcccatttccaa

SEQ ID NO: 172243 - DNA, 354 bp, Arabidopsis thaliana
gacgccgcatgcacgcgtacgtaagcttggatcctctagagcggggggccgtgggtttttttttttcaaaactttgtttatatacattctccttgtaataaatagaaatgtatcacacactttcttggggaaaaaggagcattacaataacctgccctcacaatgtgttactaggaactcctgtaagctttccaatagggggggggtgtacaatatgtggggggcctatttaaaaagagtgtgagcgagggcctccccgtttaaaagagactccatgaaacaaaggcaaaaaaacttggttaaagagtgggaaccacaccagcgaaccgtgggtgggaaattattaaaagggca

SEQ ID NO: 172244 - DNA, 494 bp, Arabidopsis thaliana
tacttcctcaattcgctagagacgaattcagcgtggattctaaagcccccatcgggcgtggagttccaaactcgtaccctctccattgaacaaaaaagcattaagggtcaagatcctgggatacccttttttttcaagggggggggggggggaaccccctttacccggggcggcattccttaaaaaaaaagagagcaggttgggcgcccatttctttggttttattgggtgtccaccaacaacgttaacacccttttgaccatattcccccggtggcttgaaaaaacttgggggccccacccttaataaaacacatttgccattattccttttggggaaacagaggctggatttatcaagatccaaagggctgtgtcccgctggagagaccctaaaagagttgtggctcggaaaggagggggctctctttttcctcagaaacccttttgtttataaacaccaacccacatggtcaagaacgttctttaaaccct

SEQ ID NO: 172245 - DNA, 405 bp, Arabidopsis thaliana
ctatattaaactatgacctcgcatgcacgcgtacgtaagcttggatcctctagagcgggcgccctttttttttttttttatagaaataacaaaactttacgccttgtgatgtgaatacattaataaaaaaaaaagaaaaaaaaaagagtttcacgagtacacttttaacttaaaaacaacaagaaataaaaattttaaaagtggggctggggggggcctaatagagctaaacaaatggaaattaattgattttaaatttggcagaaacgtaaacttagagatctggatctgtctcgaagaaacaatatcaccagggtcgctaacgaaatgatcttttttaatacttgggacccaaactctcaccaaggggatcggtattgctcctgacgtttttggttttttgag

SEQ ID NO: 172246 - DNA, 462 bp, Arabidopsis thaliana
  unsure (1)..(462): unsure at all n locations
aaaaaagccttgatgtaactgacactatattaagactatgacctcgcatgcacgcgtacgtaagcttggatcctctagagcggggggcgggtgttttttttttttgatgaaaagatttgattgatacaaaaatcaaagacaaacaacatagccgaatattaaaatagtgaagaaataaatactccatatgacttaaactttaaaatgggcaagaagaaagagatantttccgggggggggnananaggacagaacaccaactaaaaaaatttaagaaatgtaaatcgctgatagacgacgggtcaaaatcagatcaaagagggccttgcaaacaaaaaaaactttttttncggggatactagtacgggagagcaaacacaggaacagaaccgactttttttctccctttaaagaaaatcggccacgttcaaaggggagtttttcacaaccacatgggggaat

SEQ ID NO: 172247 - DNA, 485 bp, Arabidopsis thaliana
  unsure (1)..(485): unsure at all n locations
cttttttttttttttttttttttttgataaaaatccgcctgcttgggactcaatttaacaaaaaaaaggcttgaattcaacaatacaaccaactcttaatactctaaaaggatcattcttcataaccaanacctaacaaaaagagacagggggcctccacattcaatcttctaacactaaagattggcttcaccatcatcgactgaggcacaatcaaaaccaattctgattagaaagtttctacaaataattctccggtttcccttcttcttttcccttacaaatctaaaattttctctcttcttcctcttaactattggaatctcctatacaatttctttagatacccccttatttcttcctttcaaacccaacttctcaaactgactaatccataattaaaaaaaaatgtataaccttacccatccaactcttttccacatgaactctatccccctgtacaaacaatataccccctttttaac

SEQ ID NO: 172248 - DNA, 521 bp, Arabidopsis thaliana
  unsure (1)..(521): unsure at all n locations
ccccttttttttttttttttttaacaaacaaacttacacttaaccacatattttggttatcatctcataaaaaaattcattgcaaatacaaaactttatatagttatatattacataacccttatcaaacattatgttatgtgttgggggggcttccctttggaaaatatttcccctaaaatagccaaattttatgatctcaagtgcttccaccatattatcacatagncnattaagatctttaaatcgtgtttttgtcaaacaactaaattgattacaatttttttctccctaacttataaaaatggattattaaaagcttgtcctccaactaatccacttcctgcaatatataaaatcgggatggaaaaaaaacctttttctttattggggaccttttccctttttaaaatacccatgatgtcttgaccaaattttccttttttaaaaaaagcttttactgccctttcctcaaaaaatttcaagggcgaatttatatattccataaaaaaaaaaacctt

SEQ ID NO: 172249 - DNA, 577 bp, Arabidopsis thaliana
  unsure (1)..(577): unsure at all n locations
atttaactgcactatactagatctatgacctcgcatgcacgcgtacgtaagcttggatcctctagagcgggcgcgctgggtttttttttattttttttttttttcctaaaccancctttattttttcccctatctccccaaacacacccataaaaggggtttaaaaggttttcacaaacccaccaaacggctaaagaggcttaacaattattttacaaacgggggggggtgcttttttgggggggtttaaaaaaaaaaattctcctaaaatcctttccgtgtgggtagacttaaaagaccaccccttctgcaataaaggttttggggtacatttattaaaaagaaaatctccacgcgcctctttttttttccgaaaaaaaaataaaatgtttttctcacacatctcttttcttttaaatctattttttttatgggttttaaaactaaaccccctcctaaaaccataaaaaggaaatcccgcgaaccacccttttttttaaaaataaaaaaaaggttttctttgactccccatgtgtttgaaactttttttgtgggttggcttatcccccaaaaaaaa

SEQ ID NO: 172250 - DNA, 408 bp, Arabidopsis thaliana
  unsure (1)..(408): unsure at all n locations
gacctcgcctgcacgcgtacgtaagcttggatcctctanagcgggggagcttgtgtttttttttttttctcantaataaattagcatcttatgaaccaaaacagggttcaaaggttcaagtaaaaaatttgtcgaaacagaaaacaaatcctaatgcctttggttaggttcattggcaagcatcataccttgtaagcgggggggattccaagaggggggaagcatttacaaatgactatggccgttgcttcacaaagaaagagacggctcgtctcctcggccgaaccattcacctgacaattggagtaaaatttggggaactcttcggataaatagtaaaaggtactcgcaaagcacattccggaacaatgggggggcacgcttcctccaccgtgttaaaaaactgaa

SEQ ID NO: 172251 - DNA, 492 bp, Arabidopsis thaliana
atgacgtcgcatggcacgcgtacgtagcttggatcctctagagcggccgcccttttttttttttttttttttttttttttttttttttttttttttttttttttttttttttgggaaggcaatttttatattcaatatgcttaaaaaattttttaaaaaaaaaattttttttaaacaagagtaaagagggggataggcaaactcccataaattttttggggcccaaaacgcttaaaccaggtagacccttaatggaagtaaaaaaaaattgcaaaactgatcacttgaaattgcattccattttgggcaatgtgatttttattttatttggtggggctgaaaatatataaccaggagaagaacttcaagatggctctgactcgaaaaacccggaatgcctttttgcttaaattggtcttcaaaaacactgagaaactgaaatcttatctggttgtagggaaacaaaaaaaaaatttttattgggagaaatgg

SEQ ID NO: 172252 - DNA, 488 bp, Arabidopsis thaliana
  unsure (1)..(488): unsure at all n locations
gccagctctaatacgactcacttatagggaagctggtacgcctgcaggtaccagtccagaaattccaggtcgacccacgcgtncgctacaatgagagactcttaggaatcactcannacatcgagaattggaccnggttagtttgtgtaggataagtcaagaatagcaagagagctttgggtgcaagtttcaagaggtatgtttccctgtaaactattgggtcatgcaaataaaagttagttaaaaatgggtggtttagaaatgggcccttaaaaagggttttaacccaaatcttaaaaccccccccccggaatttccttaaaactttccccgaaactctttaaaaggggggaaaaaaattgtaaaaaaatttctctttggggaaaaaaggaaggggtaaaaacacctctgggagactcctcttttttttttattggggaaaaagggtttttttccccaatttttgaaagggtgttttaaaaaggggg

SEQ ID NO: 172253 - DNA, 234 bp, Arabidopsis thaliana
  unsure (1)..(234): unsure at all n locations
cgggcccggaattccggggggccgggggggccagttatataatcaaaaagcgatgnggggattttctctctcaattcatcccaaacgcgggggaccattctctttcgggtcgggtcggttcttctcttttaaaaacctttcttcnaaaagagactatctctgggggggggccatctttggggggggtctgcatatcaaaaagggggggacattcggagagtgaaaggggcgggg

SEQ ID NO: 172254 - DNA, 368 bp, Arabidopsis thaliana
  unsure (1)..(368): unsure at all n locations
atgacgtcgcatgcacgcgtacgtaagcttggatcctctagagcggccgccctttntttttttttttttttttttttttttttttttttttttttttttttttttttttttnaaanggaccggacccattggattttgtaataaaaaaaatttagtttttaatttttttcaggaagatcaaattaaattttagacaacaaattaaatgaccttgggaatggttatttggtcgggtaaaaagggattattggttttccacatttcccaaatggatcattgatgttacgttggaggttaaagtaaccggtatcttcccaaattaacccccatgaattgggaatgatccaattattttcaccacttggggg

SEQ ID NO: 172255 - DNA, 527 bp, Arabidopsis thaliana
  unsure (1)..(527): unsure at all n locations
cagctctatacgactcaccctagggaaagctggtacgcctgcaggtaccggtccggaattcccgggcctgcccacgcgtccgcccacgcgtccgatctcactgaaactagagagaaaaccaaatggcggctactccaatcagagttatagtctcagctcttgtgatcctctcggtattactactttctctgngggnggnnnnnccaccacaaaaccacaaatttgggcggggaccagacagagggggcgcgctgatggtccaaccatggctttgtggagaattcgaagaactatattggtcttgggagagaaagagaaacgaattaagatcttaaaagcaacttggagtttggcgataaacacatttctgttccgaaccgacctttggagtaggggtggccaggtcgctgatcaacaaatgaaaagttaagcgattttttaaagaagagatgggaagaactaagattcggggaaactggaaaaatttggccaaaaaagaaaaggtttggccggtgaagtgattggga

SEQ ID NO: 172256 - DNA, 503 bp, Arabidopsis thaliana
  unsure (1)..(503): unsure at all n locations
cttgacgtcgcatgcacgcgtacgtaagcttggatcctctagagcggcctgccttttttttttttttttttttttttttttttttttttttttttttttttttttttttttttttttttttttttttnaaaagagggtttcctttcaattaaagaaaatttttttaaaaggcccttttgttttttaagaagaaaagtttaaaaactttacttttttcaagggggaaaggcccaaatgtttcccccgggttttaaaaaaagaaagcccctttgttttaaaataaaaaaccagtaaagccccctgaaaatggtgggtaatgaaaactccccccatgtggactttggaaccaaagtttttttaggcnnaaaggggaaggtaaaaaaaattcaaagattagtcctttcagggggaattaaaatttttaagggacaaatttttgggaaaacagctttttttgatacaaaagagggggaaaagggcaatggggtttcatttgccaggga

SEQ ID NO: 172257 - DNA, 482 bp, Arabidopsis thaliana
actatgacgtcgcatgcacgcgtacgtaagcttggatcctctagagcggccgccctttttttttttttttttttttttttttttttttttttttttttttttttttttttggggagttttttccccatagataaaaaaattttttagattttagacccaaatggtttaacttttaacacaaacttggggaacagcttgaaagacaaaattaaagagaccgtggtccacaaaaaacaaaaaacaactttggtcccacttccacattatttttattcacttttatcatatttttcttttaataagacactttttttttttttttttcctctccagggggcttggggggaaaacctggaagcttttttttgatcttgtccataaatccctttttttcctccgggaagtgaagaatcggggtttgtgttttaaccacgggtgtggggttgaccaattgggaaacctctgggttttttgtgggggct

SEQ ID NO: 172258 - DNA, 491 bp, Arabidopsis thaliana
ctatgacgtcgcatgcacgcgtacgtaagcttggatcctctagagcggccgcccttttttttttttttttttttttatttttttttttttttttttttttttttttttggtaaaaaaaatgtttttttttttaagaatgttttttggggaaaaaaaagggttaaacagggaaaaagggacccaaccgggtcttttttttcaaaaattctgaaaaaccatcaattggcccaaagtttgggctttgccgtttccccagcgattgacccaaaaaacaggttgaaaaaaaaaccctttgggttcaatccccaaaaaggacccttaaaaaaaaaaaaagaaaaaaccccttaattgggtttttaaaaaagggaaaaaattttttttataaaaggtatagaagcgttttttttatttggctttttaaaaaaccgaaaaaggggggttaaccaaattaccattctattccaaattaaaacttcctttccttttttacc

SEQ ID NO: 172259 - DNA, 399 bp, Arabidopsis thaliana
  unsure (1)..(399): unsure at all n locations
gacgncgcatgcacgcgtacgtaagcttggatcctctagagcggctcccttggggttttatttccacgaacacccaccgaattaccacnaaggcgccgacctcggaagaaaagaaagacccgcctgaaatgggggcttccaagggcccaaaaagcacgccttcgcctttttaagaatattaaaaacgaccccccacacacgctgctcttttttcgggtggttgccccataagagccaacaacagccaccccttttcggcccctattgatgtcataatagacaaagcgccctctctctaatccattcccatggtgccgccccccttatttatgcgcccctggcccctcctttggtgaaccggcgtggacccttccccgcgtataatattcccccttccgt

SEQ ID NO: 172260 - DNA, 493 bp, Arabidopsis thaliana
atgacgtcgcatgcacgcgtacgtaagcttggatcctctagagcggccgccctttttttttttttttgggaaaaattgattggattttgggtgaaccaaagataagaaatccaaatgactcctgccacctattatactattccttggatctaatactcagattctattggctacaatctcattcacaccaatcttaaatggttaccggtgtaatgcaaaaagatgagtggctattccaccacttaaaccattgtctccatcaatcctttttctgaagtaggaaactcgggtgagatctgccattctccatccactaagaacttaatctcgtaccgcccgggacgaaggaataacgttgtggagaatttggtgaataaagctgagtactcaggcgatagatcctcacgttggctccatccatcgaacgatcccattacttgtacactctctgccatgccaatccagaacacatgaacctcctttgactgtgcag

SEQ ID NO: 172261 - DNA, 530 bp, Arabidopsis thaliana
tctattcgattaatttagggaaagctggtgcgcctgcaggtaccggtccggattcccggggggggcgggggcgtgcaccacacgtccaggttccaacttcttcttcttcttaacaggtttctcgatatttttgagagtgtttaaccaaattaaacatttttaatcaattttttttgggggagcagacaaagagtctatccatgggggtgggggtacccagaggggaatttggtaaaaaagccaaagccttactctttcatgggacttaagagcgtggaatttgggtaattgaacacaatctcccttttccaagaacttccttatcctttggggacttctactccgaaacattacaaaaacagtgtggtttttgaagagatttttaagtggggggtggcactgaggaatcattattggcaaaaaatttactagaagaatttcttttttgaactttcattagggagggggtaaagtcacttgccattgtatcagagaaaccaaaggttggtgaaaattgggggggagctaat

SEQ ID NO: 172262 - DNA, 482 bp, Arabidopsis thaliana
gacgtcgcatgcacgcgtacgtaagcttggatcctctagagcggccgcccttttttttttttttttttttttttttttttttataatatgttcaacttttttatttttttttttcttttaaaggaaatttcccaggttgagccaatgaggtaaaagacgtttcattttgacatttttttgcaaaagaccaatagacaaaaccccacaaggttaaaaaaataaaaaataattgagacacttgtttacatttgacaacgactttggtccttttttacaaataatattcatttccaagcttgtaggaactgaaatgttccaccttgaaagtccactcgcctttcacaggatcataagacacaaactgagcttcttgttccccaatttttcttttgagcattttcttggacttggccaattttttgccttccattaattgggtgccggtctttttggccatacattttattgttagcaaagttacc

SEQ ID NO: 172263 - DNA, 494 bp, Arabidopsis thaliana
  unsure (1)..(494): unsure at all n locations
ctatgacgtcgcatgcacgcgtacgtaagcttggatcctctagagcggccgccctttttttttttttttttaaaccaattcttaatcttctgtaagtgaagaataattacacattaataagtaatcatatcacaaacacatacaatcaaccctaaacagaggtgatcaccagatannnnnnccngcnaggaaattccaatatgtgagtggccctaaggattatgatctcctggaagaaaacgtggaagataaggtatccaagtgaccggatttttccaatcgaaagccggcaatgccagattcgggtttccgaaaggtaaagaagggaaagggaaagacggaaaaggcggtagagttggcaatggaggtagatccggatatggccaagggaaccaatacggtgccaaataaggccagaagaatttcgaatctctaaacttcttctccaccttctcggccctttggggatgtttcttccctccgtttccacacaa

SEQ ID NO: 172264 - DNA, 529 bp, Arabidopsis thaliana
  unsure (1)..(529): unsure at all n locations
acgtcgcatgcacgcgtacgtaagcttggatcctctagagcggctcttcctttgtttttttttcctttttaattnnataaaaaatttgtaataaatttttttttgngggaaccaaacatcccatacttattgcttatgctctgtttactgagttcaccggggatacctcnnnnnnnnnnnggtttttgttttttcccaaaacctcctttttttttttttttttgtttgggggaaaaaaaaaaaaaacaaaaaccccattgtgttttttttttcaaaaaaaaaggaggagagggggttttttttgtcccccttagaccccctttttaaaagttcctagggaaaaaacacgtttttttggggttttaccccccaaatttggtttttttttttttgcggtcctttgggcccatcccttcttaatggatattgctctccccccaacacgtacctgcaaatatttcccttttgtttgtcccacgcccaatattttttggagggcccccggcctctccatttatcttccctgccc

SEQ ID NO: 172265 - DNA, 481 bp, Arabidopsis thaliana
  unsure (1)..(481): unsure at all n locations
acgtcgcatcgcacgcctacgtaagcttggatcctctagagcggtctccctggggttttttttcccaaaacaaacacccttttctcgccnctatgaacgcctcaatctatgaaaaaagcccttgccttgttgctttgggatcacaaaacccaaatgcggacagccaataaagagaccgacggaaccaaaaccccaaaaccaccttattttttttgggggggggnaccacccccaagcacagggcttaggcaaatccagcaaaaacaaaactaagaaggcctactctagcaaccaacgtagcggcccaggtgaaaatctcaggccaccccatacggcgaagggccccccccacgaggtagaccctccaagcctccaaccccgccgcagccccgttaaaacccgaccacctcccccttccccccaccgcttatcatcccgactcctgtcccgccccacccctggttttgtcccccgcccattt

SEQ ID NO: 172266 - DNA, 288 bp, Arabidopsis thaliana
ctatgacgtcgcatggcacgcgtacgtagcttggatcctctagagcggccgccctttttttttttttttttttttttttgtttttaatgtttttatcatttttttttttgttgtgtcttggagcggggaaaaccggggactacataagtttcataacttttcataacaaaagggttaaagctattttgttctttcattttaagaaagatccaaattttgggggtttccatgctgcaaacttctcaaaaaaaatggcgaaaaaggttccaaaaggttttgatttttaac

SEQ ID NO: 172267 - DNA, 196 bp, Arabidopsis thaliana
  unsure (1)..(196): unsure at all n locations
ttccattaaccctacaattttcccgcctttgtctcactctcttnccggcttgcacctgggcggggactccatgggttcaaaagcagcaagcctcccgccgtccgggtaccgggggggganaacctccggggggtcngattatatacccgccgatactggtgtgccaggcctacggagggcatcaaaatttatcctc

SEQ ID NO: 172268 - DNA, 492 bp, Arabidopsis thaliana
atgacgtcgcatgcacgcgtacgtaagcttggatcctctagagcggccgccctttttttttttttttttttttttttttttttttttttttttttttttgtggggaatttttaggggagggaaaaaataggggtttaaacataaaaattttttaaacatcaacaatggcttaaaatctccaaagccctttatttggggagaaccctaaattcttttttttttaaaaaaaaatgttttattttttaaaacctctggctaaaccctaagccaggattggccccaagttttctttccttccaattataacccttttgcaaaaaaccctttggttgacccatcggaaccattcgcccaaggttttaaaccttaaaaaatgtgaaaggccccggtttttttaaccaccccttttttttaccctttctttggaaggcccccttttttgtggacccaaacctttttggcgcaaccattttttggggccccccccccggg

SEQ ID NO: 172269 - DNA, 535 bp, Arabidopsis thaliana
  unsure (1)..(535): unsure at all n locations
tctaatacgactcactatagggaaagctggtacgcctgcaggtaccgggcccgaattcccnggtggagccacggcgtccaggagcttgcaaaaaaaagtcacagggcgcgagataaaataccgaagctagcggaaaagcgttctatttcccagcggatccctagggtgtggattctaccgattttagggggttaaatctttgagagtgggttcgttatcaatgcgaaggggggggtcttgcaatcaccaccatctcaggcataggccggcttttttagccaaccatgaacctaaactctctactacttcctcctctgggaccttccccttgaagacaaacacttgaaagtgtagcgggactgggaatttgttgttttgagagttaaagcttatgggttcttcttctgattcctctgcagattcctccacgcctcccaatggcgctcgggagcccaaaagcagaaggggttttcacttggagtatgttcaaaatgggaagcccganttcatggagatgttccttaaaccggcccct

SEQ ID NO: 172270 - DNA, 243 bp, Arabidopsis thaliana
ctatgacgtcgcatgcacgcgtacgtaagcttggatcctctagagcggccgccctttttttttttttttggttggaatggattcaacttctctttttggttcaatggcaagaaaaatctttgggttatttcgaaggttcctctcatggtatacatataggggacatagcttatagcttgaggttgctcaaaatggacccgtcgaccggatattgatatgcctcgaaattgaattgcctgccta

SEQ ID NO: 172271 - DNA, 499 bp, Arabidopsis thaliana
ctatgacgtcgcatgcacgcgtacgtaagcttggatcctctagagcggccgccctttttttttttttttatatcgtctacgaaggttcaataaagatctactatagctttatcttacttgtacaatactttgccatgagcttctgtgttattgtaaaactaaccttaattcacacattggcgcgaggaagataacacggctgagattattatgagagctttctataattgacaaatctgtaaaaacttctgaatcatgctgaaagtgtaaggcgaaaggctcacccgatgatgatggtgattacttgagcagcggaagagtctcccgtgctttgttgccggagccattgtcccatgacatttgctcgtcacctcctataaccagaaacgtactctttcccacctggctagccaaagtctggctctctgctctcagcaagacctccgttatttgaagggacttcactaaccccatcatgagcatcagtcttcctagcttt

SEQ ID NO: 172272 - DNA, 546 bp, Arabidopsis thaliana
tctaatacgatttactatagggaaagctggtgcgcctgcaggtaccgggccgggattcccggggggggcgggggtgcgagttaatttctgttctaatgaggtgcgggttcggaaaactctacaacgctggccactggggacatcatgtcaaacattattggggcggtaccaaatacattatgctgggtgaactttaagccttatttcttgcagggggggggggaattttcgggcgctcaaagggataaataaaatagggccgagggggtcacacaaacatccctttattttccctgtttttctgatcgaagaaaacttttcctttttctttgtgtttgggggaatcataaaaacgggcaggcgtaaaaaaacaaagggcgataatgggaaggggggtccttttgatttctttggaggaacaagttgagacctgtctggccctaactggagcctgtagaggtattatttgtggggggagggaatcccttcaaaaacggggaccgcctcgaaaagaacccccttttggttcccgggggggaaaaacct

SEQ ID NO: 172273 - DNA, 499 bp, Arabidopsis thaliana
atataaaaaaactatgacgtcgcatgcacgcctacctaagcttggatcctttagagcgggcggccttttttttttttttttccggaaaccggtttcttttattttcagaaaatggtcctttggtatcctaccaggtaccaccaacccctttcttaacttggtatggttgaatcctggggtccggttagtttttatgggcccataaaacaggcacccttccggatggaccctggggcctggtgaccaaaagaaccctaaccgttattaattccttgttggccagggatgctgtggaaacctggaaagcctggtcaaggaatcccccaatcaaaaacttgaaggttcttttggaccctcctgggattcaaggcctaagggatgacccttgttccctcttggaaacccaattcaattcaatttggcccgggggccttattagctttcttggttatctatccaccgtgtgatcgggtttaaaatctttcccgcttttttgaaa

SEQ ID NO: 172274 - DNA, 503 bp, Arabidopsis thaliana
  unsure (1)..(503): unsure at all n locations
gactcactattagggaagctggtacgcctgcaggtaccggtccggaattcccgggtcgacccacgcgtncgaggacgcgttcagccacgcgttcggggtcacagtttcacagacacgcggctccttgatggttggcttccgccgacagccggcgtgtgtatgttccttccatacggaattctgcccgttagcgtttgattattttggctgactagggctttttcagtggataagaaacgagacgaggctcgattcaccggagagtcaaagaggcaaggaggagaaagcccatggcacatgccaagtttaccttggaagggcaaaatatggaatgcacttcacttttaagtgggcccaaaatcccaaccgttggaactcggctcgtggcgatttgggttctaagcccgccccccccgttggacttgaattcgtgaggggcgccttttgcgcctttgtacagctttggggtgtggtgattagatggaggtcgggccaaggaacaa

SEQ ID NO: 172275 - DNA, 490 bp, Arabidopsis thaliana
  unsure (1)..(490): unsure at all n locations
actatgacgtcgcatgcacgcgtacgtaagcttggatcctctagagcggccgccctttnttttttttttttttttttttttttttttttttttaaaccgcaacatgaatgtattgtaaaacgtttttgctccaaaatactacaattaccagatgatagtaataataaatatcttaaaagcaaaactgagactacaagagacaaaaccacaatagtctttataactgcagagatagatagacttagatgatgccgatcttgttagcaacatccaaagcatcatagtctggtgtaagcctcacgtaagccttcttggttccatcaggcctgatgagtgtgttcactttcttggtctggatgtcatacatcttcttaacagcatccttaatcttcttcttgtcagcacgaatgtcaacaatgaaaacaagagtggtggtggcttcaatcttcttcatcgcagattcagtggtgagtgggtacttaaggatttg

SEQ ID NO: 172276 - DNA, 446 bp, Arabidopsis thaliana
  unsure (1)..(446): unsure at all n locations
tctatacgactcactatagggaaaagctgtacgcctgcaggtaccggtccagaatcccaggtcgaccacgcgtncgcagacgcgtgggtccagatntcgtgtgtaagaatcattcaagcatgtctcngctaaagttgtactacaaaaagctgatctaaagccaaggccttaaagcagaaaagctgtgaatcttgtcaagcctctaaaaaaagggcaaaagggttgggcccgggccccctttcaaggccaaaagcttttacccaagccttaaaatggggagtccccacaaatcgcgcctccctaaagaaacaattgggtcccctcccaaaccttctaatccccctccccccctgatattgcgaaaaaaaaattagaaaaaccccccccttgttttctttttggacaatttggcggccaaaaaaaaaaaataagggcgctttaaaaaa

SEQ ID NO: 172277 - DNA, 467 bp, Arabidopsis thaliana
  unsure (1)..(467): unsure at all n locations
cccaaacctctaatacgacttactataggggaaagctggtacccctgcaggtacccggcccggatttcccgggggggcgaggcgtgcgaccacacttncnattaacttctctcacactgactctgcgaccctaatttgtgagctctcttctctttgcgcagaacatttcgctacaacttaaaaaaagggggggggggtacttaatccatcggtcctttctttatggggggtggctcttggggcaaaccttaaattccaaccaaacttctcaccaaatggttcttcgttctccagttgagcctactccccgcctggaagggccctggaccccctgccatcgatggtttttccgctggggcaaagccccgttctctgattttaaacatctgcttaaaaaggaaaagttctcttcctggtccaaaatccacttggagaggggaaaaacttttcaacctcccccaaacctc

SEQ ID NO: 172278 - DNA, 427 bp, Arabidopsis thaliana
  unsure (1)..(427): unsure at all n locations
actatgacgtcgcatgcacgcgtacgtaagcttggatcctctagagcggccgccctttntttttttttttttttttttttttttttttttgggggaaggaaaggtgaaattagatccaaaaggtaaccaaccttttggccatcaggggcaacttatccttaaagagtgaaaagaaaggttttaagaagatttgaaggctaaaaaccttgatggaaaccataatggggaagccttttcatatcgaaagatcccactggcggggagggaggatattggatttcttattggttggcaaagccatcggataaatagacctgttgatttgggacgtcccccaggtcttctaccatttttctaaggccatagggggggaaggcctgctggaaaaatataacgggctaaaaaacttttttactgtccggccaaa

SEQ ID NO: 172279 - DNA, 150 bp, Arabidopsis thaliana
cataacagcatctcctttaccgaccaagtcactcttgtcacctgaaataaacaactcccgaaaggaggaagagcgagtgttaccaaaatccttggagtacatatcatgcctaattcatttgggtggtggtgggattttttgggccattac

SEQ ID NO: 172280 - DNA, 439 bp, Arabidopsis thaliana
ctatgacgtcgcatgcacgcgtacgtaagcttggatcctctagagcggccgcccttttttttttttttttttttttttttttttgaaacacattgtttttttaccaaaaaaccacccctatttttaatatacgacattatcaacccccaacttccaaaattttgggagggaaaattcaattaatttcaatcgtattttacatcaaagagggtaataaaaaaatagttaactcattgaatttaatctcacggctcggttgaagcacctgattttggttgggattggctatctttctgtgccttatcagccaccaatggtccatttccaccggatctgcgagctcccgtgagttctttatcatttgttcccatggaaagaaaatgtatctttttttcaattgaaagtgttctctttgagccttcaagtgcaacacccatta

SEQ ID NO: 172281 - DNA, 466 bp, Arabidopsis thaliana
  unsure (1)..(466): unsure at all n locations
gctggagatactccactctatcgactcacttaggaagctggtacgcctgcagtaccggtccggaatcccaggtcgaccacgcgtncggtggagagtgcagaaggagtaccccatgccttcattaggatcatcgggattcgacacacccgcaagtncagtgcatcagtttcattgcctacnagccaccagcttnaccggtttattncccttgctttggggtaaacctaaaaccttatcccccttcttgatttaatccctgggttttcaggtttttcttttttttttgggtttaaatttccggacttaaagtttgttttccggtttggaaacaatttttttgggatttcaaagtgggggagaaaaaaaaatgggggggggtctttaaaaaaaaaaaaaagggggggccccttttaggaagaaaaattttaattcccggggggggacacacttatttttttttttttgg

SEQ ID NO: 172282 - DNA, 482 bp, Arabidopsis thaliana
ctatgacgtcgcatgcacgcgtacgtaagcttggatcctctagagcggccgccctttttttttttttttgtttgcaaggaacaaaatcattccggacgctatccggatgactcacaagttgattcacacttctgatcgcgtccttcttaacactcagaaccaccccagatgtttccctgggaaaaacaattcaggcgaatcataaactgtcttcaacggaatgagaaggatacactctccctgctactattcagaagagggctggcataaaagcactctccatgctgacggaaatccatatgtgcatgagataagaggaacttatgcgtcgcacgctaatggacagcacggttctttagcctcagcttgagcggggcaagtttgttgaactaaaccacagcccatgctctgctgacgtaaatcggaccctagggggactcggatatctgtaccgtctcttgtgcgtgtaccaggattgctta

SEQ ID NO: 172283 - DNA, 509 bp, Arabidopsis thaliana
cctcgcttagtgacctataaagagtatgacgtcgcatgcacgcgtacgtaagcttggatcctctagagcggccgccctttttttttttttttcaaacgaatatgaccttatcattaaagctcatctgaatttgatgaatactaaaaagagagcacacaaaaatgcttgttgaacgaactgtttaacttcctcaaagacatctaagaaagaacaaaagcgttagatactcatcaaaccatgggggatgtttgtataaaagaaaataccttctcactggttaaaggtggacctgctgtgccacccaatggttggggacctaaaccatgtttgtgaacctatgtatttagggctggaccctaggaagccaagtccaaagaccacccatagggagcattacctctgttgctcctccaaagttcgccgaaaaagcacaccacctttttaaaagtggggtgtaccctcaccttgaccacgagttgaaaccctatagcacgtgccattatgcccaa

SEQ ID NO: 172284 - DNA, 477 bp, Arabidopsis thaliana
actatgacgtcgcatgcacgcgtacgtaagcttggatcctctagagcggcccgccttttttttttttttttttttttttgacctgaagattgaattaagtcttccggaacagtaccaactactgaccaagggtttcatatttgggaccaataaagaggtttcacaaagcttttttacataaaccattccaaatcactggttataagaaaattcactaccgggcaagcttcttactttttaaaatttttcgcaaggaccttaacgggttgggcagggggtgccacggtagggatgttttcctcaagaaccttgggaagaagcttctcttggagaacatggttccttttttgggtatgcctggtcttaaccctcttaaccctaaactgggcaaaccatggctttttttttaccttttcaaccctggaattgggaattcctttcaataacccacccttggtccttgaagacattcccttg

SEQ ID NO: 172285 - DNA, 526 bp, Arabidopsis thaliana
aagatacgtcagctctaataccactcactcttaggagagctgtgtcccctgtccgtgccgcgcccgaattcccgggtccacccacaccttccggatatttgtggttggagagaattctgtgggaacccaaagagaatatgtcgttctagaggcatgtgtaagatattgagagatatgggttggagaccttgccaagagagagattccaattatgcgctctcgagtctacatagagggaacgctcagggtctcttcgttcgcgagagtatccgacatcccgagatctcttggcgcctgagatagcacacacaagtagatggtctaatcttcctccagagtcactctgtgatgtgctcaaaagattagaggagtgtgagagtaattggcctgcaagaacacatgttgtggcttgcgcttcggtttgtcggtcttggagagctatgtgccaagagattgttttggggcctgatatctgtgggacactcactttccctgttttcctcaaacagccagggcctcgtgatgc

SEQ ID NO: 172286 - DNA, 497 bp, Arabidopsis thaliana
  unsure (1)..(497): unsure at all n locations
tgacgtcgcacgcacgcgtacgtaagcttggatcctctagagcggncgccctttttgttttttttatatcaaagaagatctaagtgagtatattcttttctcctatggccaagaggaattaattaccaccacgacccttaactattcactattaattctatcttatagaccaaaaacagctcaagtacttgagtatgaaaatnataantatttgcgataagattgaagaatcaacaagcgttacaactctttctgcaggtaccgtagtaatcaggagagccaatcatatagacagggtttttcttgcactccccaagcttagcccatcgtccacagttttcgtcttcatcactgcattccccactctcctcaattcttgcttgtttcttcgcatagatcagttttgttgccactaacagttctcctttcaccacagggcacctcaaatgagtgcttttcccatccaaagatgcattcaagagcctggtgaagaacaa

SEQ ID NO: 172287 - DNA, 517 bp, Arabidopsis thaliana
gacgtcgcatgcacgcccgtacgtaagccttggatcctctagagcgcgcgccctttttttttttttttttggtttcgaagaattttctataaccaaaaatttataatcaaacaaaacaatatactggacaacgttatattttgcgtcatcagtagataacttcaagaacactgttttcgcctaaattcttcagaggaaagtgtttgatcttgctcctgcaacctctcagaaccaggtcctggtttcaacaccgagtcgtcaccttgcacagagcactgatcattgccattagctgaactcccgacacaccatcctcctggtgcaaaccggtgtgtccgtcccaatagctctttatcgatcttgtctaacgcaggatcgtttttgtggaacttgcgtgcaaatggagctttgctcttgaccatattgtcaaaatccttcaacgagagagatctagggtgttgctttggaggactgtcccaagcaatgtagtgaaggtcgtgaccgattgcagtgttga

SEQ ID NO: 172288 - DNA, 471 bp, Arabidopsis thaliana
gaaagctggtacccctgcaggtaccggtcccgaattcccgggtttacccacgcgttcggacaagatgcttgacataggttttgatgcacacattgaattattgtttggaatgttgacctgcctacaggtggtgtttaaacaattaaaaagggcctttcttacaaatccaattaaaatgaaaaaactcaaaccggaaaccttgctaactagtgtattttggcttgaggaaaaagttgttccatcaattctttaatttacttaaaggttgaaataagattaaaacttggacaaaaaatccgttttctaggacttacttcagacccaaattgaggctcattacaggcattcattactgttgttggtaatgaaaaaaatgaggggaacgcttgcttcataaaatgacctgtgcttaaatggacttaccacctgcctgcattcatgcggatggaacacatctgaaagaaaaaaaag

SEQ ID NO: 172289 - DNA, 513 bp, Arabidopsis thaliana
  unsure (1)..(513): unsure at all n locations
gactatagcagaattatgacgtcgcacgcacgcgtacgtaagcttggatcctctagagcgtccgcccttnnggaaaagcttnnnacaacnananagaaaaaaacagaccggagaaaaaaaaaaacagaatncctgcgaaagccagaaaacacatacagaaatattttgttggacacaaaaaaaatggtggccctcccccacaccacaaaaagacacaaaattaaataattgggcgggggccaacagnggcngggcccattgccccaagaaaaaaaaagggaaaaggcgaccctggcgccccccccccacaggaggggcggagangggcgcacaaccaatcattgaagcaaagctctacttaattaagacaaccacaggacaagctcttgaggtgggaaagaaaagggcaagaccaaggaacggggaactggttcttggtcctgagccccagcgcccaccaaagaaagagaagaggagaatttctcggaaccacaacggatgaaacatttacga

SEQ ID NO: 172290 - DNA, 506 bp, Arabidopsis thaliana
  unsure (1)..(506): unsure at all n locations
actatagnaagattatgacgtcgcctgcacgcgtacgtaagcttggatcctctagagcgtccgccctttgttttattcttttttttttttttttttttttatttactttttattctttctcttctttttttttttttttttttcaggggggaaaaaaatttttttttaaattcccaacccaaaaaggggcccaacccggggacgaccctaacaagatttttatggtttggggggggggcttattcaaaagcctttaagaatttacaaggcgttttcaaagttggggaaagggccccccaaaaaaaaaaaagtggcccatataatatcctattttcacaccacttttctttggcttaaagaagtttgagttgaacctccttggggggaaaaacacccccccctttggtttagatttttttggtcaaaaagaacacttctccccagggatcggttttttttctaaccctggccctttgccacacccgtggggtgccccccccaagaat

SEQ ID NO: 172291 - DNA, 510 bp, Arabidopsis thaliana
  unsure (1)..(510): unsure at all n locations
tatagaaagattatgacgtcgcatgcacgcgtacgtaagcttggatcctctagagcgtccgccctttgtttttttcctttttttttttttttttttttttttttcttttttttttttttttttttttgggtttccaaanatggggggtcccaaaaattttttcttccattaaaaataaccatctttcccaagtttcaattcttttaaaaaaaccccttatccttaaacattttggcaaaaacttttactaaacccaacgttttttaaaaacaaattttgtttgtttttaaaggaaccgtttttttatgtaagattccccttaaacaaaaaccggatcttttactttttctggaatttgaggccccccccttgcttttcctgttccttggggcgggggggcaccaaccattttctttttttaaggccacccttaattgtgacccttccccggggcgattttaacccgcgaaagcccccccccgggtaaaaaaacccccggttttccttttg

SEQ ID NO: 172292 - DNA, 493 bp, Arabidopsis thaliana
  unsure (1)..(493): unsure at all n locations
tgacgtcgcctgcacgcgtacgtaagcttggatcctctagagcggccgccctttgtttttttttttttttttttttttttttgttaaatcaacgaactnacgcaaaacaaagaattcgtgatgaagttcccatgttaaaacaaaggttgaaagatgttagagacacatcttatgagggggatatttgtagcaaccagacgccagtcgtcattaaactgtacacaaagtttgaaagatggtaagaccctctacatgagaagacactgggtggatcatgaggcgaagggtaatccctgttgcactcctttttgcctttgcttccttctcctgtttccaactggatacaacttgtttcatacactttaatcaacccgaaacaccaagacattgcaagagcttgcttgatgtggggacaatttgcacaacttcaccccactcaacatttccccaacctttacctccttaaagcttttgtaacgcgataaccgctctc

SEQ ID NO: 172293 - DNA, 509 bp, Arabidopsis thaliana
gacgtcgcatgcacgcgtacgtaagcttggatcctctagagcggccgcccttttttttttttttttttttttactaattttcatatcttcatatgacatgccatggaatggaagtacaaaatattctaaaattaaattagctgatcacaattgcctgatcaaattcaaaacacaagttttcttttttttaataactcaaactgatttttcttttcttcaaaagggtctttaagttcatcttcatggtcaggtccttttagttgcggaactcgtccatgaagctcttgtggaactctgtcagacgattcactatcgctggaatcttgtcttcttgtggaagtattgtgcatctaaagtgccatgttccaggaacctaaaccacaatgaatccaaaacccattattcaagttcgatccttttgtaagacatttaaagttatgaagatttggttatattttacctgtccaaagccagaaccagggactacaactacaccagtagcattgaga

SEQ ID NO: 172294 - DNA, 525 bp, Arabidopsis thaliana
acgccagctctatacgactcactatagggaaagctggtacgcctgcaggtaccggtcccgaatttccgggtcggacccacgcggtccgaaaaaggatatctcggtagtcttggttccattaagtcttccaaggattttattgagaatggggaaaaagaagaaggttccttggaggtacttggatttaatttttggatggtagaaaaccaattttccaaatgggtttttgggaattctttgttctacatctctggtcaaattcttgctagccttgtcatgagcccacccaagcctggtgatgactcatatgactcatacatggcagaaagagatggaattctctcatccatggctaaacgtgcaaagactttggaagacgctctcaacagtttagaaggtgttacatgtaacagagccgaaggagcaatgtatctcttcccgcgaattaaccttcctcaaaaggctatcgaagctgctgaggctgaaaaaactgcaccagatgcgttctactgcaaacgccttctc

SEQ ID NO: 172295 - DNA, 515 bp, Arabidopsis thaliana
atagcaagactatgacgtcgcatgcacgcgtacgtaagcttggatcctctagagcggccgccctttttttttttttttttttttgttcccaaaatgtgctttcatactcgaataaacataacaagcaaacaataaagaaagtagagtaatgcaaaagagcaaatcgcgctctttctgatacaactttaagagagttttaacattaaccattcaaacaaattatattaccttcttctccttctgaagtagctttgcatcccaaaaccgttactagttgttcattcagattttatttccatggagaataatagcaaactccctctggttaacaaggtacttaagcagcagcctgtagcaactccctttcagcgcgttccctgatccttctctcgagctctggcctaaagtgtcttatcagaccttgcacaggccatgcagctgcatcacccaatgcacagattgtgtgtccttcgatctgtttggttacctcctgcagcatatcaatctcttccagc

SEQ ID NO: 172296 - DNA, 470 bp, Arabidopsis thaliana
  unsure (1)..(470): unsure at all n locations
aaaaaaaaaanaaaagcgagaaaaaccccgttatgatatagnagacatctcgcaagattatgaggccgcacgcacgcgtacgtaagcttggatcctctagagcgttcgcccttttgttaaaactttttcatctttaaagattagactagggccctgtatcaccgcggtggttataagtgcaagatgcacaattgcaatgtgtagggtatgcgcgggctgatcaatcccttaaagctcaattttatggaaggcgagtcccaggaatttttatttggggggggtgctacaactggggctgtcccataacgcccgaggaacacagattccaccagggaggggatcgtatcatctccacttccgaaggacttttggacgacatgggtacccctagcgagacgcactcaatggttcaagggtgtgacgataaaatcggaggataaaataacatgcgccacttaaaaaactcttaa

SEQ ID NO: 172297 - DNA, 487 bp, Arabidopsis thaliana
gacgtcgcacgcacgcctacctaagcttggatcctttagagcgggcggcctttttttttttttttatggctattttaccttggaagaattatatgccaaccaaaaggggattccatttgcgaaaccacatttcttaccaaaagggccgggacccctaattctggttgggggttttttcttttctttaaaagtggatccaggtctttttttcatttaccttggaacctaaagcttcttattaaaagaaagaaaagtttttgggttggggtggaaacctcccctcatatatccataggggaaccattggggtgggggggtgaactttccatgggattgaccgggccaataatccttttaatttcccaatccaggtacctccggattttgatttggaaaacgtgttatccaaaaaaacctgcaccacccaccctgattataaggacccacaaaaggttccagttgagtttggtggttccaactttgcctg

SEQ ID NO: 172298 - DNA, 484 bp, Arabidopsis thaliana
ggcccccttccgtaggctggaatcttttaaagcgtccgcctttttttttttttttttggaaatctcaaccccggttggggtcggttaaggagtagtaaagcaaaagagagttggtgatgtcaaaataaaccacatccacatggttcacttaaaagtttctgcaagagacagatccgatattccagatatcagatattctttatggctcttctctgatacaactggatcatcattcagtggctgtggaaggggctggacagtggaagactcatcgagggccttcttcagctgcagcaccaacccatcttcctcatcattgtcccccacaacctctagatcccacactttgaaaatctcttgtgaagttactttgacaggatcctctgtaacattacaatcctcagcattgtcttcaacgtatgtgctcatgaaatcatccttgaatacttgagacgatactgacgctggtttttcttctttagcc

SEQ ID NO: 172299 - DNA, 481 bp, Arabidopsis thaliana
gcacgcgtacgtaagcttggatcctctagagcggtccgcccttgtgttaatttttttttttttactttttttttttttttttttttttttttttttttccaggaaaccggattatttcaatccaaaatcggtttaagggtaaaaaaaaccccgttaaaggaacttttaccaattttagcccccaaacccaccatataatcccaagggatggacctaaccggaaacccttccccatttttttggaaaaaaaaaccaatttttttcaagaatcccttccatttctgaacaagtaaaaaaccttgcaaaccttttgaaaggttgggctttttaaaggaatttttggtgggccaaataaaccttatttccatcattggaataagttaatttttttaaaaccttttaaatttttggtaaaaaaaataaaaacccaaccttttttccaaaaaattcttaaaataacccttaaaaaccacaccttttt

SEQ ID NO: 172300 - DNA, 442 bp, Arabidopsis thaliana
  unsure (1)..(442): unsure at all n locations
tgacgtcgcatgcacgcgtacgtaagcttggatcctctagagcggccgccctttnttttttttttttttttttttttttttttttttttttttggggggccacaaagatttctacttcaatcaagaataacaatcattacaaagtttcaatactcttaatcaaacacatatccgttaatcattttggctaaatcttctactaaatttttcgtgctttacaagcaagctttgtctgtttttaagtgaactgtcttctcatgtaagtatcctcatgaacaaaaacaggatcttttactttttttggaatctgaggctgccccattgctattcctgttccttgggtcgntggggcaccaacaatttgcttatttgaagtcaaacataaatagtagacaatcccaagggcaatagtaacaagcgaaagcacagcaccggtagagaa

SEQ ID NO: 172301 - DNA, 488 bp, Arabidopsis thaliana
agctggcacgcctgcaggtaccggaccggaattcccgggtcgacccacgcgtccggaaagtaatgcagctgaaagtccttctcctatatggcatcttccatcagaatctggtggagaaggtcacctaagcaatgatgagatgggagcggacgtacgaacaccggacaatgcagacacatggatgactgggagaaccaacgattatgaaagagctgtgccccaccgccttagcccaggatggattctgaaaaaccttacccacctgcgagaagcgaacatcaaagatctcgcctgaacacatcgtcacgaaaacgcctgctgtcgagggctcagcgtcctcacggagacgacacgcctccgactgcaggagaagagcgccattcgcgcggactccacctgccccacggcggctccgcggaggagcgaacctcatcgcggggcgccccctgaccacccagtagggagccgtccccagaccgaccccatgc

SEQ ID NO: 172302 - DNA, 512 bp, Arabidopsis thaliana columbia
atgatactcagctctatacgactcactatagggaaggctgggtcccctgcaggtcccggtccgaatttccgggtcggaccaacccttccgaagaacctttttcaaacttggcggcggggaccttggtggcggactcgttttcccgatttttgttccgccgcgattctcttttgttttcctgattaaggagggagtctcgagaacacgacgacgacgttaattctccgttatgaccagaagacttactactacggcatgctcgtgccggaggagcagattcgttcaaaaactactcgaaagacggtaatgtcgtaaccgattcgttccggagatacagccgtaacgcggcgggtcacgacgataaattcactgtctacggtgaaaacagtaacgtggtagaggaaggattcaattcatacggaacattcggaaccggcggcgccggagatttcactaactaccaaaacaacgtgaacaatccaacgagtcgattcacggcgtattccgacgga

SEQ ID NO: 172303 - DNA, 490 bp, Arabidopsis thaliana
  unsure (1)..(490): unsure at all n locations
gacgtcgcacgcacgcgtacgtaagcttggatcctctagagcggccgccctttttttttttttttaataaaaggtgaatcatataataagcaaaagccaagaccgaaacgggttctgattcaagagtgtgacccaaataaaaacatcggtcataagagttttggcactcgaaaaactctgatgccgagtctagatctaaaaagatttttnacattctcaactgtgtttcaccaaaacgtgagatattttgctttatcccattcataaaatttttaaagaggtgaaaatgtgcaaataaaaaatgaaaactttgcgaaaagggagaggccacaatcagtggaggtgctcatcgtctctggcccgngaccatccggaggaccgccaggacaaaccacttacagctcaaagaactgagtgcaaaccgggcattcaaaggactttcctttgtaagccataaccagacaacattgtgctcttcctcgccttcaca

SEQ ID NO: 172304 - DNA, 519 bp, Arabidopsis thaliana
gatacgccagctctatacgactcactataggggaaagctgggtacgccctgcaggtaccgggtcccgaatttccgggtccggaccacgcctccggtttaaggggggacctggaatcccaccatataccactttaactggaaatgcctttgattctgattaatagcccggtgaagaaaatctttatctctcatttcataaccctagccgccgtgtcgttgctgatttgcttcaagattcgatggaccgccaccaccagaccatgtcggctattagctcgacaacattcgatcattcatgtgcgaacaatttttcagctatcccacggattttcatttccaattgagtacagactcctgcgacgattattgtggaggatgaactgcccattgtgactggacaccataaggaagagcttgatgctgaactatacggaaggaggctggatgatttcgactctgctggacgtgctgatggaactaaagaaactactgctattgtgaaatgctactatgacatgc

SEQ ID NO: 172305 - DNA, 512 bp, Arabidopsis thaliana
tttatacaactaatataagggaaggctggtccgcctgcaggacccggtccggaattcccgggtcgacccacgcgtccgcccacgcgtccgatttcaagtttattttttttcttaacagatttcaatatatttgtgcgagtttttaaccaaattagacatttttaatcaatttttttctgagatgcgcaagaataaaagagtctcatccattcatgcgaatgtgtacctagaattgaatcaggtggctcaatccccacccttactcttttatggagctcaagatcttggatcatgtgtagattgaacacagtcatccatttccagagactcacttatcctttggtagcttctactacgaaacataacaataacagtttgctttagaagagattttcagatggtgctgccactgacgactcatcactgatctaagattatctaaatgaatctgttcttcgacctctcactaccgatgagtcgaagtcactgttcatctgtgctgatagatcaac

SEQ ID NO: 172306 - DNA, 504 bp, Arabidopsis thaliana
gacgtcgcatgcacgcgtacgtaagcttggatcctctagagcggccgccttttttttttttttttgagaggaaatataaattaaaatttagcagaaaaatacagcttaagtggagggttctcacttctcatgttagataaaatggaccaaagaatcaaatagtaactatgagaaaaaaacagtgaagtaaagaacaattgaagctttgtaagattactcttaaggagtctttttgaagatttgttggtgaaaaataaaatcatctctttagcaacctgagcacatctccaacaagatgtagcgatcctgtgaccagaacctctagtttcagtgaagggtttcggcgtacgcagtctcttagccagtttatagtcaatggaagtgaaggcattacggcactggaagtgaccggtgtccctgcaggtccaccacattgaggtgcatctccgcacaggaaatcatgaggtggtaaggcggttattccatcgggtttcagtgtatggt

SEQ ID NO: 172307 - DNA, 491 bp, Arabidopsis thaliana
gacgttgcacggcccccaacgtaagcttggatcctttagagcggtcggcctttttttttttttttatctaacccactctttttctctcttttattaattcaaactcaaaacattaaaggttggcctagtgcttgaaactattaagtcccaccgcgaaattagggaaattccttccttttggtcaccatggcccattatttaacttttttttggcgaggcctaacatatgaattttcacaccaagcccttaccttaacctactggaagaacttccttgggtcaaccaccccggccggtaaaggccaaggttgaaccatggtagggagaccttaagaaaattggcctttcttggggcccaatccaaccgggaaagttctggttggccgttagaacccccactggaggttaattcagccaagcgtaggggttggttggccacccaaggcaggccccacagttggggctgcttggggtgtaacagccagtttttt

SEQ ID NO: 172308 - DNA, 489 bp, Arabidopsis thaliana
acaacaatttgggaaagcgggcccccggcaggcccggcccgaattcccggtttgacccacgcgtccgcacacaacaaacggtcttttttcatattcacatctcacccagacgcaaccgctaaggctgatctctcccaatttacagccattccccatcaaaaatctctgacacagtgagatctccctcggagaaaaagactgagaccaaccactcgatgaagacgctcactctacgttggaagccacacacctcaacagagaccatagactctaatttcaccaaagcccaaaggggatgatgctaacaaacccaacacccttcatcacgacagacactacaaaaggcagacgaagcatgccgaaacggaactccaccaacaacaacacccaaaagccgacgcaaaccgccctcaagaacttttgcacacaaagcaggacaccaagcccattcccccccaagaacaccgaccccctaggcacccgcctcgc

SEQ ID NO: 172309 - DNA, 485 bp, Arabidopsis thaliana
cagctgctatacgactcactatagggaaagctggtacgcctgcaggtaccgggccggaattcccggggtcgcccacgcgttcgcttcaagggtgtgaccctgagaatcacaacaccaaacaatctcactcgaaattcctttgactcatcattctcaccattgtggagaagaattcgtctcttttagctcaaaaccctagcccgcgaaggccgccgtggtttttcttggcgatcggataccggccccacccgaactggccggttctatcttggcggccatcgatccggcctttacggattttctttcggtaatccttggcggttcaacttccgatccagtagagacctctggcgaccaagaaaggggggggaggtatggccctttgcaatgggccccaaaagggaggacctggaggctgaacttatgggagggaggtggaatgatttgaccttcctggaaggtccttttggacttaaggaggctcc

SEQ ID NO: 172310 - DNA, 502 bp, Arabidopsis thaliana
taggtacactatagaagattttgacgtcgcatgcacgcgtacgtaagcttggatcctctagagcggccgcccttttttttttttttttacaaaaatattactttatatgaaccgaacacagtatgtataatatagtttgtacaacaatggtggttcttgtttctacctgaccttcctgattggcaaagctttcccaaacaatttttcaacctcacttgcttccattttgatctcatccaaaaactccatctcttctttacttaactctctcacgaaattctcctcgtcttgcttcagttcattaaatccttcagccaatctctggaacaaggtcatctcagtcctaccgaccttctccacttccttctctacctcttcttctatctcttcaacctcttttacgattatcctttcaccttcttccactgtcttctcaattctctccacgagcgcaggttcaggaccacatgtgttatccgttctaatgaatgtgctgaagtct

SEQ ID NO: 172311 - DNA, 476 bp, Arabidopsis thaliana
  unsure (1)..(476): unsure at all n locations
accgcggccgcgagttccccggggtcgacaccacacgcgtcgcgggcactgagaaccatatatatgcatatctctcatatcttctcttatatggcctcattataacacacatatatatatgccnccacaatatttagattggattagagaggtgtgtggaatgtggcgaaagagtatgccgagtgttcgttagagaagatcttctatgaggattgctctgtctgcagggttgatcatatgaagaggcttccgcgtggatttctcttgtgagagctttataccgtgtggatcatcgttctttgcaccgctgtgcccattttttctatattcccctttctatactatatgattgatgattncaacattgcagagagagaagaggacattgggctctacgctggatttggtgggtgctctttcatgctcggacgagcttttacatctgtggcatggagacttgttgctgatcgttatgg

SEQ ID NO: 172312 - DNA, 511 bp, Arabidopsis thaliana
  unsure (1)..(511): unsure at all n locations
gacgtcgcatgcacgcgtacgtaagcttggatcctctagagcggccgcccttttttttttttttttttttttaaaacacagtaccactttattcaacttttgacgattttacttttcataacaagttaagaacatctganaacatagtaacttttgagaccttattaaaaaccagcaatcatttcaacacccgaaaaactctacagtctctccctcacgctctctaggttncattcacgaagatgaattcttctgtacccattcaacaagcgtagcaacaccaaacccggtcccagacttcttcttctcgttccacaccggtccagccatgtcgatatgcatccattgcaccttctcactcacaaactgtttcaagaagagagccgcggtgatggatcctcctgcccgcccgcctgtgttgaccatatcagccactccagacttcatcttgaaccgaggatccatcaccacggccattgccaaaaccaagctacagtctctccagtacttg

SEQ ID NO: 172313 - DNA, 509 bp, Arabidopsis thaliana
ctatagaagaattatgacgtcgcacgcacgccgtcgtaagcttggatcctttagagcggtcggccttttttttttttttttttgaagaataccattccacctggatgacccatctattggagaataatgtgagttggagggcttaaaatcatattacttattttgcttaggttcctaccttttacctggtttaaccccataagtctggatcaatggaaccttgtaccctagttaagaagcctaatcatggtttttgatggatttaaatttaaaccagaaaaaatttggccggtgaccggcctttttagggttcaccttagaaaaccaaatttaatgggttaaaatttccaacttcaggcagaaaattttccaaaccatcttcgttcctttcgttttggttgggttggcattctgtggaccttcttttttcctttttaaggagaagggtcaaccaccatatacccatttggatcatccttgcgtgacatttaatccttgccacgctcagg

SEQ ID NO: 172314 - DNA, 515 bp, Arabidopsis thaliana
  unsure (1)..(515): unsure at all n locations
agattatgaggtcgcacgcacgcgtacgtaagcttggatcctctagagcgtccgccgttggttttagtctttttttttttttttttttttttttttttttttttttttttttnnaaaaccaaaaaaagaacaactcgcaaagtgggtctgttgaaacactgtgggctaaaaatctgaaggcttaaagaaataccgggacgctaagttattgtttttttttttaaaagaggggttatgccacaaacgcatttgataaaacattcaaaacctttttcagagtctaatccgtgaactggtgatcgatttagcttcacactatatatccttttcacttattagactttttcttcggtacagctgcatttggagcaggtgtaccagcgggggctggaacaattacaggcgcaacatttccaccgggacccttagttaaacgctcctttttcctagcatgcttcctttctgggctagctttgtttttggccctgttagcctcaaactgatcagacagagtt

SEQ ID NO: 172315 - DNA, 491 bp, Arabidopsis thaliana
  unsure (1)..(491): unsure at all n locations
gacgtcgaacgcacgcgtacgtaagcttggatcctctagagcggccgccctttttttttttttttgacttaggaaaatttttacaccagagtttagacacatcatccttctaacagaacggactgtggtgcctaataaaacatatcctactgtagcttgactactgtgtttacaagtacgagactgacaatgtttcatgcctttttttgtagctagactgtcgcggctgaggacggcccgaggatgatttaccttgcacggatactgctactgcttgacgaagctgcgctcatgactcattggcaccttgtactggtttagagacagngtggctgatgaagactgtgttgattgatgcaccactgtccacaactgcattagctagttgtgacaagaagtggccaaacggcggcattgatcttctgaaggagtatctttttgaggaacatcgaccgacagcgatgacggatattctgatggcgagcgtacct

SEQ ID NO: 172316 - DNA, 499 bp, Arabidopsis thaliana
aactcactatagggaaagctggtccgcctgcaggtaccggtccggaattcccgggtcgacccacgcgtccggccagacatactattatctgatcatagaccgactgaggatcgctatactgtgagctccattgtctctgcacaactactccttacgacgcacaatacggcctttggtacttcatccatcattactgtcatagcatgcccaggttcactgtgatcatacgaaagctttcggcatcacacagtcagatccttgactctactcagctgcggatacctcatagtgtcgaacaagtatgtgagaggcctgacactcaccggcataggatatggcgcgcctgtactcgtccttgactgtcgcatcgtgagtacctcagcggtcaatgcccctgtttgtcttgatttagacacttgtgtcttcacaagagagaaagtctaatacgctgcctacgaccagtcattgagagaggaggaagagactagtccaagcatct

SEQ ID NO: 172317 - DNA, 500 bp, Arabidopsis thaliana
  unsure (1)..(500): unsure at all n locations
gacgtcgaacgcacgcgtacgtaagcttggatcctctagagcggtcgcccttttttttttttctttttttttttttttttttttttttttttttttttttttttttttttttttttttttttttnaaaacaacataaaacggtttacagagacttttttaagtccaactggcccaacttttcttttaaaaaaaaaaaagggattaatcctatataggccaaacccgtgttagcatcaaatacacatgtaacctgaggagacaaaagttttccattttttatccttcgccgggaagccattgattttgccggaaactgaaactaagtcgaatgaaactcgaaaattagcttcatttgaatttttccaacccctccaaaacagaagtgggggtttaattcgggttttttaattttaaaagaaaaaaaagatttttgattaaccacctttgttttttaaacccaatcgaagtttgaatttaagaaatcccgttaaaggcaatt

SEQ ID NO: 172318 - DNA, 505 bp, Arabidopsis thaliana
actatagaagactatgacgtcgcacgcacgcgtacgtaagcttggatcctctagagcggccgccctttttttttttttttgttgtgaagggatcatggatttatatttcagaccacaacacccacattctagcgaacaaactatctaagattgaatctcaagaacaggtccattgatgtcaatttccactagagactccttcccaaacaaagtagatcctttcgttgccttcgcagttcagcggtgcagttgctttaggatcccaacagattcatcacatgtgcctgataaaactctaactgatgaacccgatgcaagttccttgttcctcggctttggctcagcagcaagagtagctttgctcgtggctcgtttcagcttagattctgctacagtctcaataacagtctgatgatataatgcgacacgttcctgtgacgctagtatactcgattgttcttcagctctatctgcctatgcgaactcactatctgctatctcttgc

SEQ ID NO: 172319 - DNA, 504 bp, Arabidopsis thaliana
gacgtcgcatgcacgcgtacgtaagcttggatcctctagagcggccgccctttgtttttttttttttttttttttttttttttttttggaaattaatggtaaattagattcaaaaaggaaaccaacctttgtgccttaagtgccacttattcttagagagttgaaagaaaagtttttaagagatttgaaagcttaagaacttgatttttaccataattggagagccttcttattttgattggctccacttgcggggatgggtgaattttgatttcttatttgcttggcaagccattggattaattgaactgctgtttttggaccttccccatgttttttaccattttttttatgccatttggggggaatggctgcttggaaaaatttaccggcttaaaaacttttttactggccccccaaaaagttctggaagaggtttcttaagaggacccacttggtgaaaacttcgcctgatagatattggttgctaaattggtccaaatt

SEQ ID NO: 172320 - DNA, 492 bp, Arabidopsis thaliana
cgcaaacgtaagcttggatcctctagagcggccgccctttttttttttttttgtgtaagctcaaaacatttaactgaaatggatacagatgaagaagaagcaatactttgttgtacgatcacacaatgtataaataaattggaaaaaataaacaataaaagaaataaacgaatgataaaaatatagtaattttttaggacttgggactgggaggaaccgaggaattaggaaaagaaaccccgccaaggtttgaagttggttaagcatctcgaggagcgatccaatgtctcccattaacgaagctcttagcgataaatggatgggccgattcatagtccaaagctctagcccaagacacgcctctcgtcgctgctgttcctggcccatagcaattgtacacttccaaaaatgccggcttgcttttgttggatttgtggtccaaatcgtcccaaccaccgtgagcgacgagagcataaaagtaagtgtaggcgt

SEQ ID NO: 172321 - DNA, 502 bp, Arabidopsis thaliana
gacgtcgcatgcacgcgtacgtaagcttggatcctctagagcggccgcccttttttttttttttttatgcttaggaaggacttaaaaggcttaaaagagacaccctctgttttttctactataagatccacacagataaaacccaaaaaggaaagacattgtcttgtttgaccaaaagagttcctccagcgaatgcatctgacttatctaaagtatgtctgagaagcagcatcaaaggccgaggttactcataagctgactccatctgggagtttcctcatgaaaaatgtatgttacaggagaaactagtaccccacttcctcccaccgttctcagttgctgaacagactcataaagcgctttttttggtacacaaatcacaatggcatagtactcaatcgttacttttccatctcgtttacaataacctggacttattgttggtccctgcaatcctgatagtgatggttgggtatctacacgttcagccacttcttaagca

SEQ ID NO: 172322 - DNA, 510 bp, Arabidopsis thaliana
  unsure (1)..(510): unsure at all n locations
ctatagnagagtatgacgtcgcacgcacgcgtacgtaagctnggatcctctagagctttcgccggtttttttattcttttaaaaaaaaaactcaaatttccaagtcattaaattacaaagcgatttacatttttcgattgaaaacgagagttaacaattggatatgccttttaccaagtggaacatttatcgccctattttcgggggaatttaaattttttttttcagggtgccctcaaactccccaaaaaaattaaaattaaccaattatttcatttaattaattattggttcaaaaggcggttacgggtttttttccaattggcccattttggttgaaagttttttcacccttttggcccaaatcagtttgtaaaggtgacaataactaaaatttttgttggcattaaggtaccaccattcttccaaggtcattatccctttacctcccatatcataggggaggccaagaccgaatcccactggaatcccaacacggtattaccatcc

SEQ ID NO: 172323 - DNA, 512 bp, Arabidopsis thaliana
  unsure (1)..(512): unsure at all n locations
ctatcaaagaattatgacgtcgcctgcacgcgtacgtaagcttggatcctctagagcggccgccctttttttttttttttttgaaaagctcagccacaaatgtggaatgaggaaatacattgcaaccattcacatagagagtagaggccagtggacctacagaggaacttataagttgtctgatgttggtattacatatacttaaccaacatccatanttcatcagcaagaccgacgatccccagcactgacaagagcattgacatgcaagagcaaccacttctcatattcttgttcatgacagcaaggctcttctgcactctccttaagcgagagtcagtaacatccacatggtaatctaagtcatcaataagcctagtctgcaagtcaagctcttcactaacagccagagcaatgtgttttgtgctaatgactgttccctccaattgctcaagtccttcgtcttgttctctcataacttgncggtgatatccaacaattccttggttatc

SEQ ID NO: 172324 - DNA, 507 bp, Arabidopsis thaliana
  unsure (1)..(507): unsure at all n locations
ttgacgtcgcatgcacgcgtacgtaagcttggatcctctagagcggccgccctttntttttttttttttttttttttttttttttttttttttgtttttttgttaatgtaaatttttttttttttttttttttnnaaagggaaaaccgcgggggattcaaataattttcattttattcggtttccctttacctggcaaaccaagaaaaattttgcttttgaaatttgcacttgggtcctaatccccgggtttttaaaaacccctgttttttaagcttttaacaaaaatgaacctggcctaaaacattttttcacatttttaacacaaggttggggcccccccgaagaagaagaaaaaagaaaacctttttgaccccctttggtttataaaaaacccaagttttcccggggttttttttttcccatttttttccagggggcggcgcaaagagtctttttttttttttgggacctaaactcattttttttttttcctaacttgacatct

SEQ ID NO: 172325 - DNA, 469 bp, Arabidopsis thaliana
  unsure (1)..(469): unsure at all n locations
acgcgtacgtaagcttggatcctctagagcggttgccctttgtgttttttgtcttgcaaaaccagaggaaattttatgaagctgtgagaaatgagtttatgcngggagatcgatgagataaaaggaccatcatccgtttactgaagctgcattcttattataggagtctgatgacctgtcccacacggcacatcctccntgtggggggtagggnacacggggacactgcgccaaactctagaacacacgagcatgatggngcgccaaaagaaccgaacatgtcagataaacacaatccttggtatatccagatgcattccaaaggatccttctaggaaccttattgactctactttcgctcgccaacagagtttctcacactcgatgagcatctctggtgagagccaccctagtgcggtggaggtaccaacccaccaacaagtgcgtactctgctgtcttaaagacact

SEQ ID NO: 172326 - DNA, 535 bp, Arabidopsis thaliana
  unsure (1)..(535): unsure at all n locations
tgatttagctgacctatagtaaactatgacgtcgcatgcacgcgtacgtaagcttggatcctctagagcggccgggcgggggttttttttttttttttttttttttttttttgaaaaagaaaagatctttttctttttcggagtaaattccaaaagaaacagagggttggacctaacaaaagatataacaggattcccacaactgcttaaagaaatgattggaggggggagactttaccctctgttgctccaaaaaaaaaaaggagaaaanccccccttttttttcttcttacaagatcttattttctttgtaaaaaatatatttttatttagggtgattggtaaagaaggaagagaaacaccatctttttttgccgttctttttgtgggattatatattttaaaaagaaggggcatctcttgtggttgggaatnttggtcccacgatcctgtttagccggggctttttttttgttttttaaagggcgcggaggagaaaacattcgcacttctgcctttgttttttttttttgac

SEQ ID NO: 172327 - DNA, 316 bp, Arabidopsis thaliana
  unsure (1)..(316): unsure at all n locations
aaaaactcctaccttatactatacctttaattattcctcaataattctaattctccttccttttttaaatactagngtttcatataaatactccttttttttactaattccttcctacatatattcttcttccttccttcataaacccttataaccccgaattttaaaccttgcaaaacaattaacccacaggccagggctgctcctcttctaccaagccatcccacttaaaggaaaaaataaaaacattttccgcccaaaaaaacctccccttcagtcaccacccctcttttaaaaggccccatccccccccccc

SEQ ID NO: 172328 - DNA, 385 bp, Arabidopsis thaliana
  unsure (1)..(385): unsure at all n locations
tccccagctctaatcgactcttatagggaaagctggtacgcctgcaggtaccggtccggaattcccgggtcgcgggcgcgggcgggatcaacctctgttctctttttccttcatttgatcgccttttctggggctctctaatttattggcgtcgggtgttccttatcctgaatccttatcttcaatcctctgttctggttctcaaacctaaaaaagtttnaaactttcctggggaaatgnccacctagagggaacanatcagaaaaaagttaananaattttcccaccaattccacgggaatcatgatgggtgggcttaaccctgaagagatggccgctcttggccgacgtgttaaccctaggggtaaattcagggacgagcaaa

SEQ ID NO: 172329 - DNA, 485 bp, Arabidopsis thaliana
  unsure (1)..(485): unsure at all n locations
acgactcactatagggaaagctggtacgcctgcaggtaccggtccgngattcctgggtcgaccacgcgtccgtgacgcgtccgccaccttccgctggttctctgcgaggaaaaagagctcttgaggaaaaaaccgaaggggtttaaaaaccttccccctaaaaaaagcgcaaggggttttgacattttgatttatcccccccaagggttttggtagtaaaaaatatttttcccaaaccttaattcgggccccatttttgggcccaccttgaatctaaaaagggaccaagaaaaaccccccccccccgtgaagattttccttttttttcccccccccccccccaagagagcgctccccccccccccccccccaagaaaccccaccaaaaacccccccccggtttgtcttttataacaacaacaggggggccccccccccacaaagttttcttttctttttccctccccccccccaacaaatggggg

SEQ ID NO: 172330 - DNA, 521 bp, Arabidopsis thaliana
ctatgacgacacatgcacgcgtacgtaagcttggatcctctatagcggccggccttgttttttttttttttttttgaaggatagagcttgattcattgcctccctgatgatgggccctaaggaacaacacaccgctagaaagatgtgccttttaaactataaagcataagaaaaactccccaaagtaaaaaaataaacactaacgggggagatggttttggggattggggaggagacctaaaaacccagttttggtacaaagatttgactttttctttcttaacacaatatcacgggttattgggctatccttatcctgagttaaaaaagggtgatgctgccaagcaaaaattaccctttaagggcctttttttctttttttatttcacgcgttccataaaattggggaaaacattcctggctccaaaaagaggtttcttaatcctgtggccggtgggacccccacaaaatcccaatttttcgttatgaaaaattgggcccgttttttttttgatcccgtt

SEQ ID NO: 172331 - DNA, 523 bp, Arabidopsis thaliana
gaagagctatgacgtcgcatgcacgcgtacgtaagcttggatcctctagagcggccgccctttgttttttttttttttttctttttctcttttttttttttttttttttttttttttttttcttttttttataaaaaccccggggttttttttttgggggccataagcgaaactggttggtttaccaacaagaaccttttttttggtgcggggaaggggccccttcacaaaaggaaggcgggtgccctcaaccctaaaactttggcccaaaaacaagtctccaaaaacgggattttttccgggcgtttttcctccaacagaaaagggtctttggctgaaagccccccccaggccgccccacccccccttgggggaccccccccctctttaaccaaattgggggataggccccttttgtgggggcctaaaaagggtcccccccccttggtgccccacccccccactatgggggttcaatattcaacccgccctcgaggcagttttttttttaaaacccaaaaac

SEQ ID NO: 172332 - DNA, 567 bp, Arabidopsis thaliana
actatgacgtcgcatgcacgcgtacgtaagcttggatcctctagagcgggcgcgctttgttttttttttttgatttaagtagatttttagaccaaagcagagagacataattcttcaaacaaaacaaacagtcacgcctaagaaaacatcacaaactctcgacttaatactccgattacaaataagagactgactatctttcaaccggggactcagttgctagattgacgcaactcaggtcgaacaaagtctgcatcagcaggcacagagatatcaacggtaggcctgagctgtgcgcagaccttaagggcccatggactggatcagaaaagaagttactggttagggctttgtggttggtgaccactggcccagacacaagagtttgtgggggcaggatgggggaaaaaccggggggccattttcctcaaccccaatattggtgggggtgagccgggtggcaaccatggagggaacctcccctggggcggcataaagggggttaaagaggcccccgggttcaaccccccttctcggggagggattctggagaagagaggccctttt

SEQ ID NO: 172333 - DNA, 491 bp, Arabidopsis thaliana
  unsure (1)..(491): unsure at all n locations
cactatacgactcttatagggaaagctggtacgcctgcaggtaccggtccggaattcccgggtcgacccgaggcgtgcgcgttcctccactcgtagctctctcacagtctggtactcctagagctagagaaaaggcacaggcgttgctcagttacttcaaaaaccaacggcatggaaacgctgggcgtggctgatgatggatgatgatgatgatgatgatgttgaggatgcacagattctgggctctcagtgcctatttttatgttttgtcttgggaccaaagtagtgattttgtacaaaagaggtctcttctgcgnatatatttttcgtactcagattttttgatgggtctctggattctttaattttctattggttctcataataaacctgtgatttgggatagaatttttttttttctccaaaaaaaaaaaaaaaaaggggggccgctctagaggatccaagcttacctaccgggtgcgtgcgacgga

SEQ ID NO: 172334 - DNA, 590 bp, Arabidopsis thaliana
gcactatagatagactatgacgccgcatgcacgcgtacgtaagcttggatcctctagagcggccgcccttggtttttttttttttttttttttttttttttttgttacccatctttatgtggaggatctttccctgtgaaaccacggactctgcaaaaaaaattgctttggaacggctctctttgtaacaaattttccccttttctcgcccttgaggggggacaggcccctacagacatgctcgggaccctgcccccacccatttgacccgattgccccgtggtactaaccctgtgcacttgcagggggcggctatacctaacacccggacttgaaagagcacgaggtgcaagcccaccagagggggaaaaccacaacacccagttttcatgcaaggaccaccccctagtgcaggtgattccccccccaaggagtttacttgggaaaatgcctcctcccgagagctttaaaggcgcccacgtcacccccacaaagtgaagtccttgttggaaggggggccataaaatcccccctcccagtgcgaaggcgtttccttaaggtgggagtgggggaacaacacggtgttttcc

SEQ ID NO: 172335 - DNA, 579 bp, Arabidopsis thaliana
ttactatgacgccgcatgcacgcgtacgtaagcttggatcctctagagcggccgcccttcgcgttctttctttttttctttctttctttctttttcttttttttttttttttttataaaaagggggtctattgcaaaaattctcaaaaagggttgttttttgacaaatcaaacaaaagcccctcttttacctattttaaaatctctgtgggggcgccccaaaatggaacctaaaatgccaccaacccgttttttaaaagaaaaataccaaaaccctctgccccccttttttctttggttccttaaccccccaggtgaccctcatatgctctaatccgtctttacagaggaatatataagcctttggaacccaaaaccaaccttaaaacctttttgttcctgggaccccaaaaaatggggggggggcgtaggccttttccccaagtgaagccttcccaaacccccgttggggggccagaacttttggaaaaaagaaaaaccgtccatatagggaggggcaaaagcctctccccctctttggggggttcccccccccccagggggtgccctcttgaaaggt

SEQ ID NO: 172336 - DNA, 486 bp, Arabidopsis thaliana
gacgtcgcatgcacgccgtacgtgagcttggatcctctagagcggccggcctttgttttttttttttatagggttctgattaacaaaaggagaaaaccttcaagtttattgggagatataacaaaatcgggggaaagccccacctgaaatttttgtggggttgggaccaaggcccacaacaaagtttctaggcggtattactcctcgcggggggggtctctcaaacctgcccttcttcctccccaatagtttctgctaaaacccccagacgataccccacaccgccctcccgaggcggcccccggcctcgtgcaagggcggggatgtgctgaggggtgcgccctctctccccgcacccccgcgcccccaccgcgcccagccccgatagcgccgatatctggccgctcctgtcccgagagctaagccgcgggcgctgtcaagacgcccacgtgccccccaccagagccccccggccctcccctctcg

SEQ ID NO: 172337 - DNA, 580 bp, Arabidopsis thaliana
tgcacgcgtacgtaagcttggattctctatagcggccgccgctggcttttttttttttttttttttttttttttttacttttttttttttgaagaaaaccccccctttttttaatttcccaaattattaacccccaccttcccaaaattttgggagggaaaattcatataatataactttttttttcaaggggggggggtataaaaaaaacacccaccatataaatttgaattaacggctttggtcacacccctaaagtatagatgggaaagggttatttttcttgttcttttacaccccccaattggcttattttccacccaaatttaaaaactcccggaaatttttttaacctcagatacccttggaaaaaaatttttcttttttttaataaaaaagggttttttttaggttttctaagccacccccaaaacttattttttttttaagtttgtctaacaccccccaccttaacactctttgtacctccgcccttttctatttattgacccccccctttttgtgatttttgttataaaatcattataggtttaatcccctatgggggggggccttttat

SEQ ID NO: 172338 - DNA, 612 bp, Arabidopsis thaliana
gcctctagatttactatgacgtcgcatgcacgcgtacgtaagcttggatcctctagagcggccgcccttcgcttttttttttttgtttttttttttttttttttttttttttttttttttttttttttttttttttttttgtttattattattttgtttttttttttttaaaaaaccctaaagccctagaggagagggtgggtctttacaaagggggggttaattttgtttttacccccccgggaaaaacttggggggggtttttccccaagttcgggggtgggggaggttttttccaccggtgggggaaagggggaacaaattccccccgcgggggggtgtgggagcttaaacaaacgttggaggggggggagtttccgaggaaaaacgccccttttctaaatacaacccccccccaaaattttgagaaaaaaaaaagggggggttttttgtttttttaccccgaagaagtttgggtggttctttgatatagggggcgcccccaaaaccggggggggataaaaaccatgggtcgaggggcaaaaaagaggggcggttttttttccttccccccacaaagaggggagagatacaccccccgcgggggggggg

SEQ ID NO: 172339 - DNA, 566 bp, Arabidopsis thaliana
  unsure (1)..(566): unsure at all n locations
cactcttataggaaactgtaccctccagaccgtcccaattcccgtccaccgcacggcgtctctatcatccacaanataanccaacaatggttggtgattacaaaggacactttaatagcccgcgtttctcccataactcttaccattcttcccacaatacttcttccgtggaaggaagaccccttctttctntacctctgggggggaaagagtatttggacccacaattaactaataaaacccttctttatatcttaaatctatggaaactttattctaagatcatttatataacctcctccgaacctctcgaaaaaaaccaaaatttatcccaataaccaaggttccgtaccggaaaaaaacctctcaaaaacaggtcaaggttcttcataatggtttctcccaaaagaataatttaaaaacaacctaaacttttattaaccggaagcccccggggaaattcttaagactttcttaagaacccctggaataaancattataaccctttaaaaaacaccccaatcccgctaaaccgataaccccaaaaataaagttttaccccctc

SEQ ID NO: 172340 - DNA, 589 bp, Arabidopsis thaliana
ctatagaatagctatgacgtcgcatgcacgcgtacgtaagcttggatcctctagagcggcgcgcgcttttttttttttttttatagaacatcgcacagagattaaaccactaaaaagatgttcaaatatggggaatggatcgtatccagaagtagttaaacagttcttgaatcacctcgatgaatttataatacacaatatcatttgactttttcgggggtgtgaagaatggcaaacagaaacccgattaagctcttcttcgcactggctttaaataccgggaagtgtgccaaagactttgtcccatagagaggagggggatccatatcctttggcctggatcctaaagggatgattccaggggtatttcttaacatggtaaagggtggttctttaggtagccatggtgcagataggagcgggtataatattaatcgaacagccgaccattgtgcgtcaaaaaaaccagggggcggaacacgagccccctacgaaatggaaaaccttcctttgccaaccaacatattttctgcggcttggggagggaaaacaaaacaaagcccccttgggggggctcgaaaggccccaa

SEQ ID NO: 172341 - DNA, 523 bp, Arabidopsis thaliana
  unsure (1)..(523): unsure at all n locations
ctactatatggaagctggtacgcctgcaggtaccggtccggattcccgggtnaccagccgtcgtagttcttatcccagcagaccccttttttnnnnngcttctttttttctctctctacaaacaccacgctcataaagagcgatatagcccagaccatacacattcattgaaaaacccttcttttcaatgggggatttgccaaaattcaggatcaaacatcacctttgatgctctcaggtcctttttttcaaacttattttggatttctactcccccgcttggagccaccccaacctctggcttccacctgttgctcaccctttaatatcgccattaaagactccctttcccaaatcatcaaataatcttctgcgtaccactcaacctgctaacacacacttatcgctcctttgcccatccaaccaaagtccttgtaaacctccacacttttttttatcatgcctgacaagacctaaaaccccttccttttcctccctccacaaaacccatatttttagctcc

SEQ ID NO: 172342 - DNA, 442 bp, Arabidopsis thaliana
gaatagctatgacgtcgcatgcacgcgtacgtaagcttggatcctctagagcggccggccttttttttttttttttgttttaaaaggattttggaccttatcgatgtgtcttaatccctaaaacgaaacttgccttccctcactgataaaacgaaacaaactcttcgacttactactccgatttcatgtttgggagggtcatatttttaagggttgactgacttgccatatgggcccgccacaggttcttcaacctcagcgtgaccatgcgccttgatctgagcgggctgcctaacctgagcacagacctaagcggaccctgggactggctcagaagaacagtactggttcatgaattgatcttccctgaaccactggccacatccacaacaggcttattgagaatgacccaaataaaaccgctgctcgcacttaccaccgc

SEQ ID NO: 172343 - DNA, 601 bp, Arabidopsis thaliana
  unsure (1)..(601): unsure at all n locations
ccagctctatacgactcatttagggaaagctggtacgcctgcaggtaccggtccggaattcccgggtcgagcgacgcgtgcgcccacgcgtncgcgcgtcgatccacatcgcaggtgagggttcctgcaatttatccctcgtggtctctgaatctcagatcgtcgtcaacgaatcctccattttctgaatcaaaattttctggaaacaatggggagcttggggacggtgctganatatccggatgacatatatccgctcctgaagatgaaacgagcgattgagaaagcggagaagcagatccctcctgagccacactggggtttctgctattcgatgctccacaaggtttctcgaagcttttctctcgttattcagcaactcaacaccgagctccgtaacgccgggtgtgtgttctacttgggtctccgagctcttgatactggtgaggatgatactagcataccaactgatgaaaagggtccccatcctgatagcttttcaccggcacatatacgatactgagttggattattcatgtgggacgaaggagtacaagattctaatgggccatttcaccatgtttcttcagctttttggaac

SEQ ID NO: 172344 - DNA, 576 bp, Arabidopsis thaliana
  unsure (1)..(576): unsure at all n locations
gatttagctgcactatagtanactatgacgtcgcatgcacgcgtacgtaagcttggatcctctagagcggccgcgctttttttttttttttttttttgaacctgaacaaacacccctgaaaaacagagtaaaatgatataccaaagccgattcaatgattgcatctcaaatctcactcagttcaggtacacacaaacaaacactactcttgctttctaataagggggcagagacaagaaaaatggaaacagataagcttggatcaaaagaaaaaacagtggagattttagagtttttttgtttaatgctttgcgattctttcaaggacttggaagtagtcggggaaggttttcctggtgcaaccggggtcattgatggtgattggaacatcagcacaagctgcaagagagaatgccattgccattctatgatcatcatatgtatcaatctctgccggtttcaccttttttcggagtaatcacacaataatctgaaccttcttgcactgtagctccccattttctaagctctgtgcaaatggaatcatcctttccggtctctttactctccagctag

SEQ ID NO: 172345 - DNA, 495 bp, Arabidopsis thaliana
  unsure (1)..(495): unsure at all n locations
gggaaaaaaannnnngaaaagctttttaggtacactctcanaanactatgacgtcgcatgcacgcgtacctaagcttggatcctctagagcggccgcccttttgttttgggtgtggacttaaaattcaatataaaatcaaactgaaaatcaaaaacttatgaggggtatacctgtacaacatcgaaaatcactttatgaaaaacattgaaaccaaaaatttccgaattctttggacaatctctgggacatacctctgtttaggggggggtaactttaaaagagcttggttaaaaaaaaaaactccatgatggcaaaaacatttccccctctggagccttgagaaccttcacaacatttggcctaaacactccctgttggtgcaacaccaacctagtgggctttgggccaaaacccttccggcggaactcgctgatttaccggaacaccggcaagcgtaatggaccaccctttaaaaaaaccttggttaaaccggc

SEQ ID NO: 172346 - DNA, 509 bp, Arabidopsis thaliana
gacgtcgcatgcacgcctacgtaagcttggatcctctagagcggccgcccttttgtgtttgtgtttaaccattttctgcaatttccattggacaaaaaagatgataattatttctcgatactgggaacaaactactcatattcccccaaaaaagaaaaaccttgcagataaatggggatgacaaatgtgcaaaaagacaaaaattccattgtgagggggggaagttttgttttgattaccccatgaaaccctcaggagcagctccgcaggagccttgggttttggtttggcaacacaatgggctgagggggcagtacccttcctgcttcggaagcagggttctgaaccccacttcttggcacttgagccggatcaatcactccagtttggaacaattcttatttgatcaagcattggcgtgggccccttcctcccaatggtgaactaatttttttcacaacaacttttttcttcatgtccaggggtttgagaaataaaagggggtgggt

SEQ ID NO: 172347 - DNA, 563 bp, Arabidopsis thaliana
  unsure (1)..(563): unsure at all n locations
aaaatctatgacgtcgcatcgcacgcgtacgtaagcttggatcctctagagcggccgcccttttggtttggttttataaaaagtgaatcatattattagcaaacacccagaatgattctgattctgattcaagagcgttacaaaaataaaaacaacgggtcataatgaggttgtggcactgtgggaaacctctgtatgcgcgaattcttgttcttttaaagaatcctaaaacggcgcggggactgtgttttcaacgaaaacccgtacataaaaatcgttttacttcccattccttaaaatttgttaaaagaaatggaaaagggggcgaaattaaaatatagaaaaattttttcngagaagggaagagggcccccaattgcgggggggggggctttttccggttttggtaaccgggaaccctttgggtagggaccccccagaaccaaaccactttgctggttaaaagggctgagtgcgcaaaccggggcttttaaaggggttttttcttttttgcaggccaaaaaccataaaaccatgggggcttttgtctgagtgttaaccaa

SEQ ID NO: 172348 - DNA, 355 bp, Arabidopsis thaliana
  unsure (1)..(355): unsure at all n locations
tcttcactacttaggaactgtccctcagtccgtccgattcggtcgccacgctcaaaatttccctttcctcaaacaatatttgttaacaaatggactcccgatcctttggagttgaagaagtgtatanattactttgaaaagagaaactatctttcctatgcagttaattcacataagaaagattgtgtcaattactgaactttttaaaaagtcaaattagggaattcataaggcctggctttctggtcatactactcctatgatgctttcttggattccctatgtagagaaagcccctctttcaaattctcttcatcatatccggaaggattattgcctccaaaaaaaggttaac

SEQ ID NO: 172349 - DNA, 502 bp, Arabidopsis thaliana
cgaggcgggggaaaggaagaagaggagggggggggcctgtttggtgacactcttataaaatctatgacgtcgcatgcacgcgtacgtaagcttggatcctctagagcgggcgccctttgggtgtggggttacataaaaatgtattttattttcataaataaaaagaaaaacaaggcctccttcacccttgccgggagctaaaaaagctaaactcacaaccccctaaaattaatccttcaatgtcaaagggtatcacgatctaaccaaaaaattgacccttggggggggggtttattacaaaagcccccacaaaaaaactaaaacacggcatttgttgtttataaaaggcagtttggcatgggtagcttgcccaaccagaactcgtttagcgaacgcggggagcgtttggatgggtcactaccccacatgctgaagaagaggccgttaatatacccccggggtgtaccaacaaaaagtggggatttctcctctttgtgcccaa

SEQ ID NO: 172350 - DNA, 516 bp, Arabidopsis thaliana
ctctacaaaatcttgacgtcgcatgcacgcgtacgtaagcttggatcctctagagcggccgccctttggggggggggggttttattttatacaaaatcaatatgatttatatttgcaacacatatttagccaactgcctttaaactttgataattatataaaacccccttaacaagtaagaaaaacaaaatctgggacatgggcaagtaagctaaaactttttcttggaggggggggggttttcctttggggtgttctaaaaaaaaacgcctgaaactttaaaagaaaaaagaacaacgaagacgacccaagcattttgaattagggaaaagtaacccaagcccttagcctgtgacctcaaagttcagtcctataaataaccttctaaacacaagccccaggatacattccattggggggggaaaaaattttaaaagcgaaaagcttatccctttgagggtgttttattgtataaaggtttttttggttgaaaagtattttaaaactgggtttttt

SEQ ID NO: 172351 - DNA, 534 bp, Arabidopsis thaliana
  unsure (1)..(534): unsure at all n locations
ggaaagctggtacgcctgcaggtaccgggccggaattcccgggtggggccacgcggtgccccaccgtccgggaatctttgaactaaattcgaaaccttttaatgggtaccgagtcgggttcggatccanaatcgagctcaaacgggtggagccgggctcgtggtctaattgtcaagactctggttttatttggggggggggtgtctataaaggggtcactaaatccaacactcgtagagatcacgcccgggtcgtctctcgttctctcacgggagaaagtttacgagggagcaacggtcaaaaatcctgatattacttcaactaaaatggtgagtngcccagtgttgaaggggggatggtcanaggtttttatctcaaacagggagaccatttttacttttttttgggtaatgggaatggaggataatgggtccttcttatggtaaaacaaaatttttcttttttttagggttttggagactcttaaaaccggttcacaaaatttttttgggaaaccggggcaaaaagctaaag

SEQ ID NO: 172352 - DNA, 212 bp, Arabidopsis thaliana
  unsure (1)..(212): unsure at all n locations
cgacttacttatggaaagctggtacgcctgcaggtaccgggccggaattcccgggtggggccggcgtgcgggtgatactactgtganatcacgtcgtgttgagactgnaatcattcctgtttctcctgaagatgtgcctaacagagaggagcaccttgagaggttgttggaaatgcaacactttggtgatacatcggttggggatggggggg

SEQ ID NO: 172353 - DNA, 606 bp, Arabidopsis thaliana
  unsure (1)..(606): unsure at all n locations
aggtgcactctacaaaatctatgacgtcgcatgcacgcgtacgtaagcttggatcctctagagcgggcgccctttgggttggggtttttatttttaaccacaatataatttnccaaacaaccaccacgagtgttctttggattttgtgcttgtgagacaaccgcaacgaatacaataaaataggggtgataccgtgctttcgaaaaacgaagcaacacccttggtgggccgcattgtttcggacgcctaaacaactccaaaaaaggggggggggcggtccttttgccgcgccgtcaccggaaacaaatacacacccctgacaacccctccgctgggttcttccgtcccaaaacagcaattttggtggggggaaccctccctcccgggaaaagccctgcgagaaaaaaaacggcgcaacgagcggagaagcctccttttccaaacatgtgtgttccaaaaaccttgccctttgttctcaccccggcactcttccccttctagcacaatgtgggttgcccggcctctctgcgcggtttgagcgggaacctagaccctcccacaacggggaggctgaggggccgaagaggggttttaaatacttccaca

SEQ ID NO: 172354 - DNA, 502 bp, Arabidopsis thaliana
  unsure (1)..(502): unsure at all n locations
aaaaaaaaaaaggggggctgcngggagcactcctccgactcactataaggaaagctggtacgcctgcaggtaccggtcccgaattcccgggtggggccaggcgtccnaatnacactttanattnacacatatactttccattaacccctccattttcccgcctttgtctcactctcttcccaccttggactagaaagggactccctggttcaaaaacaacaagcctccctctgtttcttataccggaggggggaaacnnccccgggtcnaattaaaaaaaaacgatcctggtgtctacgctaaccagcacctaaaaatttatcttcgctcaagcaaagaagaatgtgctccctctaatatttccaccgtaaaaccaattgacttaaatgattgcttctatgcaaaggggaaatttattgttacccaaggtttaaacactatggggtgggcgaaaacatgtaattacattcatgtgccgatatcacctaccaaaccaccttaa

SEQ ID NO: 172355 - DNA, 475 bp, Arabidopsis thaliana
caaaatctatgacgtcgcctgcacgcgtacgtaagcttggatcctctagagcggccgccctttggggttgggttttttttgttctgacactctaaactctcaaccaagtaatggttacaagaaagtgttctaaatcattcaatagggccatgagaagacggggacaaagaaatctttcttgtgattaatcaaacaaaaataaagcgatggattcctggggaaaaggggggggggggaatgtctgtggttttccctttaaaaaaaaatggaacccaacctttgggaggcgaagaggagccgcaagaaagagaacctttttggggaagggccttgtttttattataaaaaacccctggccacgatattaaaacaatctgcgtttattgggggcacaggtttcgttgggggccgcgtccccccccgagagcgggggacttaagggttatggagaaaagaagttttctttaggggcaaa

SEQ ID NO: 172356 - DNA, 300 bp, Arabidopsis thaliana
  unsure (1)..(300): unsure at all n locations
ctctctatatggaaagctggtacgcctgcaggtaccggtccggaattccgggtcagccacgcgtccgccgactccggagtttaattctggactccatactaangattctcataccttctttacttctctcgtgttatgtccgtctctggcatactgttgctctgggcttcttttggctgccataacccaataccacatatcaaccagtacttctttacatcgaaacaaatatacgcgaaatctttcacagggggggttctctatgattactcaccctttctgaaaaaaataaaaagtggt

SEQ ID NO: 172357 - DNA, 516 bp, Arabidopsis thaliana
  unsure (1)..(516): unsure at all n locations
gaagagctatgacgtcgcatgcacgcctacgtaagcttggatcctctagagcggccgccctttggggttgtggttatctttaaagtttcattaagtgaaccacatattaagcagttttttgaaaggaaaacaaaccttgccccacacaataatatgttctcagccaaatcactgttacatattggtacaaaaaggagtctcttanaaccacaatggttcaggacggggggggcggtctcatcctggaaaggattcttaaaagggcggcctctttccatccttgtgcttaaaaaagggcttatggggtgagagacatctttcttcacgggcggaatcaaacaccaggccggggcctttttcgtcactgggcctaatgtgcactccccgaacaccttggggtttattattataatgacccgggggatgcggtgcgtttgacccttgggcccggggaaagaatgggggggagatacaagcggtctaaaggtttttacaaaccggggggtcaatggggaa

SEQ ID NO: 172358 - DNA, 549 bp, Arabidopsis thaliana
  unsure (1)..(549): unsure at all n locations
ttttgtaaagggaaaaaaggggggggcctttgggtgcactctacaaaactatgacgtcgcatccacgcctacctaagcttggatcctctaaagcggccncccttgagaaaggggggtttatattaatttttttttttttttctcacctttaaanatcaaatagatttacccaactttggaggggaaaattacatataacattttttcataaaatttttttgtgaaactcaaaccaaagggtcctttacatataattttttctgaaaggggggggattccaaagagggggggttttaaaaaaaattttttcttaaacacctttggtttggtaaaaaaacttcaaaaagttccgactttttcttttttttttatcaaggcccttttaaaaaagtttttttaaagcccattttggaacaacctttttgtgtaattaaaccctttttatttcccaaatcattaaaaccaaaggttttcttcggatttttccccggtttttaggagccccttcctttttattccaaccaaaaccggataaattttctttaatct

SEQ ID NO: 172359 - DNA, 508 bp, Arabidopsis thaliana
atgacgtcgcatgcacgcgtacgtaagcttggatcctctagagcgggcgcccttgggggtggggggtttattttttttttttttttttggaacctctaaaaccaacaaaataaatatcttttcctaaagggaaaccagagtaataaaaaggttcctgaggataaaaatcctcaataaagaaacccttagagacgatgagaaaagtcccttgtgaggggggggacttaaaaaaagggggacatatggaaaatcacctcttataaaaaaaagatgacctttgtgtaaaaaatctcatggtgttcctcaaacttattcttaacaggctcttcttcctggggcttcctttctctcctattgtaaatggtttttttttccttggggaggggaggaggaaacctcatggcttttaacagttctttttgcctgttgaggcagaaaaaatttttgagttaaaacccatttggggcttcttcgggaggaaaagccccccattttttttgaaaccttg

SEQ ID NO: 172360 - DNA, 495 bp, Arabidopsis thaliana
aggtgcactatacaagatctatgacgtcgcacgcacgcgtacgtaagcttggatcctctagagcgggcgccctttggggggggggtgtttttatttatttcctttttcttttttttgccaaaaaaaacatggtttttattagaccctaggcggaacctcgaaaaacgactttttccataaacaaaaactcttttttttatttggggggggagagataatgtgacactttaaacccaggggggggggaacccccccccgcgataaagacccggcattaaaacgagctagggggttaacaaaaaaaatggcccgggggggggttggcccgggtctcatttggggtggggaaacatggaaaggggggggcttgaaccctggccacttttgagatacactggttcaccctcgttttgagttccccgggggccttccctgaaaacccatggaaacacggggggcttccagaagggccggccaacccacgggtgggcttgg

SEQ ID NO: 172361 - DNA, 486 bp, Arabidopsis thaliana
  unsure (1)..(486): unsure at all n locations
cttactctatggaaagctggtacgcctgcaggtaccggtcccgaattcccgggtggggccacgcgtgcgcttccttgtcnctattgccttcgccgtcattttcaccgactccaccggcatggtcgtgataatggggcagaagatatcgtgcattcctcctggcgaacacgcggagctatccatcactatgcgtccttactctttggggggggctccngnccaaccattaccaaccgaaaaaatctaactcaagcccgcctaaaaatcagcctctcccacgctcaaagcgccccgaaaaacctgggggtggtgccagacctcgggggggaagaaaaaccaagaaaaaaccgggcttggtgactgggtgggaataattgaaaactctgtggaccacctaacccttcgcctcgggtttttaaacacctccgggtttttgggggtcaactaaagaatgcccggggcaaatgaacattgcacaaacggggg

SEQ ID NO: 172362 - DNA, 490 bp, Arabidopsis thaliana
ctacctaagcttggatcctctaaagcgggcgcccttttggttttgggttttctcttaatactctctggttatttctctaactttatctcacaggaggatatccgaagcttcttttgcttgggggcaaactaaagtgggggaaacaaaaggtggcaaactggggaaccaatggctttacacttggaatgaaaatcccggggggggaaacccctaaatattgttggaacaaaaaaaaaaaatttgggaccccctgcctctctattttttgaaccaatcctttctttgagaaacaaattttttgggaagggtttctttgagttctttttctgggtggctcaaaacacttaacttcggggggttttaacggcccgggtgggaataagctcaaacgcctcgggggtccggcctcccttacgctgaactcccggcgcacacaactgctttccttaccgtctccccccgggcctaaagccttttttggggagccatg

SEQ ID NO: 172363 - DNA, 518 bp, Arabidopsis thaliana
gacgtcgcatgcacgcgtacgtaagcttggatcctctagagcggccgcccttcggggggggggggttttttttatttttttctttttttttggcgggggcccaaaaaaaccattttcatagggggatttttccgggcttaaaaagaaacaacgggggaaaccgtggttaccacccaagatttttaaagatggtgacaaacaaacaaacaaatttctggggggggtgggaaggtgacccatttctgaaaagaaaaaaatggccccttatagctgtttgaggacataacaaatttgaatttaggcttatcctcaggggggactttttataacaaagggggctgggcttgcgtgttttaaaacccattgtttcaagtttctgtgggcttaaggcaaccctctgagggcccacgcccaatgtcttatgcgccctgggcccgccccttttaggtcgaaatacggagacttggaattttttctttattattccccgagaggggggggggtgtttaactccccct

SEQ ID NO: 172364 - DNA, 556 bp, Arabidopsis thaliana
gacgtcgcacgcacgcgtacgtaagcttggatcctctagagcggccgccctttgttttttgttttttttaaaactaaacaatgggctaacgtgttcatgaggctcaaagatttctccactaaaaagcgtgggaaaaaatggggttttttgaaaaagaaaaaaaccagggtgttacctccaaaagcggggagttaaactcattaagaggagggccgggggggggccttttaggcggcaaaaacgcgggggggggggagccaccctatttgggcgttgatccaaaaaatggcaaaaggcaaaaccctcttggccgtgttttgtgtttgttttaaaccgaattttttgtcttttgccttggggaaaaagcatatgggcaatcttttaagggagaccctttttcttaagaaaacccactcggtggttgttgccacttccttcatgtggcttttttttggccacaggaataagtctgtggtcttggggtttctgacatcagaaatgggggggcgtgggtggcagtattcgctgaagcgcatgttgtcccgccgaatgtggg

SEQ ID NO: 172365 - DNA, 526 bp, Arabidopsis thaliana
gacgtcgcatgcacgcgtacgtaagcttggatcctctagagcgggcgccctttggggttttttttttttaacagaggtaaaaagccatatttaacaaaaaagcaaaaaccttaggatcctcattacaggaagaaaggggccaggtttcaagatttgtgctacatttaggcaaaattcacaactgcgtaaaaaggaaaggatcatcttatcatatggggggggatctcccatttcttgagctccatgccatccagggggaaaactcctcgattggccttaatcccaacctcttggccagtttggtgacaagaactgtcccattccatttccacaaaggatttgcttgactggtcggctcatattctaatccggattctggggtatctcccggaaaaatttgtttaaagggtggtgtcctctccggtttttattctgttcctgggtcttcactttaggttccaggtggggcccgttctttaactttcttaaaaaaaaggagaagctggccctttggaaaaacctttaa

SEQ ID NO: 172366 - DNA, 547 bp, Arabidopsis thaliana
  unsure (1)..(547): unsure at all n locations
cactttcttaggaaagctggtccctcggtccggccgattccggcggccaggcgtcgacatacatcaatcttctttattcttcttcatgggggataagtacaaaccttgcgctttactgcattcccttcttggtgtgatttcatcggctttgtgagctctcctctggtttttttttctaaggggggggtggcaaaggagcttcctataaaggtaaagagggtttctgagacaatgacttcnatggtgctggtgacttggactccaaagcccttgactggggtccttaatggcgctgatttctccgttgagcgggctcagggctatatcaaaactcgaaaggcttcactgggggccggggcaatgcaaccaaagcatggggtgggtcccttattggcaaagcttcctaaaaaaaggactgcctgtttaaccttgaagatttcgactgtaaaccacttttgaagggggccttttcccgccggggatccaatttaaaagttgaagatggtgcattttttaacccaaaaaaaaaaaaatttggtcaccgggg

SEQ ID NO: 172367 - DNA, 546 bp, Arabidopsis thaliana
  unsure (1)..(546): unsure at all n locations
ggggcagcgggggagggagaaggagggggggggcctttaggtgaacacttacaaaactttgacgtcgcatgccgcctacctaagcttggatcctctagagcggccgccctttgggttttgggtttacaaaggaaaatctctaccaaaaaatttaaacaaaacaaagctctcaaagaaaggtgtttgggtccgagttaaacaaatactcgcgaacctggacaagaggttaaaaaagaacaaaaaaagaaatgaagacttgaaattctctcnaaatggggaggggttgtgccacgagaaaccccgaagaaaaaatcccttttatagccgctgcttctccttttgaatacacccttatgaagtttctgcgagcttttgaaaatcttgaaaaaagtgggctgggggaaaaatcgtttgtttaataaccagagtcgccgaatgggttttgacattatgaagaaaaaatttccaaaagggggggtttgagcctctgaaggagtatctcttccaggaacatcgcccccccggaggtggcgatgggttgaaggg

SEQ ID NO: 172368 - DNA, 490 bp, Arabidopsis thaliana
tgacgtcgcatgcacgcgtacgtaagcttggatcctctagagcggccgcccttggggtgggggggttttttaaaaattttttttttttcttttttttttttttatttttctttttcccggaaaaaaagcccggcgccaacccccaaagtgctaccgggggcgagggggaaaacgcacaaaacccaaaaaaaggtcttcacaattcttatcctgaggggaggggatttactgcggggggtctaaaaaaaaaaaaagtcaaattgggcgcggggttttttatacatgcggggagggcccacggaccctagaacgcaggacccaacccaactcttccggcgaaccccgggtggactggaagtgacaccggtctaagaggaggggccggaccggcggcggtgctatttcctataacgcccgaaaaagcggaaattgaccgcgctcggaccaccggctgtgaaaaaaaaaggggcgtgcagcctctggttacgcg

SEQ ID NO: 172369 - DNA, 380 bp, Arabidopsis thaliana
  unsure (1)..(380): unsure at all n locations
acgactcactatatggaaagctggtgcgcctgcaggtaccggtccggaattccgggggggacgaggcgtgccccacacntncnnggacgcgtggggtgcgataacaatgggcgaaactatgaaagattttcgatgaagaacgatgaatcacaggaagaagaaatccccgatcaatttctctgctgggtttgcctggaacttctttaggggggaaattggttatctggggggtcatctatacatggttttggggcggacataagtccatgaatggctttcgggagtctcattgtgcgatatgtanagaccccgatggtcaccttccctttgggggcccgaagctttattttttggtaaagaagatggacccacttgcttat

SEQ ID NO: 172370 - DNA, 561 bp, Arabidopsis thaliana
  unsure (1)..(561): unsure at all n locations
acaaaatctatgacgtcgcctgcacgcctacgtaagcttggatcctctagagcggccgcgctctcgggggcggggggtttttattaacaacccctccttttattactgctccttcatccacctggcgggattcgatagccccaatgtccgcccctnncgcccggcgcggggcgaaaacggccccgagacaaaagagaaaccccctcccgaanaaacttctttttttttttcaggggggggggccccaccccttgagggggtggggaaaaaaaaagaaaaaaacccccgctcccttccacctctcggagggggactcccccccgctcccttcttttttgtgccccaaaccctccccgtaaaaaacaacaacgcccgaggggggggccccccccctcctgtggtctgtggcgcctccccgaaacacactcttgtgtgggaatgtttttcgtgtcttaaaaaaacacgccgccacgccccaccccccccttctggggtgggctcaccccgcaaaaaccccctcttcaaaggtctcctccaacaacccccagcggcgcgcccccc

SEQ ID NO: 172371 - DNA, 517 bp, Arabidopsis thaliana
gacgtcgcatgcacgccgtacgtaagcttggatcctctatagcgggcgccctttgtttttgtgtttttttcatgaacaaatcgtgaaatgcatagaaactcgtgaacacattgaacttatgataaaaacagttctatacaagaaatttataagtttttttcccggggcatcaaaaaaggggaaaggaggccctaaatttggtagattaatcctagggggggggaaagccttccgggggtaaaaaaaaaaagcccgggtaatgtgtatttttttggtcctttcggaaccattattattcgatttccacccccctgggtggacggtggatccttttccttggggtgggatgcttttcaccttggccgttttttaaacgggagccacttaacaaaataaggggttgtccccttttcacttacgaggccgggacaaccttttcgggggtgaaaggggcctcgggaagagggttccctcttgccccccgacaaaaaacacctttaaaggatggggcgctcta

SEQ ID NO: 172372 - DNA, 522 bp, Arabidopsis thaliana
gacgtcgcatgcacgcctacgtaagcttggatcctctagagcggccgcccttttggttttttttttttttttttttttgaaagaaatacctttgtatatataatgccttaaaattttaatcctatcgaagtctattaaaaacaaatgagacattaatgtcaaaatcctaaaatgggcaaaaaatctctatctaaacactaacaattaccaaccgtggggggagttttctctcccctttgaatcttctcaatctcactactgaggacttgcttcactttggtctttagctcattgagaccttggttctgttttcaccgaaacataaatagattcttcagggccctttttccccggacttaatgaattcgcggtcatcactggtttttattctttttgggaatacacaaacgggggaacctcccaacaaattggcattttgaccacagataaatttcccagggataccttaaacccctttctttaaattctttttatttttgaaaccgaccaaaaaggaaaacc

SEQ ID NO: 172373 - DNA, 507 bp, Arabidopsis thaliana
gacgtcgcatgcacgcgtacgtaagcttggatcctctagagcgggcgcccttttgggggggggttttaaaataatattttttttcaccctaaaaccttccatattttataatccaaaacgaaagatgtggaacatagaatccctgataactcaaatgaaaggaggttacaaaattcccaaatagaaatgcgttttttaaaacatattaaaaaggggggggggtctatctaccggtgcaacaaataaagcttaatctctttttttctgggaaacggggggggggccccccttaccacagggtgggggatcaaaagggctcggcatagaaaggcccacctccgcagggtgggtttgggggcctctttttcttaaaacggtaaacttttgcaaagtccttgggtttttgggaaacgggaaaaacgggggggcttaacccttcttatgggtggggctttgaactttttagaggtggggggaagtgttttttttgctttttttgaccccccc

SEQ ID NO: 172374 - DNA, 502 bp, Arabidopsis thaliana
acctaacttggatcctctaaacagcccccctttagttttttttttgatttaaataaattttaaaaccaaagcaaatagacctactccttcaaacaaaacaaacagtcacgcctaaaaaaacatcacaaactctcaacttaatactcccattacaaataaaagactgacaaactttcaacccttcacttattttcgaagaggacccatcttaggtcgaacaaaatactaaataaccccgcacataaaatatcaacggtttccccttattcttttcacacacctcaatgccccccatgaactgaatcaaaaaaaaattccctaattaagccttttttgattactcaaccactgtccacacaaaaaaaaacctttttttcctcaaaatgataacaaacctgggccccccatttcctcaaacccaaattttgttggggttaaacaatttcaaaccataaaagaccctcccctagccctcaataatgagattaaaaaaccccacaaa

SEQ ID NO: 172375 - DNA, 618 bp, Arabidopsis thaliana
  unsure (1)..(618): unsure at all n locations
gaaagctggtacgcctgcaggtaccgggccggaattcccgggtggggccaggcgtgncgacacacttacnattaacttctctcacactgactctgggaccctaattctggagctctcttctctttgcccgaacaattttgctacaaccttacaaaatgggggggggctacttaatgcatcgggtgcttctcttttatggggggggtggcttattcttnatggcgaaacccctaaaagacttcccaaaccaaaacgccttggctctaccccaatatggaggtgtcctctcggcgcttttgcaaaggctgctgaggggggctcacctgcccccggcagctaggaaatgggggccactgggatccctacccttggcggctcgcatggggttctttccggcggcgggcaaagccccttgttccttcttaaattttaaaacaatctgctttaaaaaaaggagaaaaattcctcttgggtgggtaccaaaaaagacattgggaagagggaggaaaaaacttgtttcaaaccttctcccaaatgcttgggaaggggaataaaccaaatggggggggggggggttggggaccccaagggccccccccacgcgtcaaaatttaaggg

SEQ ID NO: 172376 - DNA, 588 bp, Arabidopsis thaliana
ctctacaaaatctatgacgtcgcatgcacgcgtacgtaagcttggatcctctagagcgggcgccctttggggttggggtttggaaaaagaaaaatcactattttcttgaagaatctaattgtttacattggtacaatcacaagcgcaggggggacaaaaccttctggcacagaggaactaactatttaaagaaaagccactgtcgtcccacagctgtgagctgttttcttgtgaagggggggggtggaaacaaaaaagcggaaaaacccctctctggagaagaaacacccatggggacctgggcgcgttgctaatctaccttccttgggagccttaaaccattatcgcatgtggaaaccaatgtcttaggggggtcggggctcatctacgacggtgggggttatacttcttataacaaacatctggggtgaggggttgggcgccctggcgccatggcaagagagaacttcacccccaaaagggcgccatggtgatccaaaaagacccacttctttgaataaagaaaaaaaacgggggcgccctttcctcaagggacctttttcattccaaccatttgaaaaaaaacag

SEQ ID NO: 172377 - DNA, 480 bp, Arabidopsis thaliana
gacgtcgcctgcacgcgtacgtaagcttggatcctctagagcgggcgccctttggggtgggggggttttttttttttttttttttttttttttttttttgttttttttttttttccttttttcccgggggaacgggaaactttgggtttttttttttttttgggggggacccataaaaaattttcccccggggttaaatgaaacaatttccaggggggggggggaacccaatttgggggtctttaacataaattgttttaacaaaaggaaaatttttaaaattttcaaatcgggggggggggggaaatttttttccacccataaatgccactgggttcccgggttaacccttaaacttttaagatcccttatttcctttgaaaatgaggaccaaaagttttttttaaacatcctttttcggggggtttggcgggtttttttttcccaaaaatttttttggcaaaaggccccaagggttcc

SEQ ID NO: 172378 - DNA, 334 bp, Arabidopsis thaliana
  unsure (1)..(334): unsure at all n locations
gggggagaggaaagttaaaaaaaanaagaggcttttgggacactctaaaaatctttagtnnctgccccctacctagcttggtccttagagcgggcgccttggggttggtttatataaaaatataaaatttcttttttccaaggtccaacttataataatttggtaatcatatcatattatcatctctaagcgttgaaggggacaaagataacacccccaagcggtttttacatttaaaagctggaaccagattcccccctgggggggggtaaaaggtgttggggttctttttgcaaacatacattcctttttcacaaagggtgggccggggggg

SEQ ID NO: 172379 - DNA, 477 bp, Arabidopsis thaliana
tgacgtcgcatgcacgcgtacgtaagcttggatcctctaaagcggccgccctttggtgttttgtttttagttgggaaacgtatcaatcattattcactaaccgaagagaagaaatacgccacaacgaaattggagacatggggcgtaatttgtcaccattttcatggacttatcttagggcaaaaacttgagagatagatgaaacaaaaaatggggggggggctccaaaaaaaggggtatctttattatacagggcccaactttattttatgagggaaaaaaatcttttttaccttcttactccttaacgaaatctttggcttacgggatgatagcttggaacattcacccggtctccgaaggtgccattggaaaggggtgggtgaaaacctgggaggagaatcgaggatggccttaagggagagggggcgaccgcctgtaagaagtgcggtgccggggcgtctcgtcccgaaagag

SEQ ID NO: 172380 - DNA, 614 bp, Arabidopsis thaliana
  unsure (1)..(614): unsure at all n locations
gggacgacggcggggagagaagagaggggggggagccttttggtganctctanaaaatcttgacgtcgcatgcacgcctacgtaagcttggatcctctanagcggcgcccctttggggttgtgttttaaggaactaaaaattttatactataggggggacaaaacaacactaaaccatcaaatactaatttgacgtctttctaaagggtttacaatacaaatgaatccactcacatgagcatataaatatattgttaggtagggagtttttgatgaggggggggtgggacctaagggtggtaatttaactaaaagtgatgcaaatatttttcccttaccaaaattctttcctcatataaagctttaccatctggaccttctaagaaaaaagactttaaatttaccgcatgggtgcaagaggtttatttgaggggaaaaatccttgatcggtactttcaaggatttaacttagttagggaccgggtcttaatgtttacttagaagctttgccggtttaccgctttttattgccttgtaggaaaaaaaggggttgattcccgaatctctttagtttgtccaaacgcgtgatttagggggtgggaaacccgaaatta

SEQ ID NO: 172381 - DNA, 520 bp, Arabidopsis thaliana
gacgtcgcatgcacgcgtacctaagcttggatcctctagagcggccgccctttgggggttgggtttatcaaaataaaattactatcaactcaaatttatcatcttcaaagacaagaaatttgcctccaaggaagattctattgtgtaaaggaaaaggaaaacccgttcatgcttcgataaaccaaggggtgccattcaaacaaataagccaaggggggggggggaaaaaacctggctttcttacaaaaaaaaacctaatttcttttcactaacattctcaacctccttcttttactgaccggaagagggcgccctggcctactcattatcccagtcttttttccactgggagcgtaacttgcttaacttgctttttttcaaaccaatttttggtgatttaaaattccccagaccttatcgggggcccaagaataaatcccctttcaccatttaaacaggtgcttggggtctccccccctatttcccggtgtttaaagcacctcgccccaatcgtgaaaaa

SEQ ID NO: 172382 - DNA, 660 bp, Arabidopsis thaliana
  unsure (1)..(660): unsure at all n locations
gggggaagggggngggggggggctggttggggaacactctccaaaactaattacataacatgcacgcgtacgtaagcttgggtcctctagagcggggcgccttgggggttgggggtgttttaaaaaaattttaagaccagtgctaagagacaaatttccttggtagaacaaaaacctgggcccgctaagaagaggataaccccccgctggcgcttggacagctggggggtaacaaacatgggaagacgggggaaacggttccatcgcgcttgttctttttttggggggggggggaggtcactttcttttgggggaaccttatcctaaatattaacggcgcgccccagggtttctcttgggggggagggggtgatgcctgtggacgcatgcgcttcaggtgggtgaccgaggggcgggggggtccaaaaagaggaaaagtccctgggtgtggcgctccttggggggggggtggcgcaccctggtttcgcagggcccagcgaagcgtgggtgggttttcagggtggggggaaaaatggtggggggcgcggttgtatttaagaaatctattccgcagggggggggcggtggagggggtgtgttttcctgttgaggggccccttcgcggtgggtgttgtcgtgttcgggaggtggtgggggggg

SEQ ID NO: 172383 - DNA, 536 bp, Arabidopsis thaliana
  unsure (1)..(536): unsure at all n locations
ctctagaaaagctatgacgtcgcatgcacgcgtacctaagcttggatcctctanagcggccgccccccggggtgggggttttttttttttttttttttttttttttttgttttttctggcccgcggaggctacccggataagggcttatcaaaaaaaatctttttcaaatttctattattgggaaaagagtaaaacccccttttttttaccgaaagaaaaactttttttgggggggtgactaaaattgtttgcctccccaaaaaaaacacccctgcggttttaaataatgacccttcattggtccccgggttaatggggaaacgttaaaacccttttttttttatagccggaaaaggggggccccccctctcccttttattggggcagggctgggccttaccccgccccactcgggtggggggcaactttttggttgggctaccccccctgggggaggggcccctaaaaacccccctgaaaaaattttttcttcctgagcgggggtggtttttcccaaaaagtgtttggggggtct

SEQ ID NO: 172384 - DNA, 321 bp, Arabidopsis thaliana
ctaattcgacttactatagggaaagctggtacgcctgcaggtaccggtccggaattccccggtggggccaggcggtgcgggtctccccattaggcctgaatgtgctatgattggttttataggaagacttgattaccagaaaggcattgatctgatccaaaccgctggtcctgatctcatgggggatgacattcaattcctcatgcttggttcgggggagccaattgaaactgatgaaaaattgaggaaactccgaacaattgcgtgggtgggttgggttcaatgtgccccatctctaatcgaatcacaggcgggtgtgac

SEQ ID NO: 172385 - DNA, 513 bp, Arabidopsis thaliana
ggggggagagagagggggggggggcttgtgggtacactctccaaaactatgacgtcgcatgcacgcctacgtaagcttggatcctctagagcggccgccctttgcgggggggggtttttttttttattttttttatttttttccccaaaaaaacttggttacccggtaaggagggcgccaacccccttgggaaaccaaaggtggtgtttccaacaaaactgtttcttttaccaaggggtccccccccctttttccccctcttaaaaaacgggcgaggggctctttcttattgggggtttcttaaaaaaaactcaaaaaggcgctgcgttttgggaggcccaaaagaactttctttaacctctctcttctgagaggggtacaccccccctcttcgcttttttttcttttgtaaacccgttttattcccttaggtgttggggggggccccccacccctctccttcttctctttttggcgggggggggggcgtctccccctcccaccgccccctgg

SEQ ID NO: 172386 - DNA, 487 bp, Arabidopsis thaliana
  unsure (1)..(487): unsure at all n locations
ttaggtgcactctanaaaatctatgacgtcgcatgcacgcgtacgtaagcttggatcctctagagcggccgccctttgggttttttttttgtaancaaataccctatttcaaaatagaactcaaaggtgggattactctgcatgaacaagcatttacataacatatagtgatcaacatcgacactatcacccgggggatactagttataaaattgaaattgatgcctatataggatgggggggggcaaagtcccaatgggctctgcatctacaatataatctttgccgatttctgcagcttctcagcctcttcatcagtcatatgcacatgtgggcacaggaaccacaccattccttccaagcaaagccggaaaactgaggaaaacatcaccaccatcaacaccataaaaatccacgaacaagaacagtaacccggggtggatcttgcgcctggcacgggggatagtacaacccaaattatcaactg

SEQ ID NO: 172387 - DNA, 505 bp, Arabidopsis thaliana
tctatgacgtcgcatgcacgcgtacgtaagcttggatcctctagagcgggcgccctttgggtttggggttgtgttccctacttatgatatactacaacattctgaaattggtttacatgatgtgatcaaaagacgggatcggtggtttcaaatatttacaaaataaaatctcacatgagcctagttttttcatctgagcatatctccggaatgtattgggggggcggtaagcgcaggcgatattgggaatccatttccctccatacgggacaaaggatgcgcgagcgggactggtcggtcccgaataggaggaacctccatggctccttcaagcattgtcaatggatctaatatggtgggccttaaagcaaccaatacatgggcacacaatatcccaacttggaagaacctcttcattttccctttgggattcgagagcccctgagccttcctctcttaacaaagactggtcagaaccttcttttggtttccctgcttttacaaa

SEQ ID NO: 172388 - DNA, 486 bp, Arabidopsis thaliana
acccctacctaagcttggatcctctagagcgggcgccctttggttttggttttttttttaacaatttaaaaatacttattatttctgaatttggactcataataaaatcaggaaagaatggttctttcaacataagccagtactaaattttaaaattcctactaggaattttaaaggaaagactatgtttcctttttggggggggggttcattttatgaggggctgaataaataaatatctttttggcaccaattaaaacctttgaaaaggatcgatccattaaacgcttgacatataaaatgatgaccttaagcggccccatcataatatttgcctcatgggccaatttgtgaacatggtaaacataaccccggttcctggatgggattcgaatgggtaaaaacctttaggggggatataaaaaaagggggcaatgtttcctgtaaacatgggccggaattatctttaaataacttttttcaaac

SEQ ID NO: 172389 - DNA, 504 bp, Arabidopsis thaliana
  unsure (1)..(504): unsure at all n locations
tcaaaatacacctttnaaaaaaaccaaaaaaaaccaaaaaaactacttaaaccaaaaaaactttttatttttaaataaaaataaaataaaaaatgggatacacaaatgtgtccattttattaagcccgtttattgtctttgggcacccatggttttcgcanattatataaaacaccatcccagatggtgaaacttagggagcacaagctttatccctgagaatcttcggaaattttgctgctttttacaactggaaattctaccggttccaagacacaatctgtgacgatacaagaaacccttttcttcaagattgtttccgtgaaggaacattccatttcatctttggaaggggaacctctattttccttgggaccccattgcccggtggtggagaccggctttaatgattgccccgcctgcccgaaaaaccgcacaaaaaaagagtggttcccttttccccccctgcaaggggactgaaacccggggaggatttcttttggg

SEQ ID NO: 172390 - DNA, 503 bp, Arabidopsis thaliana
  unsure (1)..(503): unsure at all n locations
gacgncgcatgcacgcgtacgtaagcttggatcctctagagcgttcgcccttgggggttggggtgtgaaaaaaataaacacaattcgaattaataataaggctctctacctccccctctttctctcttaaagggaactattggttggttagaggctaataatctgttacatgatagaatctatgtaatataagagctctgggtcatcacacaatggggggggggggactttaaaatcatcagactaaaaagaatcttcgcatgaatgccgggtcattatcctgcccaccagaacatttgataaacagggcgggatgcgactttgggcttgttcctttttcttgagagcgagtcctttttgtttaacccaggaggggtggacaaccttggctttatacggagaaatacaaaaacctggttgtgagcattgttgtgggaaggtttggggagcgccccactcacgggggagtgcgtgggccggcccaatagagcgttcaggcacac

SEQ ID NO: 172391 - DNA, 466 bp, Arabidopsis thaliana
cacgactcactatagggaacagctggtacgcctgcaggtaccgggccggaattcccgggtcgagccacgcgttcggacaggtgtagatggacagatcatacacgaggaattttccactatgagaagtcggctgggaaagaaggtcctgcttttgtttgtgggaacaccattagcctaaaaaccggaggactaacacctcttactggtttttatgggggggaagattttccttgggaatgggtcatcctaactggagttagcgaacaaatgtgcggggattccgttggggcagcgacctgctagcggtgagtagttttctcggaggccggaaatggtgtgtttgtagaagaatcgcactggctccgcccaaaagataaactctcccgtgagtcggaggcagcgatcctagagtcgcgggggtcgcccccacgttgggggggagaaaaggcctcacggcgtgattggg

SEQ ID NO: 172392 - DNA, 362 bp, Arabidopsis thaliana
  unsure (1)..(362): unsure at all n locations
atgtgccctatagaagagcttgacgtcgcatgcacgcgtacgtaagcttggatcctctagagcggccgccctttggtgttgggttttgctcctattctttccaacattaatcatctgaatgaaaaatttgttcttgtgtccccaattcttacatatgcacttcttgcacatcccagggtcttgtgttttttttgccaaggggtctcactaaaaacananctaatgtggggttcaggggggacgcggaanctcactaattgggggaaaaaacaatgaatatctggtgcaagtgctgcactaccttgcgggactgggtcaatatcagggcaactaagggattctgacctaagagatcaattggg

SEQ ID NO: 172393 - DNA, 454 bp, Arabidopsis thaliana
tatacgacttactatagggaacagctggtacgcctgcaggtaccggtccggaattcccggggcgagccacgcgtccgcttttactcctatttttaagtggggtcactgcatttatgcggtctgtctctgtctattagttctgcttacttttggtatatgccctgcatgggggagttaagaacaaaatggccttaagggcctttatagtgatcaaggggggggactgcgggggaaggagctggtgggtaaaaaacccgtgcgcgccagcggggtgcagcgccccacgaaagggcgcactcggcgaggggaggcggttgagtggcgggggccgggtagtgcggggggcgcgcgcaggtgtgggtgggcaccagcagacaaatgtgtgccgcggcgtagcaagtggaatggggagagcccgcgaggggggggagaggtccccccgacggattggggg

SEQ ID NO: 172394 - DNA, 504 bp, Arabidopsis thaliana
  unsure (1)..(504): unsure at all n locations
ggtggtataggcggagagtggcgcagcgaatacggggggngnnnggtagttgcgccggacctatacgacttatatagggaaagctggtgcgcctgcaggtaccgggccggattcccggggggggccacgcgtccgcttttgtttcacagaccactttagtaagtggggccacaacatcgagagttactgaatcaggaaaagcaattcgcacatcatctcctgctcggcaagaaaacaatgcaagtggatcaaggagttctaacagttctaggggggactcaagatcttgctctaatgatactgacagggacaggtcttcaggagggggatcaaataaggggaattacgcccacaaggcgaaagtctttttagctttatagtcagaaccggcatgcttgtttgaactctttcaatagcaccgggtggatgggatgaacttagggggggaactctttcgaaaagggatgattcctggatgggggagtttttactggacagaaaaag

SEQ ID NO: 172395 - DNA, 476 bp, Arabidopsis thaliana
tttgacgtcgcatgcacgcgtacgtaagcttggatcctctagagcggccgccctttgttttttgtttttaaacaaaacaaaatgattcgatatttaacagattattggtaaaatgatccaaacccagggaaacagcataatattcaaagtgtcatatccaaattgcaatcacttttttcccatgaactccaacaagccatacaaaagagaaaaagatggctgtggggagttacttctcaggagaaaaccaaaaaaaaccctgtgggcaagaacccaatgaaagaacaccaccctccctttatggttggaatcccttttgcgcgttttggcatcaagcttggctgtgtttccggcggaaaattaagcctttttgttgaacaagggagggataacctttttttgtttctgaaaacggttccttatatcccataaataatattcggggtgggcccaatataaaactgcaatttcctttc

SEQ ID NO: 172396 - DNA, 466 bp, Arabidopsis thaliana
  unsure (1)..(466): unsure at all n locations
gacgtcgcatcgccgcgtacgtaagcttggatcctctanagcggccccccttttgtttttggtttanaaaaaacatcatttngttggttctttaaatgagcctcatcaacaaaaaaggttttttaaccacctacggtaaaccaaaataagaatgggaaaaaagaaagtttanaatcgatccccatcatcatccttcttcttcttcatcatccggggcgtgttncctccgattgggtttaaaatactaaaaaaggaccccccctgagtggcaaaaaagggacaaagacanagactcaacccccctgagcttgatgaggatgttcaatgaaggccctgaaatatccttcatggggctccaatggggctccaatcacaggtgctttggggggtcttaaccctttggcccagggtctttttggtctttgatccccacccttaatgttttttttgggtttcccccgccccc

SEQ ID NO: 172397 - DNA, 510 bp, Arabidopsis thaliana
  unsure (1)..(510): unsure at all n locations
tgacgtcgcatcgcacgcgtacgtaagcttggatcctctagagcgggcgcccccggggggaggggcggnntaaataaatatttttttttctttttttttttttttnngggggcaagaaaaggggggttattcaactttctgggaagcttttataacccaaaaaaaatttcattttgggggggtttattaagacggggggttcatgggctcttaaaactggggcggggttcccccggggggggggggcaaaaacaaagggcctggctcctttttccgaaaggggttcccctttcccccaaagggaaaggggcccctggggccccctttgtgggggaattaaaggggggggggggttcaaaatgccacccccctgtttggcctcccccccccggggcccaagacttgttatccctttaaaacacaacaagccggtaatttggggcgccctgggacccccttttggggggggtttctttgcggccgggaaccccccaacacgggggcccccct

SEQ ID NO: 172398 - DNA, 483 bp, Arabidopsis thaliana
  unsure (1)..(483): unsure at all n locations
gcccccgcgaggggngggggtagtttacgccgggcgtcctacgactcactatagggaacgctgggccgcctgcaggtaccggtccggattcccgggtcggccccgcgtccggaagaagcctacggatgatctgttcctttcaatctcaccaaattttcatcttcaccttcaattttgatagattctcttcaccgaaccaaaaccccaaccctagcttttttttaaattatagagattatttagctaatgggggggcggggagaaattggttctgtctagaaggaaatctaaatgggggtggattccaaatctgactctgagaaaggcctagggcgattcattttggagtattagccactttgttccgccttttcattcccatgggaaagggtggttggcttttgagccaaaaaaaaacgttctttctttaggggcctttgtttatttctcttcgggggtggggtcaccccccccccttttttt

SEQ ID NO: 172399 - DNA, 463 bp, Arabidopsis thaliana
  unsure (1)..(463): unsure at all n locations
gggtagtttcgccgggactaaatacgatttatatagggaaacctgnggcgcctgcaggtaccgggccggaattaccgggtcggccacgcgtccggtcgtgagtacaaggccaaaaaggtctcagaggaggactacgttaaagccatcaaggaagagatcaagaaagttgttgacctccaagaggaacttgacatcgatgttcttgtccacggagagccttttataaacgacgggtgtgatcctttggtgagcagttgtctggatttgccttccctgcaaacgggtggggccaatctttatggtctcgctgcggaaaccccccattatctttggtgaagggagccgccccaggcaatgacctttttttggcccgcatggtttaaagcatcacctttcccccataaaagggatgctttactggccccgccccctttttagatggtatgtttgtcagaaaaaccag

SEQ ID NO: 172400 - DNA, 425 bp, Arabidopsis thaliana
aatacgacttacttagggaacgctggtacgcctgcaggtaccggtccggaattcccgggtcgggccacgcgtccgtataatccgaaataactcttttcttatcatggagactctgtggactcttttgtatttgctagaacctgctccagctactctcattgtcacagctgtcaccgtgacatttgcatccgctttccgtgcacttaactacgggagagagatggagagaaaccgtgacttctctgaagcatccataacactagatagctttcaggccttgatgatcccagttatgagctcttgcagtttgcttctcatgttctatttgctctcttctggttctcagctcctgacccggtttacagccatcgcctctggttattcattcttctattgggtatcaaccatacgcggtatatatgaag

SEQ ID NO: 172401 - DNA, 300 bp, Arabidopsis thaliana
tctcataccttttcactatgagggaaagctggtacgcctgcaggtaccgggtccggaattccccggggggccggacggcgtccgaaaagaccctgtttttgttccgcaagtcaacccgacccgacttcctgacccattcggtgtgatccggcccaggacctggattgcgtttaacctcccgaaatctacgggccaagagttgctcccctcttgtgatatttactggtctgggaggggaggggtggtttctcgcctgcactttttgaaatctaaacatcacttgtaggatacatcttgaca

SEQ ID NO: 172402 - DNA, 307 bp, Arabidopsis thaliana
gctatgacgccgcatgcacgcgtacgtaagcttggatcctctagagcggccgcccttggtttttttttttttttttttttttttttttttttttttttttggcccggccaaaaaaatctcgggttaatttacttgttcttacaaaaaattttaaaacgaaaaacaaaggccacaacttgcgtaaataatattccttcttgacaaaaaaaaatcaaagttttgcgcggagcacctaatacgggaacccttttgggattaaaccccccaagtgggttctttttagccttccataaaaaacaaaaacggt

SEQ ID NO: 172403 - DNA, 546 bp, Arabidopsis thaliana
ctatagggaacagctggtacgcctgcaggtaccggtccggaattcccgggtcgaccacgcgtccgatgaatacaccttccctcacgcaaaccatggcaaggaatactctgtaggatgcaagcttgcttctccgtcgcttcaaattctatcgacgaagacgaagattgccggcgggtcccacttgctgggattgtctacgagaggggagagtgcttctaataacacttacgaggctatttcgggtcgctctatgaataagctagcaggtcggtctatagctaccgttgaagaaaaggtcactaggggtagtcctgttgatagaccaatggacctggaaaatacctagaccagggaggacgggctgattttaccacagggttatatctatgggacgacattggccccccaggggcgtaaagaccctcccgaagaggatgataagaggcgggcattttagagggggaaactaaccccccccccactacaagaggaacacccccataagagcactctattttggttggagagcagaacgatgaaacctcg

SEQ ID NO: 172404 - DNA, 505 bp, Arabidopsis thaliana
ctatgacgtcgcatgcacgcgtacgtaagcttggatcctctagagcggccgcccttttttttttttttttttgcatgtccgacactcaccggaacctaccacacaggggaatcggctaggtactacccgaaaaaaaacactcctgtgtatcaattttgggcagcatttatcaacattctgggtgtcgcttaaatctggccgagagagattttcgcttacttgtcgaaaaaagatctcccagaccaaacagctggagcttaactgggactcccttctgtgcggggcacgaccccttttccataggttctccaaccaaaccaagatgctttgagtcggacggcaatgcttagacgcgtcggtcggtaatcatgttggactaaagaacattgcagggttggaggacacgttcgttgcttactcgtttcacaatggtaacaacctcttgagcgtggtgatcttgttccggagctggacttgtccagacggcaaaacctcaacggttgtt

SEQ ID NO: 172405 - DNA, 379 bp, Arabidopsis thaliana
  unsure (1)..(379): unsure at all n locations
ctacgactcactatagggacaagctggtacgcctgcaggtaccggtccggaattcccgggtcgacccacgcgtccgccgatgggaggtaaaaaactgctacccgagttttatatttatggcgacgataacccgcctaattgttaaggacttacctctcgtttatcaatctggaacgataaatccaaaggtggacgatcttctaggtctatgtggcgtcggctnttcggtgcttttccataacgatactcttaggggctacttggggttgatgagacctacttttctaaacctgagagcattaaacactcccttaattgtgaagaggacagcattaaatcttaatcttctgggaccagcccagaatgcattacgactctg

SEQ ID NO: 172406 - DNA, 587 bp, Arabidopsis thaliana
gacctatagttgagctatgacgtcgcatgcacgcgtacgtaagcttggatcctctagagcggccgccctttttttttttttttttttcatccatccacagtatatataattaaaattttacaaaattttaaagtgcctttccacgaacaaaattagacagaagatcacaaacacatttcttagtactaaagacatattctctgatagtaatggctcacttctctctctctacttctctgagcaatcagattttgaacccatgattctcaaaacaacaaacaaatccaagtttgataagaaaattaatatagtaactcatttgataaaatgagaacaaacaaaaaaaaaagtgaaagaattataccctttttgatcgatctaggaagtgatcatatgatcttcttctcctcctcctccatctcgctccgccgctgcttgtgctaatctcttccatgtatattgccgatgttcttctacttctttggatttcgcttgtttctcttcatactggctctgacattcttcaaacagttcaggatccatttccatgaacattttcttgatatttgtggttagaccatgaactg

SEQ ID NO: 172407 - DNA, 382 bp, Arabidopsis thaliana
cactatagatgagctatgacgaccgcatgcacgcgtacgtaagcttggatcctctagagcggccgccctttctttttttttttttttttttttttttttttttttttttttttttttttccaaaaacataaaaaatatattttttggttataaaatccccccaaatttttttggttttatggaaccctatgcccaagaattcaatataacctttgatattgaagggaatcaatatgaagttcaatctaaaggaatcggattgaaaagtaaggacctgacaccatcaaggtttttggttttttggggagagccatggccatcgccatatggatacatgcatggaaacgtgcgcgccaaatttatcactgtttccataaaatta

SEQ ID NO: 172408 - DNA, 532 bp, Arabidopsis thaliana
  unsure (1)..(532): unsure at all n locations
ctatacgactcacttagggacagctggtacgcctgcaggtaccggtccggaattcccgggtggacccacgcgtncgcccacgcgttcggatgaacatatccgagacttataccatcgcatatgatggagaatcagtgactgctagtctaaaagacgggagggcaaggtatgatccgttttcaagatgatggacccggtctttaactactgcggcgggggaaacaacgggaaagatggataagacaaccgaggcaatggttgcctccccgggtgacaccaatggaccagatgcatgaacttggtggtgaatcgacaaaagcatttttataattcgggtgcataagcaggaaatctacatagcagcctggagctccattaggtgccggggcctaacccaatgcagcttaattacctttcgaatgggccatgatcgccttaggggcttttcagaaaggcccggggggaccctcaagggcgttaaaaatgcgtttcttgggataggaaagctccctgcccgccgcaccctgggggg

SEQ ID NO: 172409 - DNA, 573 bp, Arabidopsis thaliana
cactatacatgagctatgacgccgcatgcacgcgtacgtaagcttggatcctctagagcggccgccctttttttttttttttcagaaacaaaccattaaacttttaatcattaagaccaataaacttgagaaacagaaaaagagtcttgaccaatcctacatttaccccatatatagctcaaaatccaacaattgcagcaatctctcacaagcaaatccaccccaacaaaagcacttaccccgatccatatatcacaacattgcagcaaccccaaagccgatcatcgcgcacaaaagagaacaacatacatgagaaggtttatgctggaccgcaaagataaacgagagttaagttgttatagcttgagatggcaatttcgggtggttatgctctgcttcataagtaacaataagcattgccggatcttccaaacatctctcaacatgcttcctcgctggacaacctctcatgctactaccatttgaatatcctctgggataaggaaagcccttgatgggcttctgaccatatttcgccatgaataatcattaggagggatatctgcaaccttg

SEQ ID NO: 172410 - DNA, 417 bp, Arabidopsis thaliana
ctatgacgtcgcatgcacgcgtacgtaagcttggatcctctagagcggccgccctttttttttttttttttttattttttttttttttttgttttttttttttttttttttttttacaaaggcgctgagggggcctaaatccttggaagcaaaaaaattacaaccttaaaagtgaatgacaggaggaaataatttgggattttgagtcccgaaaaattaaatttttttggagacgggggggggtaaaataaatcacatccttaagcaaaagcaaaaagctttgatacaagaggacattgccccttcttggggggtataaagaaaagaaaccgggaaaaaacctttgattggataaacccaaattttttccttcaaagggaaaaaatctggaaaccctttctttaccatacgggacct

SEQ ID NO: 172411 - DNA, 555 bp, Arabidopsis thaliana
gcactatattagagcttgacgtcgcatgcacgcgtacgtaagcttggatcctctagagcggccgccctttttttttttttttttttttttttttttttttttttttttttttttttttttttttttttggaaaggaagaaaagcgtctttgtaacccctcttttgattcacaaagtttccacttttgttttctgtccatttgacaacaaaaaaaacgggtttacatgctgaacaaaaaattctagtttatttttttggcgggccaaaatccacccgtgggagactggttttagcctttccaaagagcaaggggaagctttgcccccctccctcaaagggggaagactctaaacaccccaccaaaacaggcccctgggccttttttggtggattgggaagacaaaaaaaggctgggaggggagcaactattttttttggccaatcttttggaggcaaatgcccagccccttcgatgagtcgaagcttaacatttggggggtgtgggttctcaaatccctctgctataaactggggcaaatatttttcaggttttcc

SEQ ID NO: 172412 - DNA, 550 bp, Arabidopsis thaliana
gacactactagttaagctatgacgtcgcatgcacgcgtacgtaagcttggatcctctagagcggccgccctttttttttttttttttttgaggccaaaaacagacatctcaaatttatagaacaaaaaagggagaaagatattcacaaacagaagcaaagctgttcctggatttacatgcttcgttgcagacaaatcaaactcaaataagtcatataacattcattaaaggaactctcagatttccagcacacacttaaaagctcatctcttcccaatactgacatgatcttacccttgagatcaggattggtctgatgaagtttggcctagagagacagatgccagcgatgaagcccaagcttgtgcgttctttgccctttcatggaagtttcttgttttgacgagacttagtttcaaccataacctcctcacatcgaccatgtgaataccacggttgaacagttggcttatctctccaaatcttcccaagttcaaattggcaacgtatgaagcccataccgctctcatgcgggattcaactatgggga

SEQ ID NO: 172413 - DNA, 484 bp, Arabidopsis thaliana
gctggtcccctgcaggtaccggtccggaattcccgggtcgacccaggcgtccgcccacgcgtccgcatttcgactttggcgtttctcgatctgttgtttctgctcccaaataaaaataaaaaaaaatcggatcggggatttccccaaatcgtaaaattaggttttgttcttcatttctagccctagcttaggtgtatcgttatcttattcattaaggtttgattctacctttgtttcgcttccctcctcgaattttgcaattccgttattaaaggatcctagtttttctggctcttgtactacgtcaagtttcatggattctcgagtttcgattctcttcgtctgtgcaatagccgggtcatgctttacgtctgggtctggttcatcaccagtggacttttccgtttgcaattacgaattcgagctgtttcgattcgatgtaaaggcccaaatgtcctccttctctttatacaactcctcctat

SEQ ID NO: 172414 - DNA, 367 bp, Arabidopsis thaliana
atgcacgcctacgtaagcttggatcctctatagcggccgccctttttttttttttttattaacaaggagatttattttctgcactatctcatagtcttctgggcacaaagaaacaacactaaatcttgaaagtgtttcataatattgtcatatggtgcaatatgaaaacactggagacaacattacatatttctaagggtcagagaggaatccctcacaatacacttggcatatagaatcctagtgcaatctctcgcatagaagtgtgaaattattatgaatcaaaaaaggttttggatatgcccgatccaggcccaaaacctcgattcttctggaaagtaatccgacagggcaaataccaccattc

SEQ ID NO: 172415 - DNA, 539 bp, Arabidopsis thaliana
aattgagaccgacactactagttaagctatgacgtcgcatgcacgcgtacgtaagcttggatcctctagagcggccgccctttttttttttttttttttttttttttttttttttttttttttttttttttttttttttttttttttttttttaagggagaggctgttttccgttttttttaaagattttttttgaccggggctggaaccacaactcaaaaattccctgggtccctcccaaaatctaaaaaggaaatgtcccccttccttcaaaagaaaagccagaaacgtttttaataaactttgggagccttatttcttttttttgggaaaaaaaaggccggtttttttgggaacagaggcaagacccttttttttaaggggcttcaaagccctatttgataaacaaagtttgacaaaacgtttgccaatttcccaccaaacttttttgtattggaggttgacaaatcgcaaccttttgggcctgggagtaaaaaaagaaaactttggggcttgaggtgctttcttcccagaaaaag

SEQ ID NO: 172416 - DNA, 539 bp, Arabidopsis thaliana
  unsure (1)..(539): unsure at all n locations
ctatactaaactatgacaccgcatgcacgcgtacgtaagcttggatcctctagagcggccgccctttttttttttttttcttttttttggtgtttggtttggaaatgtgagatatcatatatatctatgcgttgtactctgtatatgtgggataccaaacttgtattctttgataaacaatttaatgaactgtattatttttttaaaaaaaggggaaaagagnacctanagaacggaccggaactaagttccctggaaaggaggcccaaaaaagggaaagaacaccgtataacccgagacattgggggcgcggcggggggggggtaccttttttttttttttgggaaaggagccccagtccggcagataaaaaacagacaaagataagaagcgggggtgtgccgattgcgtgtctttccccttacgggaaaaaagataaagacattagaaaaataatgtaaggggggtgtgttttttcagattgtctttaaaaaaaaaggaccacagagggaaacaggctgtttatactgcgatctttt

SEQ ID NO: 172417 - DNA, 512 bp, Arabidopsis thaliana
tgacgcgtacgtaagcttggatcctctagagcggcgcgcctccgggttcttttattttttttttttttatttttttttgttataacagaggatgttcgactctggattttaatattgcgcttctgatatttcgtcgcggggggcaaaaaaaccacctccggggggcccgaaaaaactcctactaaaggggcggggggcccccccccaggaaaaaagaaaacaaccaaaaaccacgtcgtttatttggggcgggaaggggggccctcttctaataagaggcttcctaaaaccaccccaagattcgctaaccgccgcctccctctcccccaaacaaaaaacaaaagagaaagaggccgcgccccccggtctctttctctcaccacccgcagaaaaaaagacaaaaagggggtctcccctccccaccgccgccggcgccattacacacaaaaaagaaagggtggacaatccctcaccgaaaaacatggggttcgaaaaaaaggggacctgccgcg

SEQ ID NO: 172418 - DNA, 522 bp, Arabidopsis thaliana
  unsure (1)..(522): unsure at all n locations
ctatagggacagctggcacgcctgcaggtaccgggccgctattcccggggcgacccacgcgtccgcgtagttgttgatacatcaaatatccatgtagaaacagaggaggtacgactctgtaatttagattgggctcaagaattcgactcgcgagagaagaaacccggttgagtcaatcttaaatcgtccaaattcataggggggagcgcccgngtctcaactgaaattccttaaagaagccaagagtgatctgttcgccccatcgccttaaagaagccaagagtgatctgttcgctccatcgctcacttttgtctttaagcgtatggtgctagaccagacctaacagcttggggaccactccaaaccacaaattatgggtttttaagccaaccctgggatcccgttcaattaaggaaaccttaggaggcaccacccagcctgcctgggtgatttccgggctggacacccgaaatgaccattgaaaaagacctgtctcagtaatcctgacccatctgttgatg

SEQ ID NO: 172419 - DNA, 552 bp, Arabidopsis thaliana
ctatgacgccgcatgcacgcgtacgtaagcttggatcctctagagcggccgccctttgtttttttttttttttttttttttttttttttttttaaaacgtgatcatgagcactcaaatgaatagccccttaatgcaaatatatataaatgtagtagtcctgaatatacatcaagcctaagtaaatccctataagcataccaggaggtgttctttactttctgcgggttgacttcttttgcctcttaactgaggaaactggctcgggactgaaagggcctggtaaaacggtttcttcgctataccatccgtatctgatgacatcttttttaaggtttcttggttttaatgaagaccggaaatcttttaatttgtcttgaaaaacaagtataattctcgccttttgatcctaacaaaggagcttcccttttttttttttcttttggccctttttcccgccaaaatacccgcttttttataaggttgtgggttaaactaaggggatcccgatttttttctttttaacatttttaaaatattatttttgaaacccc

SEQ ID NO: 172420 - DNA, 587 bp, Arabidopsis thaliana
ctatgacgtcgcatgcacgcgtacgtaagcttggatcctctagagcggccgcccttttttttttttttttttactcgccaattgttttcagtgaaaatgtaaattacaaatacggcaaaaagtaacaaactcttctgaagcatcatcttacaagagcaaagaaaatagaataacccataatgtggaacatttagcaaaatcgatgataaccactttaaaaagcgtggttaaggattggaagaccaaaagccaaagggtcttttttttattatagcggaaccaaaaacatagagataacccgtttccccaatggcgggttaattggagagcgttggcccttgcttggatgggagcaggccaaattttgaaaattttttttgagggaaaacaccaccttcggtctccgaagggatatgctaatttgcgagaaattagtgtcgcaattgatgtaaaggcgggttagtgggctcttgtgtttggcaacaggaggaagatgaggccgtttaagatacgacacgaaacagcagagtttgggaggaggtatggcggtatagtctataccaatacgttcgccactaataaatgtg

SEQ ID NO: 172421 - DNA, 526 bp, Arabidopsis thaliana
  unsure (1)..(526): unsure at all n locations
actatagggacaagctggtacgcctgcaggtaccggtccggaattcccgggtcgacccacgcgtccgcaacgccctgcggtacagctacctaagaggtccaggtggtcggtttaggaatccttatgatctcgggtgcagaagaaactgctagtggaattntnnctnttnttgnntgactgnnaaaacgttttccgaaaaggggggggggaattccacttgcggaaaggataaaaccctgcgggacaactacctaagaggtccaggtggtccttttaccaatccctatgacctcgggggcataaagaaactgcctcgactctttattgaaagggtctaacgaagatttagggcgccctgagcaacacccaacaccgctaccagaggggtttttccctgccgcgccttctgccgattgccaatttctcataacggccccggccctgttccctttaatcgctccccccccccatatttcgccgcctcccactggctcctttgcttccccgtgggggccctttgcctgat

SEQ ID NO: 172422 - DNA, 342 bp, Arabidopsis thaliana
ctatgacgtcgcatgcacgcgtacgtaagcttggatcctctagagcggccgccctttttttttttttttttttttacgtcaactaacaaacatatatattccaggaatttatatgacatgtagttatagcagattcaaacaaaaaattataattcacgagaagatcaacaggataaacaacgtagacaatttaaacaatattgaagcaaaaacattatccaagtggaagaaaaatgactagaagaagaatggcaacattggcggcgtcaaagttgtgggattttacctactaaacattgacactgcccttatggatcaacatgtacttgacggggttttcgc

SEQ ID NO: 172423 - DNA, 558 bp, Arabidopsis thaliana
  unsure (1)..(558): unsure at all n locations
tctagctgagctatgacgccgcatgcacgcgtacgtaagcttggatcctctagagcggccgccctttttttttttttttataaagaaacatcattctggtgggttctttaaatgagcctcatcaacaaaaaaggttttttaaccacctacggtgaacgaaaataagaatggtgaaaaagaaagtttagaatcgatcgcctttatcatcttcttgttcttcatcatcgncatcttcttccctcggattgagtttagaagtacttgaaaaggataccaccgcgagtggcgaagaagggagcaaagacaagagactcaacagccatgagcttgatgaggatgttcaatgaaggtcctgaagtatccttcaatgggcctccaattgtgtctccaatcacagctgccttgtgtggctctgaaccctttggtccaaggctctttgcgtgctctgatacaccagcctcgatgtttttcttggcgttggcccaggcaccaccagggttagatgctgatatggcgatctgaacaccggatcaagaaatccgggaggacaccagagag

SEQ ID NO: 172424 - DNA, 565 bp, Arabidopsis thaliana
  unsure (1)..(565): unsure at all n locations
atttaactgcactatagtaaactatgacgccgcatgcacgcgtacgtaagcttggatcctctagagcggccgcccttttttttttttttttgctgaataaatccaaccattaccaagatgttcaaaaagatccaatgttgttcaagttctgttacttaacaagataaaaaagtatatgttatccaaaatgtttctataaaaacaatcttctattctataattggtcaaaacaaacttacaatagctgcctccagctttttagctcacagagtagtttcatcagtgagaaaattctgtgttcactttcgactcaaaagctttattatttttttcgtttggccctcttaacaaaaatagtatgcaccgttttaaatcacttcttcttgctgctattcttcttccttccctttacttggctctccaaagccttgagcctcttactaacaggactcagcgatgttgaggaaagcctcgggtttactggcgaaggtggttctatctggttctgtgtatggncctgtgtcatggctttcattttcttgagagctagaaacaggtcaaattg

SEQ ID NO: 172425 - DNA, 285 bp, Arabidopsis thaliana
ctatgacgccgcatgcacgcgtacgtaagcttggatcctctagagcggccgccctttcttttttttttttttttttttttattttttttattttttttttttttttttttaaaaaaacgggggcgaaaaagaaaacggacaaacattttgtgttacaaacccttttagaggacaccccggaggaaaatttcttttaggaaagcggacctttttaaacaaatccttttagaacacaacttccaaaaaaggaattggcgaggaagaggatccataaggggccatcgg

SEQ ID NO: 172426 - DNA, 568 bp, Arabidopsis thaliana
  unsure (1)..(568): unsure at all n locations
ccccccnactttatatagggaacgctggtacgcctgcaggtaccggtccggaattcccgggtgggcccacgcgtccggcttgctcaactccttacaacgccaaagggttgatgaaagccgcaataagaagcgagaaccctgtgattctgttcgaacacgtgctgctttacaatctcaaggagaaaatcccggatgaagatttcttctgtaaccgtggggaagctgagatggtcagacctggcgagcacattaccatcctcacttactcgcgaatgaggtaccatgtgatgcaggcagcaaaaactctggtgaacaaagggtatgaccccgagggtatccacatcagggtcctgaaacccgtcgacttcacacaattggaaactccgtgaaaaaaacacatcgggttttgatcgggagggatgtatgaaaaccggtgggattggggcaagttttacagttgcctcaacgagacttttatgactacttagagctccggggatgggttttttttttaagacgtcctacccttaccgtgtccctggagggggggcccggggtctaccggtta

SEQ ID NO: 172427 - DNA, 580 bp, Arabidopsis thaliana
tgattgagctgaactatagatgagctatgacgcggcatgcacgcgtacgtaagcttggatcctctagagcgggcgcccttcgttttttttttttttttgttttttttttttttttttttttttttttttttatttttgtttttttttaaaataaaaaaagcgcccgtggatgaaaaaatgggaaaatttccttttccccgaaaaatgactacccaacttttttaggggggggggagaaactcaccccggaaatttttatttttttttggggcttttgtgaaactcaaaaaatatccccatttttggggggaacacggggggggtgtaatataaagggggggaaaagaaaaaaataccgtgtttttttttatgctgctcctgaaaaaaaaaactggtcgccatttaagagggttgggccattttaattccccgcctttttattttttcgggagggactattgtgtggttgaagaacccttgaaggtggtgcaggggaaaaaatttgtgcctattttacacaaatggggggtcccctcggggaatataaacattgaaatttttttttttaaaaggggggaaa

SEQ ID NO: 172428 - DNA, 567 bp, Arabidopsis thaliana
tgaactatattaaactatgacgtcgcatgcacgcgtacgtaagcttggatcctctagagcgggcgcccttcgttttttttttttttttgttattttttttttttttttttctgattcttttttattatgttttttttcaaagaaaaaaaatcgccgttgatcgaaaaaatggaaatatctctttttcccagtagattgtttccccaatttttttagggaaggtgaaaaaattgctccgggaaattaattctttctttggaggactttgtgaaattaaaaaaattctacaatttttgggggtaccaggggggggtggtataataaggggggggaaaagcaacattaacgcttttttttttattgatcctcctcaaaaaaaaacttgttgccatttttaaggggttgtccatttttaattccaccccttttatcattttcccgaggcacccttgggtggtttacgaacccctaaaaatgggtgcggggaagaaattgggcttatttaaaaaaatgggggggtcacctccgggaatttaaaactttgaattttttttttttttaaagggg

SEQ ID NO: 172429 - DNA, 522 bp, Arabidopsis thaliana
gcactatagattactatgacgtcgcatgcacgcgtacgtaagcttggatcctctagagcggccgccctttttttttttttttttttttttttttttttttttttttgataaaacagtctattccttctcgattttaacagtttaagggaaaaccactttgggattgcaacacataaaacccttgtggcgcgcttttttttgacaaattaaaccttaacaagccgggggaaaaaaccaatggaaaaaaaaaattttttattccaaaaccataatccacttccattttatacttctttttttcccaaacctaatgaggaacccccccaccacactcttggttgcaatttaactgtgagacctctcccaagacagagggaaactatcctttggagcctatcacttaaaggaaagcgcccttctcagaagttcaccactctaacgaaaggggacccttgcaacattatggcattttattggactgtttggctgggcactgaaggcatttttttggagaagtttaca

SEQ ID NO: 172430 - DNA, 510 bp, Arabidopsis thaliana
  unsure (1)..(510): unsure at all n locations
gacactatacttgagctatgacgccgcatgcacgcgtacgtaagcttggatcctctagagcggccgccctttttttttttttttgaccaagtgctagtcgaatcatgcatgataatccaacattacacaaaacagatttgagggttcaagagaccctgcataactacgatcagggaaagaatatggaaaacacttaaaagccacctattataccggagagaacatcatctgagaatgatagaactgataacactcagacggtgttgagaagatttttaatctaactggagaagaggggtaccagatcttaataatcgtaggactataccaccaccgactnctattacttagccaccaccagccggcaaccgggacattacaccaccactagaccgattcactctggcacgagaacctaatgttatttggggcaatgggtctctctcctggatgttaggcataactttaacatttataaactgatacttacaagattgttttgtccgtctg

SEQ ID NO: 172431 - DNA, 452 bp, Arabidopsis thaliana
  unsure (1)..(452): unsure at all n locations
tcaaatagggaggctggcccctgcggcccggccggattcccggtcgacccacctcgaacgtaaaattctttcccctgagacttaaacaggaaagttccgaactgtgacgaattcaaggggtttcaacaatagccaccttttgaaaaagagatgtcttttctatgagtgggagtattctccattcatggcaattgataaaggagcggntcttcaagaggctaaagtctttaatgaccctcagggtgatcctatacaatgctcccatgttattacgaatcttctttatttgcttatccaaggggagcccttcaccacggttgaaccatcggaagttttcttttcatttacaaagctttttcaatcaaaagacacgggcctgatgagaatggtctacttaatcattaaagaggtatctccatcctctcatgaggttattatcgtcacaagctctc

SEQ ID NO: 172432 - DNA, 178 bp, Arabidopsis thaliana
gtacacttatagacgagctatgacgtcgcatgcccgcgtacgtaagcttggatcctctagagcggccgccctttctgttcggaaattttgtttatctatgagtgattttgacatggcatttacagtgcatccaaaaccgctggaatccaaatgcagagccgttttaccgcatactaac

SEQ ID NO: 172433 - DNA, 193 bp, Arabidopsis thaliana
ctaccacgcctgcaggtaccggtccggaatacccgggttgacccacgcgtgcgctgtcatgtgaataaaccctcaatgatacgatgagagaactggacgagagaaaaaatgaatcactataatgtaccgagcgaacttcgggtggcggacagaagcatttataattgcatcgacaaagcagtgcgtatacttt

SEQ ID NO: 172434 - DNA, 343 bp, Arabidopsis thaliana
  unsure (1)..(343): unsure at all n locations
aaattatgacgtcgcatgcacgcgtacgtaagcttggatcctctagagcggtcgccctttttgttttttttttaaaaaaacctgaggtttccaaggccgcttagctttacaacactctacatatgtctggctgtagataacaatcctatcactaaactatccacagcgtcacaaaaggggacgctngccttctataagcaaggagagcgccccccgacacacacgggcagatttttttcttgggaggggccggactcttcacatcaattttccatccccctcctgttggccgcatgtttatagttgcttggcgcttgtccaattatacgtaaccaaccaaccc

SEQ ID NO: 172435 - DNA, 558 bp, Arabidopsis thaliana
ctgcaggaaccggaccggaattcccggttcgacccacgcgtccgggggatcttatgggcatatgatgaggaaagattcaagcctagatcattttcactctggtacaggaaaagcacacgagcacaaatctagctgaggccacaaggtcgaatcctgaagagacgagcggctttaaaacatgtctaaaattggcaaaacaacaagcattttttttttaaagggagggcaaaccaccccggaccctttgtagggcaatcagcgcgagcacaatttgtgggtctgggagtggggccctacgagagggacactactacataaaaaaataagagagatcgggggccttccactcagacggacaagcctatgatagactgagctctaaactagccgagagggtgatcgtggtccatctagcccgcggcgtcataggaaaaataagggctgggctcctgctgcgtcggagaggaaaacatctctggatttccatagcgaaaagagtatattccgggagatttatcaagaacccgtcatacgacgccgtagcggtatcggcgcgaa

SEQ ID NO: 172436 - DNA, 535 bp, Arabidopsis thaliana
cagctctatacgactcacttagggaaagctggtacgcctgcaggtaccggtccggaattcccgggagacaccacgcgggctccaacgttcttatctactttcaacccttccttacttagggtttgatcgaaatctattctacattcgctgtgcatcttcagcgcggacgacttcattgatattccattgaagctgctaggttacatatccggatctgtgtatgctagctgagtctaggaatggcaagagagaaatccatgattcggaccccatgatttcaatgaggtgcttgaggaggctgattcgaagaatacctgccaagatcgcgatcatagtagtgagcgccagaagcgtgtatgatcccagagaatcgccagatagaaggatttgctggaacaaactatgattcacccgggaatcggaagatccttacgatgtatatgatgatgaatagaggcaaaagcctatggacaaggagacggagcgaagactgtcgctatatgttctgtgcacctagactgtcgttatagacaga

SEQ ID NO: 172437 - DNA, 360 bp, Arabidopsis thaliana
agctgccacgcctgcaggtaccggtcccgaattcccgggtcgacccacgcgtccgggaaggttttgatctccctgaaccaatcggagattctttctaccgttggtccgaacgttcttataataagtttttaggtggaccgatcctccgtttaagagaacctaggcgtcatctttagaacccctaatttggtgttcctcccggctgtttttttctttcggaggggtcggccgccaaagggtcatgtcggggattcctgagcttggcccacctttttcatattccctctgttggccacttcaaaatcttccccaggaaggcgaaacctccgaatttgggattcttccgtacataattggaac

SEQ ID NO: 172438 - DNA, 555 bp, Arabidopsis thaliana columbia
aaggatactcccagcctctattacaactcactttagggaaagctggtccgcctgcaggtaccggtccggaattcccgggtcgacccacgcgtccgcggacgcgtgggcgtgaacaaggagccgtcacacctgttaaaaaccagggtatgtgtggttcatgctggtcatttagtgcgataggagctcttgaaggagcacattttctagccactaaagagcttgttagcctcagtgagcagcagctcgtagattgtgaccatgagtgtgatccagcacaagccaattcatgtgattctggttgcagtggaggactaatgaacaacgcttttgagtacgctcttaaagctggtggtctaatgaaggaagaggactatccttatacaggacgtgaccataccgcttgtaagttcgacaagagcaagattgttgcgagtgtgtctaacttcagcgttgtctcttcggatgaagaccaaatcgctgctaatctagtccagcatggacctctagctattgctatcaatgcgatgtggatgcaaacatacataggaggagtct

SEQ ID NO: 172439 - DNA, 226 bp, Arabidopsis thaliana
  unsure (1)..(226): unsure at all n locations
acgtggcatgcacgcgtacgtaagcttggatccactagagcggtcgccctcgcgttcgttttaatagggtgagtgcttattccancaagaacaaggcgcccagttctcatggaactctttgtacccagccctaaactcctccttgaacaaaccgtccccacaagaatcccaatgagatgcttttttactggtaactcacgatgatactttntgactccattcctgc

SEQ ID NO: 172440 - DNA, 535 bp, Arabidopsis thaliana
  unsure (1)..(535): unsure at all n locations
gagctatgacgccatgccgcgtcgtagctggatctctagacggcgccttttttttttttcaaaatgaatgaattgtcgattattgcaagaaaagaaaggtgagtggtaggttttgggtcaccaatagcggatttntcagacatcattatactagtgtctccgttgtctctctcgcacatggttcgtaccaactgtgccacaaactctntaaagttcatatcagatgatccaccgtccgccacggcggcctcggcctccgccttccacctccgagcgttttctctcagctccaccagccttttccccaactgtggcctcaagcagcttctctgctacaacctccctcgaaacaatcatctcctcagcggctccgcggcctagtctcactcctgtcttgaaaacatcagccaagtacaccgcatcagtcacttgatctccccattgcggaaaacaaacaacggggactccggcagttaaagcctccattgtcgagttccatccgcagtgacttaagaaacaagcaatcgcaggatga

SEQ ID NO: 172441 - DNA, 656 bp, Arabidopsis thaliana
ctatagaagagcttgacgtcgcatgcacgcgtacgtaagctcggatcctctagagcggccgccctctttagttggttgtccatgaagaaacgacaccctctcatctcaggaccgaaactatgcgtgctgggacgagcaacactctaacagcgcactggctgcattcgaccaccgccgagggaaaaaacgggagtcaggacacgctcgacaagtgaacacttttttatatggggggcaaaaagggaccagaacatttgtccgaacgaccatgcaacaatacgaagagcagcctctagccaaaccactaaccatcaaccagtccgcgtgctagcagtcgatcgactcccgcctattcacgccatgacgggtcccgcaaactcgaacggttccccaaaccccatggccaggatggacaaccctgaaccacttacccaaccggaggagaaagaaggcctatacccccccagggaccgaaccgcgggggcggccaactactgcgagaactgggcccaaagcgaaaggacagctggtcgagagcaaaacaacggctccgcaaaaagccttgtcccaagagaagagccgtccagagtaaaatgcgttggcctcccaaaacaaaaaccctcgcaagagcaggccgcccgccgcggtcgaacaca

SEQ ID NO: 172442 - DNA, 657 bp, Arabidopsis thaliana
acttagaaaattatgacgaggcatgcacgcctacgtaagcttggatcctctagagcggccgccttttttttttttttgataaagctacactagcttcgacaccaagacaattacaggaattcacaaatcttgtctttcattacacagtgttttttgatacacataaagctcataaggcacacatatttctatttctacattcattagttgaaaggtttacaacgtggcccatgttgttgctgcatggatccagcaagtgagttggcaagttttcaatggtccttttcccggataagccgacttgtgtacaacaaattctacaaaaggccacaatgcaagccgccgcttcttgagctcattactttcaattcccacaccttttgggagccctttgagtttccagaagggtcaaagcccctccccggtaccttcttatcttaagggtttttttccatacttttatggggttaaacaaaggacatgcgtaagagttaaaggcccaaaatggggacaaaataccccacggaactgggtttcacagtaaggggcttaaccccttagaacgcttgccattctagaccttaacccttttccattgcttaggctttggaactaaatcccacacaggaggtttacccatctcctggggttagtttc

SEQ ID NO: 172443 - DNA, 610 bp, Arabidopsis thaliana
  unsure (1)..(610): unsure at all n locations
actatagagagctatgacgtcgcacgccctcgtacgtaagcttggatcctctagagcggtcgccctttgttttttttttttatgcatgtcagacaactagttatgtccgtacctaagntgtgtgtattagaactgtataaagctctacaaaacacactctgatgtataatatatgtaggtatctagcaatagtcagcatgtagctcaaaactcgcgagagagagatatattatagagagcccatanaagaactcatacaacaaacatcttaacgttattaacgtcccaccaacaacttagaacacactcctttacatgggatctccaccacacagaaatatgcaaatgaaacgcccacgatttattatccaccaactctgtggaaaactgcttacaaaagcgcccttcacgatttgaaggacggggtccaagcctaccttgtccaccaatgcaagaagaacttggccctggtgatttgttttggagctggagatgccatagagacaaccccagcggtggagggtacccggcacctatatgtgactgggaaattcttgccctcctcgacccccaatggagagtgtaaaatcacctgcttggaccacatcca

SEQ ID NO: 172444 - DNA, 500 bp, Arabidopsis thaliana
gcctgcaggtaccggtccggaattcccggtgtcgacccacgcgtccgacgacgagaggaaaaaaaaaactcactagagacaaatttaatatggcgatgattaccgcgcaacacgcgccacgcgactccctgtactactaaaatatcaacgcgccgtcggccgctgcctcggtgtatcacctccacacatcccttttttttttttctgggggcacaagaccgacttcctacaccagacctggtccttctttaacctccactccttcttctggttaatgctaaagcaggccgataatctgaactccaaggaccataatgtcatgaactgtgctcggtccggatcgacttagaccatgacctttgtttgtcgctcgttgcaacaagtaaatgacgcatacgcgcgctgcactctacgaggaatgacggcccgggtgagatcttgaggcacacaccccgacggaaatatggggcgctggtggcgatcactattaccaacgataa

SEQ ID NO: 172445 - DNA, 557 bp, Arabidopsis thaliana
  unsure (1)..(557): unsure at all n locations
gtagcttggatcctctagagcggctcgcgcttgcttttttttctttttttttttttttttttttttaaaaagtaaaaactgatattatattgcttaaggtgaagtgtttatttgataacattttacaagcaaccagaaaacaatttctagtcaccggaatcttttactggaaacaacaaccataatttatatatgtgacaaaaccttttcatcttgtgatattaaaccagaagcaacatttccatctttgattttaaacccgatgcacccggaagatcattcgaaccggtataaaccttaaacacattcttgcgtgaaggcanaccagctactgggtatgtgtcaatccacatacttagtcctgttcttatatgaataccatcatacccaacctcgttcattgattgcctaacaatatctctcttactggtgttcgacccaaagttaaaagagagcctcatgtaaaccggttggctatgactcacattgatgacaaaccgtatacggaaagaagctaaaggtcttcgtaaacctctgagattcggagatgattccag

SEQ ID NO: 172446 - DNA, 492 bp, Arabidopsis thaliana
ggggagctggacgcctgcaggcccggcccgaaattcccggttcgacccacgcgtccggtggttcttgctgggcattgggtgctgttgaatcactatcagatagattctgtctccaattgggcatgaacatttctttatcaataaatgatctcctagcttggggaggattcctattgtggagatggatgggacggccgctatttttttgctgcggggcaaaacagccgaatagccgggtcggcccacaatactgagacccaaacgttgataataccggaggcgttcgcccacgatactaaaccaggctctcctactcccttatgtaggccacgatccacactcgccggcagtggaggttaggggaccagtccaatgcgaaaggtgtgttggaacagtatgtacagacgtgcacgcatgcatcaagctctgggtggtagggactctaataactgctatccaagcataccttgctatggccctaacaataggaga

SEQ ID NO: 172447 - DNA, 478 bp, Arabidopsis thaliana
agggaagagctgtgccccttgcaggacccggtccggatttcccgggtcgacccacgcgtccgattgagcaacaaaaattgggaaaccaacgtgactttaacgaaaaaaccggcaatggccgagttcactccaatgccgaaaaaataacaggattcttaaacgagccggaattatttcccccgggttacaactgtgttacacaccgcattttcaaacatggggcctatgctgactaaggtgtgttttggggaaaccaaaccctcggcttttggaacatggacaatgggtcataaaaaaaaaaaaaaaaagttttttttgcttcctcaaccattgattaccggttaagctgtgactaaaaaatgtgaaagctcaaggtccttgggaaggccaaaaaaatatagaggagtaagggcccgaccatggggaaaatgggcgggcggaattctaaacccaccaaggcgacacgtgttggtttggg

SEQ ID NO: 172448 - DNA, 511 bp, Arabidopsis thaliana
gcaggaacgcctgcaggaccgggccggaattccgttcgacccacgcgtccgggaaataaattgagacctagactcagcgagattccagcaagtgtatggatctttcactttttcactaaccaaccaaaggacaataaagaattattcatctgagctaacctggattatatgctggcggaaaccgactttttttttgaaggggggggaaagcaagcttggcattcccccgataagatagattcctgaatgaattttttcattacttatgagtatggtgattgtgatctttgaatgtttggatatttagtggtaaactgtgcataaatgaataattaggaaagtattgaagagtcggggattgacttagagatatctgggcttatattctggactgagagaatagctcgtgataatggaatatgtaattagtgtgatggattggagatggtactatatatgagatctattactgtttattgggaattgtgatgttacctggtgacttgtcatc

SEQ ID NO: 172449 - DNA, 556 bp, Arabidopsis thaliana
  unsure (1)..(556): unsure at all n locations
ttggatcctctagagcggccccgccttttttttttttttcaaagagagacatttgaacaaaacatgggcaganaatcaagaaagagaattaatcagaatgctcgacttgttaccaccgtgaacttgtatactgcaactgttgaacaaatcaccatgtgcaaagatttgctattgccattcagattttctttagtctttcccacatttcttcttcatgcttanacaatacatttgagcacgaagaanatataactaccattcaacttggatacaggcagcaacagttgtaccgacatgccccgtattctgcacttaaagtttcactacgttagtttacaatagtgaagaacttctgcaacaaagtagggaaaatcaacccatataacttcgaactgtcaatctctggatctcagnaacaaatcatacattccaaaggacattggtaaccagctcacctcattttcagctaagaaaaaccaaaggttagaaccctcctggttctaccataacggaacggatcaagaacacataaatacattctacccataaacaactg

SEQ ID NO: 172450 - DNA, 517 bp, Arabidopsis thaliana
tacgacgtcactttaggggaagctggtgcgcctgcaggtaccggtccggaattcccgggtctgacccacgcgtccggagagaatcaaaaatcaaaatgtcttctcctactgcgactaagtgcgacgtctttctgagtttcagaggactcgacactcttcgcagcttgatcagttttctctactaaagaactcgttggaagaaaaattcgaactttccaagacttctaggagcgggggaatggccggaggattttttcctgaggtcatacccgccctcttggaggcgaaattcgccgccgttgtggtctctctgaactacactgcggcgccttggtgggtcgtcgaggttgtgaagagaatgggggctctaaacacaggggcgatcaccggggtggctcttttctacttgcgggggagctcgctctttttggggggcggctcgccggagtcgccgctcggggtttcaagaacgcggggcgggagggcatcctgttaacgccgtctctggtaggcgagc

SEQ ID NO: 172451 - DNA, 532 bp, Arabidopsis thaliana
  unsure (1)..(532): unsure at all n locations
agctctcatacgactcactttagggaagcctgttcccctgccnggcccggcccggatttccgggtccgcccaacccttccggccagttgtttggccccaccaaaccggttttaccggttaacctgctaatctggctgaaaaaggttgggtggctcagtttaaaaacttgaaaatggctggaacatcactgccaatctgaaggctggcaaggcaaaaatgttgacccaaggcactctaccggaagatgaccaaagtctcaaggatgctcttgcagcatacagaccagctgcagaagcagcggttcggattcaaggtgcgtttagggaaaaagcgctaaaggcagcacggtcaaccgtgattcagtttgctaccaaagaagaagaggccaagagcttaatcgcggcgatgaagattcagaatgcgttccggaaatatgatccacgtaggaagatagaagccgcttaccggattcaatgcaggttccaaacttggaaaatacgaagagagtatctgaacatgcggcgccaagcaa

SEQ ID NO: 172452 - DNA, 514 bp, Arabidopsis thaliana
tgatctccagctctatacgactcactttaggaaagctggtacgcctgcaggtaccggtccggaattcccgggtcgacccacgcgtccggagaattcaacttgccggtggatattattgatcggagagtgacgaagatgaagatgatttcgccgtcgaacattgctggtgatattggtcgtacgcttaaggagcatgagtatataggtatggtgagaagagaagttcttgatgcttatctgagagagagagctgagaagagtggagccactgtgattaacggtctcttccttaagatggatcattccgagaattgggacttgccgtacactttgcattacactgagtaccatggtgaaactggagctccagggaccaagaaaacaatggaaggtgatgctgtcattggagctgatggaactcactctaagggtgctaaatctattgaggctggtgagtaccactacccaattgcatttcaagagaagattaagattcctgatgagaaaatgactt

SEQ ID NO: 172453 - DNA, 540 bp, Arabidopsis thaliana
gatactccaggtctaattccactcacattttggggaagcttgtgcccctgccaggaccgggcccgaatttccgggtcgacaccacagccttccgcgaccccttggccgagtttggaaaaaaaaaaaaggttttggggggaccccaaaagggcaaaaccaacttagggttgtggttccgaccggattttttcggccaatctaagttcttccggcaaaagatggcttttaaggattcatcatggtaagaaaaagagaaccggttgctccttctgaaggaggtgaaggttctgggcctcgtgaacctggtccagcctaaggtgggggacgtggttcacagcaagggggtttccaccagggaggaggacaccaccaaggtggaaggggttatactcctcaacctcaacaggaaggtcgtggtggtcgtgaatatgggcaaccaccacaacagcaccaccagtttggaggaccacacaagtcccacggaagaggaaaaggaggacctcctcatcaaggaggtcaaggagggtatggcggtgtccg

SEQ ID NO: 172454 - DNA, 534 bp, Arabidopsis thaliana
tctatacgactctataagggaagagctggtccgcctgcaggtaccggtccggaattccggggtcgacccacgcgtccggggacgcgtggggaccaaatcccagccgtattacttgatcataccacagatgttgagagattattcatggcggtcttgtccgccgggggtgctctatttatttggacattgaggcgtgtttaccctgcggagggtcagcgggctctatgtatcattagcacaacactttttgttattttgagccccgttacggagccagcgactatatccactacattgctagatctagggtgcacagcctatggtgactttggggccacgggtgtgaccatgcttttgaggatctacaagacacgtccaggtagggacctctcaaaaattccaagattgacgccaccggttacggcgactaaccaaccaggttccggcgacttatccaccataatgggggaaatgctactaggcgcctcctaattagggatgatgtttaaaggaagtcgatcacactaaattact

SEQ ID NO: 172455 - DNA, 519 bp, Arabidopsis thaliana
gcctgcagggacccggcccgaattcccgggttgacccacgcgtccggggtaaaccctaaaaatttctgcatgggcctcccgggacccccgaagagaaaaaacttcttcttgtgaaacgcgggttaacattccaaagggtgagatacctgcacctggactacatgttgaatatgaccagcgtcctgatgtttttttttgaacgggggggatcccaacccccatgcccttctggaagaaactgcgcgaccagggagaaaccggaaatctcgggtacacacttgagttcctctttaggagagcgcttcctatcatagcgggcgccaccagcggagaacaacaccctgatctcctgggctggaagaaggaaggacagctcctccacgagcaaaatgggtggctgctagtttcaaccatgccgcccagaggagaccagccggtccctccgccaaataggggggtaaaagaacatactcctgactcaacagataccagctgccctgatggcttagaacggcccac

SEQ ID NO: 172456 - DNA, 464 bp, Arabidopsis thaliana
  unsure (1)..(464): unsure at all n locations
tgacgtcgcatgcccccgtacgtaagcttggatcctctagagcggccgaccttttttttttttttttttaaggtcggaacgtggcagcgtattttcatttatgacaaagtcatacactctccccccactgaacaatgtcaggaagggaaaacccngacatntgtgttggaatangctaaagtctcatctcngtctcngtgataccatgaagggtctatcaatatcaacgttgtagcaacctgtaatttacttctaatatctgataattctttctggattcctaaagacgatcaagtcttagctgagcttcttctcgatacggcttgggcacactattcacanagttaactagattactcgtcgcatctgaaagatctttttgcatagcgtcttcgagctagtgagccacncatcagccactttattcaccttaccaattatagcctgtcttcgatatgggaagt

SEQ ID NO: 172457 - DNA, 540 bp, Arabidopsis thaliana columbia
aagatactccaggctctatccaactcattttagggaaggctggtccgcctgcaggacccggcccggatttcccgggccgacccacccgtccgcggacccttgggttccaggacggcgccacaagtctctcgtctgctctctcttgctcaaagacgcttcggtaccaagaagtcctgatctgaaagatacaatggcgtctggtatcgtcaaaggaggcggatccttatcggatgtatatagtagtgcgaaaaggattctactcaaggctcgcgacggaatcgagaggttagagaggttcgaatcatcttctatggattctcccgatctagcctcctccgtgaaacgagatattactgaggtccgatctctctgctctaacatggatactctctggcgctcaattcctgttaaatctcagcgcgatctctggagaagaaagactgaacaagttggagaagaagctgagtatttgaatctaagtctggagaaatacatgtcgaggaatcagaggaagatgttggaagctaaagagagagcggt

SEQ ID NO: 172458 - DNA, 450 bp, Arabidopsis thaliana
  unsure (1)..(450): unsure at all n locations
tcgactcactttangggaaagctggtacgcctgcaggtaccggtccggaattcccgggtcgacccacgcgtccgaagagcttcttctacaacaatgcagacgacgagaagtgttcaagtaaatcatgtctcagatctagccacagagagagagattcacgagtttttctccttctcaggcgacatagaacacattgaaatccaaaaagaatttggacagtctcgaatcgcatttggtacatttactgatcccaaagccctcgaaattgccttgttattatcgggtgccacgaatggggaccagattggtacaataacacgagctgaaaactatgttcagaggcctgagacacaggaagtaagaatggtggacaacgcgatgcctgctggtcttcaagagagtacttcgcagactcaaaccaacattgattgggatagtagagcatacctt

SEQ ID NO: 172459 - DNA, 506 bp, Arabidopsis thaliana
ctatagaagagcttggacgtcgcatgcacgcgtacgtaagcttggatcctctagagcggccgacctacgcgttcgtccactctgttcgccactgcgttcggtttagaaaaaagatgaaaacattatctattatttatctaacacatattaaccaactgcgaaataacaaacgtgctaaatatctagtggtcaaaactattttttttaaactaataaatttctcattaattttgagaactttataatgtaaaacaaagaaaaattctctagaacatcaaagattttgaaacagaagacgcacgtgtatgattaattatggtaattccaagatgaaaatagcattgtaagagatcaggcaacgcctgacttgatatcctcgacaagctttatacaattgtttagtaagcttctcggagggatgagcaaagtcatagaagacatatttatctggggtggagcatggtactattgccagaagcatacaacaacatacattcttctgatgg

SEQ ID NO: 172460 - DNA, 563 bp, Arabidopsis thaliana
ggtgacactatagaagagctatgacgacgcatgcacccgtccgtcagctgggatcctctagagcggccgcccttttttttttttttcttgagtcaagactgttacgaatatacatcttagcagtcactaaacaagagtcataaagcatctcatactcatagagtatgattgatgaaatctgccaacacacgataagccttagaaagcatacatgatattcttcattaatgcagggcataaagatacatagacggagaacaactcagcagttgacatgacacgcttcacattctctctcacagctgggagtgggctgactgcaacattgacattaggcccggctgtccttactactcagcattcgacgttcacgtgccctgctcccactagccatccagccactggctgatgttcgtggctcccatgataatccagccctgaaagctgattgaggtgcataatactgcagggggaccagtctgaaacttgagcttgtgcattgttgcatactgagaacactatgttatctgctcgaagattgaagtccatctgcacaaccactt

SEQ ID NO: 172461 - DNA, 487 bp, Arabidopsis thaliana
  unsure (1)..(487): unsure at all n locations
ccccccgccaggacccggnccggaatacccgggtctacccacgcgcccgaaagccccaatggggaagaaacgagccacgaacagggagagtccgcgaaggaacaaggcgccgggagaagcaaacctgacggacctaggtctagagaagaagccctggagggacatatggctatcggcaggcgcccataagaagcctcctccgaggaaggaagccccagcnagcaacaaaagacgctcgcgaaccgcaaccgacggaggggagaccccaccncaaagccgggcacccgcccaacgcnccggggaaaaggcaagagcccaaagagaagcccaccggcgccgccagaagccgcccaaccgaaccgaaaccaagggccnaccagcccccccaaaagcaggccaacccaagacccgcccccgaaggccaaagaacggaccaaaacccccggaaaccacccacaaacccccccgcaacgcccccgccaagaaa

SEQ ID NO: 172462 - DNA, 475 bp, Arabidopsis thaliana
  unsure (1)..(475): unsure at all n locations
ctcacttagggaaagctggtacgcctgcaggtcccggtccggatttcccgggtcgacccacgcgtccgctgtggacctattgtgattacatgtactcattatcgcttacggttattggtggaagccatggaagctcatgcagcagggcgtttcagagcattacaaaatcatctgcntcaggattgacttgaagattcaggacacaaaccaacgctggctggtcagtattcgcctgtatctaagcactcacccatgacataatcatccactacagagatccggatgaaggcacccaagagttactgaagctatctagctacttacttacatctgattgatgaacaatctaactggatctactcgctggtgctatgcatgaccaggcgtgtcgacatgctgctttggattgaatgaagcagtatcgtgaggccttgccaatcctagtaacagtcgaggcacatgacccanaaacact

SEQ ID NO: 172463 - DNA, 504 bp, Arabidopsis thaliana
  unsure (1)..(504): unsure at all n locations
ctatacgactcactattagggaagctggtacgcctgcaggtaccggtccgggaattccggggtcgaccacgcgtnncgccacgctgtacgggcttcagtatgcagaatcttagtctccattgcatatctttcgacatcgtgacacagaccatagtctcatttatgttatatacgatttaggtaaactttcatttgatctagagatcgctagcatcgatggacgatgacttgcaattgcacgaggagaattcatctcatgggtaaagagacaccggttcggggaaaggagccctatattgagaaattgacaatggcagttgtgtacgcgcctccgaagagtacgcgtggcaggggctggggttgctctgactttttgcgcttaccgatctctaaaagctgcggacgatattgctggacatgctgcancgatgtcgagaaagcagcgaaagcattgcanagatgggataagtggatgacgactctgaatcttctgctaaggatgag

SEQ ID NO: 172464 - DNA, 519 bp, Arabidopsis thaliana
  unsure (1)..(519): unsure at all n locations
cgcgtacgtaagcttggatcctctagagcggccgtcctttttttttttttttttttttacacgaagagcccacatttagattaaataacttaaagccactaacaatataattaaagcattaaggcttgacccacaaaagaaggaggtggtcactaccatgatggattcatcatcaccctttctttgganaaacttaatagtatggttgaagcagcccgggtcgcaccaagcagaagacttcaccaccccaagcccctggcttttttaatttttccaacttacaagggttctggtttgcaaaatacattgcttgctggacctaccctttaaacccagccaaggggttgttcttgataaagatctgggtggcctttaggaacttcttgaaaaaagaagcccttgtcctttaacccattttattaaaaattggcctggttcccttctgccgagggccaactgatggcccccaaggaaacaaaaccctggttgcctagaaaggtacggtaagaatttgtggtc

SEQ ID NO: 172465 - DNA, 180 bp, Arabidopsis thaliana
ctgggacgcctgcaggtaccgggtccggaattcccggggctgaccacgcgttccgacggatagcatcagcggggtatttggtgagagttctgatgggtgatctgtcgctcttggagtaacttgtgctgctggattaaatggttttgcatatacaaagatgaaaccatactcccactacta

SEQ ID NO: 172466 - DNA, 487 bp, Arabidopsis thaliana
  unsure (1)..(487): unsure at all n locations
gtctatacgactcactattagggaagctggtacgcctgcaggtaccggtccggcattcccgggctttctcaattcctcaatccttactctcttccagggtaagatcttatatganatgatttgctaagaggacctatagtctcnggtgatcggngaattcgatatggaggagagtgaacanaggggagaatcagtcaagaaactgactaggcttgtgtttcagttgatagaattgngtctactntactctcatcatttgtgaagaaaggtaaagaagtatcaaataagagaaattctaagcagaataagcgaaaagcggaagaagaactctgttcgaaatcaagaaccaagaagtactctncgggatgggtccgttgtgaggaaatggangangagaaggggtagaaaacaganagaggggaaagtagagacagcnaaaggataatanggttgaggttgatgatcctttaagggtgcaaaggagaca

SEQ ID NO: 172467 - DNA, 528 bp, Arabidopsis thaliana
acggcgcatgccccccttccttagcctggatccttttgaaccggcggcccttttttttttttttttttttaccggttccaaaaaccccaataggttttttcttttaaccggaaaaattccaaccatggaaccaggggaggttttttcagggcaaaaatttaaagaaaaaccaaaatggggggggacctattctaaagggggcccaggtaagttattagtccacctccttctcactgttttcacctgtggaatcataggtgtgtctttggaccaggagagataatggccgattcttgaccttaacctctaggctctgcctctctttggctataggctgaaaatggattcaaccctaaatcactcctgatatgtccagggttgtatggcctgtgtgtttgggaaaagcaatatcgctgtgttaagtaattatcgccaaaagacatggactggcctaatacagtcctgatgcgaatcttaacatcgaggcaagcgtcattgaccatgttttttaactggggaatgataccc

SEQ ID NO: 172468 - DNA, 457 bp, Arabidopsis thaliana
atgatacgctcagctctatacgactcactttatggaagctggtcgcctgcagtaccgtccggatcccggtcgaccagcgtcggattcacagcgatcatgtatgctctctttggtcagctattgatgatcatcttctctgccaggtgcagtcttgtgctctgacatatagtatggattttcatcaccgagtcatcattatcgagttggagggataaacagctactgagtgtcaaatcaatgatccaatactcgggtagcgctttgcggctttaaggaactcatgttccttgccacattaacgtaaagactctttattagacgttaaggtcaagacttgcttgctcatagtgatcctgagccccagtgcaagacaagctttggcctcctccgatcttgtgatggatgatagctctatcagtttgatttgatgaaatggctatcttaatctgttggagca

SEQ ID NO: 172469 - DNA, 474 bp, Arabidopsis thaliana
acgcgtacgtaagcttggatcctctagagcggcctgtcctttttttttttttttttatattaacattgaatccatggattattcatcccttcatagctattccaacctgggtcatattcactttttacacaccacattgaattataataatactaggccttggacaaaatgtaggaatttgagacgggggtcgcgttaatggtatttgctggattcaacaaaacagggggggcctggtatgaaaccggaagccattggtggatcaagtaaatacagtgggattagaaggcttgagtccgggttgagccactggccgaagggggaaaagttcttgaccagctattgggttcgatctttttccaaaaaaggtgtttccttattatccaaaagcacgcctttaaaaaatattgttgaccccctatctgaggcttcccgaacactatgggttgaagcccgaacaacctggtaaaaaat

SEQ ID NO: 172470 - DNA, 480 bp, Arabidopsis thaliana
  unsure (1)..(480): unsure at all n locations
ccggcgggacccggcccggaatcccgggttgacccacgcgtccgagaacgcggggggcacagaaagagagactggggcacaacggaaaaaccggcgaagagagagcggatgacagccagcggcgaccaggggtcccgaaacatcgctttccatctaaccaaacacggtcgcaagctggcaaggacggtaattgttgggcgcgtagggagcatagnacacgggattacagataccattgagggatccttccctgccgatgttatagcactcaacatggaaacggactttgaaggtgcttttcatgccggtgtccaaaaagcatgggaactattccgccatttcgaagcttttcttaactgctgatacctaccacggaaaggtgcaggacatcttccaggtctctcaagatgagttgcccccaatcacaaaaaataatttcaccgggtccgggggatctccttgaaggctgttagaccacaa

SEQ ID NO: 172471 - DNA, 492 bp, Arabidopsis thaliana
aaggttggacccctggcaggcaccggcccggatttccgggttgaaccaagccttccgccaagccttccggttttaatgtaccatccataaccaccgttggaagtcgttggggtgtagtaatgtccagaacctcaggctactttgaccaggtggtgaagctggactccttgtacccaagtgaaggattacttcgaaggtgggaaagtggatacaggataacatcaatggctgcaacagttgatcaagcagctcttatattgagtatacctaaacgaaaaataaccgatgaaacccaagagactctccggacttctgccttcccaagtacccatgtcaaggagaaatgggcgaaaaatctgtacattgcatcaatatgctatggtcggacagtttgctgatgaaacatggagtatactgtttcaacctctctcactctctctctagggttttagggacgatctctctctagaagcctgacaacgtgtagccttc

SEQ ID NO: 172472 - DNA, 512 bp, Arabidopsis thaliana
  unsure (1)..(512): unsure at all n locations
cgcaccacgcgtacgtaagcttggatcctctagagcggcctgccctttgggttttttttttttttttttctttttttatttttgttcttgggttgactaaagagacaacaaccggtttcatttcattcggcaaggaaagtgttcttgcagggacttctggtgattacagaaaacacaagttaaagatggaaaggaagattcccctcntttggaggagaccctgcaattatacatataagcttcaatgcttgaacaaggtttttaaaagcaaaagttgaaaccaaaaaaggatgggtcatcacaattcaagaacttgtttatttctaaggaaaaattggggccattgaaagagtgatacctaggatcagatctccaaaaaaaacccatgtgaagaataaaagggaggggatccaataaattctttgaacaagcccagatgagggctccagctttagtgggaggaatgaaaaaaaccaacctttgtctttcagaatcagtgcccaatcggggtt

SEQ ID NO: 172473 - DNA, 542 bp, Arabidopsis thaliana
  unsure (1)..(542): unsure at all n locations
ctatagaagagcattgacgtgcgcatagcacgcgtacgtaagcttggatcctctagagcggcctgcctttgtttttttattcgataatatccgttactcgtaggacaaattcgtagctttttatgtttgcttaaccgacaaaaaaatattttaacaacacaatcaaaacacaaacgtcataattaaaggatagtgccggtaagactgatcaaggataataaactctttaaagagtaagcactaaccagcaataattaaacattaaccgatgacctaattaatgttaattattgacaaagtgagtcaaatcatattctcttaagtgatcaatctatntggcacggtcttggataatatcgaaacccatctccgtcggatcagtagctngaagttcatagtgaatcccttccaacactctnctcagcccatctttcgacgttgcgtacaatatctttgcccttatctttgatgcctccggtgacccatgcatgaagaagatcttgctcttgcggcagttatcgacggtgacaaagtcgaaataa

SEQ ID NO: 172474 - DNA, 553 bp, Arabidopsis thaliana
  unsure (1)..(553): unsure at all n locations
ggtgacactatagnnagactttgacgtcgcatgcacgcgtacgtaagcttggatcctctagagcggccgcccttttttttttttttttttttttttttttttttttttttttttngaagaaaaaaacattttttattatttatttaacacaattcaaccaactgcaaaataacaaactgcaaaatataaatgggcaaaacattttttttaaactaataaattttccattaattttgagaacattttaatgtaaaacaaaaaaaaattctttagaacatcaaagattttgaaacagaaaaaggccgtatataattaattatgggaattccaagatgaaaatagcattgtaagaaatcaggcaagtcctgtcttgatatcctcgacaagctttttagcaattgttttgtaggctttctcggagggatgagcaaagtcttagaagacatatttatctgggttggagcatggtactattgccggaagcatacaacaacatccattcttctgatgggtaaatccgtatttcctatgattgttgataacatccataaaa

SEQ ID NO: 172475 - DNA, 499 bp, Arabidopsis thaliana
  unsure (1)..(499): unsure at all n locations
acgactcactatttggaaagctggtacgcctgcaggtaccggtccggaattcccgggtcgacccacgcgtccgaccagtgaagctgaccttctgtctgatattgaccaccaggacctagtgaagcttacttggcatgtcgacataggagacgagcgactcatcatatctgagtatgtcagacatggtacactccgcagatcacattgacggtgctcgtggctataactcatnctcgatcaaatgtaggagattgtcatggacgtctgccatgacttaacctatctacattctgatgcagagagacggatactgcacagtgacatacaatggacgagctttctgctcgcagatcgcatgagagccaccgtatcatactacggctacgctagaggcaggcctactgactcgaaccagactcacatcttaactcaggtgaagagaaccgctggttatctcgatcctgaggacatgaaaactgatcatctcactgctaaaagc

SEQ ID NO: 172476 - DNA, 458 bp, Arabidopsis thaliana
gcacgcctgcgtgagctgggatgctatagagcggtcgaccttttttttttttcactgtcgttcgattaattaacacagatatgtctgtcgaccctgaatccaagatgatcaagccagaggaaggaaggatcgagaaatgggttctaaggagagcctttgactacaaagaacgctcttatgtaccaaaacacattctctattttacagggggaacagtttaccagagggtgtcccccttcaggaaggatctaaggcatgttagatcccgctgttccataggtgttatgctagatgccgcccgggctggggggtttatgttaggctgagggcccccgcgggagttcactagagcggtggtcgcgtaggggcgctcgtggaggtgccggctaccgttgcggaccttgcgggcggatgcgttgtctgtagttccgctacggcggtggcggtgcctgccgtaa

SEQ ID NO: 172477 - DNA, 360 bp, Arabidopsis thaliana
  unsure (1)..(360): unsure at all n locations
agctagcacgcctgcaggagccgggacgctatagaggggtcgacccacgcgttcgggtacttgagctagctgggaacgcagcgagagataataagatgaacaggatgaaccctaagcatctatgtttagcgatgaggaacgatgaggaattgccgagacagtgatggagtactatagctcgcggcggagcctactttttttaacggtgttncnncctaagaaancaacagatccaagatccgaagcggagcaagctgcagctaccaaaccttctaagatggctcgattaagaagagaatcgatagcagatgcttggtatattcgagacgtagatgatagagatgaagtagaggaacaact

SEQ ID NO: 172478 - DNA, 514 bp, Arabidopsis thaliana
taggtgacactattagaagactttgacgtcgcatgcacgcctacctaagcttggatcctttagagcgggccgcctttttttttttttttttttaagggaaacctattttattttttttaccccaatgccgaaaagaaaaacacctctttggttctggcaataaatcccttcctttaataaaaaaaaattaaaaccaataagaccaaaccattccataccgggttcctttttccaccacctggcccagccaaggttgaaacctaactttagaaacctaaggaaatggagtaatgtccgccttaatcaaacaaaaaggtggaaaccaacaccaaaaaaaagaaaaatggttttcgtccaccgagcccagaaaaaggtgggggcataatgggatcaactggaccaggaaccttatgagcagacctacccatggttctttcgttaatcatccctacttctttgcaaactctgcctactactccaaggaggtctctacccaccaagaatattctaaacg

SEQ ID NO: 172479 - DNA, 516 bp, Arabidopsis thaliana
  unsure (1)..(516): unsure at all n locations
ggacaaagctacgcacgcctgangtataccttggaccctataccagcggtcgacctatgtctgttcgagcagctcaagtttacttcattctctgtgaaactatactgcatataagcttactgggtttttcttggataagatttcaattcccaataaatgcaccctttagcaatcaagaaaattccataggagttttgtgggctagaacccggcttttttttttgggggtgggggacccacacacaaccccccctcaaaaaaaaccccctcccccgatcggttgtctgctctctgctccccgcacgcccaacataccgcctctcggtcaccccgcccgtgccaccttctcccgtgacactgctcccggcccctacctgcgctcaccactagcgtcgctcccctccgcctcgcaatttccgtcccgcgatcgcaccgcgcccgcgtgtcacccggactgttattgtttgacttctaggctgtgctggagcatgctttatggccgcgatgctcactcgg

SEQ ID NO: 172480 - DNA, 475 bp, Arabidopsis thaliana
ccgcctgcagtgagcctgggcacccaatagagcggtcgaccctactgtctgttcgcacaaaccatctcacaaactcatcaaacctctttctcatctcatcttcaagccatctccgatcatcatcagacaatggcagcagctatggcaacagcaaccaagtgcatgtctctaaacccatctcctcctaaactccaaaaccaatccaaatgcgggggattcatctccctaccaaccccaccaaaaccaaacgtctctctcgccgtcacaagcaccgccctagccggagccgcgttttcttggctcacgtcgtgggagccaggttttacccctgcaacagatctgtcacgtggctcgacaagcgcgcggggggcggcccggggggtggggtgggggaccggttggtggacacagagggcggggccgggcacagggttgcggccccagggtcgcggggggcggcacacgggcggccggg

SEQ ID NO: 172481 - DNA, 458 bp, Arabidopsis thaliana
agagctagggcaagctgcgccgcctgcagtgagcctggtgcacgctctagaggggtcgacctatgtctgttcgagcgaaagaagatccaaagatgagtgaagaagcttttgaagaatctcaggaatcaagtcaatctcctcgtccggttccaaaactgaacgagaggattctctcaacactatccagggaaatcggtgcgtggcattcattggccttttttttggggggggggggcaacaccatggcctcctccttaaaaaaaagttgccgtgggtggttggtcggttctttcccgcggaacctgatcggccaatgtacgtctcagtccggtcggatggtctccggttagtgcagccgtcgaccacccgggcggccccgcgggggtgggcgtgggctcggctggtcttcgggggggtcgcgcatgggggaggcacccgggggcggtgttgtctccggc

SEQ ID NO: 172482 - DNA, 472 bp, Arabidopsis thaliana
  unsure (1)..(472): unsure at all n locations
gcaggtaccggtccggaattcccgggtcgacccacggcgtccgaaccaaagaaatacaaagatgattnacaaacctttttacttactcactaattcagggaattccctggggggggttcaaaatggggaaaagaggtttcgttttaccactcccgacaagaaaatgtgtggtgtcgaggtgggggcgcgatttttttggggttagttgggcaccccccgcgggccgcgcacaaaaaaaaatgtccggggcctggcgggggggtggttcccctcgtgagttggactgtaggtgatgaaagatcgcctcgtgatcgggctggaacccgcgcacgaatagagcgtgggagaggcctgggagttgcttcttgccggaggctatcggtgcacgttcgggggtctctggtggcactgctttgtacggtggggcggtgctgccgcgtgggactgcggggggggggttcgtgcgtgaggt

SEQ ID NO: 172483 - DNA, 481 bp, Arabidopsis thaliana
  unsure (1)..(481): unsure at all n locations
ggggagctgctacgcctgcaggtaccggtccggaattcccgggtcgacccacgcgtccggccacgcttncaaacaaagacaaaaaccaaacctgtttcactattacacttttcctcaaaaaaaagaaaaatgtttttgggtgggggttatacctgtggtcattggggccggcagcggcgacgccgcggcacgcggggcggcaaccatttttttttcgggtgtaggggcgccagtaggggggggcgccctcaaaaaaaatcgggggtgcgggcgtgtggggtgcgcacctcggcgagggctgtgggccgcggcgctggggtggcccacgggaggcggggcggcaagcagggattgtcttgatgcggcggtgaggctaaggcggcggggggacgggggattggggggccggggcagggcggggaagggggagggggggggcggctcgggacgtccttggggcgtcgatgcggcggtggtgggg

SEQ ID NO: 172484 - DNA, 389 bp, Arabidopsis thaliana
  unsure (1)..(389): unsure at all n locations
ctggcacgcctgcaggtaccggtccgctattagccgggtcgacccacgcgttcgtccacgcgtncggtgacatcaagggctctaatctgctgcttgaccataacaacaatctcaaaattggagatttcggccttgccaatttttaccaaggtcccaaaaaaccgaactttcactgactagttctgcacctcgcagattttttttctggggggggggccaccgcggcggcttctccctcatgcccccctcagtctaatggcgtttccctctctcgtaccttcccgccttattctattatgtgtttctatctcttggtcctgaagcttttaccctttgctcctgtcccttcaccggctattcatcgtcgcgcggcgccgtccctttgtctg

SEQ ID NO: 172485 - DNA, 495 bp, Arabidopsis thaliana
gctggcacgcctgcaggtaccggtacggtctagaggggtcgacctattgtctgttcgtccacgcgtccgaacagaaagaaagtccacgcgaggacataagcgcgtgtgatttaaaatcgtcgtcgtcgtgttccacaccgactttaatctgattgttagaatcgccgtttgcgtattagtcggggaggagatggacccggtgttttttcgggggggggggccccgtgttcgcctcgctttgttacaccctttttggggtggggttgaagcggcttggtcgggctcacgttggctctgagtgggtggttcggtctgcagaattggtccgggtaacctgtcgcggctacctcccgggtgtgtacttatattcggtgtcgttttttcgtgatcatggaggaatgtcgcctagctggggatcactggtcgccgttggtgttgttactggagactcgcatggggggggagggggaagggattctgactgtgctgttgctt

SEQ ID NO: 172486 - DNA, 489 bp, Arabidopsis thaliana
ctgcgccgcctgcaggtaccggtccggtattcacgggtcgacccacgcgtccgatcttaattggttcaaaatcatcctaaatcgagtagattgttttgaatcgattctcgaagatagctacattcatatatttcaccattttcatttttattaaatttattgattattatcctgatactgtttattaaacaagcattttttttttaagggggtggaaacacaaaaaaccatcttaatgttaacacccttacgctattctatctattttatagtatgacacaccactaaacattatgtaattaggtataatcattctaatgtctgttacttaatttctatttctttcttatcttacacggatcttcttcataagctttattctcttttatgcttgtattatcatataataggacaccttcgacaataacgtgtactaatgatgtttaaatttgaccgtcaaaacgagtagcacgcaatacaatcaacatg

SEQ ID NO: 172487 - DNA, 509 bp, Arabidopsis thaliana
  unsure (1)..(509): unsure at all n locations
agagctaggacgaagtacgcacgcctgcagtgatacctggtacgctctagaggggtcgacctattgtctgttcgaccagcgagagtgagtgagagagtatagagtgtgtggngtgataccataagtagatactttgagctggaatacgactccaacgttctatattatttggagtatgtatcatctataacagtatccttttaacatccaagacacctttttttaaagggggggcccacatagcagaacgcatgctggaaccacatatttgctgtaagatagggagagcactagaatatggtcgccttgtttaataggtgatttacactgggaggatgtgacattataaactgacgccggttacacaggggtgatcaatagtggcacgtggacactatctggggtctccgggtatttggttcgctattcatttaagtggactgtctcgcgtccttatgaatcgtaaatgagaggagttggcattcttattatcggctgttgaacaatgt

SEQ ID NO: 172488 - DNA, 424 bp, Arabidopsis thaliana
  unsure (1)..(424): unsure at all n locations
tctatgacgaagcttgcacgcctgcagtgaagccgggaccctctagagcggtcgacctatgtctttcggtttcgattcccacatttgaatcaaattcaatcgggatggagaattctgatattgacatggtaatcatacctgatactccagatagatcggtacaccatagagaggttaagagaaggccacattctccagtagcaccattaagattttaaagagaggagtaccgtactcatcatcttcacggaaaagccagaccagtcnctgtaactgaggacaacccgcaccgttggtctgtttgccgccactaccctcactcttttgtccctccaccaggccgagcggcaaagaatgggtccaacggggaagtagccgcattagtgagcataatgtggaaatggctcgtttcggaacaaggaga

SEQ ID NO: 172489 - DNA, 480 bp, Arabidopsis thaliana
gtagctgtgccgcctgcgtgagctgggatcctctagagcggtcgacctttgtgttcgttcactgcgtacagatcacttggcaccgttgcaaagagagaaccaaacatggtaaacaaagacgaccggattagaccggttcatgaggccgacggtgatccgctttctgagactaggagaagaaccggtggagtgattgctttccgttgtttggggggggggggttatacagaggccagttaatgaaaataattcttcttgtttaacaaattggatccccccctgttagtggaggtgggggggtggcggcagggggcgtggctttggtataagcctaggggccctgtcgtgcgaacttgggcggtagactggagccggtaggcagtgggcggactgggttgggttggggacggcggggggggcggttgtctttgggctgccccgtggtggtgtgggtatgctttgtgcgtgcgctgcccaggg

SEQ ID NO: 172490 - DNA, 428 bp, Arabidopsis thaliana
taaaattctcgataccccaaatttcgaaaacttgttcttagggcgattcttctctttgggcattgggcgaatttgattcatatccctcggggatcggatttttttcagcccttccccgccgccggcgcgccggccccagccgccctctttttttgggggggggcgcccaacaaccggcacccctaccacaaacaccgcccccgcgcgcccccgccgccggccgccccgcccgcccagaccgcgccgcgcccggccgccggccgccgccccggccccagccgccgggcccccccccccgcccccaccgcgccggcggcccccggcccgctcccgggcggccgcgctgccggccgccccccgcggctcgcccggccccggcgccgcgcccgcgggcgtcgcccccggcccacgccgcgcgggcccccgcg

SEQ ID NO: 172491 - DNA, 465 bp, Arabidopsis thaliana
  unsure (1)..(465): unsure at all n locations
tccagctccatacgactcacttagggaagctggtcgcctgcaggtaccggtccggattcccgggtcgacccacgcgtccggggacgcgtgggttttaacacaaaacatagccgcaccatanaaacagtggtgggtttgtttcagatgaagtgagagctagggcagatatatactcaggagatgatatatgccgggagaagaaaaggagtttctaaaggattttctatgcgtgagggtttatcgccatggaagactattaacaaagtgaaaaccacagagggcgtggttttgctccctaaaccataaaaggcatcccttaaggttggggtctctgggaaacctttttattacgctccgggggcattcccctggggggggggggaaaaataaaaattttacccgtggatgggcgcacggtccttttttttggtcccccccaaggggtttgttttcgggcgcaccccc

SEQ ID NO: 172492 - DNA, 461 bp, Arabidopsis thaliana
gaagctatgcacgcctgcgtgagctgggacccactagagcggtcgacctttctgttcggagagatcggagctaaaaagccatctctcgccggaaaatttctcagttttcttattaccttagccacagacaacaagacgacagaggaatctaatcttagccccctttcctctctggctctctctatatctctggctttaggctttgagatatggggggcacgaagctttttgcttcttttttttaacactttaaaaaattccagccaatggttcgaaccccactaggagcttgaaagggcatgggatttagcctgggggggtcgtgcgcacacacaccggccgcgcagtgtctcactcgcggccctccggcggatggcgggtgcgccttggggccgcccgccgcccgcgatgtcgctccactgccggacacggggcggcaggcggcgcgcgcctcggacgac

SEQ ID NO: 172493 - DNA, 370 bp, Arabidopsis thaliana
  unsure (1)..(370): unsure at all n locations
acgactcactttaggggaggctgctacgcctgcaggtaccggtccggaattcccgggtcgacccacgcgtgcggagagatcggagctaaaaagccatctctcgccggaaaatttctcagttttcttattaccttagccacagacaacaagacgacaggaggattctaatcttagcccccctttcctcctctggctctctatatatctctgggttttagggttttttttatagggggggggacaaanctttcttcgtttctttttttaaaaaaaaattaaaaaaattcccccggcatggggtggcgaacccccatccggtctctgtgaaagggggcggggggtgtgaggccgcggggtgagggcggggtag

SEQ ID NO: 172494 - DNA, 358 bp, Arabidopsis thaliana
tagggcgaagctgcgcacgcctgcagtgagcctgggcacgcactagaggggtcgacctatgctgttcggcgggatttattcaaccgatgagtttcgtatgttctcggtcaagatccgcccatgttctcgagcatattcccatgactggactgaatgtccatttgcacacccaggtgagaatgcaaggggaagagacccgaggaaggctcacttttttttgggggggggggccacctctatagcaacggtgcactgaaaaaaaagggcgccggggggggtgtgccaggatggcggcgccggcgcccacatagaatggatcgagggtgtactccgctgcgggttgtggaccactgcgact

SEQ ID NO: 172495 - DNA, 505 bp, Arabidopsis thaliana
  unsure (1)..(505): unsure at all n locations
agctgccacgcctgcaggtaccggtacggcatacacgggtcgacccacgcgtgcggtccatcgatgaaccagatctcgaagaagacgaagagagcgaggatgaagatttcggcgcagcagaatacaaatacgagcacaaggagacgaagaccacccaccgacgggcccaccgatcccgaatcgcggcgggaggacaaggaacttttttttaaggggggggggcccacgccgccgcccggctgccgttagcacaactcagtgcgcgtaggcacgcgctggcgaccaggccgggcgatgcctngaacgatcgagtggtacgaggctggaggtcaggggccccttgccacgcgcggcggcgcccggctgggcgagtatcgggtgcggagggctccaatggatggcacaaggagcgatagagaaaggtgggaggtaccaggggcgcggggcgcggtacgggtgccgagaatcggtgatggagggcgacagtaagcggaccggccagggc

SEQ ID NO: 172496 - DNA, 516 bp, Arabidopsis thaliana
taggtgcacactatagtagatctatgacgtcgcatgcacgcgtacgtaagcttggatcctctagagcgggccgccctcgcgttcgttttcattgttttaccatttcttttattatacttttattgctttgtttgttttttgggggctccaaaaggcctatttttgggaaaaagaaaaagccttccttcctttggggggaaaaccaaccaaccgggaaaaaatttaagccgggggaactttttttccgcctttgggtccaggaccttaagggttttttgaatccttttttttaaagggtttagggggcctagggtttgcgaatttttgccttttagaaattggcattttgtaaacttccttctttttcgcctttgttttaatttgggggggcctgggcctatacaatatcgcagtccgcccttttggccctactggtacggaaccatgggtttcctccaaatgctgcaccggatcctttaccttatagggcgaggtgtggcgtattttcccctttaa

SEQ ID NO: 172497 - DNA, 207 bp, Arabidopsis thaliana
tgacactctgacaagatctatggcgaagctgtgcacgcctgcgtgagctgggatgctatagagcggtcgacctttctgttcgttccacgcgtacgagagtgtcttatcccgcgtctcgagattgccttatcgatctctctccttagtctgaaagcgctcccacttgattcttacttaaggagagattcatcggagtcggactcttaa

SEQ ID NO: 172498 - DNA, 521 bp, Arabidopsis thaliana
caccgagaagccgcgcggacgaaagccggccggcgggggcaaactataggtgacctatagaagagctatgagcgggcatgcacgcgtgcgtgagcttggatcctctagagcggggcgccttttttttttttttttttatgctaaacaggacggggcctgatatcggagccagaacagtggaaatccaggggcacaaagggagcggggcgctagggaaccagccttacagagcgagaggagagcacacagctgggggaagcgcggcccgcggcagacaatcatgtgaaagagcaggcggaacaggcagggtgccttatcgcgggaagtgggaaagaaactcgtctggggggggatggctggtgagacctgcgaaaagcatcggagagaatcttggtcaggcggggagggaggccatgggggcccgaagaggccagcaatgggaagcgaccgaaagggagagaaagagggggactgccagaggaggagggctaggaaacggcgcacaagcgccaggaacaacg

SEQ ID NO: 172499 - DNA, 501 bp, Arabidopsis thaliana
  unsure (1)..(501): unsure at all n locations
tacgactcacatatanggaaagctggcacgcctgcaggtaccggtccggaatacacgggccgacccacgcgtgcgatagaaccagaaagagcacgtgctcaccatggttgcaagcagcacatttatctatgacgagccatgcagttttatccccttcttgcagaatctgcgtccggaaataatgcgatattcgaggtctcacattntcctaaatgaacgtgagcttgaagatgtctgcanagcctgaggactcgntaactacactcgtgttagaaacggtccatttataatgctctctgcaacaaaacccagctaagctcaccctctctcaagcatatatacttttctgtaaaaactggcataaaggtatagacattatcacaactggagttcatacagtatacataattgtaaagacttttgaaatgtgactattatctagcttggaaattggggtaacatgtacgcaaggggtcttcatcttggaaaaataaaaaaggg

SEQ ID NO: 172500 - DNA, 506 bp, Arabidopsis thaliana
gacactatagaagatctatgacgtcccatgcacgcgtacgtaagctgggatcctctagagcggccgccctttcttttcgttatatccatattgagtttgttcttaccatggttccaagttttttttttttttaaagaaacaacctctttttaaagacaaaaaccgtctttctgggtttctttttcattttgggggaagaaaaaacccccctttaccaccttaagaccaaaaacggggtttgaataaaaaatgggtgtgacaactaacgtaaccccccccaaggcctttttaactgggggggggaaaaaaaaaaaggggggcaaaaatgggggcgggccccccaaaggctcatatctttgttcaagccaaacatggggaggacaagtttttgggggggcccctttgttccaaaaaaaccaaagaccccccttttttgggggcagccttttcttggttcccaagttttaggggaaaaaaaaaaaaaaaatttttttttttccaaccca

SEQ ID NO: 172501 - DNA, 470 bp, Arabidopsis thaliana
  unsure (1)..(470): unsure at all n locations
gcctgcaggtacctgngccgcattcccgggtcgaccacgcgttcgagcatcttcttcatcanattttgctagttcgtcacacacacggatcatgtaatctgcttcttcttcgtttttacgatttgatcccaaagtttttcaattctataaatttgtgaaagccaaccccgttggcgcgctttaagctttccttctgggggtgttggggccccccccgggggcctcctaaaaaaaaacccccccccagtgggcgggtgccccccccccctttcggccaggacgcctgcggcggaatcgcgcacggccccgcgccctccgccctcgcccgggggccccgccgccgggctcgcgcgcggtccgcggcccgcgcgcgggccggccgggacgcgctccggcgcgctacgccgcggggggcgcctcgcgcgcccccctgcggcgcggccgacgggccacgctcgccaggggcccag

SEQ ID NO: 172502 - DNA, 528 bp, Arabidopsis thaliana
  unsure (1)..(528): unsure at all n locations
ggaaagctaccacgcctgcaggtaccgggcacggaatagaggggtcgacccacgcgtacggccctggaaggagagaagcaattggaagaaactattgaagcggcgtataatataatgtcaaagccggataaatgaagataaagaggccaatatgcaaagtagatacaaacataattgcaaaaatcacgagaaaataggtgaccaagaacattcngtcataaacgggtgtgaacacacaccagcagaaaagacgccacaagcaaaaacacacgcaaggacacgatgaagagaaaagcacagacaagctcggtaatcacaaagtgatttgatctgcgggaatattataatcggagctagtagattcatttttaaatcccacggaacctcaaacaaagactaaaaatagaagagagagccggataaacgcatgaagaccacggaggaaatgaacaaagttgtttagataatatggaaattagatgatttcaatctgcaaacagcacaaagtagtatgactggaggaatgca

SEQ ID NO: 172503 - DNA, 493 bp, Arabidopsis thaliana
aggtgacactactagagatctatgacgtgccatgcacgcgtacgtaagctgggatcctctagagcggccgccctatgcgttcggtgatggatggagagatgcatttggaagaaactattgaagcggcgtttcagataatttcaccacaggaatgttgagctttgttttgggcttttggggtctacttcagctaccccgagatccgacgcgacggcgacagttactaacggggcttatatcgtttgcgccaatgcggctgcctatggtggaacatatgaatcatctcgcaatctgtgggttttgccgggggaggatgaagtgtaaaaagtgccgaggatgatgcgagacttctttaaaagaacccattgtttttgctacgtgctgttctagctgtaaggctagttcccacaatgtttaagcctctgatttgctttaaggggaacgaactcctgtttgcgtttacgaggtctttgcctttgtggagttggcttaa

SEQ ID NO: 172504 - DNA, 477 bp, Arabidopsis thaliana
ggcgaagctggcacgcctgcgtgagccgggcacgctctagaggggtcgaccctttgtctgttcgattcggatttgcactccatactcatggaagcttcgatttcgtttctggggtcaacaaaacccaatatttccttgtttaacccttcttcaaacgtccttcctcgtagagatttccctcttcctgctttgaaattgaagaaagtttttttgctgggggggggggttgcaccaaaaaccactcatcagagactactgctctcgtgggttcaacccgggggcacgcccctgcgtttgggactggaaggcgcgggtgcgtgggggtcggggtcggggctggccccgggcgccccgcgggccgccgcgcggggggcggcgcgcgcgtagcgggggtgtgccccggggggcgctcggggcgtgcgcgcggcgttgcctgcgcccgcgggggcgggcgggcggcatcgggcgggggggggc

SEQ ID NO: 172505 - DNA, 463 bp, Arabidopsis thaliana
  unsure (1)..(463): unsure at all n locations
ccctgcaggtaccggtccggaattcccgggtcgacccacgcgtccgggcaccctttaaaaaaaatctttnnnaaacaatttcaaaattcccctagaccccccactctccccgacgcctcgacgagtcgcactctaccggagtagttttttcctcggtttgtcagacgcccactcgcacaggcatgaccgcgcctcggccctccagacacttttttttcgggggaagttggggtcccctctcactaccgctctatccaaaaaaaaaacacccccacggtctgcctcgatcacggtcaccccccctcgcgccatgcccgcagtgcagcagccgaatcccccgccatcagacgtacgcgagctctccaatcccgccaacgatcgtcgatccgcgcgccgctgtccactacgcgctccttccgcctacaagggaggacgctgggccgtcgcgttatcaccccctagg

SEQ ID NO: 172506 - DNA, 468 bp, Arabidopsis thaliana
  unsure (1)..(468): unsure at all n locations
gatactccagctccatacgactcanataggggagctggtacgcctgcaggtaccggtccggaatcccgggtcgaccacgcgtccgggtgcgtgtggttattactaacaactttacaacacttcatcttgctgcttttgctttatcattaatgctaaaatcagctagcgaggatacagcaacatggagacgtgttgattagagtcctcttgaagaattactgactgtaccttatcgcggaggtagtttcctctttctttgtaaaaaggaaaagagtaattgcgcacccaaacattattttgccccccaccatgaaaatgcgactatgttcccttttaaaaactatttcggatgcttaatactagggggaccttaccatgggccctccccctaaagaagnggagttgaatccttgcaaccgggcgccccacttggcgctcaccacggaacagggctaccccggggaccct

SEQ ID NO: 172507 - DNA, 497 bp, Arabidopsis thaliana
tgagaaagatatctaggacgtggctaggcacgcgtcacgtaggctgggtatcctttagaggggccgccctatgttttttttttttcttttttttttgtttttatggtatttcacacacatgattttttatcgtttcttgttttcatttttgtgccccacaaaaccagcacgggcaacacatatgtttcgggtgaccatgttggggcatacgcagaaaatcttggcaaaatatttgagggtgctgaaaaatgggggggccactgtatagataaagaatttttcttacatggtgacggggaggatccctaaaaattggaaagcgcagagacgactcctccacatggtccatgcacactccgcgactgttttggaggatacgcacttctggtgaacagttcttaaaagtcagcgttagctgccgaggaacccaatgcttctggaccaagaaaaggggagaaactaatgggggggactcacctggccgggccgtaggagta

SEQ ID NO: 172508 - DNA, 183 bp, Arabidopsis thaliana
  unsure (1)..(183): unsure at all n locations
atgattctgccagctctactacgactcactatagggaaagctggtacgcctgcaggtaccggtcctgtattacacgggtcgcccacgcgtncgcngtacgcgtggtgctgtgcagaaggagcttcacacacnatgaatctgatcgggtctgcattcatctncgagtcgacatatccaggacgg

SEQ ID NO: 172509 - DNA, 639 bp, Arabidopsis thaliana
  unsure (1)..(639): unsure at all n locations
gactactatagnggaagctggtacgcctgcaggtaccgggccggaaattccgggtcgccccacgcgtcgctatccccggcgatatagacgcgggagccacagcaagacgatcgacctttgacctaaactgaacccgctttcgtccgtctctctctttacgtacgaacaaagctgaaacactttatgttgggttagccattatcggacagtgatcttggcttagctacagccttgcggggcaaattcctgttttggaggacggtgatgcgacgcttttcgttaaggttacttttgatctgagcaatgattagactttcttagatgaccagaaacgtcattacgcctgatgcacttcagcttgaataacgatatatctgaatcgacagactgcgatgattattgctgatgctgaaagcttccgtggcaatatatgtgcagagacaagagccatcacacagtacctacgagaggaatacagtgagaccggtgaccagcttatctgcctagactgtaagacagcgctggcagccactgacgtatggctcaagatgaaggtcaacagttggaccctaacgcctataagcttgtcttcgagcgtgtctctaatgtgatgatcggaatgaccactgaccctgacgc

SEQ ID NO: 172510 - DNA, 523 bp, Arabidopsis thaliana
ttagggggcacttttgaaagagatataggcaggtggataggccaccgcgccgtaggctggatatcctttaaaggggccgcccttttttttttttttttttttttttttttggcacaaaaaaccagaccaatcgccattaactttaaattttttaccccaaccttccattggagaaaccggtaaggtcccttatttaattcataacacccttatttgaggcatataaaccggttacaattcgataaagagaaaagggaccctaaggacctaatattgtatgggctataccatagaaaatccttacccttcatagggcctatatattataaggaggaggtgacctttattatattttaacagtaagggatccattttttgtaacaatcaatagaacatcttcaacggccacttcaacggcggtatcttttccgggagcggttaaaagattggaaacatttaggaggacactaaggtttgtggccgtaacagggtcctttctcttggaaggaaacggtgggcctac

SEQ ID NO: 172511 - DNA, 515 bp, Arabidopsis thaliana
taggtgcactatagaagagctatgacgtcgcatgcacgccgtacgtaagcttggatcctttagagcggccggcctttttttttttttttgaatggtgaattgaatataaattatatttatcaagcttataattaaattggttacataaatatcctaaaccatccggggtattatattggcaataacttttcctttaaaataggctcaacatttccacttggaccattggccattttaaaattggccaatacttcaaggttctttttggcttaatggcagagggtggattaggggccgattctggatttggcggcggtggccgccttggagaggatccccaattggaaggttatggtccctttgggtggaattttccggagttttttttcggaggagggcccgggttcaatattttattggaccaccgcaaatttttaaccttggggtctggaattcggtttggttggagttctttttcgggggaatggcctaataataggattccggttatccgg

SEQ ID NO: 172512 - DNA, 381 bp, Arabidopsis thaliana
ctgcaggtaccggtccggaattcccgggtcgacccacgcgggacgaggcccccccaaaaacaaaaccctatgatcacgaccgcgtgggtgcggacacgacgaaggatagtgaggatccgactcctcgtgaagcaaaataactgagaatcatatgtatgggatattggaggcccgatcaaagccataaaaggaggatgtaacagcgtgccggaccaaatttttcaaacgggtgtgggaacgctacattagtccgatagacattttataaaacaatattactgtgttaccgggtagactagtctcactcagcaacacaccgctaaactataaaaacaagatagataccgccccataccgccgcagagcaactcccgtaacaga

SEQ ID NO: 172513 - DNA, 160 bp, Arabidopsis thaliana
aggtgacctctactaactatatgggaagctggcacgcctgcaggtaccggtatgctattgcagggtcgacctatgcgttcgttcacgcgtacaggtggaattggtgccttacagatgggtgaatatctgcccaatgtgtctgacggagttgatacatata

SEQ ID NO: 172514 - DNA, 487 bp, Arabidopsis thaliana
actatgagaagagttatgacgtggcatgcacgcctacgtaagcttggatcctatagagcggtcgacccttcttttctttttttaaccaattagatggttggtctgttcaaagggaaagacttttcctttgcctggaagggtacgttaagccccctggaaaataaataaagcaccataagcgccaactcacgaaaatatgggttcccaaacaaaaggaagggaaatttcatcaactaaaaagattcaaaacaggtgcctttgccttgacttaggaacagaagagttaaacttgaattacacaggccatgccttgagggagggggcaatttaaattcgaattacccttggaactaaatggcctttacaggagtcataacttgtactaacgaacccttggtttggaaattaaccattgaagagattcgctccctatgttattaagtatcgttacgtaacaatcctggatacctggaacagcgaaaatttg

SEQ ID NO: 172515 - DNA, 501 bp, Arabidopsis thaliana
  unsure (1)..(501): unsure at all n locations
taggtgcacactatagnagnagtctatgacgtcgcatgcacgcgtacgtaagcttggatcctctagagcggccgacccttgtgttctttgtctcttttttgtttttttcttttttgtttttttttttttctttcaggtgaactctaaagaaagcatttttaccaattgtagctcacaaaacaaaaggatctcatttctgcatcaacaactggttttcaatattaccgagccaaagtgaatccattgaccaaaataaaagagatattgaccttaaacaagctcaatggaagccattggagcattattacctttccttggaagagttcttatgatcctcgtgtttccaccgtttttctcaccggatttttcaggaacctcagcaaacagagcgtgaaccatctgtttttcgcagatatatcccaagggttgtcttcgcttgtgcaacgaaccgtctttagccaatgtaatcatcttggcaacgaacttcctcatcgcactagc

SEQ ID NO: 172516 - DNA, 477 bp, Arabidopsis thaliana
  unsure (1)..(477): unsure at all n locations
aggtacgcacgcgtgcgtgagctgggatcctctagagcggttcgcctacgcgttcgttctttgactagccgacagaaacaagaacgaccttggaggtgctagttgacgatgttacaaagtcttggttacatagcagctgatagataatttgagaacgaaatctaaacttcttttaagaatacggtaatgaaagagagtcaccaatttgttttctgcgagaggagtacatgaagccagattacgtagattgtgatagtacaggtgacactaatacagagtgctatcggacggaaaaaaacctgcttatattttattagatcgacatggattccaagttggatcatttacctgaagaagctttgactctcttgagcgaggctaaagcctaagaaggggctgagaacaattccaaagccacgaccattcgccgctggtgacgaaacccaagttagtttatctgngatccttgaaaatttg

SEQ ID NO: 172517 - DNA, 375 bp, Arabidopsis thaliana
  unsure (1)..(375): unsure at all n locations
ggggaggctgctacgcctgcaggtaccggtccggaattcccgggtcgacccacgcgtgcgggataaaatcgtcactaatccaaannattctnctctatttttgtctcctcacaaaagctctagcgggaaagggagcagtagtaggtagggccgagtatagggggtgaagggcgcgagggtagcggtacgcgctaggcaaagcggctttttttttcggggggggggggtcaagcaatccgcggccactgtggaaaacaagggcgcgcgcgtggtgacaatataagtgcatacgcttggaagggatacagctacgtattattgtgatatgttttggaggagagggacccgcggagcgccatctgcggtggtgctatt

SEQ ID NO: 172518 - DNA, 303 bp, Arabidopsis thaliana
  unsure (1)..(303): unsure at all n locations
gctctatacgactcaatgagagagctgtacgctgcagtaccggtcgggattaccgggtcgacccacgcgtgcggaaagacggaaccaggatcgtgaccgtcagggcnatagctcgtgggaggccaggatcgtttgacgatggngacccacaaactacgaatgtgtatggtgaggcagcgtggaatcgtgatggtgcggatgtggcggccgagatatgctattttttttcgggggggggggccaatatttttcttcattttcttttaaaaaaaaaactccacatacccgtattatttaaaaatt

SEQ ID NO: 172519 - DNA, 504 bp, Arabidopsis thaliana
acgactcacttttagggaagctggtacgcctgcaggtaccggtccggaatcccgggtcgacccacgcgtccggagcaaaagtacttcattcagacttcagtttaagctatggcggcgaacgattcttcaaatgctattgacatcgacgggaatctcgactccgattcgaatcttaacactgacggtgacgaagcgaccgataatgattcctcgaatgtattggggggggggcctgctccaggcggatggcttaaaaaaaaccccggggtggcggggggcggcgagggggggcgggttggggagggtgcgcgaggggggctggagggtagggagggaggggaggggggcagcgcggtggctcggcgggcagcgggacgcggccgggtgaggtgggggagggggcccagggtggttggtggcgggggcggagggcggcgcgtgttgtgcggcgggggggcggcgtgcggtggtgcggcggcccgggggcaggggcgggcggcgggt

SEQ ID NO: 172520 - DNA, 468 bp, Arabidopsis thaliana
tacgcctgcaggtaccggtccggaatcccgggtcgacccacgcgtccgaagaagaaaaatggcgggattcaccatgagcttgaacttgctttactagtagaaatggtagctacaaacagagtgtgactgtaccaactctggtgaaccccaagtttttcccagcgtacgggcgaagcacaacaccgggtttttttttctgggggggggggcaactaccgcggcgcttccaaagaaaaaaccggagcgatcggctgagaggaaaagaaccaggtctgcgaggagcgttttaatgtgtgtctttttgtagatcggcgtggacgcaagccgagactgtcctcccgtgtatagtatgctgagtcctgaaagcgggggacacggtggcgtgttttatacacgagcatacataggagaagcctggcggcgacttccgtctaccagaaactcaaaggatgtgaggaatatgtggcg

SEQ ID NO: 172521 - DNA, 506 bp, Arabidopsis thaliana
acgactcactttagggaaagctgcgtacgcctgcaggtaccggtccggaattcccgggtcgacccacgcgtccgtatttgcactctttcaagttcacaaggtgaatctgatcttactttctggtccacctctaagcacttttaaatggagaagaaaggccagcatggtacatatgaatcaatgatgactcatcatccgatcctctggataattgggtttttttgtgggggtgagggggaacccaccccgtgtgcataaaaaaaaaaaaagggggggaggggaaagcccgaagaagcggcgacgaaggggggagagggtaggcatcaatgaggtggatgggggggagtgggggagggcctggcgtccgcacgtgacgcaccaggcggggcgtgacggggggacgctgctcgctcggagtgtcttgtggggggtacgcttgaagatgcggcggggggggtgtggcacgagtcaaaaggcaggccagtagagatcgccgtcagtggggg

SEQ ID NO: 172522 - DNA, 503 bp, Arabidopsis thaliana
acgactcactttagggaaagctgcgtacgcctgcaggtaccggtccggaattcccgggtcgacccacgcgtccggtaaaattgaaagcattggagacaatggagagaataaacacgaaatgggtagcagcagcagcgagtatatggattcaaagctttagcggagctacatacacattcggtatctactcttgaatccttaaatcatctgaatcttatttttttgggggggtggggtaccacccgtggcccgtcaaaaaaaaaaacacgcgccggggtcggcggcccgggtaagcgcgcgcgggcgaatgcgggggaagggtgcgtagacaggcgaggggcgtgcgggtccgcgcccgcccgcatcagacttggttcggggcgcgccccgtgcgtcgacgcgccccgcaattgtccgctcgctggcggtcatccgacctcgcccgcgcccactccccctcctccccccctctcacgtcgggccgccccgtcgacggtattccg

SEQ ID NO: 172523 - DNA, 568 bp, Arabidopsis thaliana
  unsure (1)..(568): unsure at all n locations
cgtcagcttattacgactcatttaggggagctgctacgcctgcaggtaccggtccggaatcccgggtcgacccacgcgtccgatcaaagtggcccaaaggatncttcacgtgcctgggaacaaacaaattaatgggatcccatttggaggggaatatgggtttagaattttgggaacgtttaacagtcagggtggtataggttgggtgcgttgaacgggcgggggacgcagttttttttaggggaagtgggacatctatcaacaacattttatgtaaaaaaaaaaagctgccttagtaagaaatgggatcggatgatgtaaggaatgatgtggtgtgttataaagaaatgagtgatgaggatattgtgatgggggtttgggaanggtgtcaagggaataggaccgatgagtgagagagagggggagagtatgctgggagagaagggtggcagcgattatagagtggtaagtcgagggagaaatgagagagcgaggtgtcaggtgagcgcggagttaatgtccatcggcattgaatgggtggagtacgagggtggacacggaaagatcg

SEQ ID NO: 172524 - DNA, 457 bp, Arabidopsis thaliana
  unsure (1)..(457): unsure at all n locations
acgactcacttaagggaagctggtacgcctgcaggtaccggtccggaattcccgggtcgacccacgcgtccggacattttgcgactcttcttctccttatcctctaaatctctcaccggtcaccgacgacgggaacttggtagttacaggaacaagaaatgtcctcgaagttccctctcggngtcngcttcatcactcattctcttccttggactttttttggtggggggggttctngcccccttatttattcattaaaaaccttgcctttcttttgcaccattttttttatctcaacaattgttattgtttctctattttttttttagtggcgttgataggcgcgccgggttgggtgtgtggtagtttcgcggcgtcctacggcgtcccgtcgtcgtctatctgcgctcgtcgtctatgtgtgtatataattggtggcgggtttgtgttcgttttt

SEQ ID NO: 172525 - DNA, 447 bp, Arabidopsis thaliana
  unsure (1)..(447): unsure at all n locations
tgtacgcctgcaggtactggtctggattccccggtcgacccacgcgtccgttgtgcttcctctcgtcctcgtcgccgncnnnagagagaaaacgattaaagctggnggtataggcgaagaaaaagaggaatagatttgtaagtggtgttgggggtggttttgaggttgtgatggtgagggtgagggaaggaggtttttttttgggggggggggacctacagcacagtgtttgattaaaaaaaactgttgtggagtggggaggaatgtaggatagtgagattggagagggtatgtaatggttttaaggtgttattttggtatgattgagagagtccgaggtgtctgggtaatgttctatagggggagggaatggtggaggtgtagtttgtgtaagtgtggtgatgagtgggaggaatgtgagatggcgtgggattgtggtgaagcgca

SEQ ID NO: 172526 - DNA, 500 bp, Arabidopsis thaliana
  unsure (1)..(500): unsure at all n locations
ctccctacgactcattttaggggagctagtacgcctgcggtaccgtccgnattcccgggtcgacccacgcgtccgctttctttaacacagagaaagagcctgagagacaagtgagaaacgcaacaacaccaccgaaagagagagtccaaattctaaagagaaaaagaaataaattccttcttcttgctttattgtattgcagtgcgaaggaaagggctttttttttaggggggggggtaataaaacagcagtttatttctgtaatctgttcttctctcagccgggaatgttttttagctgtaatttgtaattgtttattttgtatatttgttatttatttattatagggattgttttgcgtatcctattgctttttttttttttttgaatgtgtttattggtggcctactgttcatcgttgtattgttttcttggctggtgttgttatgatattggcgggtcgaactctgttacatgtttcttgcgttgtataattttta

SEQ ID NO: 172527 - DNA, 501 bp, Arabidopsis thaliana
acgactcattaagggaagctgtacgcctgcaggtactgtccggaatcccgggtcgacccacgcgtccgattctatgagcggtgatgataaggcgatattgtatatgaagaggcaagatacaaaaactgaactaagaacatgcataaacatactcgcaatgacagaggctgagcatgcagaagttatatgggtatagctagtatatagaacttttttttaagggggggggttatctaaaggagtataataataaaaaaaaaggtagcgagagcagaaagttgttgcattcgctgtatttgaatctttgagttgattgttaaataatcgatatggttcaagagcaactcaccagatgataaaattaatatgatgtcaaacagccggatgtacatgattcataagatagaaaagaatgctacataaacatcttgtgtacattacacaccaatttcagttaggggtgagaattggagagaagtgaagttacaatttaataaaact

SEQ ID NO: 172528 - DNA, 478 bp, Arabidopsis thaliana
acgcctgcaggtaccggtccggaatcccgggtcgacccacgcgtccggttgctctttccataatactatacatcttcttctagtctctctctataaatacaagtttactcttcctgttcctgaaatgtgtgactgttctgtggattatgtgttgggagtgcgcggggtgcagaggcggggtggaagagggtttttttaggggggggggcaagctaaagccaccctttcacaaaaaatagccgctgcagtgcagagtggagaaaagaagagaaagggaaggaaggatgaggggagaatggagataatataaggggaagagtgggaggcggagaggcgtggcaggagttatcgcaaagggataaagtatagggactctggtggtcttatatattagggattatgagtggtgaatggagagtttgtcagttagctgcggatgcattaatacgacgtgggcgggacggtcggcttttatacc

SEQ ID NO: 172529 - DNA, 493 bp, Arabidopsis thaliana
  unsure (1)..(493): unsure at all n locations
ccagctccctacgactcacttttagggaagctcgtacgcctgcaggtaccggtccgngattcccgggtcgacccacgcgtccgctgagatccagagcttgactcctgctatttcaaaccccttcagggtttatagaatttttaggaatccgagagagaaaaattcagggaagctcattggccttgctgaatggctacacttgagggacccggcccgccagggatacttttttacgggggggggcccccccccccactccccctctcaaaaaatacccctccccgtcccaacttaatctactaccactcaaaatccactataaccttaatctcttattttttaaataagattacacccaccccctcacccccctcttttacctcctcgcccaccgcccgcacactgcacgctcttgtagttcgtctccggtgccccatccacccttcccggtccccttccctcgcccacgccggcccccgcataatgacgtcac

SEQ ID NO: 172530 - DNA, 521 bp, Arabidopsis thaliana
  unsure (1)..(521): unsure at all n locations
cgtcagctccctacgactcactttagggaaagctgctacgcctgcaggtactggtccgggattcccgggtcgacccacgcgtccggtttcttcgaatccagacacaacaaatccgaacctgaccaaaactgaaaactatgtcagcctacgagtacccgaggctctctcgttccgacattatcacggcgctcaaggatgctcaaatcgctagcgttacagagaccgatctttttctccggggggggancttggctccgggctggacacaaaaaaacgggtcgttcgggttccgcgggggtggtgccgctcgggaggtggtagggtaggtgggtttgattgggtgggcccagatcgtacggccgccggcgcggcctgcgcttgtttccagcccgcggccaacgcccgcagctctgcgttacgttagggggggcggatagcggtgtcagtaccagggggccgtcctcgtcctgaggtttatgcgagtaatgagggggcccgagccacgcggcgccgtctcccgg

SEQ ID NO: 172531 - DNA, 491 bp, Arabidopsis thaliana
  unsure (1)..(491): unsure at all n locations
ggaaagctgctacgcctgcaggtaccggtccggaattcccgggtcgacccacgcgtccgtgtcggcgagacatcatcaatggaggaagtagcgagagaagaagtanagatcgacaaggatctgcggaggaaaataaagaagacggtgaagaagatcttggaaagttcgaacttgtacaagataacagagattaaggcgcgagaagaagcttcaggtggaattggatcttgatctgtctcaagatccttacaaggtgaatcgtgaaagaagaagttgaaaatttcctcgaagaagcagtaaagttgatcggcaataaacttgcgatgcttcccaagaaatagaggccaccagtatttagatattattaatttaaaaaggctgtgcatccaaaatggggataggtttaaatggtgatcccctccaggggtgggctttggttgtcttgtttgaaagcggggcgccggggcgcggggaggggggtgggtgtgggc

SEQ ID NO: 172532 - DNA, 468 bp, Arabidopsis thaliana
tccagctccatacgactcacttttagggaagctggtacgcctgcaggtaccggtccgggattcccgggtcgacccacgcgtccgtaaatgctcaaatgttgagacattgcatatagtgaaaactccagaatgttcaaactttggtctgatttatgtagctgagagatgtaagctgctgaaggaagcttcatattgatggttggaggactaataggataggtgatgaaggttttctttggggggggcgaacactgtttaaacttggaagaactagagctgcttgatgggcgttggacacgtgtggtggggggagggggggggggggaggcggagggaggggaggggggggagggaggagggtgagtacggggggttgtgacagatttgagagtgtgtggggagctaagtcagggagatcggttggggggggtgatggattgggtattgtgggtgtgtcggcgcctgttt

SEQ ID NO: 172533 - DNA, 504 bp, Arabidopsis thaliana
  unsure (1)..(504): unsure at all n locations
acgactcactttagggaaagctactacgcctgcaggtacccngtccgaantcccgggtcgacccacgcgtccgtgagagttaagctataagagagtagaaagttggtgttaattaaagtttggatgcagaagtgtgaattttatatggatttagtattatttgtaaaggaggattatatgagaaatatgtgtaattggatatattagatagtaaagaaaaaaatttttttttttgggggggggggaaaaggaaagattgtaaaatataaaaatatatgtagagtaatgagtaagaattataataggagttatgtaatgtgtaggagtggttatatatttttaggtatgatggttttataataaggcttctgtcttgacaatagataaatgggtgctcgctaagtccgtgttcacctcgtaactattatattctgatttgaattataatatgtgcatcgctcattaaataactatgtagtgagacggtggcttcgccactctgaa

SEQ ID NO: 172534 - DNA, 505 bp, Arabidopsis thaliana
gactcacttaaggggagctactacgcctgcaggtaccggtccgcgatcccgggtcgacccacgcgtccgcgagtgagagccttttctttcggagttttcaacgcaattcttcagagaagcagaagagatgttccccattatagggttaggtctagtgcctcacctccccccgccccccatgcgcccccggcggccgcccgctgtccccccccccgtttttttttggggggggggcggcctcccccccccacatcgcttctacaaaccccccccccctcgcgcttgcccgcccccccgggtcctcggctggccggtgcatgtgtcggtctcgtcttgcgtagctctcgtgatgtgtgtgctggcggccccgcctcctccctccccctttcccccgcctgctctctccgccccccctgccccgcccctccttcatcccgtctctcctccctcgcctgttctcggccgcccggtcgcggccgcccctgctctcatccccctcctccgt

SEQ ID NO: 172535 - DNA, 515 bp, Arabidopsis thaliana
  unsure (1)..(515): unsure at all n locations
ctagctccctacgactcanatagggaaagctactacgcctgcaggtaccggtccggaattcccgggtcgacccacgcgtgcgaccacgcgtacgttattnttccaccagagacaattgtataattattatgaaatacaccaggggaacaataccaatcgaaataaacgatatgagcgggaatgtcctatgtataagtgcccgaaaaaacaatcaagtcgaggaacaaaattcctccttgggggggggggacaaacaaacacgtttaacttataaaaagacggctcaaaggctagccgaaatatgatataggcattttaaatattgggaggtaatgatatatgaaaaacgtgagaatagaaaatagtaggagagagagggttcagatatgaaggctttgtaaggagtacgctatactgaattatgtactagtgaaatgtgagatataaaattggcgggcgtggggaaatatgggaaataaccccaacaagatagtagacctggtcgtcatatagac

SEQ ID NO: 172536 - DNA, 504 bp, Arabidopsis thaliana
  unsure (1)..(504): unsure at all n locations
gcctgcaggtaccggtccggnattcccgggtcgacccacgcgtncaggccaaaaaaacaaaaaactcttacatcaataacaagtaaatgaatagatttgaggaactgagaggatgcgcccacgtatcttcacatttatatcatcaagaacgccacctcactccattgttttttctcctccttctcttctttcgacccacaccaactttttttttacagggggggcgccctcttctctccttaatgtaatcgttaattatcccattacacgttacggttacaagttcttttacgccccgggataagggtgaagtggtttattttattagtaaatcgtgtatgatatgcataagagacagggtacctcggcggcgtgtaacacccaacctctaaacttcccgcgccataatgattataatttattgtgtgttctttgaatatttaatgccgttatgcttactacacattaaactcaacttaatattgcaactacactccctccaag

SEQ ID NO: 172537 - DNA, 518 bp, Arabidopsis thaliana
  unsure (1)..(518): unsure at all n locations
acgactcactttgggggaggctcgtacgcctgcaggtacaggtccgggatcccgggtcgacccacgcgtccgcccacgcgtacggcctggaaaaaagaaagataacgggactcgagagattgagattacggagccacccactttcatggaggctgcactgtgaggtgtgtgaacccgcgaggtagacgaaaaggaggatgagcgtgaaagggggcggtttttttttngggggggggcccccaacaactcaaactataccaaaaaaatctccctgtgctggacacgtgaacacagaagtggctgggggagggattgtagagggggaggaggtatagaggtagtaggtgatgggtcgggaggcgccacggcgtgcgagcataggatagcggcgcgcggctcttggcgtccgtcgccttgcgtgatgtagtacgtcgggtcagagattgaggaaagtggaaaagtgagggttcgaggtaaatggacggaataggagaccgcgtcgctggtgacgtatttcg

SEQ ID NO: 172538 - DNA, 415 bp, Arabidopsis thaliana
  unsure (1)..(415): unsure at all n locations
acgactcactttagggaaagctcgtacgcctgcaggtacacgtccganatcccgggtcgacccacgcgtccgcctgcaaccatgattggtacagaagacagaatcttgaacccctggtcaatgttcgttaaaaaatatggtttgctgccgctcataggtaccccgcgcacccatcatccatttttctcgctctgttgccgccgagaccccgtcgctttttttcacggggggggcctatcgtgtatctatcattttcttttaccctccctgcctgacatgggggcccgtaaatttgcagcgtcagataaagaacgaaggctcatattattatatatctgttaatggtgatgcttacgacgtcctcccctcccatcgctcctgtattatctctctgccactcgccctcaacccatgc

SEQ ID NO: 172539 - DNA, 518 bp, Arabidopsis thaliana
  unsure (1)..(518): unsure at all n locations
acgactcactttagggaaagctgctacgcctgcaggtaccggtccgngantcccgggtcgacccacgcgtccggtcataccttcctttgagaaggcatgcaaggccatgtttgaccaaatagactcagccttccagaaaggtattgctgagcatacaaatgcagcccagcaacgggttgactctggacactcccagcttgctcatactctaaaggaattttttcctgggggggggaaccgcggtcacgctttgctgaaaaaaatgcgccgacctcgccagacgtcggggcccgctagggagccatgagggagaggctgcgggagacggtatggggcagtggcgaggagacgagagggccgccgcgcgcgccgcggccgcggatggcggtgctcgtgaggcgccctcgagttggtgcaggatactgactccggtcccgccctaccatgccccgctgttgcgcccaccgaaggacctgcccgtcgcgctgagtcgccgggcgggctgcccggtctcagcc

SEQ ID NO: 172540 - DNA, 503 bp, Arabidopsis thaliana
  unsure (1)..(503): unsure at all n locations
acgactcactttaggggaggctggtacgcctgcaggtacgggtccggagtcccgggtcgaccacgcgtccgccacgcgtncgcccacgcgtncgnttgcaactctcaaaccctagatcaccaccaatccaagtctccctcttcgttttccatctccgccggagctaaacccaccgtaagataccgggagtgtctaaagaatcatgcggggagcgttttttggggggggggcccctcctcccaccccctccccccaaaaacaccctccgatcctccgcacccccaaaaatataagatgtttcgtgcgtgggggggggctcacaggtggggtcgtggtggggggaagggggagcgccggggcgggcgcgggtcggtctgccggggtcggcggccgccgacccccgtgccgcttcgctcgcgggcggggcggggtggggtggcggggggcggggctgcgcgctgagaaccgccggggcgacggtgcgcgccggcgggggcggtgca

SEQ ID NO: 172541 - DNA, 485 bp, Arabidopsis thaliana
  unsure (1)..(485): unsure at all n locations
tccctgcagtactgtcccgnnatcccggtcgacccacgcgtccgcccacgcgtccggcgttcgattacagctccacagaggattctgaaatggttgagtcaaaggttctagttacagaacttttttttttttttccggttccttctcctgggtgtcttctcttttctcatgccctctccccccccagtttttttttagggggggggggaaccacaaccgcatccattcttctaaaaaatactgttctccttgtcttgcgtgtgtagctccccctgaagctgagtcgtcgtgaaaggatattattttgcatgaggtatatatggaaccacacccttctcattacctctgttattctactctgccctctccttcccccacctcctctttccctccccaccgctttggatattaaaatcgcggcgtcccgcgctccctttgtacttaacccccgtcttgctttcctcaccccgtcgctctttctccgc

SEQ ID NO: 172542 - DNA, 307 bp, Arabidopsis thaliana
gtacgcctgcaggtaccggtccggaattcccgggtcgacccacgcgtacgggcttgttaaaaaaaaaacacacatcatagtaaagtcgttgttttgttgtgcatggtccggtcatcgtattgactactaggtggcgttagagtgagcctcgttttgagatggtatggctatgtgttaccgtacggagacactagaactgaaggttttttcttttgggggggggagctttggtgctaatatatatttaatagaaaaaagttgtggtgtcatggtggggaacgtgttgtaggattagtatgggagatag

SEQ ID NO: 172543 - DNA, 550 bp, Arabidopsis thaliana
  unsure (1)..(550): unsure at all n locations
acgactcacttttagggaagctgctacgcctgcaggtaccggtccgngattcccgggtcgacccacgcgtgcgaagcttttttacttgcaagaaagagagctgacataagtacatatatcagccgtgagataagctagtgccaggatacacacaaccaagaagaattggtgcgacacagaaagccggacgaagagaaatagacggagatcggagagcacaaaaaattttttttaagggggggcgcacccccatccgcacagccgccgtgagcaaaaatgccgccacgtgcacgcaacggcaagaaagagaggagcgcgtgggtgacgaaaggaaacgtaggaggcttgttaataaagatgggggacggagtgactacgggacgcatgccgcccgcggcacaatagtatcagaaacggaggcgacacacgcataacatactccgaacctgaacgactcagtgcaacccaaagcgaaatgacgcgctctcatactccacctagcacccgcgcagcagtagagagacagagagaaataagaagggtgttggcc

SEQ ID NO: 172544 - DNA, 512 bp, Arabidopsis thaliana
  unsure (1)..(512): unsure at all n locations
caggtacaatacgactcactttagggaaagctgctacgcctgcaggtaccggtccggaattcccgggctctactgattttggtgtagcccttgtttatttgcttatgtttatcttttgatctgatctataaatatatatacaggttatcaaaaggcctccaccaaaaccaactcaacatctccgcctccatctccgcctccatctccgccgcgagttccagacgctcattaattggagggcgttaaatccgactcttttcccgaacacgatgcgtagagttgtcattcggacggaggtgtgcgtnncnatnnaatgagnttgcgggggggtggtggttgtgcgtgggggagggcgggggggcggggcgtcgccggcgggggtcgcgttggcggcgcggggccggggtggtggccatgggtgggcccgtcgtggcgcgggggcggagggaaatgaggggggggggcgtcccatctgatacgaccggaggagtgtgaggaggcggggccgcgtt

SEQ ID NO: 172545 - DNA, 228 bp, Arabidopsis thaliana
ctccctacgactcactttagggaaagcagctacgcctgcaggtaccggtccggaattcccgggttttctcactaacaccaaaaacaagtctttgaagaagaataaaaagattcggtaataataaaatgtaattctgccactaaacccctacgtaaacgatcgatctttttgaagcaacataacatacagttattttactcattatataaattggcaaatcgagacaca

SEQ ID NO: 172546 - DNA, 204 bp, Arabidopsis thaliana
tacgcctgcaggtaccggtccggaattcccggttcgacccacgcgtgcgagccatactataaaaaacaaggcgcacgtgccggcgcacgattgggtcgcgaacacccaagcaagaaacgatacaaaagcacgcgatcaatctccggagcccgttgataacgagtaatttagtgcctgttacagcgtataacgtcggagccccag

SEQ ID NO: 172547 - DNA, 424 bp, Arabidopsis thaliana
gatacgtcagctctatacgactcactaaggggaagctcgtacgcctgcaggtaccggtccggaattcccgtttcgacccacgcgtgcggaaaaaaagtctagctctcttctctttctaacattgttcagaggaggaggatttagagctggctagtccgttatgatgggcggggatgtaactgatgtgcgcgggggggagtgtgcaggattttgtgagcgggtgtgagtgtcacggtaagatttttttttaaggggggggatgcaacggggggtgatactcgcgctccgcgtaaatttgttggagcctcggcggcatatcagcgggcagtgggaatatatcgtggtgtgggatgattgggggcagatgttcgtagtggagtagggggggaggggaaggtgatgtagtaggtagtctgagtggggg

SEQ ID NO: 172548 - DNA, 230 bp, Arabidopsis thaliana
cgactcatttaggggagctgctcgcctgcagtaccggtccggatcccgggtcgacccacgcgtccgctctaaaaccctagaaactcacttcctcagtttctccaactctgtacttggtatcatcaagcgaaaccctaaaagaaggaatgtttagtgtgttgtgttgtttgttgggggtgggaccgataacaagcgagtcccagcgccacattttttacgggggggggagt

SEQ ID NO: 172549 - DNA, 508 bp, Arabidopsis thaliana
  unsure (1)..(508): unsure at all n locations
gctcctacgactcattttaggggagctgctacgcctgcaggtaccggtccgngatcccgggtcgaccacgcgtccgggaatcgcaatgggtgcgtacaaatacgtgtcggagctatggaggaagaagcagtccnntgtnatntggnnnnnnnnnagngagnggaaagcgatgggggcctgctgtcttcctctttatctcctcctttcccctacctctttttttttttngggggggggttctcccttcctcgcttttttgtttaactcccctggcccgcgcctgggcgtgtagggtatcgtgttgggtgttcggttctgcttttctctcttttgtttgctttccgttctcttcgcgccccgctctctccctttatgtttggcttagtggtgttttttcttttcttcatctgttgtgtgtggctcccttttttttttggtgctcccctcgtgtttctttcgcatctttttttccctctttctgttgtctccgccggctttccccttttct

SEQ ID NO: 172550 - DNA, 517 bp, Arabidopsis thaliana
  unsure (1)..(517): unsure at all n locations
gctctcatacgactcactttaggngaagctgtacgcctgcagtactcgtctgngatcccngntcgacccacgcgtccgcccacgcgtccggcaatctgcatgtcaatctctgcaatgtcgttcatggtgtcagnnggattcaacncanctgccagggtgagagtttgcgtccactttcctacctgatgttctccattttccttgccgctgggcccccgaggcttttttttggggggggggaatatcacacttaaccttcattttaaaaaaaccgttattcttatttttccaaagtttgtcgcctattgagaagagagtaggtgttatgttatctgtatttgtcggtcttattgttgtggcgctgggcgggcggttgtcagacatcggttgggacgctactgggacttatggaggtgagtgggttcggcccttttcctccgtattcagccggggtgcatctcgccctatgtctatttccggcaactcgggtcgtccctagtgttcacgggttattacg

SEQ ID NO: 172551 - DNA, 439 bp, Arabidopsis thaliana
  unsure (1)..(439): unsure at all n locations
tgctacgcctgcaggtactggtccggaattcccgggtcgacccacgcgtgcgtgttnctntttaatttcatttccagcctgacggtaagatattaaaaacaagagctgataacttaatcttattaacaaatggggagtattttacttgagcgatctagtagcacgctaatcacaaaagctaaagagttcgcgagggaagaacagcgtttttttttaagggggggggggacgatatgacgccacagctcccatatgaaacacaaacgtatacgcaaaattggagaagagaatatgtataggggggtcgtaagagagcgggtaaagagaaatatcagattggtaaatgatatgaaaagggtggatagaggagcagcggaggtcgtgtattaatacttagtgtgaaggagagtggtagacagcctcgctaactgtgtaatgc

SEQ ID NO: 172552 - DNA, 482 bp, Arabidopsis thaliana
  unsure (1)..(482): unsure at all n locations
tacgcctgcaggtaccggtccgngattcccgggtcgacccacgcgggaaggccanctaacaaatataataaacgatacattagacagaattctaatgtcgactctacatcaccactcaaatgcaaactttcataattttgtacacccaaccccaacaccagcaatatcaacacaaattccattgaccggatcacgcaccacagatttctctattaggggggggggccaccaaaaccagatttatataacagaacaacaccctcacaaccccaggcaccaaattaatattccacctattttaaaaattgaagtgatggcaagaatagagaaaagagagatgagaaggaaacgtagacgcaaagcacaataggaattaatcccactccattgtagcgatggattagaactgggctctacagattgtgatacatcaacataacaaaaaagcgggagctccatagcttccatacaaacaagccaag

SEQ ID NO: 172553 - DNA, 523 bp, Arabidopsis thaliana
atgattctgccagctactcatacgactcactttagggaaagctcgtacgcctgcaggtaccggtccggaattcccgggtcgacccacgcgtccgctcacttttaagcggggcaggatatcttcagcgacttgatctatcacactgttcttctgtgatatcattggattttgcgagtagcttaaagaaggtttcagcattacagtcgatcaggttggatggttgttctgttacgcctgtttttttgggggcgaggggcacattgtgcaattccctgaaagaggatagcctaagcaaatgcgtgagcgtaactgatgaaggtctttcttgtctagtaatgaaactgaaagacctggagaaacttggcgtggcatgtgtgccggaaacttagtaggggtgcaatcgcccagattcggtcatataaggtgctttcttcgctctcgtgtgaacatgcgcggcgggcgctgctcccatggccgagcgcccgcgtgcgggcgtcctcgcgcccggtcccgcttcctcccc

SEQ ID NO: 172554 - DNA, 410 bp, Arabidopsis thaliana
  unsure (1)..(410): unsure at all n locations
gggagctgctacgcctgcaggtaccggtccggaattcccgggtcgacccacgcgtgcgagattcttcaaagtgatnccccaaatatgcggtatggaataatgaaagagttcgacccagtagccccttaattcatatgccggatatatagatgagtgggggcagatgtccaatgatattcccctaacgaacaagaaagaaagcgtaaaataacaattcctcttttaggggggggggcaagatacagcccagtctaattgaaaaagaaaatcagtgtaatggatttgaagaaagttatgtgtaccaatttgagaaataagtaatgcattatattttatattatggtaagcaggatcaacgaaggagctcgatcgcctggccaaatatagaatgaggaaaagtaaaagatgtg

SEQ ID NO: 172555 - DNA, 489 bp, Arabidopsis thaliana
  unsure (1)..(489): unsure at all n locations
ctccctacgactcactttagggaaagcagctacgcctgcaggtacaggtccggaattcccggttcgacccacgcgtgcgggcaaagctaacatagccatttctcgaagtcaagaaaagataaacgatagtggcccatacacaccacatactggcaccaaagaatagataaaagatagcgatcatagcaccaaataataatcaatcttcgaatgaccaagtcagcaaaaacaagttcctcattaggggtgtgggacgaanaaacaacaatacagtattaatgaaaacccctcgcatcagaatcggcgaaagatgttgtactaacggtgacattagagaaaacataaataaatttaaaaaagttagtacgtaaagaatagcgcccatacgccgcagatcaacaatataacagagcaaatatacaacacccacataacactaaaaaaacgacaccgtttccaaatcaaaacaacgcgcgcaatatacaccta

SEQ ID NO: 172556 - DNA, 455 bp, Arabidopsis thaliana
  unsure (1)..(455): unsure at all n locations
gactcacttgnagggaagctcgtacgcctgcaggtaccggtccggaattcccgggtcgacccacgcgtgcggaactaattcacatgtatcatttatttacaccaagaattttagaacatgtggtggatcacgattcatatagtacacttaattatatattaacggcggctaccgcccattacgtctccctctctctgttgtcccacgaccccaaaaccttttatatcacggggggggagactttacccgcattcgagaaacttcaacagacgacatttgtctaccccgcgcccaccggaatatgcgaatcgagggaaaagtggggctgtcttctatatatggttttatgtttattatgcatctaatccgcccccaagtcatgatctcctctagttttcttgcacatctggccactcgctcggcgtactatacacgcctactatgaatccgtcacc

SEQ ID NO: 172557 - DNA, 525 bp, Arabidopsis thaliana
  unsure (1)..(525): unsure at all n locations
acgcctgcaggtaccggtccggaattcccgggtcgacccacgcgtgcagaggcttttataaaaaaaanncacaatacaacacggggaaaagtaagtataggcgacccagcatcggctgtaagaaaaaagaagaaaaatttagtcacgccgatagtaagcaaacaaactccgtgcatagttcatttgtcgacaaacgaaggggagttttttcttttgggttgttggcacgcacaactcgctacatttatctacttataacagctcttcaattaatagaagagnagataggaatgacaagagagaatgtgggagataaacgagtataattaaaaatatagtcacgggaagaaataggacccacgaacgtcccgacacgttgattaaatgcagactatcaacgagtcaacgaccatgcgacgaaacaattccgattatcttgtgtgaaaaaataatgagccgcctacgtctctatacctaaataattccatctctcttattatactcctaccgagtctatagtgttaa

SEQ ID NO: 172558 - DNA, 493 bp, Arabidopsis thaliana
acgactcactttagggaaagctgctacgcctgcaggtaccggtccggaatcccgggtcgacccacgcgtccgataaacagtgctttggataagtataacaacgctcctgtcagtaaaccttctgttggtgaacgttggccacaaaatgctgtagaggattcatccaatgtctttgctgctgatagtattaccgatgataatcccgatggagttgttttttatgtggggggggcaccccacacgggaattggttaaaaaaaaaagagggcaagggaggggggagggggggggttgggggaaagggtgatggagggggggtgtgttgttggagatgggggggggtgggggagcgcgcggcgggggtagttgctaggtggtttggggatgggggccgggtggttgttaatcagtagggagcgggacgggcatggacgggcgagggctgcacgatgagtacggcgggggaggatggtgagggggggggggtgtcggg

SEQ ID NO: 172559 - DNA, 321 bp, Arabidopsis thaliana
acgcctgcaggtaccggtccggaattcccgggttgacccacggggggaggccgaaaaaggcgaaaaagacggcagacgggggggggggggaggggcgcgggggacggccgaggcggtgcgcgccgcggaaagaggcgggccgcgcgcgagacgagacatatcggcgcatgggcgaggagaaggacgcggcacacggaagactttttttcgggggggggggggagaagcccggggagagctcgcggcagcagggcgcgccaaagggcagaaagaaagggagccggcgggcaacaggagtcgaggagggagagagatgagaag

SEQ ID NO: 172560 - DNA, 312 bp, Arabidopsis thaliana
  unsure (1)..(312): unsure at all n locations
tacgcctgcaggtactcgtccggnattcccgggtcgacccacgcgtgcaggggannnaaaaaaaacacaacaaccttaagaatttatttgtatatgaatagtgacagggagcggataaaaatttattaaaaagtatgtatcgcgccgaactacaactatctccaagcccattacattcacgcacaaaacaaatcacaatttttttcaaaggggggacggagcaaatatatgcacttcacatggaaaaagcgagtccgctactctgtcaacacaaatgtatatcgcgttatctaaaagagagctagtaagaat

SEQ ID NO: 172561 - DNA, 512 bp, Arabidopsis thaliana
gcctgcaggtaccggtccgggattcccgggtccacccacgcgtgcgggtgggagaaacaaaaaaccacgaacgatgaagagacgcaatggtaattggcgctacgaccgcactccgataatcaaagcggaacaatcgccgtcctaccctaactcatccactttatcagaaataggatatgtgagcagcacaagcagaaatttttttaacgggggggcgataaacacatgccccatacttgtattctcgcggacccagcgtcgggacgacatgtaagagacaaatgtatcacggcctcagtaacagtaaaaaagaaaaataagtagtaaagattaactaaaaaataagtaaacggaaccgatcaatttcaattattaatctataaagggataatcagtaataagataatatagcttttttaatgcgtttgccatcaaacagaaacaatagagggacttaccgataatcctaatgaataatgcgcacgaaaatgtgaaaaaggaccgattagcat

SEQ ID NO: 172562 - DNA, 427 bp, Arabidopsis thaliana
  unsure (1)..(427): unsure at all n locations
acgactcactttaggggagctagtacgcctgcaggtaccggtccgngattcccgggtcgacccacgcgtgcgcgattcattagaaaccaaattacaaaaaaaaacgtctatacacaaaaaaacaaatcgggagagaaagaggaagtcagactatatttttatttgcatcggttcagtgggatgaataggggtaagggttcatctcggccgtggagggcggggagttctactttcgggggggggcgggccacgccggatcaccgttgttcaaaaatcaccccgttctggcaggccggtcacatttgaggctagagaggngggtggtggatggagaggtgttttttgggtgtagtgtgggggtgtgattaggtgtggcgctaaggtcggtcaatgtttattatatatgtagaaatgtgaaatatgatgc

SEQ ID NO: 172563 - DNA, 467 bp, Arabidopsis thaliana
tacgcctgcaggtacaggtccggaattcccgggtcgacccacgcgtccgctgaattgattgctaagatcatatgtcatggtgctcaggactatactagagctacacttaggacttgcttggtagattaatggagacaaagcagggaatgaataggtaaacgaagcgattcaaagacaaaggaggagaagagggagtcctccttaagggggggggacagaaaaaaaaacttattatatgatgaaacacattgagctatgagacggagagggagtaaaaggaataagtgaggaggtaaaggaaatgtaaattttattaatgaatagagcgaaagcagtgggcaggagacaatggtaggcagagcagtgtagaattattgagatatataactaaagagaagaaatatgaacgatgaaaaaagatgagggggcaatggacaagaaaaaaataagaggataaggaggtgaag

SEQ ID NO: 172564 - DNA, 470 bp, Arabidopsis thaliana
  unsure (1)..(470): unsure at all n locations
acgcctgcaggtaccggtccggaaatcccgggtcgacccacgcgtccgtgcagatagagctganatacacancacagcggcagcggagtaaaggatgtgccacctgcgtcatcatggattgctcgaaatctattatattataactgaccgtcctatatgcaagcgaacacacttttgcctgggcgacagcgcccaacactttatatctaaaggggggggaacacccaatccaaaaggcaaatgaaaaaatagtgcgcacgagttcgcaacacgcgttacagaagatggtattgcgggtctgagagagcaggagagaagaagtgaaaatgagagtgaacagtggggatgagaccggaccaacagcgcgggagggatgtaagtacgctgaggtgctgagagatgcacgcaagaggcagatgagggatgcatcacattagagcaggagacatcaaaaaaaaaggagggagtga

SEQ ID NO: 172565 - DNA, 383 bp, Arabidopsis thaliana
cgactcacttttaggggagctggtacgcctgcaggtaccggtccggaatcccgggtcgacccacgcgtacgtgcacgcgttcgagtgaaggagccattagatttagtctggttttgagaggacgagactgcacgaattggcctaaagtttagatagaaagggtagagtgattgacagatatctgaataataagctccgaatatatacctaggaaaaacttctcatataaggggggggtgatcatcaaatttacacacatgggatcactgagttgatacaggtgtagaatatattattagtctcgtgagacagaaggagaagtagtaatggtatgtttacaagatgggatttgtggagagaggagccgacaaacgtctttgagt

SEQ ID NO: 172566 - DNA, 477 bp, Arabidopsis thaliana
  unsure (1)..(477): unsure at all n locations
acgactcattanagggaagctcgtacgcctgcaggtactgggtccgaaaatccncggtcgacccacgcgtccgcgttgatctctccttcaacaatttaaaccggtccaatcccttgattctcgcggntgtgcttaaaccagaaaatggaatcatgtttcgaatagtataggctcggctgttgcacttataactccgattgtttatgttcagctggtaacagcacgagtaaatttttttcaaatggggggggatacaacaacacgctttatctctgctactcacaagttacttgcacggttatgacaaaggtagttaacgaaacaatcgagtaagatacttgtatacatttatttaatattatcagagttgaatggaaacgccgcctttaatccgacaggatatatctttcggcgttttttatcgccgctagatatcattaatgattaggatccactcatctatcactttcctacaat

SEQ ID NO: 172567 - DNA, 501 bp, Arabidopsis thaliana
cgcctgcggtactcggtcggatcccgggttgaccacacgcgttcggcactttcttctccatatacaaaaaaaacagagaactcacaatgtgcgattcagattttgtgtgtgggtgagggaggctataagataggtctgcgttgtatactaaggtatagagttgggggatagaagggcggggagggagagtttttttttaggggggggggggaacgtggccgggtcggggtaaaaaaaaaggggattgggacgtgaggcaaggaggttatatgtgggaaaaaagggggggtgataggaagtgtaggtgagggggaaggtggggaaagggtggagaggcagggatagtgatcgtgtcggagtggtggggaaggcgtgagagaaggttgagtgtagggagagtggaggagatgatgtatttaagaaatagtggacaggctggcgttggtcgtgttagtgggtggggtgttctgggagcttgtgaggtgtagagggctgatgctg

SEQ ID NO: 172568 - DNA, 492 bp, Arabidopsis thaliana
tacgcctgcaggtactggtccggattcccgggtcgacccacgcgtccgtaatttttgccgaactcgtcttctgctgaaaaccctagatctacagatctcccgaatctcccagggagataatttgaagatggtgtctccccctctccggacaagctctgcccatgctttcggttctcctgcgcctgcacaggggttttttttctggggggggggcgccccagcccacaccctcttatgaatacacctcgtgcttccctcgcccgccccggtttatgaggtgttcgctcgaggcggttatcttattttttggtattgttttatgtttgtggtgggaccaggccgcgtctgttcttttaattggcgtggcgcgggttggcttctttgttttgtgtacgggtgcttaggtgtggggtgtataggaatgggtgtgtgtcgccctgcccgtgaatagtctgggcgagccgttgacccgcgcgcggtagattttttaca

SEQ ID NO: 172569 - DNA, 520 bp, Arabidopsis thaliana
  unsure (1)..(520): unsure at all n locations
tacgcctgcaggtaccggtccggaatcccgggtcgacccacgcgtccgctgtntttttcttanatcctcgatttcatccacaatatacaatagccaaatttccgatttgtgtactgaagagaatatggtaaaatggtaatatagagaggtgataggggtgatataaattgtgtgttagattgaacgtagagtgagagagttttttattattgggggggggggagaataatacaaggtgtatagagaaataaaaaaatgagggtattgaacagggaaaaagaaaaatggttaggtatgaggaaaaagaaaaaagaaggagtttaagtgaaaggagatataagaagatagcacctggtcctacgtcggtgaaagtatataatgaaaaaggtgtattactgtagtgtaaatagaagtagtaaaacaatagagttataaatataagtattaaaataaacgtaagagatatggtcggctgttattagcatataagtaagtgctagaaattatgattaaaaggtta

SEQ ID NO: 172570 - DNA, 393 bp, Arabidopsis thaliana
  unsure (1)..(393): unsure at all n locations
acgactcactttagggaaagctgctacgcctgcaggtaccggtccgggatacccgggtcgacccacgcgtccgaaagaatggcttctgtaccatgttccttcaagctctctgctcatcgtagatcttcttgcaaggggatcatgttgtgtgtatgtgcttgaatctcggcggcgtaggtgacgctttgggggcggagtgcgatcggggcgcgtagccttttttttataggggggggnaccactcgccccccccacacttttaaaaaagtcgtcgtttgngggcgcgggcggaaatgaggaagcgcccctgatagaatattgtggtgaatagagagtttgatgttgtggtcacgtaggactctaggagcggctccgcgggtgagttgttatgcc

SEQ ID NO: 172571 - DNA, 476 bp, Arabidopsis thaliana
  unsure (1)..(476): unsure at all n locations
cctgcagtacccgtccggatcccgggtcgacccacgcgtccgattgtgatgatgttagatatcagattggatgagtgagcatagagttcatgagatcactgaaggagataaaagagtaataaatagagattgcgaagagtagttgtataaaaaatgaagaagtgacttacacgaaaaagagagatttttctttatggggggggcacacccccacatgttgattcttcaaacactgtctcgccacgcgcggagaatacgaaataatgtttgattataaaatagaaaatataatataataagaattgttgagttagattggcaaaggaatagtgcgcgactaaaataattaatgttaaaagaataagaataatagcagtgtaatgaaggtcacattaaactattaataatcacgtggacggngtactcctatgaatatgcacaacatacttgtaacatcgagcggttgatattattct

SEQ ID NO: 172572 - DNA, 513 bp, Arabidopsis thaliana
  unsure (1)..(513): unsure at all n locations
tcacttttagggaagctgctacgcctgcaggtaccggtccgngattcccgggtcgacccacgcgtgcggttggacaaaatccacaagattggaatgaagtgtagttgacataattgatgtgtagcaaagtcagacagtgggaatcacaaggttgtagttgagacgatagagtgcacgggtgagtaccacgtttagcgggcaagtacgcgcgagattttttttacggggggggggaaaagaccaaacgaatgataaaaaaaaaaggggacatatgaagaccacgtagaaagcaaggaccgagcggtgaaataggtgcgcgcaaagcgagaagtagtaggagagagcgggaaggttaaactagcgagtatggggatggtgagaagtacgagaggagtagcgtaccgactgtgggcgttagtaaatatgatagcacaccaattgcaagatgaacgaacggtcgcgccgaatccttgtacacatatcagcgagacgcccgagtaccgcagaaagacg

SEQ ID NO: 172573 - DNA, 514 bp, Arabidopsis thaliana
caggtacaatacgactcatttagggaaagctggtacgcctgcaggtaccggtccggaattcccgggtcgacccacgcgtccgtgtcaatttctctcatgacgagtagtagtggaagcctcaaactagagatccacactgatgacaagacgccgggaaagtggagcgtaccgctcggcgatgatgttttccgaaggttcttgagcgggggaggaggctcggagaaggctgtgttcggggaggggtctctttttagcccgtttttgttaaggaagtactttgatccgtcagacgcctttccgttgggggaaattttagggtgaggttttgctggggagccttaggagcttaggaccagggtaagtccgttgggctcaaacggatcaagcttgtgtggcttaaatgcgatttgcgccgtggggggcgaagagggagcgtgtagcgatggcgggggggttggctcggcgggttagagggagctctgcggggagggggagcgtggggcggggtcagcgc

SEQ ID NO: 172574 - DNA, 544 bp, Arabidopsis thaliana
  unsure (1)..(544): unsure at all n locations
cgactcactttagggaaagctgctacgcctgcaggtaccggtccggaantcccgggtcgacccacgcgtccgtagaaatccacaatatctttcttcacactttctttcactttgaccgggaaaacaggcgggaaaatagagagaaacgatcgtggtacttttatgtgcgtagataatgttctaaataattgcatgtacatgaattccctacgcctcacaacatgatttttttttccgggggggggacgacaacacgtaccgaactttatattagaaataacccgccgcagggcgggggagggacaagattataaagtattcggaaaacgaaagtgatgacgacagaatagatgtgaagggcgccggacagaaaggcaggagtgacattattgcgtgtagtatatataagagagtatccatgtggggcgctaaacttggaaggaagttaaaggcgtgccatatgataaacaaaaaagtgagaagtgcggcggacacaaataataaacgatgggaatcatgggtgagagaacaatattgatataaa

SEQ ID NO: 172575 - DNA, 500 bp, Arabidopsis thaliana
  unsure (1)..(500): unsure at all n locations
acgactcactttagggaaagctgctacgcctgcaggtaccggtccggaantcccgggtcgacccacgcgtccggcaacaatggccaaaagctctttcttcaacaagcatttgcttctctctcttctcattcttctccaaagctgtctactctcttcttcttcaaggaccgattcagaaacgtctcttgaacttcaaactcaccggagattccaccggatatttaagcggagggggcacaacaacaaacccatgccaaagaaaaagantctcctgcaaccggaacagatgcacaccgagagggggcggagagacatggatcgggaccgggggtgaggggcggaatgaagctagcgccccgggcgtgggaggtggagtggggcgcggcggggacggccggcgggggcatcggcgagtcggtgagtcggtagcccggtaagaatcggcccgggggcggcgcgcccgaagcatgcggcggggccgctaccgccgggacccccgg

SEQ ID NO: 172576 - DNA, 488 bp, Arabidopsis thaliana
  unsure (1)..(488): unsure at all n locations
cgactcactttagggaaggctggtacgcctgcaggtaccggtccgngatcccgggtcgacccacgcgtgcggacaaagtatgagccnaataactccatcaaatcaaatctcactcatcaaactttaacatttaactatcacaatatgttttctttcgctgtcggcgcgcgcggggatgtgaccctctgtgtatggccgtactccccggcgccctttttttttgggctgttggcccgcctcccggggccttcgctagaaaaaaggggggcggccgggcgccggtgttggttcaggtgatccgtggaggcggatgcgagtagtattggtgtggttatggagaggtggggcggttcggccgtggctcatgcgcctcgaaggtctggcgcgaagttatggcgagatgatgggggcgtgtgagtttgcagagcgcgggggcccgcgccgagtacttgatggtatgttggttgggaagcgcgtgagggataccg

SEQ ID NO: 172577 - DNA, 483 bp, Arabidopsis thaliana
ctggtacgcctgcaggtaccggtccggaatcccgggtcgacccacgcgtgcgagcaaatattaaaataaaactctatcatttgaatatgagtatagaactctgacaatgggactgtgagaaagtatagggtgatttggaagcaggagaacagagaatagtgtttaagtagaattacacagatcacgtcaaactaattttttttatgggggggggttgctaaaaaagaagataccaagagaaaaaaaattgaaatccgacggcaaccatggagaaaggagtaggcaagaagtatatgaagattgatgtaataattgttggtgatgaagatgcaatacacatacttagcgtggatgtattaagtaatttattagactggtaaaataaatatatatcgtaagatccctggttataaaaaaatagtaggcgaaacaaaacgaacaactaacgcgcataattaaggaaggaacataccgaataaaagc

SEQ ID NO: 172578 - DNA, 534 bp, Arabidopsis thaliana
  unsure (1)..(534): unsure at all n locations
acgactcactttagggaaagctcgtacgcctgcaggtaccggtccggaatcccgggtcgacccacgcgtccggggaaacntannacaacncntanngcaaaaatgacagaactcaaatggatatgtgtctgatccgtagctagaactagatagaaaagatagagatgtaggctacgacatggcaatatcaagagcgtatgactcaaaagaaaagaacaaggttcctcttttgggaagttgggacacaacttcacctccgattgaagaaaaaacaactctcctaccgtttgcaaaaataggaaaggtagtttgtgatggattttttagagtggttatgatttaaaatattcgtgaggttataatggcaccacagggattgctagtcagtgatgatgctgcgagtatatgagtaggttttatccattacttatttgtatttataatattgtatagtataaaaatatgcgtagtgctttagagatatgtaatactaaggcaatcatcgaaaaccctatacaagccggatataaaact

SEQ ID NO: 172579 - DNA, 479 bp, Arabidopsis thaliana
  unsure (1)..(479): unsure at all n locations
ctggtacgcctgcaggtaccggtccggaattcccgggtcgacccacgcgtacggtcaagttattaaaggatagactattggagattagagagttaagtgagataggaaaagtaacagaaagaatataacatgatgatatgtgatgggaaaggattgcatgagattagacaatatgtataaatagataaactagcgacaagtaaattttttttaaaaagggggggggcataaaataaaaaacttatataagtgtataaaaaattggcgtagaactaagagagaaataagaagtagtgacgcgatagataagaaggagaaagtaaataaattgaaatgtgagagaatggaaatatangtggggaaaggacaagagagggaaataaattaaaggaagtgtattggtcgtaaaagtaaaaatgatagttagtgaagattacgttatttttattataataaagaggggggtagtaaggagtgga

SEQ ID NO: 172580 - DNA, 304 bp, Arabidopsis thaliana
cgactcatttagggaaagctgctacgcctgcaggtaccggtccggaattcccgggcttctacagacatcaatttctctcgagataaactaaatccttcgctgaaaaaatgtcttctgcatagaataggtgtcccgcacgtcgagctggcttcaacttgagttgtacataagaagtcggcgcagatgtgcttatctgatgtagacctgatagccggtcgaccaaaaaaattttttaacagggggggcatgtacctgcgcatcatattttttactgttaagaatgtggggagaagcatgagaaggg

SEQ ID NO: 172581 - DNA, 506 bp, Arabidopsis thaliana
cagctacaatacgactcacttagggaaagctactacgcctgcaggtaccggtccggaattcccgggtcgacccacgcgtccgttttttttttttttttttttttgtgaattaagatcttccttttcaccacaaaagtaacaaagagtggttggccatttttttatgtacactgacttctacaatctttgttgcattggttattcaagaaccctaactcctacacaggtaaactgtaggggggaggatagcttatcggttttgggggaaaaaaaggcacccctctccaaaaagaacgtttaaatcattggttggtgttaaaccgaaaccaactttttgggaatcacctgttgcctttggagaagaactaccggaaccttccaacccttttaacaagcccctcttcctcaagtactcaatgatgcccattttatgatcccttacggagcgcggggcgggcgcccccactgctggtccacttgttcaagcgcccggggcggcgccggcc

SEQ ID NO: 172582 - DNA, 517 bp, Arabidopsis thaliana
  unsure (1)..(517): unsure at all n locations
acgactcactttagggngagctcgtacgcctgcaggtaccggtccggaatcccgggtcgacccacgcgtccgtgcagatttaagcgataatacgagatcccaaggggctcacaagcctttctacgcttaatctgtaactatgccgctcagactcgagatcaagagaaaattacgccaaaggtctagaagattaggatgctgtggggaaccaagagtatttttttctgggggggggagaagctcctccaacgtgttagttagaaaaaacagggggagacagaggggagagaagaagaaggggcggaggggcgagggagtaagtattatttatatgggttaggcgcggtgaacggtaggcggacaggaggcggccggacaattattgacgggtggagaaagacgaggcatgctttggtgagtgtggcccgcaacgctgttggggtgtaaaaaccgcgcggtgggggcacagcgtgcgtatggctgtgaatatgggaagacaggtggggggaacgataga

SEQ ID NO: 172583 - DNA, 561 bp, Arabidopsis thaliana
  unsure (1)..(561): unsure at all n locations
cccccgcgctgccccccccccccccccnccccggttgattgtaggtgaacttaccagagcttgacgtcgcatccacgcgtacgtaagcttggatcctctagagcggtcgccctttttttgggttgggttttttatattttcctttttttttctttttttgcccaaaggtttattccattaaccgaacccccaacatgaaaaggtccccttagattttttgtattaaacaacgggatgatctttttttttggggtgggacaagacctttttttttatgggggaggcacaaaaaacattttttacacactatttttaggtttcatcaaagtgtggaaagagttttttgcaatacgccccagtttcagtagagggggggcacaagcttgcctttgtttgttggccctccttaattcttattgcacccaccgggtgggggtttccttttaaaaagaatttttgaacactgggtgtcttttcccccccccttcttaaaaaggctggtgggatcccacctcacatcacttatttcaccggggcctccaggtcttataaaggttcttt

SEQ ID NO: 172584 - DNA, 206 bp, Arabidopsis thaliana
actcactattgggaaagctggtccgcctgcaggtaccggtccggaattcccgggtctacccacgcgtgggatgtgatatcattagcacttgctcttttgatccttgatatccggaaagaatctaaacaacactctggtgtcttgcatggcatcaccacccacttagggatggggatcttaccaataaatgggcggaaggataaaaa

SEQ ID NO: 172585 - DNA, 252 bp, Arabidopsis thaliana
  unsure (1)..(252): unsure at all n locations
cgtacgtaagcttggatcctctagagcggccttcctttttgggggagagccccnnaccnaacaaaaacacccgccggttcccggagaatatcacctgccccctagccccacacccagtaccgactcaccacgctcacgacctagcggcaaacaacactaccaaagatctaaagctccgaccccacatttccaggaacttcttctttaagggggggggcaagagcccccggagagccgcatagggggcccctg

SEQ ID NO: 172586 - DNA, 515 bp, Arabidopsis thaliana
  unsure (1)..(515): unsure at all n locations
ttgacgtcgcatgcacgcgtacgtaagcttggatcctctagagcggccgcccttttttgttttttttaagcaacaaaagtaaactacgattatgaaaaaggtcgagactttacatgatctttatctgtctctctatgtaattgngcatctctacatgaaacccacaagataaatgcctaagcaaagaataaattgccttttctgggcgcttttttttcccaaaggggcggcagnaccacacgatccctacactctcgaatcgctgcgcccccacccgtcacagcccggcccgccccatgcccctgccctccccccccaccccccccggccccgccccccgtctaccgcaagccacgcccccacatatcctttacacccctttcccccccattccgctatccgaaggccgctttccccgctgttctcctcccgcgcgaccacgcgttagaacgccttcctcacgcatccccaaatcccccacactcgcctcgatcccgcctactcccccacgcccc

SEQ ID NO: 172587 - DNA, 496 bp, Arabidopsis thaliana
  unsure (1)..(496): unsure at all n locations
acgtcgcatgaccgcgtacgtaagcttggatcctctagagcgggcgtcctttttgtgggaaaaatccaaaaacagagacaaaacgcggcgagacgtcaaaggtttataccgtccacgtagactgagtgcgtagtacgcgcacccagggaccacgaaccacaaactaaggcagagcactacgagatttgacgagcacgaagccccgaaaggaagaaaaacgtttttttaaagagaggggggggaagggcccaaacaggaccgcaaaacagagcaaagggaaagggcngcaaagacaataaggcaaagataaaatctcaagcgcgcagagaaccgacgaagttagatagtaaagttcaaccagaaatcgtacgagacaataccgggcgcacacggcattgaaggagccggacgatagatctgcgtggtgaccgcaaagacgaaaactcagaagtcgcgggggcccgccaagacgcacaagcccgctacaccctgcagg

SEQ ID NO: 172588 - DNA, 507 bp, Arabidopsis thaliana
  unsure (1)..(507): unsure at all n locations
actatgggaaagctgatccgcctgcaggtaccggtccggaattcccgggtcgtcccacgcgtgcgacctcttcgtgctcgtcccctgtcgttgctctttcttcctctacatcgccacattctcttggaagcgncgcatcttctcctctgtttcctcactcctccttcgggcttcagaaaaaacatcccatcaatgggacgagcccgaggatgattttaccaaaatgggggggttctgatgcanctcaattgataagcgctaaagaagatctcaaagttctttctccggactaagttctgccatcccatcttggttagattggggggggcaccatgctggacttaaaacaagaattttggggagcggcccactggagggtggcgctaatggagtcttagggttggggctgatcttaagaatgctgaaatggcggtctgttaatgcttaaagctcatccccccctaaaggcagggttccaaccttttttagcggcctatcccaggtagt

SEQ ID NO: 172589 - DNA, 497 bp, Arabidopsis thaliana
cctgcggtaccggtccggattcccgggtctaccagcgtgcggactctggtatggaaagatgggcttggcaccaaaacttccctcacctaaaggaaaaccaattgaaaagtctggacctgaggttttagttgaacaagcgaagctttgccctgctcaaaccaccctgtcccttttctgccgccgtttcctattttgcggggggtggcaccccccccccgcgcctgtctcaaaaaatccctaccccgcgcacgcctccacgtcccgcctcctcgcccctatccagccccttcctttcaccggctatccctcctctctccctcggcctcccctcacttctccatgcacaatattacttagatctaccgatctgatagtgcccagatgctttatgtcccgctgactttggtagcctggccccacccccccgctcccccccgcctctaccactcccaggatacccgcccacgcgctgccctccctcccacccctctccctcc

SEQ ID NO: 172590 - DNA, 466 bp, Arabidopsis thaliana
  unsure (1)..(466): unsure at all n locations
ttgacgtcgcatgcacgcgtacgtaagcttggatcctctagagcggccgcccttttttttttttttttttttttttttttttttttnnaaacgaggacaccaccgcgaaacaaagaacgggaggagaaaggcccataatcatacatctcctaatttagctatcttgcatttagaaaatcctttggcgcaagtattcattctattaaccaatatttcccgcatttttttttttttaaaggggggtggtgtaagcaccncacccatgttcttgttttggttataaaagaaacgccgcgatgcggtgtattaagactagatgggccgcgctgtggttccggatgtagacggcgtggtgcttgcttgtggtgagcggtggtgttggcccgcgttgtgtcccgagtgagctgaatcgagagaaatagcatgctgtgatgttgggtgctttggctctcagttcccgtgtctc

SEQ ID NO: 172591 - DNA, 548 bp, Arabidopsis thaliana
  unsure (1)..(548): unsure at all n locations
ttaggtgaaactatagcaagactttgacgtcgcatgcacgcgtacgtaagcttggatcctctagagcggccgccctttttttgttttgtcttttttttttttttttttnccacaccataaaaaatgtattaagaaaatgaaccaagacgaatcctcaaaatccagaaactaaacgattggaaaattctaccaaacataaaaacccaaaagcctaaacatacacacaaattgggtatttaaaatggacgggggaagatagaatccaaagcacatttctcctaaaccctctccgtagcagaaatctcaatttgtgagggcttcaccgtcttcttttttgggagtgacttataggccatggaggcccactatcaactggaaaggcccaaaaaggttccaatcccatacttggggaggcggaataaatcggttctgaagatcggggaggaagtagtccaatccccggctttaccgaccccgccagggaccacaggaggggatggtctcacacctttttggttttaccgcttcgcaatgggcgccccgggcgg

SEQ ID NO: 172592 - DNA, 548 bp, Arabidopsis thaliana
  unsure (1)..(548): unsure at all n locations
cgtacgtaagcttggatcctctagagcggccgtcctttgtttttttaaagaccgnntcgccacgtgaggaacaagcagacggaggaaagggtttggagagaaagaaacggggggaggacccgcggaaaaggtgacgggagcaaagaggggagcgtacacgcgcgacaggcgagagcacggaccggaagagcagggggtttttgggggagttcnatacttaaagaggggggggcacaagacacaagaaaagataagaaggagagaaacacaggccacagagggagccaaaacccaaaacggagcacggaacgagcaacaaaacacggcgcaccaccgcaaaaagcagaaggataagaaggaagaccacccgaaagataagggaccaacagggcgagataggcggcgctgtccccacagcgaggaaacgcggagcggccagagaccgagaaacagggtacggaagcaaagtcgaaagcgagatgacacgcgagagactccagcatacggagagaaaaagcgaaacaagacccgccggtacgcaccacggc

SEQ ID NO: 172593 - DNA, 516 bp, Arabidopsis thaliana
  unsure (1)..(516): unsure at all n locations
actttgacgtcgcatgcacgcgtacgtaagcttggatcctctagagcggccgcccttttttttttttttttttttttttttttttcnggaggcaaatataaataaataaaaagaagaaacaatttattatcaccaaaagaattaaacaagaaaataatactctttggtgaatcttcaccttaatgactcagatcaggttttgactattaaagaacatcttatatatggggggataaactaaacattagtattaatcttctggagtattgccgttactctatattaacaaccatcacagaagttcatcaagaaccgccttccctttatacctctcggcgttaaatgccatgtgccgcatacggcgcccctatacctccaactcacagaaccgtcttctagagagccacgacccttcaccccaaggccctaacccccctgcgcctccgcgccgcgcggcccccgtcggacccacatcccagctgagtccaaatcaatcccgctcgtcccccctcccgt

SEQ ID NO: 172594 - DNA, 540 bp, Arabidopsis thaliana
  unsure (1)..(540): unsure at all n locations
cgactcactatagggaagctggtccgcctgcaggtaccggtccggaattcccgggtctacccacgcgtgcggtagagttttcgaaaccagcgagattaatggcatcttccaccggtctcaccgtcgccggagctctgcttgccggagattttcgattaccagctgtatcgnctctaatacccagaaagacttgttgttcattggcatgccttagcaactttttttttcggggtgtggggacccctaanggcggatttcccgagaaaaaacgcgcccctgcggtgccgcctgagggcgcggcccgaggcgggtcgagtggctcggagcgtcacccatcaaccctcaatcagggccacccctacctctctcgccgccagcgccgtgaaggagtattgtggtacgggngaccctcgaagtgttaggattgggagggagggagtgcggtgggcgtggggnggggcggcgccgggcggtcgtccctctccgcctcccgcggtggtcccccgaacggcccccccgtcattctggaccacctcgctt

SEQ ID NO: 172595 - DNA, 535 bp, Arabidopsis thaliana
  unsure (1)..(535): unsure at all n locations
atagcagagctagacgtcgcatccacgcgtacgtaagcttggatcctctagagccggttcgccttttttgttttccgccnacaacgacccgacacgcccgcgcgacgccccagtgctatggcttcgtgaccctgacgacacccacgcggcgcccatccaggaggtgcacgcacagagttagctgaagtacgagtccacacggccagaactgcctagaggtttttttacacgcgggggggtcccacgaggccaatgtgcaggttaccagagcgggacccactagcaatcgtagtagaatcccncctcatccactgctgtttaccgtcaactaaattaccaccactcgatcacggcggatgacataagcaaatacgcaataaaacactgcaacgcgccatatgcaagtaaaagcgaacaaccccacgctggagaagggcgtgctcgacaaccatatgacatagcgaagaaacctacatacaacgatgcgcccaataaagactcagcccagatgtatgatatatcaccatcaaaccac

SEQ ID NO: 172596 - DNA, 524 bp, Arabidopsis thaliana
acgactcactttagggaaagctgctacgcctgcaggtaccggtccggaattcccgggtcgacccacgcgtgcgcccacgcgtccgcggacgcgtgggttcccaaggatccgcattgttgaagttccgggcaagagtcaactcagatcctcatgggactcttgcgaattggaatgtttctgggattaatgatctctgctattggtcaggggttacttgtgttttttggaagagggggggtcctgacactttcggttctttgtttagaaggaacgcccggtctgggggctaggcgtgggcccccctgatcgtccgttgtgcggggtgcgggggtagggcgccgggggcattgcgctgcatgggggggggggagacgacaggatgtgagcgccttgccttgggggcggtcggtcgggtgtgtagctcggggtgattggtagagatagccaccgcgacccctcctccggtggccggcgtcgcgcttgcgcgacgtgggcgcgcgggtgctgctgttccggtcgggctt

SEQ ID NO: 172597 - DNA, 531 bp, Arabidopsis thaliana
cgtcgcatgaccgcgtacgtaagcttggatcctctagagcggccgtcctttgttgggggaaaacccccggaccccaacaggatgagcagaggaggacgggcgggcttcacacgggaaagcacgaaccgcggccccccgaccaacagccagggacgcaagaacaaacaagaaggcagaaacccggaccgagagagaggccatacggacccatagaagggaactttttttgtgccgagggggcgggcgaaagagccagcccgaccggctgaggccggacacgaaaggcgcgcacagcaacaacagaacgagagacccacctgaaacgcacaatgcgcgagccgcagaaagcacagacgcgacaccccgtagtccgccaaccggaaccggccacccacgcacaaaaaccgagacgacaaccgaccgagccgggagcaacaaggccagaaaccgcagaggggacgggcgacagacgcagtagcgcatggccgaaaaagccaaccacaagaggacatccccaaaagagaccacgta

SEQ ID NO: 172598 - DNA, 551 bp, Arabidopsis thaliana
  unsure (1)..(551): unsure at all n locations
gtcgcatgacccgcgtacgtagcttggatcctctangagcgccgtccttttttttttttttttcggaactcttttgtttttatagatgtattcagtattttcttggattgcgtaggttacaaaggcaaagaacaaatgaaataaatagtaatgcaggttctgcgttgacacatttccagcattagtgtgcgatccaaacgaattttcgcagacctttttttttctggggggggtgggcgcccccaaggaacgtcgcgccggaaaaaaagcggcccccccgaaccctcaatctagtgccgcaccccaaccccaacccccacacaacctcaaacctcccagcactccacgcccctaccccaagccagaccgccaaccccaccccagaccaacccccccccacacaccctctccatccaacaagcccatctccacgtacccaccgagcagcctgtccacaccatcccctccaccgtcaaccccgagatgctagccgcgacattcccggacacctcccccgctcccctccatcattccaccagaaacccctcact

SEQ ID NO: 172599 - DNA, 507 bp, Arabidopsis thaliana
  unsure (1)..(507): unsure at all n locations
agctggaccgcctgcaggtaccggtccgngattcccgggtcgttccacgcgtgcgcctatttcctattatataatctctccgaccatcataatttgaccgttggagaacattactacttttcgcaaaagaagggaaaaaaaaagagagagataaagctctcttcgattcttttgcaagcttctctcctacggattgttgaacctttcgtccatttcgggggggggcgagcccccccaaaccccctttcgaaaaaacgcccactgtcattgtcctgtctccatttcctctccttcgtcctattttctgctctactgtcttatatctcctctccttactgctccctccttatcttccattcaccactaagtaggatgttatgtaactacgcccaccttctctttatttatttttttttaatttttttttctaagccgaaccacccccccccttctcacaactccttatcgccgagccctgtcctcctcccctgtactacccccccccat

SEQ ID NO: 172600 - DNA, 553 bp, Arabidopsis thaliana
  unsure (1)..(553): unsure at all n locations
cgactcactatttggaaagctggtccgcctgcaggtaccggtccggaattcccgggtcgacccacgcgtccgattcatcacaaccacaagaagacgattttttattcttgtttccaaactgaatctgagatgggcgagccactaggactgctccaggtgactgttattcaaggaaagaaactggtgatccgagattccaagccaagcgacccttatgcgatttttttctagggggggaggcacccaagaccaaagccgatcaacaatatgcctgaccccaggctcgcaccgcagtccctcagcccccccttgccaccacccccgcgcaccgtcccccccttcattaccctccgcccccgccccccgccgtgacctacgacccccgccgtggggnggagataattaaactcaccccccgccccgtctaacaccttgatatctatatattctcccccctcctctgctcccgcgtaagcgagacacccccgcccccactactcctcatctcctacctccccatctcccccccccttcagtcgcacccccatcgccg

SEQ ID NO: 172601 - DNA, 542 bp, Arabidopsis thaliana
ctactacgactcatatagggaagctggtccgcctgcaggtaccggtccggaatcccgggtcgacccacgcgtgcgtaattgacaactgtccgcaggtgtacagattgcaaataaataatgggatccctatcaaaagttggtacgatgatccaactgatgatgggttgattactatacttgggttgttagagactctagggtgtaggatgccattttggacgcttccttctttttggggggggggaaccccccccccacctcttgtgactatactatctagaggacttttgattttcctggttatgtgtcttttcttggtgtatgtagcctcatgctctgtcgtgtaagcgttctcgtctatatcttatcccttcgtctggcgcgttttacagatgtgtttggccctcaccagatctccctgcttattttgttgtatttcatgcagagttgtgtgtggagcggactcgcggacctgtcgctcttctactcctccgcagtttgttgccgttcttctctcccgttgagttcttgtctatctgttt

SEQ ID NO: 172602 - DNA, 517 bp, Arabidopsis thaliana
ggtgaacttatagcagagctttgacgtcgcatgcacgcgtacgtaagcttggatcctctagagcggccgccctttttttttttttttgttgcatcaatatatattagttctaaaacgaggataaaattttccaaatgagacataaaagcattatccatctctagcttaatacaacaagcaaggagataaaaacaaaacccagtaaataagtcttaatacacaggcactactgttcacagttcctggatgaggctggggtcttttgtttcttcggcatgccggcaccaccaacaacacaggcatgggcaccctcaaacgggtcgagagtcacctgcagctgctggcttaaacctgtgctgtggggcaggtgtgcacctagctctggaacactcctgtgcccccagagctgggacacggtcccacggccaccttcggaggctcgcacccgtccatcgccatatgccctagcccctctccgcaccccctccgccggcccccccatatgtcccgaaccccg

SEQ ID NO: 172603 - DNA, 520 bp, Arabidopsis thaliana
  unsure (1)..(520): unsure at all n locations
ctgacacgcctgcaggtaccggtccgngattcccgggttgacccacgcgtgcggcctcacagacatgcgggagtgtttattgntaagggtaaagaagatgctgttgtcgctaagattgggctgggggtaggaagatttggcgttcggcctgcgaactgtgtccccgatgatctagcggggccggagggaggtttgcgcggggtcctccctttcgggggggggaacacgggcggaccacgttttccccctttgtaagtctcccccgatgatggatggtgcttggtgttcgtggttctggtccatgccagcgttgtcctgtggccgccgcgtcgtgagtatgtgtaacattctccctcgggtggtctcccgcaggcggcctccggggagagaatttgtaacgtctgtctgaatagtcagcgtggtggtggttggttggaagcgtggttgaggaatggttaggaggaaccgtcgggtcgtccctatcgcgcagtgttgtgtggaggcgccgcaccacccgccc

SEQ ID NO: 172604 - DNA, 555 bp, Arabidopsis thaliana
agctctctacgactcactattagggaagctggtccgcctgcaggtaccggtccggaattcccgggtctacccacgcgtgcgcaactagatctctcttctcctctgctcgttcaatgttataacgatctcgagtatcacaaaagaacaagatgtctattcgaagaatctaccgatgtctgaattctttaatcaaaagatcttgtgctcaatctctatgatcatacgccctatttttcactttgggtgacctctcagcttttttttttcggggtttataatcctcctccgtggtgtcttccttctcgttctttctctctgtttgccgcctactgcttagtctgctcttgtacgtagcgctcatttctgtttactttgctctctattcgtgcggccggttatagtattgataagcccgacgcaaactaggcttttatcaattttttttctcttatttagtagattataaggagagtccgccgcattcccactccgtctacagccgttccgtgtaattatgactcttcctctccccttcttttacacttacccctacct

SEQ ID NO: 172605 - DNA, 463 bp, Arabidopsis thaliana
  unsure (1)..(463): unsure at all n locations
cgcatgcacgcgtacgtaagcttggatcctctagagcgggccggcccttttgtgtttaaacccctncnncnnnnncagnagcaacncatgcataaagcgatgaaatgcgagaagagaatcttcgccgaagaaaagaatgcgaggaacatatgagagggaggggaagcgggcacagaaaggagccgggcccgcggagcctacggagagagtttttttaaagagggggtggggccccgcggccggaggcagccccagggacgcccccacagccgccgggcgacacgcaccgaagcccgcgccagaggaccaccgcaccgccgccccccgaccaccacgcaacaaccccacgcaccagaaaacacgaaccgccacaaagccccccgaaacgaccggcagaagccaacgtgcgacgagcccccagcacagagacgaacccggaaccccggccacagaagccaggcca

SEQ ID NO: 172606 - DNA, 519 bp, Arabidopsis thaliana
  unsure (1)..(519): unsure at all n locations
acgactcactattgggaaagctgacacgcctgcaggtaccggtccggaattcccgggtctacccacgcgtgcgcccacgcgtccggtttttcttgttcttcacggagcttctggtttgtctgagaaccttatcaaggaatgcattgagaatggagtgaggaagttcaacgtgaacacagaagtaagaacggcttacatggaagctcttagctctgggaagattatccgacattgggatgtcatgtccgcaacaaaagcagccatgaaagctgtgatcgcagataagatccgtctctttggctctgccggaaaagcttgagttgttgataaaaaaatgtccgatcaattagttaagtacaattgtacatcacatccaaagaataaaaaaacaacaaatattacatcacatccaaagaagatgaatgcattgtatgcaatgcagatgcagnggttgttggaaaaaaagaaatcatttttagtactggttaactgttttttttctctttttctccgccaaat

SEQ ID NO: 172607 - DNA, 544 bp, Arabidopsis thaliana
gtcgcatgcacgcgtacgtaagcttggatcctctagagcggccgtcctttttttttttttttaacgtgaactgtagtataacattgaaagtagctacaatggtaaccaaaggtttacaaataataaagactatttaaaactgttttgagactgtttttgtttaatgaatggcgggaatgactcttgatgagtaaattttggagcatttttttattccgggggggggaccacgcaacacgaaaccgaacaaaaagagaaactcccgtgaatgcatatcacccactaattaatctttcccatgatcgcctgacccaccacaacaccacctattcccttattatatccattattactctttagattttattattcaattaattctccactaatctcgtcatctgttcgtattactacttgagcacgtcattctatatatccgcatactaggagaatttccctttaaatctgtactcacccccctagtatctcccaatctctctcctcacttcgacacatagcactctcatatgaccacatcatttca

SEQ ID NO: 172608 - DNA, 473 bp, Arabidopsis thaliana
cgactcactattgggaaagctggcacgcctgcaggtaccggtccggaattcccgggtcgacccacgcgtccgcggacgcgtggggcacgcgataacgggttattggggcggagttagacccggggaagaatacggatctgttatgaaatatcctaatatgtcaaagggtgtggtggaaaatgatccaacgctgaagactgatgtaatgacgctgccaggtttttttttgggggggggggagaaagcccacaaggacttcaatgagatacattgctccttaggctgatgcttggcgttgttcggtctcctattttttttatttccctttcttttccatatctctacacctctcttgactttttccttgctcttccttgcactcggcattctccccttatgatatatatctataacaagtctcggacttggtctactaagttttttactggttttgtttttatgttttattttgt

SEQ ID NO: 172609 - DNA, 308 bp, Arabidopsis thaliana
  unsure (1)..(308): unsure at all n locations
acgtcgcatgcacgcgtacgtaagcttggatcctatagagcggtttgccttttttgtggaagccccccaagtccgcttttaccgttttctatgtaggttactcgtggacatcgcaaacgtagttttgtcctggccaccgcgggcgctctatcgtccagacacaggcccagcgtctatatcccacattcccccgcgtctgggcggcggaggttttttttatgagggggggggtccgatatataactccgatagtgcacctgtggagngcctcaactactgccgcttcatgcttttttccgaattgcacg

SEQ ID NO: 172610 - DNA, 530 bp, Arabidopsis thaliana
atagcaagagctttgacgtcgcatgcacgcgtacgtaagcttggatcctctagagcggccgcccttttttttttttttttttgggaaacatccatttcatttaaccagaaagcatggcaatcttttctttgaacaaatctccataaattacagacaaagataaagccggaaacaagaaaatgttgcagataaaatctaacaaaagaaagaacaatcgaaaaactcttcttctccttgtgatttgctcacaacaaaacctcttcttcagagcctcttaaagtggctttccacttgtcttgatatcatttctgattgctccttgaatcatcttaacgatcaaatactgagcgcctatgataagagggatgagtttctttcttttatatcagaggaagagccatctaccatggtgttggctacagaatcggttagctatgggcgcggctgcaccgccccagagctcacagagacccaggggacccgcctgccgctcctaccgcacgccagtccctccttctgccccggagccc

SEQ ID NO: 172611 - DNA, 207 bp, Arabidopsis thaliana
gaaagctgagaccgcctgcaggtaccggtccggaattcccgggtctacccacgcgtgcggcttcctccaaaacctcaaacgctcctcacacaacgggtttaggagtgatggggtctcctcgtcgtgaatgggttggttcttagccagtcccacgacctccacacacacacaccctcaaccccccccccaacctgcacccaccaaacc

SEQ ID NO: 172612 - DNA, 525 bp, Arabidopsis thaliana
  unsure (1)..(525): unsure at all n locations
gctgcaggtaccggtccggaatcccgggtcgaccacgcgtgcggggaacttcggttgaaagntgctcttcgtgctgcaaagggactttgtttcacttaacagaaccctacgacacgaggcgaaacaccggagatcgcaagaccctgcaccaacgccgcgccaactcggccgggaggcggcgccttcaacaccgacgaaaaaggcttccctccatttgggcatgttngggaccccacacaaacgcgccccccacaaaaaaaaaaaacccacacaccaacggaggacagtggtgacgaagcgacatagatcagagccaaacggacgacgcacggcaccgcgacacaaaaccagcagacccggcgcagcgaacgccgcaggcgcagcggccgagccggacgaaagacgaaaagaagagacacanaaggccaaaggacaagatacagagagagagaaagaagggcgagcaaaagaagcgaggagaggaagggccacgcatcgcgctcagacacaacacaacacccacga

SEQ ID NO: 172613 - DNA, 432 bp, Arabidopsis thaliana
  unsure (1)..(432): unsure at all n locations
cgactcactattgggaaagctgatccgcctgcaggtaccggtccggaattcccgggtcgtcccacgcgtgcgagttggcagactacattgttgcatctccgcatggactccgaaggaaaaatgcatacccttcagaaatcgtggaagcactagctactcatgtatctgattccctacatagcagagaagtcgcggctgtatatataccatgtatcgatgaggtttgttgttgnggggagacncccctcatttcatcaaaccggcattacttcggatagcattgcttgaaaggctcgggttgaaccgatgcgcaccatgtgggggtgttgcagcgtctgatggtctactctaggtcgcgcgtgctggcgcatccgttggccgtgcccgatgccgcgcagggagagaaatgtgtgttccccgacactgtggaga

SEQ ID NO: 172614 - DNA, 527 bp, Arabidopsis thaliana
  unsure (1)..(527): unsure at all n locations
atagnagagctttgacgtcgcatgcacgcgtacgtaagcttggatcctctagagcggccgcccttttttttttttttttttttttagatccaaacacactacattaacattcttcaacctctcatagattttcaaataatagagaaaatctttcagaaactatgttcatctcttcatttacaaacactttgaaccacccaaaactcaaaactaatcaagaacacagacacactgcgggaagatcagagcanaaaaaaacaatatcaaatgttgtaatcagtcgattgatttacagagttgagagtttggtttttagttagttagcattgcatcattcaacactcggtttctttcctttcatcattctcatcacgagtcaagcgccagctcggccaagccaaagaagatgatctaagctccgctgaaatagacagactgattctgctctccaatgtctcgcatagctcttgcactgagggcttgttggattgttgttggtgtggnccgatccccctttcaggcttggg

SEQ ID NO: 172615 - DNA, 524 bp, Arabidopsis thaliana
gctctctacgactcactatagggaaagctggcacgcctgcaggtaccggtccggattcccgggtcgacccacgcgtggcggtctcaagtcccttcatatggaacttgatcctccgtttacaatctctgagctgagctcaaacgcaatttatctcacagaagattttactcccaagctggttgatttcgaatgctggaagacaattcttgcaagatcagaaaagaatttgagaaatattaggagccagggttcgatatgtgtactcccaaacggaatggagagccgatatcttgatgtggcgggtaatatctatgcattcgggattcttttgctggaaattgcagcgggagacctgcttattgcaaagaccaaggattgttaattgaatgggcaaagggcgggcttggaggccagagctttggtctgttttggggagtagagtgtggagaggggggagccggaactcttcagcctggcctcctacgctcgtgctcatgcacctcgggccccgcccctgcctaccc

SEQ ID NO: 172616 - DNA, 191 bp, Arabidopsis thaliana
gcctgcaggtaccggtccggaattcccgggtcttcccacgcgggggggaggcgggttactagaatcaccggctcttaagcatgggagacgcttacaccagtcagcgacacggccagtccccacgcagagattattagacgggtcggcagtcgcccgctgatgcgagcgatgtgtaacatgcatccggttct

SEQ ID NO: 172617 - DNA, 512 bp, Arabidopsis thaliana
  unsure (1)..(512): unsure at all n locations
acgactcactattgggaaagctggcacgcctgcaggtaccggtccggaattcccgggtcgacccacgcgtgcgttcttctctgctcttctctctctgtagacactagaagaagaacaaaaatgctcaaacagtttcttcttctccaatccttctccttcttcctcttcaatgtagntatcggcggaggaagaacattcggcggcggtttctcagcggaggagttccatttacggggggagcatctctaggtcgttactggaacaaagagattcgtggccaatcctccagatcggagtttttcacctcaaaggctgtacccctcaacgccggagactcagcgactttgctcaaaactggtcgccgggaactgcgtggccgctggggtgagcggtgtgtgtccgcgcgccgatgccggctttgtgcgtgttcggtcgtggagcttaggggcgcgccgccggcccccctcacgcccgccgtcgccacccagcgcacatccccacttatcgcgcgc

SEQ ID NO: 172618 - DNA, 561 bp, Arabidopsis thaliana
  unsure (1)..(561): unsure at all n locations
gcgtacgtaagcttggatcctctagagcggtcggccttttttgttttattccncnnaacnaaaaacgcacacgcagacgcgggagatattcccggccccccatcggaggcgaccgagcaatgagacccgcgggccgtcgagcagaggggcagggaggcgcgggtaggcgggcagcgacgagaccgcttttaaagaaggtttttgatttaggagggggtgcgaaacgcagccacatgagccagaaggtagaacaagagccaccaacgcccacagccaacggatcaacacgcacaaaaaccagaagactcgaccatcccacgacgaaccggcgccaaatcaacacacaaaacgatggaccaaagacacgagaccagagagaggccagccgagaacacactaccgatatgcgaacaccgcgaatgcgcagccgggcgcgagcgccccgagcagaaaagcaccaacgcccgctataacctaaaatggacagcgcgcagcgcgcagcacagccccaagtacacccacgaaatacgagcactaagtcccacaaaaaccaaccaaaaa

SEQ ID NO: 172619 - DNA, 535 bp, Arabidopsis thaliana
  unsure (1)..(535): unsure at all n locations
gtcgcatgacccgcgtacgtagcttggatcctctangagcggccttccttttttttttttttttttttttttcaacaagtgaaaccatacataaactaataacattcaacaagacaagaatgttagcatttaccataacccaaaacaaatcgaaagctggtttagacaccaggaagaagaagatagcgcaccaaaggttaaaaccgtttttttttttgaggggggggacccccccgcacgtgtcgtcgagcggggagggagccgcgggcccctacgtggagcgtccacgcggtgctctagcccgagacgctcgcgctctcccgtcccgctacatccgctcccgagtgccctaccgtgaccgttgaggatgccggacttcaatcgctccactcgctcgcggtgccatcaggaaattatcgtgaccgctctttcctcactcgcatacctccagccatctctagatgtatctggaaacgataaatgccgataacccgccaatttccatattacccgctgattctcgcactcctctctt

SEQ ID NO: 172620 - DNA, 158 bp, Arabidopsis thaliana
cctgcaggtaccggtccggaatcccgggtcgacccacgcgtgcggtccgaataagaagtgtgtttgaaagatctccaaacactgttttataacctctttggtctctttgatgagtattgtaagtgaactgatgctaaaacacgagaaccgcgtaaata

SEQ ID NO: 172621 - DNA, 498 bp, Arabidopsis thaliana
  unsure (1)..(498): unsure at all n locations
tctactacgactcactatttggggaagctgatccgcctgcaggtaccggtccggaattcccgggtctacccacgcgtgcgagaagaagaaaaaaaatcatggagatgaccgaagcttccaaacagacaacagcagaaggatcagcaaatccagaaccagaccaaatcttgagtccgagaagatcgttggagctaaaacaaaagaaatgggggatctctgttnctttttgatccttttagcgggggtcccccccccactagacatgcttgtttagaagtcgctccctcgtcaccgcgatcggcggtactacctcccgtctacctccagcgcgtcgatgttctatttccgcttcccttatcacctgcccccgcctggcgcccgtaatgttattgtacggtctcccccgttccctcttttgtttgttttttgtttttcttttactctcttggagggtgtctacctttcccctctccctaaccgcccccgcccaaactgtcc

SEQ ID NO: 172622 - DNA, 367 bp, Arabidopsis thaliana
  unsure (1)..(367): unsure at all n locations
cactattgggaaagctggcccgcctgcaggtaccggtccggaattcccgggtcgtcccacgcgtggcggccgacgcgtccggacaatggcggaggagcaaaagacgagtaaggttgacgtanaatctccggctgttttagctccggcgaaggaaccgactcctgctccggtggaagggggggatgagacaattcataatccccccttccgtcgagtccaattttcttgggggtgtaggaaaaacccatcgagggagcctacacccaaagagaggcttcctcttggtttcggccgattagagatgccaccccttgccccgctttgggaaaaaggagaaaaaaaccgttttttccatcaaagggttggg

SEQ ID NO: 172623 - DNA, 497 bp, Arabidopsis thaliana
atccccgagctttgacgtcgcatagccgcgtacgtaagcttggatcctctagagcggccgtcctttttttttttttttgatgcaatgggaggtgttatcaaagacaatgactctgcaagcgatatcaagaacctagtcctaactactgtaagtgggttttgtgagaaacatgtgaaaaatcaataatgaaacaatgagtttacttttaaagaaaaacaactttttttgatatattgggcggactcatcacctaagggggccgattagggattgagatgcggaaggttctctttcctcaccccctaccctctctccccgccagccccgcctaccccctaggcttgcaaacagagccccccccactcctcccgtttccccgcccctggccgtcctcctcgcgcccgtccctcctgcccccccccgccccctccatgtacaatgttcccagatgaccccataccgcgctatgcccctcgttcccctctaccagccctcgc

SEQ ID NO: 172624 - DNA, 492 bp, Arabidopsis thaliana
ttgacgtcgcatgcacgcgtacgtaagcttggatcctctagagcggcctgccctttttttttttttttctttttttcccacccaccccccaacacagcctataataaaatcttattgaggggagttaaccgccaaatttgggcagcctactcttttataaaagaggggggttaataagaaacattactgtatttgaaaggaattgttggacgactttcatgtttttaggggggggggcagacacacaataaaaggcgtggttggagaaaaaggtgcctcttcgtgtgggcgggaagagatgcggaacaccatggctcgaggcaaggcggacgaaagatacagtgtgtaaatcggccgatccgcgccactcaagatgcgacgtcgcgatgcaggaagaagtggtagctcggtgttgcgccgcgctgtgacacatcgcttattgcgtgcggttcacggagatcgcagccatgagtagtcatacgttatatcgcg

SEQ ID NO: 172625 - DNA, 522 bp, Arabidopsis thaliana
  unsure (1)..(522): unsure at all n locations
gcgtacgtagcttggatcctctagagcggccgtcctttttttttttttttaccgagaaatatttcaaattagaaagttttgtagcataacatgagttgatagaagcgaaaacaagcaccctgaaaaggctccgtgtggttttggggagaaacggacgggtcctggcccggtacgagaagtggggacgcgcatttttcggggaggttcngtaattttagggggggtggcagaggcccgcacaacagggtacaaagaggggcgctgagactccgccacgtcacagaaactatccccaatatctgacacacatgtgcgcgtggggagtgacgcgcagtagcaccagctagcttcccgagaacagatcgcacctccagaacccttctccaccgcctctagagcgaacatcatgacctacactgcgaagtcctggcgccccaacttcggatatcgcagagaattcaacgagcggcccttgcgcggtatcgcccctcgctcattaccctccacgtgttaatagagtgt

SEQ ID NO: 172626 - DNA, 528 bp, Arabidopsis thaliana
cgtcgcatgaccgcgtacgtaagcttggatcctctagagcggccgtccttttttttttttttttcaaagaatgtgatataagataagcaacaatgcagtatgaagagacttcaacatgtataatagatacaactcaaaatgcgtctttaatattacagcgaacgaaaacagagtataaggtctaacgtcaagagaaaaaaacagagcatttttaccaaagcaggcagaaggcaaatggttattttaaaaaccgaatgaggacgagtcgtggcaatttttatccccgcaaccattcattgaacacaaaggccgcggacgcgtggggcgaccccagggatggcgcatcccggacccgccgctcaaccaagctgccgctatgggggtgggacttgtcccgcgtcgcccccaccttatagctcccatccgccccaccgctaccccgtccgccaccttgccgccattaaatcatgcatcgtcactaaccccttttctccacagatacctcacacctcccctccaacccccctt

SEQ ID NO: 172627 - DNA, 365 bp, Arabidopsis thaliana
  unsure (1)..(365): unsure at all n locations
gctggacngcctgcaggtaccggtccggaattcccgggtcgtacccacgcgtgcgcgcctttgtgttcaatgggatgttccggngatgacagatacgcatactccgccgaattcggtactcatttacaggtgtaaagttaaggaacaacggacacacacatctccgcaggtagattagcccccgaactatgacgttgttaaaaagcgttccttcttaaaggggggggcacccgcataactaaacaaccgcgttattgatcattgtatcaatatagttgtcagtgtatttcaattctttagactttgattaattagatgtgatacagactagtattcactgtgacgcatttagctcgcattatccg

SEQ ID NO: 172628 - DNA, 470 bp, Arabidopsis thaliana
gtagcttggatcctctagagcggcctccctttttttttttttttacaagcttactcttattaccaaggagcaacacaacttggtcaaagactcaaaagtacatgaaatcatcatacaatccaacacttgagaacaagtggcacatacacagaaactaatatgggacgttattgggcatgttgcgcattttttatttttgacggggggcccccgcgcaattggtccgggtgttttttgattccctttaaagagatggtagtgatcagagatactagcgcacgtcaaaccgaattcccagcattaccgctttatgggactcaattccgaattttttttgaaattttgtggcgcgtattcctccacgccacgagttcgcttccccttattcgccgcctccacctccttccccctatacctatcacccccaataagataattccccagatctccgccaatccccccacataccc

SEQ ID NO: 172629 - DNA, 390 bp, Arabidopsis thaliana
  unsure (1)..(390): unsure at all n locations
gtcgcatgaccgcgtacgtaagcttggatcctctagagcggccggctttttttttttttttctttttnananaagaaananaaagaaagagagagggagatagaggagnangagtagagggagccccaaggaagagtgagggggttgggtgacgtgcaattgtaggggggatgtgagacggtaagacagcggaggaggttttccagggagtttctattttttggggggggggggcgccgcagacgagaacagtggcgaagatgcagggccacctggatgtggggaaattagagtgtatctgtttcaatgtgggcaagcggggggaataggactgggagccagctataacagcaagagatattagccccaaactgaaattgaaaaagagat

SEQ ID NO: 172630 - DNA, 534 bp, Arabidopsis thaliana
  unsure (1)..(534): unsure at all n locations
tctactacgactcactatagggaagctgatccgcctgcaggtaccggtccgngattcccgggtcgacccacgcgtccgtacagaggtcattagcttccttctttcaactgaaattattcctctgtgcctccgtaccatggaaatggggagtgagctgtcaaaaacagtggcaacatttattgttcaaaagatactgttggatgatgtggggatgttttggaagctttttttttttgaggggggggaaacccaaaaaaaacttatattaaaaaaaatttccttcttttaattcgtattttgtcattcatctttctttgttatatttttttatatatattaatatatataatattaaaattacaaaacatttagtctaataattcatatatataataacataacatcatttttattatatataattactaatggtaatatattttgggcgtctgacctctactatatatttatattattcttttttattgttgacatatttttagtactatatatagtcttatttatattacataa

SEQ ID NO: 172631 - DNA, 384 bp, Arabidopsis thaliana
  unsure (1)..(384): unsure at all n locations
ttgacgtcgcatgcacgcgctacgtagcttggatcctctagagcggccgcccttttttttttttttttttttttaaaaaaannnnnnnnaaaaaaaacgggatttgagcttaaattaagcatccgaagggttgagaatacccttttagtgttcttttagcaggctcacagagttatgttaaaaatctattttggaaaaaaaaatggggcattttttttaaaggaggggagaaaacaattgatatccgggaggaaacacgggtcatcaaatgcaagtttttggggagaaagaccccaaaggacaaagggtccacccgccctttcttttgagagaacataccacgcattgggttatcaaaccagggggaaaccgcggggctagggg

SEQ ID NO: 172632 - DNA, 493 bp, Arabidopsis thaliana
acgtcgcatccacgcgctacgtagcttggatcctctagagcggtcgccctttttttttttttttttttagctttgagtttactttttttacttttggatttacttcctccaccaccagacatacctccttcacttgcagacataccttcttcactctcggaccctccggacataccttttttcttttcgaggttagctgtgagttttttttttccaggggggggggacaccccccttcaccctgcggacataacctacttgacttcccagacataaccttgatgccccagacgcaccataccgtgcgtgaccttgggggcttgacgagcctgtacctgggaaatcgtactgtcgggggccccggcgactcggagtgtgtggccgaggcgggtggagtgccgcggctgccgggggcgcggcgggcggggcgcccagcccagagcgcctgcgcctcgggtcgcggcaaccgcgcggacgcccccgacgcgccctg

SEQ ID NO: 172633 - DNA, 521 bp, Arabidopsis thaliana
ggaaagctgctacgcctgcaggtaccggtccggaattcccgggtcgacccacgcgtgcggaacaatatgagcgaagaactaagtcaaaagccatcatcagctcagtctctgtcactgagagagggcagaaatagggtttccttttctcgtccctcgcacaagcagagaggcataatacccgcccacagaaggacggcgcagatctcgaccccttcctatttttgggttgttggccaccccacccaggaggaaaataaaaaaaaagagtgagctcatggttcgtgtgtcattcccacaagtactaggttaacgcccgcgacgctctacatcttgcccctcacataaccccttcgcgcacccagggagtgtcgcactagcccccctactcgctcaaagcggtaatcagaattaattttaacaacagccggttaggggcctcccacccacatcactcacgcatcccgcctcactcaccgtaccccccgccaccccaccacaccacgaccaccactccaccaccc

SEQ ID NO: 172634 - DNA, 460 bp, Arabidopsis thaliana
  unsure (1)..(460): unsure at all n locations
atagcagagctttgacgtcgcatgaccgcgtacgtaagcttggatcctctagagcggcctcgctttgttggttttattctttttttttttttnnnnnnnnnnaaaagaagcctaataatactatttctagaaaataatcacaaattaagaacatggttcatctatatgtacatacatgattcttctcaaaattctatttgatatagaaatggaacccatattaataatttggggaaggacagagataattaaacacgttttgctttcattcactatgagaacagccaaaaatttaggacccagattccaattttgggttcctttttctaattcaaacagaacccggtttgtaaataaggggttttgatctttaagatttttaacattccctttattagcgggggggccaaggattgtgaattacaccctttggtgaattttggaacaacccagggatatt

SEQ ID NO: 172635 - DNA, 402 bp, Arabidopsis thaliana
  unsure (1)..(402): unsure at all n locations
cgactcactatagggaaagctggcacgcctgcaggtaccggtccggaattcccgggtcgacccacgcgtgcgcggacgcgtgggattttacaaggttatgggttgactgagtcaacgggtataggagcttctacggatactgttgaggaaagtcggagatacggtaccgctgggaaattgtcggcaagtatggaagggaggatttgttgtccggnnattttttttattgggggggggggacaccccccttgcttcttcttaaaaaaatcccctccacaangttatttcacccatcccccctctcccatctccctttcacctcccaccccctctctcttctaccctctctccacccatctttatattccnnaccactcatatttaattttcccacccccttca

SEQ ID NO: 172636 - DNA, 413 bp, Arabidopsis thaliana
  unsure (1)..(413): unsure at all n locations
cgcctgcaggtaccggtccggaattcccgggttgacccacgcgtgcggatcaatttacgaatcgccaatgattggtctttgttatggaaaaaaggaactgtcggtactccgcgtactgttcagaagaatactcatctacagaaacatatctttcataagaaagtcttcgcccgaagaataaaggaacattaaacgcacttcnctcnatttaaggggggggggacgcaggagaaacgcagcatttgtgatatatatgtatgttgtatgataagaagagccgaggcgttggtattcgtgcagggtcatattatacaacagtaaattttcatgaacatatactccctcgtgtctatatagaaatgtgcgagacacgcgggtaaagaagtgagtcgcacaagacgatatcagataaa

SEQ ID NO: 172637 - DNA, 430 bp, Arabidopsis thaliana
acgactcactattgggaaagctggcacgcctgcaggtaccggtccggaattcccgggtctacccacgcgtgcgcccacgcgtccgattagcttcagtatccattggcggattagcctcagagtgctctgatcaaggttttggaggttgcatttgagtgaggagatgttttcggctcagcataagattcataaggagaagggtgtggaactttctgaattgtttgtttaagttggggagggtcctttgattcggagaacaccaatcaagaattgaaacgcgagctgaaggatttatacgtccactcggctgttcaagttgatatctctggaggacgcaaggcacttggtgccaatgttccttacagactgagaaaagcttacggggaaatagcattgtcagcgcttgttggtgcatcttttcgaagaattg

SEQ ID NO: 172638 - DNA, 485 bp, Arabidopsis thaliana
  unsure (1)..(485): unsure at all n locations
cgctgcacgcgtacgtaagcttggatcctctagagcgtccgccctttttttaaatcttttaaaaaaaaananatatagaagataaagtagggattttttgaatggttgtaggtgtataaacttnttataataagaagagagaaaaatttttatttgttctattaaattatactataaaaaaagtaaagaaaaaaaaaaaaaggttaggaatatttttattttggggggggganaaaaaaaataaagaaaaatttgagaaaaaaaaatcccggtttgtagtaagttaaagagaaaacaattcaacatgaagtagaagataaaaataaccaagaatcgggaataacaagtgaagggttttaataacatgtttctgtgtaataaggaggatttttgtatttagagagggggtggggataggcgagagaaaaataagatattttatttcacctgcggtcatagacatcgccaattactccccttatata

SEQ ID NO: 172639 - DNA, 525 bp, Arabidopsis thaliana
  unsure (1)..(525): unsure at all n locations
tcgactgcacgcgtacgtaagcttggatcctctagagcggtcgccctttttttaaacccctaaaacaanaaagcacaaaaaacaatctcaagtacactatcacaacgacgccacagcgcgcgcaccaaaaatgcacgccgcccggagactatctaccaccaatcgcgcacaataacacaaccctcatgcccgaaaagccgaagttcacagtttaggtccattcacgaagacgaggcggcccaagggaagaagcgacgaccccaaaacccacccaccgaagaacaaaaaaaaaccaacaaaaaccccccccagcagggacgaaaagcataacttaactagaaacccggctcggaaatacaaccgcaaaataaaaaagattatagaacaaacaaaattaggaaatgatgaataagtatggagagagccaaaaacaaaacaaaaaaaaacagatatgacgactcacgaaccacccagaaccaaagcgaaatcacccccccaaaaacatatactacccgcagcaggctt

SEQ ID NO: 172640 - DNA, 536 bp, Arabidopsis thaliana
  unsure (1)..(536): unsure at all n locations
cgactcactatttgggaagctggaccgcctgcaggtaccggtccgngatcccgggtctctcacgcgtcgccccacgcgtccgcgtcaatcgaaatcccaaagatcagcgatggtgactctaaacgcttcttctcctctcacgaccaagtcgttcctcccctaccgtcacgctcctcggccggcaatctgtgtgtcccctgactgagccgttcatagagtngtcgcttaggggggggcccaagacccgcagcgatgacgcgcgtacgctgcgcgtcgcgctgtacggcgtcccgaggggcgcgggtcagaacggggccggtggcacggcgcgcccccccccgctctgccgcagtactcgcttgctgcccacccgggccccgccgtccctgggggttctgcgtgactgcgttccacgaccccggccgggcgaccccgccccggagccggcgccgcacgggcggagtgttctgcacccgccgtgggcgcggtggcgcgcggcgcggggggtgcgccggcggccgctaccggccaccccc

SEQ ID NO: 172641 - DNA, 505 bp, Arabidopsis thaliana
gctctctacgactcactatagggaaagctggcacgcctgcaggtcccggtccggaattcccgggtctacccacgcgggcgcgaaattgggatggtggggtaaatgcaaggagtattggaagaagatggatactgaaggtgttactaaggatcttttttcgtattccatttacatggatatcatgtgcaagagcgggaaaccgtggaaagctgtgaagttgtataaggaaatgaagagtagaaggatgaaactcgatgtggttgcttataacactgtgattcgagccattggagcgtcgcaaggtgttgaattcggtatcagggtatttcgggagatgagggaaagaggtttttattttattgttatagctacgagtggcatcattaccgtataatggtgtaaagcttggattgctcgggacttcttgtttgaattataccactctgtttataaaatggaattaccagaagggtgattattgaaagaattagtatagtgcaattga

SEQ ID NO: 172642 - DNA, 507 bp, Arabidopsis thaliana
  unsure (1)..(507): unsure at all n locations
ctatagnagagctatgacgtcgcacgcnacgcgtacgtagcttggatcctctagagcggctcgccctttttttttttttttttttcgaaataaaattgaattatatttacagcagaggtacttggattaaagggaactaacaaagaacaatattcctgcaacataaaaactaatgacccttttctgtttccttcttcttcattgtagaagcataacaatacttgtaattcatcactacaaaacgttccaacgtgaaaacccaactttttttcattctttttctgcagaaaatgtggctgcaagttgaaatcaatcagcacgagagccgccgcccgtgttcgcagaagaatttccgtccgctatatttactgggttcctgttcctaaaagtatttttattatatactttctcatttcgcctttcgcaacaccaattttactcatctttcgcacaccccacctcacctttcccaatccccccccctctttttccttttcctttttttta

SEQ ID NO: 172643 - DNA, 489 bp, Arabidopsis thaliana
  unsure (1)..(489): unsure at all n locations
ccggctgacccacgcggccgcccacgcgtccgctttttcgctgcgtcgncgagagggctctctttgaggaagctaatgcctgcttgttcggcaccatgcgggggaaggatggcacgggccggaagctgcgcgcgaggacgcgacccatgtacgcgttttatcaaaaatttttccttgaaaggggggaggcacagcaaccacaccctctcacaaccgccacagcacacccgaaagacataaagcgcattacacccccatatatatgtttagccagcgaacggacaccattactctcctttacaacataacaatcatctaaaccactacacacaccaattaatatactcgccagaccgggctacgagagttcactcattacggaaacatcagaaatctacaccgtaaagtaatccaagagctagtcaaagaaatactagtgaataaagcaagagctatattttacaaaagacatcaacgtacacacttata

SEQ ID NO: 172644 - DNA, 530 bp, Arabidopsis thaliana
ctctcacgactcctatggggagctggccgcctgcaggtaccggtccggaatcccgggtctaccacgcgtggcgatcaaccttcgacatacgttgcaattcggcatcggactgcatcatgcaggtttaaacgaccacgatagatctgcagtcgaagagcttttcacgaacaacaagattcaggttttggtctcaacacttaccttggcatggggagtgattttaccagctcactgaggtattataaagggaacagtatattttcgtcggttgacctcagtgtacttgctgtctcttctcactctctattaatttatgtcttttcttctccctttttttaccttcctgcaacctctctcgacctacccctacctctaattattgtttttttttgtctgatcttctcgcaaattgatcatttaaattcttatttccttctcttcttttcctatccctctttattctttttactgcgcacccaccttttttacttgctctttcacattttcgattttattatgtccatttgttc

SEQ ID NO: 172645 - DNA, 446 bp, Arabidopsis thaliana
  unsure (1)..(446): unsure at all n locations
gacgtcgcactgcacgcgtacgtagcttgnatcctctagagcagccgccctttttttttttttttttttttttttttttttttgannaaaacagaaatataagtttgttgactgaatattagacattacaaaagcttgagttttgttttatatgccattaatattaaacacaccagaggctttatgcttagctactaagagagtttttttttagaaagagaaangacagacaaaaacgaccaccgaggaagacaatccacccagagagagagaccccccggccgtaaccgagcgcaccagaaacaaggcaaaagcgccaaaacccaaaccaagcgaaaaaaaataaaattattaaataattataccgcgtataaaaaaaattataattacgtttcccaacttttaatattaaattatatccctaaacctttattccaaaattgttt

SEQ ID NO: 172646 - DNA, 542 bp, Arabidopsis thaliana
gctctacctacgactcactatggggaagctggtcacgcctgcaggtaccggtccggaattcccgggtcgacccacgcgtgcgccgatatcaaacaagctatggcgccctttccactctctttgatttttggaaagaaaaaacgtcgtcgcgacgacgagatacgaagacaaaagccgacgctcaagggtgttatgacggctttttttgccactgaagctgcaatatgcctcttgtttgtggccggatatctctaaccggcacagccgtggcactattcgcgtccatgccgctattcctcggttttagccctgatcttgttccccgagttttctgtcccctttttttagctttaggatttccgctcttgggtactctggtgtgttccgtctttttttctttacttttgaggtctcttatcttgcttcttgctctttttacttgcttttttttctgtgattgtttgtttcagtggatatcctatctccctgttctgtatcttttgtgtctctagtcttttggtatatttttgtggtattgtctc

SEQ ID NO: 172647 - DNA, 514 bp, Arabidopsis thaliana
acgtcgcacgcacgcgtacgtaagcttggatcctctagagcagctgcacattttttttttttctttttacgcataatctgctctttcattttaacatttttccactctgaattagattattacatttccaacgaccatactaaaagaatacatgtataatattacgctgaatagaaaaacaagaaaaagactcaatctatcgaatttttttctaggactaaacaaagcatgaaccaagagtataacaaaaatagaatacgcataacccaatttaaatactatgatatatttaatataccacgactctatagttatacataatactaatactatccctttttcacattataatagaacatataaaagatctgtttgttataataaattttatatatctcttttaaaaataagaattgcccaaaacaaaaacaaaataaccatatttactgccgtctttcctcccaaagacatacatattacatccccatacttctttttataccgatattttgaa

SEQ ID NO: 172648 - DNA, 414 bp, Arabidopsis thaliana
  unsure (1)..(414): unsure at all n locations
gcgctactacgactcactatttgggaagctggtccgcctgcaggtaccggtccggaattcccgggcgctcacaaaatcgtctctctactaatatctctctctctctctctctattgttgaagaagactcataatcggagattgtttgtttttggtttgctctgtaaattggagaagttntgttagagatcaaatggctgggatttgttgcggngttgtttgagagacttttttttttgaccgggggagacacaacaggagctgggctgaaacggacgtgcgcgccccaaacgacggccacaggcgcgcgaagacgggaccccaccccggcaccccacgaccacgcccgaagcaccgggcaccgcccggcacgcccgcgcgcggcgcacccccccgccagcccacacacggccac

SEQ ID NO: 172649 - DNA, 512 bp, Arabidopsis thaliana
  unsure (1)..(512): unsure at all n locations
ctatagnnagactatgacgtcgcacgcacgcgtacgtaagcttggatcctttagagcggccgccctttttttttttttttttttttggggtcatcaacatatcacttactactacaacatttgacaacttgttccttcggatcatgcatgagttttacttttacaaacagattctgcaaactttaaaagaagtttctaatctcttctgaaaccgaacaaggtttttattagttacctccaagcacaagaagtgataagaggttgattcttccatcctaaatacaatgctccatctctttcttcaagtgaatacttctctgaataactctcaagcaatcctttgattgttgcgttcacatacgagcttaaaggataccggataaatctcagacatgtgaaaccgagaacttccttttccctagtgcctcggtgcctatctcatactttcaacacccttttcagggttctaggactccacacccttctactagccaaacccatgctgttatata

SEQ ID NO: 172650 - DNA, 520 bp, Arabidopsis thaliana
gtcgactgcacgcgtacgtaagcttggatcctctagagcggtcgccctttttttttaatcccaaaaataaaggaccctcaatatccaaccattttcgattcctccacaacatggacaaacacctcaacaatatcatcaccccaaagtttaaaaacacaaaccacaacaactaacccgccaccattacccaacacaccgcacacttcaaggactttctaattatccgatgcgaaacgaccaccccgataaaatctcatactacagttaataccaatccaaattctaaccgttaaatctatcaatctcactaccatctagcgctatacaaagatctataaacaacatacatctctccacatccattcgaaccacataaacaaggcggtggttgttcacaaaataatattttttatactctatttaattatcatatttcgccctagcccaaaacacaaaaacaatatacatgatggcgccggcgtcacaatcaatcccctattcccccccccgaaaaactatt

SEQ ID NO: 172651 - DNA, 515 bp, Arabidopsis thaliana
  unsure (1)..(515): unsure at all n locations
gactcactatagggaagctgacccgcctgcaggtaccggtccggaatcccgggtctacccacgcgtccgcttgcaatgtgtagaatgtgtgctgttaatctctttagggtctttcctccgaattatcggtctagttctggtggcgaaaacgatgatgatgaaccgatgttagtccctgtttgatcttatttgctgaaagagaaagatttagaaaatttgtggnttttgcggggggaacaaccccaagaaaaacaccacacaaactcaaacaaaccacacccaacgcaccacggcaccggagaaacaaccaaaacaacacaccacaaaaagaccgaaacacgccccggcgccacgagactcaaaaaccataacacacagaccggcaccgaacccacaccgcgccaagaactaacaccccaacatgcttctaaagaatctctctatctcaacactaatctagttctaacatatttaatcgtcttttatttttactctaactctttaactactatcct

SEQ ID NO: 172652 - DNA, 501 bp, Arabidopsis thaliana
ggaaagctgacacgcctgcaggtaccgggccggaattcccgggtcgacccacgcggggcgccacgcgtccgcttacatacatacacgtcttccacaagactcaaactccacagcatgggattctcacggtcgctcaaccgcaccgtgggcgtgttctgcttgttcatccttgacatttgttgttcgcgtggtggggttctgcggctttatttttcgtgggggggccgacccggcggtaccgtggcctctaatgtggttcttttttgttctgttgtccgggtctgcgtcttggtggggggttgaggcgttgggtgggccggtggcggctgatggagggtccgggtgtgcgtggcggggtccccttctggctgtttgggtggcctggtggcttgtggtggggttctgcggtcggtgttcgcatttgcggttaggtggctggcgttttcgcgtcggcgcccgtcgttgtgttctgtgccttgctgtgatcgtgtggtgtgcgtc

SEQ ID NO: 172653 - DNA, 479 bp, Arabidopsis thaliana
  unsure (1)..(479): unsure at all n locations
ctatagnagatctatgacgtcgcattgcacgcgtacgtagcttggatcctctagagctgccgccctttttttttttttttattgaaccaagtaggagccataccatatatagacaaatgtcaacttagtttacaattcgtggttgatacgaaggtaatacagattatgtacttctgagggtttcttacacgcagtggtattcttctttgcctcacttttttaatcaatcgatagaaggaatagaaaacaaccattaagcacagaggataggctgagagaaaaggatgagctttcacaagttgccaccacattggnatttcaggtccttttccagcagcctttttgcaagagcttgaccaaaaatttctagtttagtttagctagttgtcatgcagtggaacacactgtacattgctcttgttgctcgggcttggggctttgcctttttcccccgaagccctttgttccgtattttgttt

SEQ ID NO: 172654 - DNA, 493 bp, Arabidopsis thaliana
  unsure (1)..(493): unsure at all n locations
acgtcgcactgcacgcgtacgtagcttgnatcctctangagcgtcgcccttttttttttttttttttttttannactttanaaacctaaaaacttaaaaggaagtagcatttaatcctcagagaatgttacaatctgtagctcaaacgaacagtgaaggaaaaaagaggtacagaaaaccttatgcacgcaacaatatccacatttttttttttcaaaaagcacccaaaccaccccaaaacaacaaacacacaccaagaacccaacacaacaaaaaccacagagaaacaaaaacacaaacaccccacaaacccgaaacgacgccacaacacaacaaacacacaccacaaacagaacccacaaggacgacgagagagcgagcaaaaaaaaaatgaaattttatttatatattgattcacccgaaataaaaaacaaaaataaaatattcgatactaaccgctccatatttacattctccttttacctccccattc

SEQ ID NO: 172655 - DNA, 528 bp, Arabidopsis thaliana
  unsure (1)..(528): unsure at all n locations
cgactcactaatagggaagctgacacgcctgcaggtaccggtccggaatcccgggtcgacccacgcntgcgaaaaaaaaaaaaaaaaaaaaaaaaaaaaaaaaaaaaaaaaaaaaaaaaaaaaaaaaaaaaaaaaaaaaaaaaaaaaaaaaaaaaaaaaaaaaaaaaanggnnaaaaaagggcggccgtccaaaagaaccaaagctaacatccccgggcatgcaatctaaaaggtgttaaaaagggcaaccaaaatgaaattaactgggccgccgtttaaaaacgtaaaaaactggaaaaaccctggcgtaaccaacttaaatccccttgcagaaaatccccttttcgcaagttggaaaaaaaccaaaaaggccccaaccaacagcctttccaaaaagttgccaacccaaaagggcaaatggaaccccccctaaaaagcccaataaagcccggcgggtggtggggggtaccccacagtgaacccgtaacacttgaaagcgcctaaacgccggttctttccctttttta

SEQ ID NO: 172656 - DNA, 472 bp, Arabidopsis thaliana
acgtcgcatccacgcgtacgtaagcttggatcctctagagcggtcgcccttttttttttattccctagtaaggaacatgtctaaagcattactataagaacaagcgttatagataagccaatgctcacatcaatacatatcatacacattaatgttgatcagataacaacaattctcacacaacaagaccccacgttttaccgcattaatcatttaaataatcgactcacaacaccccaaaacaaatatcaccactcccccctccaccacaattttcactgctcaccaccaccttaaagttaactccaactaactaaataaaaaattactccaaattctacatcacaataaatcacagccctcacaccaacacagtcatcaataaaaaatctcttatttaataaaaataatgttaaccgcaaaaaaaaaaacaaaaaaacaatcatactatccctccctccctctcaaacca

SEQ ID NO: 172657 - DNA, 465 bp, Arabidopsis thaliana
  unsure (1)..(465): unsure at all n locations
ctatagnagagtatgacgtcgcatgcacgcgtacgtaagcttggatcctctagagcagccgccctttttttttttttttttggtatagaacaataacgtgaactgtagtataacattgaaagtagctacaatggtaaccaaaggtttacaaataataaagactatttaaaactgttttgagactgtttttgtttaatgaattgtatgaatcactctttatttctcaacttggatcagatgaaatcgtttgttctctataggcattttgtctaactcaaaggtgaccaatccagaggaggaatcgatctcgaatgcaatctcatttgactcaacaacgcatatcttaggcttcacagtagagtaagatctatatttttccaaaaaatttatattttatttaaaaatattattacgcacgggccaaaaaaaattaaaatatattatttaatcccacgcttacctaac

SEQ ID NO: 172658 - DNA, 443 bp, Arabidopsis thaliana
  unsure (1)..(443): unsure at all n locations
ccctgcagtacangtcagnattcccgggtcgacccacgcgtgcgcgacgacgaacatggcaacgagcagtgcggcttctgatgatatggaagagatgtaagctgtaatatatttaatgtatcttgcaatccaattaaatacatactttccttatgggatgtatattcatcactctctccgccctgctcttcatcactgttcataaagaaggangcgaaacgaaagccatccgaaaaatagcataatacatttacgctctattttcacaatacacgactattctccatgtatatcgtgtgttatatcaacacctcccttacatattcacgagcacctcaatcgacttcttataaaaccataactacaacgatttatgctttcaccctaatatgaaatacagccctgcaacccccacgcatctacaaatatctgaacatattttg

SEQ ID NO: 172659 - DNA, 504 bp, Arabidopsis thaliana
  unsure (1)..(504): unsure at all n locations
cacgcgtaccgtagcttgnatcctctagagctgtcgccctttttttttttttttttttttaaactattaaacaaatttatttctccaaaattgtaaattgtgataatgatgtttcagtacctttctccactaaaacaaacatcatacacacacagtccacccccaaataccccattacaaaacccacatatcctctttttttttttccacaggaagtcccacacaccatataaacccaaacaccaaacccaccccaactattcactagacaatacctctactctaatctccaccaccacaccactatactattaacaaattcatctcctcgacaacattatatctaatctccaccaaccaaccgtttatttacaataaaaaatatctattttaaataaaataaataattaatcccccaaacaanaaaaaacacaacccttattcttttactcccacaaccacaaacccataccccaatcccccacccaatatataatatatctc

SEQ ID NO: 172660 - DNA, 530 bp, Arabidopsis thaliana
agcgctacacgactcactattgggaaagctggcacgcctgcaggtaccggtccggaattcccgggtcgacccacgcgtccgagaaaagagaaattctcaaaccggttaaagccgccgctgctgaaggtggagataccgctggggatgctaaagttggattcctcgccaagtatccatggctagtcactggattcttcttcttcatgtggtacttcttgaatgtgattttcatcatccttaacaagaagatctataattacttcccttatccctattttgtatcggtgatacacttgttcgtgggagatgttaactgctagtttagttagctcgtgcatctttattattttatatactacttactctatctcccccagcttctacccgacttccttctaattttccacttactctttatgcttcatctcatttaaatactttctgtttcctatctttacatctcttttattacagcattacattactttttcttctcgactttcttatcaccctcacaatgatcttttcgt

SEQ ID NO: 172661 - DNA, 433 bp, Arabidopsis thaliana
  unsure (1)..(433): unsure at all n locations
ccagcgctactacgactcactattgnggaagctgatccgcctgcaggtaccggtccggaattcccgggtctacccacgcntgcncccacgcgtccggggttctcgggttgactacgaagctcctggtcgctggtgtacaacgatggcctacagtgctgatggaactaggctattttcttgtgaaacaagtcaagatccaccatcactacaattccgtaaacgcaactcccaacaattctcctattagaagggggcgccgcacgaagagaaagggaaggtaacgaaacctatacatcccgccgtctctaccctctcaatcaataacgcacaacccctacaatacaccaactaacaagtaatattaggtgctgatacttaattatggagacaacacaccggacgtccgcgtatcataattaatactttctcttat

SEQ ID NO: 172662 - DNA, 496 bp, Arabidopsis thaliana
taggtacaactatagaagagttatgacgtcgcctgcacgcgtacgtaagcttggatcctctagagcgtccgccctttttttttttttttttttttttttcagaagaacacataacataaatcaaaatatttgacaaattctactgattacagaaaaactctgaaacttgatataatgttttttaaagtaccgagcattattatttaattatcataaggatttctgaatttcttcaagagatctggaatgtcgtatcccagcatatcatctactgcttgaatcatcttaggcttcagtttctcgaatttgtcaatgttatagcctcccaatacttctctaaaatgttccacacttggaaagtctccagctggaagatgaaactctcgctgcacctttccaaattcttcttcgagattgtccatgagacgttgctgagctttggatttgcccatcattgctggcatttccttcttaaggtgactcattatgtatgcat

SEQ ID NO: 172663 - DNA, 538 bp, Arabidopsis thaliana
  unsure (1)..(538): unsure at all n locations
acgactcactattgggaaagctgatccgcctgcaggtaccggtccggaattcccgggtcgtacccacgcgggcggctcttatctctttctctcatggcctcaccacaagcaaccaaattgtctcttataatccgatctcaaaggttggcttgttgggagcactgagacatcaaacatggtttcttctttctttcactcttaaaaaaaccaatttagccctaaatttctccttttagtgtaatcccaaaagttcctcaaatctcttctattctctctctctctccattaaaacccttcacaagcaaaaagctttgagctttaaatgagtttaaggtcctgcanaaactgggtttttcctcgtgtacttgttcatcttatctgctctgcataaacttcattgaagaaaaaggcttgcttattcgcggggagcgtgtggatggaacacgccttactggctccaatcgatctcgtcgcagctaggtccgtcgcgtcgactatccggtcgccttgcccgaagccgcgcgacatgtcttgtggc

SEQ ID NO: 172664 - DNA, 492 bp, Arabidopsis thaliana
  unsure (1)..(492): unsure at all n locations
tactatagnagagcttgacgtcgcacgcacgcgtacgtaagcttggatcctctagagcggttgccctttttttttttttttgattaaagaaagtaaatttattcaccagactattattatatatacacaagggtacgttataagcatttatggaatgtaattagatttgaaccacaaagagacttttgacatgaaagttgatactatcttgtcattggtttttttttacagtggnagnnacctgacgataagaagaatcagagatcgatattcttatctatgaagattccttcatcaattcgaatgaagaaaaggaatgtggcgagagaacataggtaattctctcctctagcactatcgaaagctaatatggtgttataattataatttttattttattataatattagtttccatgaaaaaaaaagtaatttttatgtttccaaaaacaacctatatcttcactattcaacccatataattattaaccca

SEQ ID NO: 172665 - DNA, 550 bp, Arabidopsis thaliana
  unsure (1)..(550): unsure at all n locations
gcgctactacgactcactattgggaaagctgatccgcctgcaggtaccggtccggaattcccgggtcgttccacgcgtgcgcccacgcgtccgcattggtcttgaaaagaatagtgacattgttgaaatggcaagttatgctccactctttgtgaacacanatgatagacggtggaaccctgatgcaatagtcttcaactcctctcatctatatggaacacctagctattgttttcaacggntgtttgcagagncaagcgggagcaactcttctcacttcaacactcaggggaaactctacctctcttgttgcatgtgctttgtgttggaaaaacaatgggcgagattacatacgcatgaaggctgaagactggggagctaactgagaaaatgtgcaagtggtgggagactggattgacccctatccgttttatgagtcgggcctagtctataggatccttgtctgaccgagtccaagttcgtgaatatcgataattttagtccattctttcatcttgtttagttaatttcattttatctcgtacgtctc

SEQ ID NO: 172666 - DNA, 490 bp, Arabidopsis thaliana
  unsure (1)..(490): unsure at all n locations
actatagnagagctatgacgtcgcacgncacgcgtacgtagcttggatcctctangagcgccgccctttttttttttttttttttttttggcaacagaaatcctaaaatctttttgtatgctttaagaaatgatcatgttacataaaaacgacatacatgaaagcacaaataacaaggcttctctatttctaacagtagttaaatagaaaaattctttttttttattgtaaagaaatataaaactccctgatatccacatgattttcccaaacccccccaacaaaatacagataaagaacatagaaaaactctatcggatatatgtgtttatataatcaatccttcttcttctttttttttcgtctgattcgttctggtctgctatacgtttgatgtatagataatttaacctccgcgggacaaacctcacacacaagctttcatttctgaacctctttccccgttggctgaaactcccccttaatatct

SEQ ID NO: 172667 - DNA, 484 bp, Arabidopsis thaliana
  unsure (1)..(484): unsure at all n locations
atgacgtcgcactgcacgcgtacgtagcttggatcctctagagcggtcgcccttttttttttttttttttttttttttttttgngggacgatcacacaatgtataaataaattggaaaaaataaacaataaaagaaataaacgaatgataaaaatatagtaagcttttaggacttgggactgggaggaaccgaggaattaggaaatgtattcccgccaaggtttgaagttggttaagcatctcgaggagcgatccaatgtctcccattaacgaagctcttagcgataaatggatgggccgattcatagtccaaagctctagcccaagacacgcctttcgtcgctgntgttcctggcccatagaaattgtacatttcgataaaagtccgtttgcttttgctggataagnaagaccaatcgttccatcccccgttcgcaatcaaagccttcaaccaacggttaacttttatttatttatgtgttta

SEQ ID NO: 172668 - DNA, 463 bp, Arabidopsis thaliana
cacgcgtcgtgagcttggatcctctagagcgttcgccctgttttataatccttcatctgcttttcctttttgattcatatataccgaagaaagctggcagagagggagagatacctcatcacaggcaaaggcacattacaaattacatgtggggtagatatatattatacccgatgcccacaatgatgatgttgtagtttgggcctgatgacgaccagaacaccgctcggacgtttcttctccccgcctcacatccacactcgcatccaccccctcacgccacacaccctagccaacaggatgctccccctcagccactcctatccaccaatgttcgtccaccatatagattatttatttaatgaggatattcccggagcgaaaacacatcactaggatcctcggccccccggcgcctcctccccttactccccccacacacatgattatcccactccttatc

SEQ ID NO: 172669 - DNA, 467 bp, Arabidopsis thaliana
  unsure (1)..(467): unsure at all n locations
agctctactacgactcactattagggaagctggcacgcctgcaggtaccggtccgngattcccgggtcgacccacgcctgcncccacgcgtccggtaaaaatgtcgttgtgtttggttatagcttgtatggtaacatcatggatcttcttacaccgatggggacaaagagacaagagtggtccaaagacttggcctttggttggagcagcgatcgaacagttaactaatttttatcgaatgcgtgattggctcgntgagtatctttataactcaagaacagtaagtggttacaatgcccttcactacttatacatacataggctgtcccatgaacgttgaatagtgcgctggaaacaaacttgtgccaattgccctcaggggagaggcttgatcgtggctgatcttgggccaaatcgtcccggtgtcccgctctcacgcgcacctaacccacctctccttggggtgt

SEQ ID NO: 172670 - DNA, 522 bp, Arabidopsis thaliana
  unsure (1)..(522): unsure at all n locations
cctgcaggtaccggtccgngatcccgggtcgtacccacgcgtgcgcccacgcgtccgctacattcgtcagtttcgcctctcggtttcttgaattctncaaggattcatgcttacacaagcccaagctcccaccccatcaggccctcccaccccctcccacctcccccccccatccaccaccgccaccagcaacaaatttttttttccggcgggggcgaacgccgccccccgcgcggagcactcgacggcccccacccgctccactcacccgcccccccccctcccaccacagccccgaaccccacaccccctgcaacaccgcacctccctccccccccgacattctccaccccccctacccctgctcgtcccattctcatttctatctactatcctcttgaccccccacccgtacactcacttctcccccccccctctcctctcttaccgttccctactccgctacctccaccaaacaaccgactcctctcatcccccgccaccactccacctactcttatt

SEQ ID NO: 172671 - DNA, 576 bp, Arabidopsis thaliana
  unsure (1)..(576): unsure at all n locations
aagaactctagcgctacacgactcactatttggaaagctgatccgcctgcaggtaccggtccggaattcccgggctcctcctcgcgggtcgaaacgcaagcttcacgcttgaaaatctccgttcgttttctacctcgtttagatcggagatggcggagaagccggcgcaagagcaagagcagaagcgagcgatggaacctgcagttctcgacgatattattcgtcgtttggttgagtttctttacacgagaccgtggatcgggaagcaagttcatctcagtgaaggtgaaattcgtcagctttgtgctgnctncaaagaaatatttcttgaacagcccaatgtggtggaatccggaagctctcatggagattgtgtgggcggcgtgagtcccctgcctctatttcattcggcgcgtcttctttattattgcgatatgctccgcgtagtctacctaggtcgtgcgtgtggtagcctgatcgtttcgctcactactgtcagtgcgtagacatcgaattcggtatgcttcttctcctccggttgttttttgtcggtgttggttgtctctcattctacgc

SEQ ID NO: 172672 - DNA, 535 bp, Arabidopsis thaliana
  unsure (1)..(535): unsure at all n locations
ctgcagtaccgtccggattcccgggtctacccacgcggcgaagacttgacgccagaaacacaactagaggacctntctaggcgatatgaagaataagaggcacaccaaaaagcagaataaaaagtatttaacccacatcgcataccaccctcgcaccgccaccccaaccacacagttttccacacattcctcncttaaaccgggccgacaccacacacacacacaccccccccaaccaccgacctaccacaaaaaaaaacaacccacacagctactaccacccacagacagaacacacaaccccaccccctaccacaccaaataccccacaccaactcccccccctcagcatccccatcaattacacgccacaaccacacacaaccactttaacatctgtgacaaacaacaccaaaccccacaacaatccacatagacaataccaccaatcaacaacaacgcataatcactgctcaacagaaatccagtaatacaacccaaaccaacacaccaacaaaaatactaaaaaccacca

SEQ ID NO: 172673 - DNA, 569 bp, Arabidopsis thaliana
  unsure (1)..(569): unsure at all n locations
tactacgactcactattagggaagctgatccgcctgcaggtaccggtcaggaattcccgggtcgtaccacgcntgcangaaggaganagcttcttctcattaatcagngacatgactattagatcaacaaaagcantgatacagtcagctatagtaactgacaggagtatttacttttatgataaaaaatatcttaagatattaattttatggatacctgagaccaaaaattctctataagagagggaagaaaaaaccaacacagaacgaaaacaaaagattagacaaagcgatcacagtatgaacagagagaaaacaaaaaaaatataaaaattatatataatactattagtaccgcggactcctaatattatatatttaacgaaatgacaaatacatatctttacatttttctcaatatttttaattaataagtataatatatatattttatatttaaaatatttaaaaacagaattttgagaattatagtattataattaatacaagataataactaacttaaaccatatatgctctaatgaaaactaatatgaaaatctttaatt

SEQ ID NO: 172674 - DNA, 487 bp, Arabidopsis thaliana
  unsure (1)..(487): unsure at all n locations
gctctactacgactcatatgggaaagctgtccgcctgcaggtaccgtccggattccggtcgaccaccggcgggacgcgtggtttgatatatgacactagggcctcaatgtaatgcacacattgggcttgctaagctaaggaaggagtggattgatcgtcgggagaagctaggaacaccaagatacactcaaatgtactacgctaagcaagggatcataactgaggaaatgctctactgtgctactagggagaagctagaccctgagtttgtaagatcagaagttgcacgaggacgggcgattatcccttccaacaagaagcatttggagcctgaaccgatgattgttggtagaaagtactagtcaaggccagtgcgaatatggtgaactctgctggcggcagctgtatctgntaggattggttatcgttgttaagcttgttcaccatgcttggctctatcacatgctccaccggttcatatgtcccc

SEQ ID NO: 172675 - DNA, 542 bp, Arabidopsis thaliana
  unsure (1)..(542): unsure at all n locations
cgactcactatttgggaagctggtccgcctgcaggtaccggtccgngattcccgggtcgacccacgcgtgcgcccacgcgtccgctgatccttctctcatcctcagaaagaatggctcaaaccatgctgcttacttcaggcgtcaccgccggccattttttgaggaacaagagccctttggctcagcccaaagttcaccatctcttgctctctggaaactctttttttgcactaccatctaggagacacagatggcgtcctctcgctctgtgcacccccaatctcacgcgctgtccctatcccgtgtccgctccctcgcttgccccgtacttctacgcccgctcctctcctccctccttccattctcgctcttcatctccacctccgcccagcccccctcacttccacccccctcccgtcccccctctgccccgcccccctcggtctacgcgtcgcccccccctcttccctctcctctgtatctctttcgcctcactgctttttctttctactcgcaattatctccgctcctgtttccttta

SEQ ID NO: 172676 - DNA, 510 bp, Arabidopsis thaliana
gtcgcacgcacgcgtacgtagcttggatcctctagagcggtcgccctttttttttttttctatttcttataactcttgcattgatcaaggaactcagttctagagcacacgagatgtaaaaatctaccggagaagtcactaataagtagtccaacatcttcagatttgctctcccgtttgccggcgtgcgcccttttaagtttttttatttgaggggtcaaagcacaccacagaaataacataactgtccataacctccccccattttcactcgactcttcaacttacatcccactctcattatccctaataatatatttatctcatcactcccatcccacctaatacctccccaacaacaaacattatttttacaaaataattgtttattttattaaaaaattgcattaaggatattcaaaaaaacaaacgactgcctactatctcacctcatcgtaacacaatttcgaatacccctcacattaaatattaaaatacaaattttagatt

SEQ ID NO: 172677 - DNA, 544 bp, Arabidopsis thaliana
  unsure (1)..(544): unsure at all n locations
cagctctctacgactcactattgggaaagctggcacgcctgcaggtaccggtccggaattcccgggtcgacccacgcgtggcgatttgggaactcgtgcgcggctgtggcagaggccaaacccacccgtgtactccatccgtcggatccaccaaaccaatattctttcatctctctctctctctctctctctcttcttcttcgtcttcttctctttttattctttcttcaggaacaaattcctctgcgtttgggcattttagggtttctcanatttttgacgctttctcttaaaagggttgacgaaataaccctttaagggaaaaaacaaaggttgaggaagaccaccaaggtgaaaaaagatagaagaatgcgaacaacagcagcaccaagataaagtctcgaatttctctcttttgagttaccttcgatcgcctactggctctccctacattcgcctccatctgggggcggcgccgggcctatactgcgctctctgatatgcgcctctctcgtggcgtagcgacgcgcgcatcacccctccc

SEQ ID NO: 172678 - DNA, 487 bp, Arabidopsis thaliana
  unsure (1)..(487): unsure at all n locations
cctgcaggtaccggtcncgaattcccgggtcgacccacgcntgcncccacgcgtccggaagccccattatcacatctaaatctgacaaatcgtctctcaagctgtagatcggcagnagagagaggaagagagnaaagccaacaaacccgacagcagcaccacgggtcacaaaagacgtaaaacctcaacaaatagcggcaaaggttaaaaacaggagggggagacacagcacgacagccaaagaaagaaacagacatcaacccgccaccccacgacgaccacgnaccagcacacaacacacacaacgacgataacaccgcagaccacacacactaaagtgcctcgcaaccgtatcaacaccgaactaccaccaacgtacccagaagactcaacacatagcatcacgaagagcccaataactaagtataaagaaacacatacaaacacctcacagggaagagaataaaagaagagggaggaaagaata

SEQ ID NO: 172679 - DNA, 346 bp, Arabidopsis thaliana
atgacgtcgcactgcacgcgtacgtagcttggatcctctagagcggccgcccttttttttttttttttttttttttttttttttttttttttgagaggcacaaaaaagcgaaaacgcaaaccaaccaagaccataatccctcaaagtgaagagtgcacgggacaccaggcgccgtgtgcacaagcaacacagatccaggacactagaatggagctctttttttttccacggagaggagggatctcgcggccgagaaaacagccaagaagatgggtggcacctgaggcgtgactgacaacatagcagaaaagaagtcccactatctgcatccgttgaaccatgagga

SEQ ID NO: 172680 - DNA, 505 bp, Arabidopsis thaliana
ctatagaagagctatgacgtcgcacgcacgcgtacgtaagcttggatcctctagagcggtcgccctttttttttttttttttttctttgccgccattttagctccaagtagcacgtaacaaaagtatcattacaaagaataccaatgtgtataagagataaaaaccttcattgaagctaaaatcttaaagctaagcctaacatttcataacagggtgatatttttagtgttatacatattcctgatttcaactgcaaggaacaatgaatggtttcacaaattcaaggaattcggatgttctgacaccgagcttcagatcgatttctccaccacccaaccagaagaaatccggtttaagtttggttatagcctcatccaatataaccggtatgtttgtcttcataccaatacaggttaccccattatgctcaaaccccgtcaatttaatcgacgtctcctcaggagcaagtctcagattaaatcttttctttgggatcttgccctc

SEQ ID NO: 172681 - DNA, 496 bp, Arabidopsis thaliana
cgcgtacgtgagcttggatcctctagagcggtcgccctgttttttaaatcccaaacaacacggcgagcccgtgtggcgagacgggggttagaggggcgaaaagggataaggggaacgccggaagtgcacggcgccgagtaattacgagaaactgattccctaaatccgcgggaacgcaatgagagatgagttacggcgttccctcattgaagctcacgagaaggaccccgcgaggattagacggtggcgccggtgcgccagcccgggtgagtcgcggagctgactagggagcccgccccagtgggcggacagagaggcgcggtaagtgccggagtgcgggaatgaccaggccccggtgggaggatgtgtatttatagtagtttttgttgtatgtttaaaggatgtggaggggagaggaaaaaaaaataacaaagaaggggaggggggggcgggaaggcggtccagtacaccggcaaacttaatatagaccggcagg

SEQ ID NO: 172682 - DNA, 398 bp, Arabidopsis thaliana
gactcactatttgggaagctggcacgcctgcaggtaccggtccggaattcccgggtcgacccacgcgtgcgcgcgttaatggcggcttcgttctcactcacgagcttcatctccttcatctcaccattcaaatctcaaactaaacctacaccaccaccaaatctcactcttccttctccaacaatctcccaaaggcgaagaaatgatctcgctatcgaatcattggcggtcgaagaaacttactcaaccgcttgttcactaggctgtgagcttgcttccgagattcgggccttcgtcgatggctcgagcaagctgctggtggagttcctgcttcctcgcactcggcctatcccactcccttgtacagcataggcgtacccccctcccactataccact

SEQ ID NO: 172683 - DNA, 405 bp, Arabidopsis thaliana
acgtcgcacgcacgcgtacgtgagcttggatcctctagagcggttgccctttttttttaataccaacaagaaaatagctatgttattagagacctgtatccaacgacatatcgcgtaaagtcacgagacattaagtcctctcccccgtgataacgaacgccatccacacccatgcttaccccccgccgaacccggaagaggcgggggccgcgttgctttttgaaggacccggcgaagatacccccagatgaggacttccaaaatccgaagagcaactgaaaagcagacgccacacgaattaaaatacaacaatcacccccggtacgagtcgctactctgatggtcgggtccacaataagcgctgaccgttacatacacagatccaatataaagagcgtttgtttg

SEQ ID NO: 172684 - DNA, 453 bp, Arabidopsis thaliana
  unsure (1)..(453): unsure at all n locations
tcgcacgcacgcgtacgtaagcttgnatcctctagagcagtcgcccctgttttttttttcttaaaacttaaattcgataatattaaagatagagaagtacagagaattgtagtacaaacggttacatggaaaccttaagatttatctaaccagccattacatactatttaatccgacataacctagacctctttgaaccttttttttttagcttaaggaaaaccagccagtaaacctactcatccacataccccccccacaaaatagaataattaatattatacacttccctcatcaattctaataaatacacaattttcttcctttaccaccatctttatctataaccaaaacacgatttagaattaaaaaaattttttattaattttaataataatatatggaccctatccaaaacacaactaaaattcatacaacacacactacttcctc

SEQ ID NO: 172685 - DNA, 503 bp, Arabidopsis thaliana
  unsure (1)..(503): unsure at all n locations
actatagaagactatgacgtcgaacgcacgcgtacgtaagcttggatcctctagagcggtcgcccttttttttttttcttagtcgaaattgcaatggccactcttgaaaccaacggacaaggattcatctaaaagatcgaacgatcataaaccccttgatgattcgaaattacacaaacggaaattaaaaagacattaaaattcaaattcaaagtcgaattttttacaagagagaaaaagagagattaattcagtagtctgtggttgggagctgctcgtgtgtggtgttgatgaagaaaacttcgtagatgagtccagcgattccaccgncgacgagaggtccggcccagtagacccagtggttggtccatgtccagctcaccaccgttgttccgaaagccactgtgggattcatggggggctcagaaaaagctccttcagcttaaattgttggctccaacaacgaacccgatcgccatggtagtatttgtatcattgattca

SEQ ID NO: 172686 - DNA, 554 bp, Arabidopsis thaliana
  unsure (1)..(554): unsure at all n locations
agctctctacgactcactatagggaaagctgacacgcctgcaggtaccggtccgnaatttcccgggtcgacncacngcgtggcggtatggcttgaggaggtgtgcatcatccgtctataaataccctgacaaggaaaaccctaattttttttggcccaaagggttttatactttaatctcatactccgattcattgtcgaaaaacgatgatgcataattcaaccgaagaatcttttatgggaggtgagacctggtggtatgctcgtccaacgaagagacgacgccgcttcctccgaccacaaacctctgcaggatcccgactctgcttccggcgttttggctgaaaccatgagaatgacttgtgggtgatgggtgatggcgccacgatgctggatgtgggtgctgaccccccttttccgtcgtgttattcatngatttttgttctactctcctctctctttcatattttctattagtttgtcttacttcttatccgccctacatcgtctctttgcccatttcttctctttatccctccttcacctttaagctat

SEQ ID NO: 172687 - DNA, 489 bp, Arabidopsis thaliana
  unsure (1)..(489): unsure at all n locations
ctacgactcactattagggaagctggcacgcctgcaggtaccggtccggaattcccgggtcgacccacgcgtccgcgtacacacgggtatctaaccgctctcattcatggtgacatagattccttgttaggtgtgcatttgatgaatctaacgtacaacacgggtatttaaccaaaaatggcatctacagtcaagcatgtggactaaacaatgagcatgatgttatgttgccatgacgactacatgtacatggaatttacactcaaggatgtggattaantaatatagttttggatagtttattattgttatatatgttaattaatttaattaatatttaattttatatttataatttttataatttattattatattaatattttgattatattttttaattattttattatattataaaaatatattaattattgaatatatttatattattaattttatattattattgatattgattgataaatt

SEQ ID NO: 172688 - DNA, 482 bp, Arabidopsis thaliana
cgacgcacgcgtacgtaagcttggatcctctagagcgtttcgccgggtcttaaaccccgcaagcgggatcggggatactccgtgccagaaccctttcacagcaaccggtacaatcgcccccagagaaaccatcgggggtcaattaataaccaaacgcgaaatggctccacctacctggcgcggcgacgccccccctctaacatttcttctttagggggcgtagaggcccgccctacgttaacccagcccccatatgccccgccgccggaagcctgaggtgagatatcctacagcccaccaagagagacgctgaacaggcaggcgaacctccactcgctcgcaccaaccaaattacacccgaacgaactgtgcgacgtcacacaagattggctttgttattaaaaagaaagaagattcggccgggtgctaacaacaataaaacgaatcctaaggtagaacgttcggaagaccgaccgcgattc

SEQ ID NO: 172689 - DNA, 551 bp, Arabidopsis thaliana
  unsure (1)..(551): unsure at all n locations
aggtgacttatagaagagctttgacgtcgcatgcacgcgtacgtaagcttggatcctctagagcggcctccctttntggggtttttctttttttttttttttttttttttttttttttttttttttttttaaccccaaaagggttttgtttaaatgtgaaagtcatacatggaaaagggcattgtttaaatgggaaaatcatacctgggagaattataaaaagaacaggggctggtaataaataatccagaggagattccagagacttttcaattttgcaaaagatagcaataaacaaacacccaaaccccctcctttgaaaaaatccgttttgtttcatccatcgttgaacctgactgggaaaagggtgaacctgatgagatactaaggcactttactcatctttgatgggtccatgaagatcggaaccagcaccagaaatcttagcctcaggatcttcataataataatcggaatcatccctacgggatttaacagggacaatagtttccctggaagctccaactttcccaggaagggcgcggaccttc

SEQ ID NO: 172690 - DNA, 543 bp, Arabidopsis thaliana
  unsure (1)..(543): unsure at all n locations
cagctctactacgactcactatttggaaagctggcacgcctgcaggtaccggtccggaattcccgggtcgacccacgcgtgcgagcgtatctacagaggtgatagcaaccatgcgggcagaggtgtcagatgtatcaaagagcgcgatcagcaattcatttttactagacgacgattcgagcatcccattctcgcttgacgatatctccaaatcgatgcaaaacgtaaaggttgcagaggttgatcctcctccgttgatccgccaaaactccaacttcatgttcttgttggaaaggtcagattgaagtagtcaaagttccctatacccgatcgatcgctaggacattttcagattaggagatcagtattgtgctttcaaaaacaaagcctgtacattagtacatatgcctatctttgccagtggctttctggtactgttctactattaataggggtatattgggtaggaaaaaatatatatatgtgaactaaatatttgttgtgtccatgcgtngataggccatttgcttaatgaattttact

SEQ ID NO: 172691 - DNA, 554 bp, Arabidopsis thaliana
agctctactacgactcactatttggaaagctggtccgcctgcaggtaccggtccggaattcccgggtcgtcccacgcgtcggataatataggttgcagggccttatggactctctcctacaccagctagacgtgctttgttcatattgtaccagaccgcagttccatatatcgcagagagaattagcactcgagctgctacgcaagcagtcacctttgatgagtctgatgagttttttggtgatagtcatatccactcaccaagaatgatagatcttccatcttcatctcaagttgaaacttcaacttctgtagtatctaggttaaacgatagacttatgagatcgtggcaccgagctattcagcgatggcccgtggttcttcctgttgcccgcgaagtcttacaactggttttgcgtgccaatctgatgctcttctactttgaaggtttttattatcatatatcgaaacgtgcatccggggttcggtatgttttcataggaaaggcactgaatcagagacctagataccaaattctttggggttttccttcta

SEQ ID NO: 172692 - DNA, 545 bp, Arabidopsis thaliana columbia
atgatacttcagctctctacgactcactatttggaaagctggcacgcctgcaggtaccggtccggaattcccgggtcgtcccacgcgtgcgcgatgttggtatgaagaggaagggtgttgatgagtttccattctgtgtccatttggtgtcatgggagaaggagaatgtgtcaagtgaagcacttgaagctgcccgtattgcttgcaacaagtacatggtgaagtctgctggaaaagatgcttttcatttgaggattagggttcatcctttccatgttctcaggattaacaagatgctttcgtgtgctggagctgataggcttcagactggtatgagaggtgcttttggtaaagctttgggtacttgtgctcgtgttgctattggacaggttcttttgtctgttcgttgcaaggatgcccatggtcaccatgctcaagaggctcttcgtcgtgctaagttcaagttccctggtcgtcaaaagattattgtcagcaggaaatggggcttcacgaagtttaacagagctgacttcaccaagttgagg

SEQ ID NO: 172693 - DNA, 459 bp, Arabidopsis thaliana
ttgacgtcgcatgccacgcgtacgtagcttggatcctctagagcggccgcccttttttgttttttttttaacgtttttttaagggaaagcagaaccaactcaattcgagccatatattctgtgcaaaccgcgccaataacaggtttgagttttaacatttaagagaaacaaaatcttaaaaacgaacccttggaaatagactattgatcagttttaaagtaacatgagctagaagctacaataaataaacttacaatttccctcatgaacggacactacattcttgctgctcattcacaaaactctcttttagagcgttcactttaactcggcagacacacatccatctgaagccaattgcacgttcttagatgtcttatataggacttccggggtaaccttgtatgcaggagcagcccatttttttttcgggcattaatttcttggggggaaactggg

SEQ ID NO: 172694 - DNA, 539 bp, Arabidopsis thaliana
tgatcttcagctctctacgactcactatagggaagctggcacgcctgcaggtaccggtccggaattcccgggtcgtaccacgcgtgcgggcgagagggaagatccagatcaagaggatagagaaccagacaaacagacaagtgacgtattcaaagagaagacttggtttattcaagaaagcacatgagctcacggttttgtgtgatgctagggtttcgattatcatgttctctagctccaacaagcttcatgagtatatcagccctaacaccacaacgaaggagatcgtagatctgtaccaaactatttctgatgtcgatgtttgggccactcaatatgagcgaatgcaagaaaccaagaggaaactgttggagacaaatagaaatctccggactcagatcaagcagaggctaggtgagtgtttggacgagcttgacattcaggagctgcgtcgtcttgaggatgaaatggaaaacactttcaaactcgttcgcgagcgcaagttcaaatctcttgggaatcagatcgagaccaccaag

SEQ ID NO: 172695 - DNA, 546 bp, Arabidopsis thaliana
  unsure (1)..(546): unsure at all n locations
agtttaggtgacctatangaagaatttgacgtcgaatgcacgcgtacgtaagcttggatcctctagagcggactgcccttttttggtttttttttttacaagctcttgatgttgataaaaactaacaaatgtttacatgcattatataatttgagtagagaatacatatgcatctctcaactctttgagcgtctaatccaatacttgtgtgatttaagacttattattagaaactaattaattaattgagtggaagagggtggacgagcaaggaccggacatgattgacggtcttagccttgtcaggacagccatggccatcaccgtactgataaacgcactgagccacacgtccaagattagccgcagcttctaggaaaccttgatgtagcctacaactctttttctccatgtttaagtcatcccaagccacaccgataattccttgaatgtacgcgcgtgactctgcctccgaagctccagtttcatgcatgtgacattgtacggatttcatagtgtcgcctctcgctaattcctccgaagaag

SEQ ID NO: 172696 - DNA, 514 bp, Arabidopsis thaliana
  unsure (1)..(514): unsure at all n locations
aggtgacctatagnagagctttgacgtcgcatgcacgccgtacgtagcttggatcctctagagcggccgccctttttttgtttttttttttttttttttttttttttttttttttttttttttttttttttttttttttttttttttttttttttttttttttatttttnaaaaaaaagaaaaagccccggaaattaacaaagggggaaactttccaaaaccgggcttgtttttttctttggcccggttattgttaaaaaaaattttcccttgaattaaccccccaaaaaaaccccccggggaaaacttaaacctgggaatttagggggaccatcaagctaggggcaaaataaaccccccgggcccccccttttttaaaccccctatttctcctaaaaaaccaaaaaaaaacccctacggggaccatttttaggccccctttttggggaaagggagtcccaaaaccaggcaaccccggctggaccccccccgccctttgactaatttttttggg

SEQ ID NO: 172697 - DNA, 542 bp, Arabidopsis thaliana
  unsure (1)..(542): unsure at all n locations
cagctctcctacgactcactattgggaaagctggtccgcctgcaggtaccggtccggaattcccgggtcgacccacgcgtgcgcggacgcgtgggcgcagaagttgatctcaacaagtgtgagccttggcaacttcccgggagagctaagatgggagagaaagaatggtacttctttagcctccgtgaccggaagtatccgacgggactgagaactaacagagcaactgaggctggttactggaaagctaccggaaaagacagagagatctttagttcaaagacttgtgcacttgttgggatgaagaagactcttgtcttttacaaaggaagagctccgaaaggagagaagagtaattgggttatgcatgaatatcgtcttgaaggcaaattctcttaccatttcatctcaagaagctccaaggatgaatgggtgatctctagggttntccagaaaaccactttagctagcaccggagccgtctccgaaggaggaggaggaggaggagcaactgtgagcgtaagcagcggtactggtccatc

SEQ ID NO: 172698 - DNA, 546 bp, Arabidopsis thaliana columbia
  unsure (1)..(546): unsure at all n locations
atgatactccagctctctacgactcactatanggaaagctggcacgcctgcaggtaccggtccggaattcccgggtctgacccacgcgtccggtctcgcaacagtagaagcgaacagcaaatcttactgactactaccaaggcaccactcaccatgaccatgatgatcattacagtgttcttatcacagattgcagcgcatctcccaatacttgtcaccaattctcaaaccggatctgacctcttcgcaccgtctgacttctccgattcgctgaatgatgtcccgtcggttattgaggtaacttaaccgcatcctctgatcctgagagtatcgttctcgatccatcaggagaaggtccgtacgttgctagatcagattggtcgatcatagattggcactctgaacccgttgtatggtcacatcattatcacacattatttaacaggcagtaatgcgctcatccatttgctccagattgtgtagcatgtctcttgaaggccattagagtcagctgtttcgatcaggtaaccgtacatctctacatat

SEQ ID NO: 172699 - DNA, 538 bp, Arabidopsis thaliana
  unsure (1)..(538): unsure at all n locations
cagctctcctacgactcactatanggaaagctggcccgcctgcaggtaccggtccggaattcccgggtctacccacgcgtcggcccacgcgtccggttctgatgaaatactggggggatacttgtacttccataaggctcccaacaagaaagaatttcatgaagaaacatgccgaaagatcaaagctctccaccaatttgattgtttgagagctaacaaatcaacttctgcgtggggtgtcgaagctcgtgtgcctttcctagataaagaatttttaaatgttgcaatgagcatcgatccagagtggaagttgatcaagcctgatctcggaaggatcgagaagtgggtgctacgcaatgcctttgatgatgaagaacgaccttatctaccaaagcacattctatatagacagaaagaacagtttagtgatggagttgggtatagctggatagatggtctgaaagatcatgcaaataaacatgtctctgatactatgctgtcaaacgcaagctttgtcttcccggataacacacctctg

SEQ ID NO: 172700 - DNA, 557 bp, Arabidopsis thaliana columbia
atgatacttcagctctctacgactcactattgggaaagctggtccgcctgcaggtaccggtccggaattcccgggtcgacccacgcgtgcgatttttgtagaaatcgaaactgggcttgatcaattttgactctttgcatccaatttcgattctaatctccgtaattgttctccgaatcgggtcaatttcaagttgggaaacaaaccctagcgaacctccattgatgtgatctctctctctctctcacaacttgagaatcaactctctagaaaatatcagaaaatcgttgaaaaaatctggtcttttctggagggaaatgccaggggtagctgtgaagctctatagcgtcttctttaagttactattgaaacatcgtcttcagaatctgatttcaatttcagctgctgatggcttatctgattccttgggtgtttcgcccgatccgatgaatccgtcgccgccgcgaatccgtctttcaccgacggtgttgccaccaaagatatacacattgatccaatgacgtcactcaccgtagggatctttcttcccaatctgc

SEQ ID NO: 172701 - DNA, 545 bp, Arabidopsis thaliana
  unsure (1)..(545): unsure at all n locations
cagctctctacgactcactattgggaaagctggcacgcctgcaggtaccggtccggaattcccgggtcgacccacgcgtgcgggcattgggacagatataaggagtcttttcactgctcctagtgcgtctgcattgcagaaagcccttggatttggagatgtctctcttttgaatcccattcttgtgcactgcaggacttctgcaaagcccttttatgcgattatccacagggttacagggagcatcatcatcgactttgaacccgtgaagccttatgaagtccccatgacagctgctggtgccttacaatcatacaagctcgctgccaaagcaatcactaggctgcaatctttacccagcgggagtatggaaaggctttgtgatacaatggttcaagaggtttttgaactcacggngtatgacagggtgatggcttataagtttcatgaagatgatcacggtgaggttgtctccgaggttacaaaacctgggctggagccttatcttgggctgcattatcctgccaccgacatccctcaagcag

SEQ ID NO: 172702 - DNA, 476 bp, Arabidopsis thaliana
ggtgcactatagaagactatgacgtcgcatgcacgcgtacgtaagcttggatcctctagagcggtcgcccttttggttttttttttttttttatcataatatatctaagtaataataataataaaaaccgaaattaatgtcattaagagagacgtaccatacgtttaaaatattttggttttccacatcaaatattttcttaaaattatagttttctcatcaccaagcgatcgacgaagatgaacaccaccaaaaccctaaaatctcaagacggatcaacagtacggcgaccatcatctccagcggcggctctcggctgctgaaactgagtgatctgtccaatggcaagaatcccaccgtcgtagttgttaccggccggacatccaagccaccaaacatttgttctctaggaaaaaactgggggggggatagtgggctctcacggcggtggctgttcatcttgtgctccggggagt

SEQ ID NO: 172703 - DNA, 540 bp, Arabidopsis thaliana columbia
atgatactccagctctcctacgactcactattgggaaagctggcacgcctgcaggtaccggtccggaattcccgggtctgacccacgcgtccggcaaagcaaaattcgaagagacacaaaaaaaccttcgtttgtgtctcagaatttacaaagttttgagtcagtagagaaatggcgggaatcgtgacagagccgtggtcagtagctgagaacggaaacccaagcataacggcgaaaggatcgagcagagaactaagacttggaagaaccgctcacaacatgtcttcttcttctttgaggaaaaaatcagacctccgagtgattcagaaggttccatacaaaggtcttaaagattttctctctaatctccaagaagtcattctcggaacaaagcttgccattctttttccggccattcctgccgccattatttgcacctattgtggcgtcagtcagccttggatatttggacttagcttgctaggactgacacctttggctgagcgagtcagctttttgacagagtaagtatccgaccat

SEQ ID NO: 172704 - DNA, 546 bp, Arabidopsis thaliana columbia
atgatacttcaggtctctacgactcactatttggaaagctggcacgcctgcaggtaccggtccggaattcccgggtctacccacgcgtccggacgacgatatcgagatcgatccaaccaactctgcagctaacatctctaaggtttgattttccgatgatgagggtgatggagcctccgcctatcgaggaggcagctttggccccagtatcggtcttctgggacataaaatcgtttccggttcccgatggctatgatgctcgactggtgggtccgtgtatcaaacggaatttgaggaagttaggctacacaggtcctatcaccatcactgccgttggcgtactatcagaggtccctcgtgacatccttaaagcagtgtattccactggaatctctcttaaggaggtcattaaaagtccgacaaacatgtatgctcttttccttgagtcctctcttcttcgtactccacctccagctaatatgatggtcatatcccgtccaccatcctacattcctcgacacttctcttctatacgtgacaaggacc

SEQ ID NO: 172705 - DNA, 495 bp, Arabidopsis thaliana
aggtgacctatagaagagcttgacgtcgcatgcacgcgtacgtaagcttggatcctctagagcggcctgccctttttgtgtttttttaaacatagtgtacattttattccaatacatgcacattgcatccttattttgctctacacgctcatggtctgtatataaggatagctaagcaaatcctagcacaaaacggttgattgttatccacacagagtcacagcagattcatggtgccgcagtagcattcacaggtcttattatgaaccagtgcgaacactctgtgatagactccagagttactagcatacacagcaccaacttttcgaagatattatagtagaaaggtctgcgagtgaactatttatggagtatattgttgaggctactcaaacacacatagtcatgacactctctagcacagagagggtgagtcttactcatggcattctgcacgactataatggaggtgatgattgtagaccgagctatgca

SEQ ID NO: 172706 - DNA, 553 bp, Arabidopsis thaliana
  unsure (1)..(553): unsure at all n locations
ccagctctatacgactcactatangggaagctggcacgcctgcaggtaccggtccggaattcccgggtctacccacgcggggcggacgaacaaaacttggcttccaaaagaaaaaaatcgacgaggtctcaaaggaagcagagaaagtaaaaagctggttagataagaatgtggctgagcaagaaaagacttctctgtggagcaaaccggtgttcacgtccactgaagtgtacgctaaagtatttactctacaagacaaggtcacaaaggtgaataagatcccaaagccaaagccaaagatagagaaagtaaccaagacggagaacacaacaaaggaggaggaacaatcaaaatcctctgatgaagctgccaaagaagaagaaagtcacgacgagctttgattaaggatatataataaatagagttttcgttaatttttgtgtttttaagaggggaaataggattaaaagtaggcagctgagatgagcaaaaggattttattcctttctcctcaacttcttcacatcaccattagaaacggaatattctgtgt

SEQ ID NO: 172707 - DNA, 527 bp, Arabidopsis thaliana
gctctctacgactcactatttggaaagctgacacgcctgcaggtaccggtccggaattcccgggtctacccacgcgtgcgtccaaatccattacttctccaccctctttagccttagggaagtcaggaggaggaggagttatcagaagttcactatgtaacttaatgatgccaagcaaagttaacttccctagacaaagaactcaaactctaaaggttagccagaagaaactcaagagagctactagtggtggtcttggtgttacatgcagtggtggtgataagattctcgtagcgaatcgaggtgaaattgcagttcgtgttatcagaactgctcatgaaatggggattccttgtgttgctgtgtattctactatagataaagatgctcttcatgttaaattagctgatgaagctgtttgtattggtgaagctcctagtaaccagtcgtatttggtgattccgaatgttctgtctgcggctattagccgtggatgtacaatgcttcatcctgaatatggttttctt

SEQ ID NO: 172708 - DNA, 547 bp, Arabidopsis thaliana
  unsure (1)..(547): unsure at all n locations
ggtgcactatagnaagactatgacgtcgcatgcacgcgtacgtaagcttggatcctctagagcggccgccctttttttgtttttttttttttttttttttttttttttttttttttttttttttttttttttttttttttttttttttttttttttttttttngggggttaaaacccttctcaataaaaattcccacccatcccttgttttctttcccaaaaatggggttttttttccccccccctggaacaaaacacccctttttttaaacccccaaattttttttttttggcccccccagcaaatcaatttgaaatttttccggaatttattgggcttttggttgttcatcccctaacatttaaaagccccctttttctttttaaacgggccccccgggttttctttttttttccggaagggaggacccccgggggtttttttttttttaaacccaattttaacctaagggttggtccttaaatttcccccccttttttttggcccaaaacaaactgaactttttcccttgccttaaccgaaata

SEQ ID NO: 172709 - DNA, 416 bp, Arabidopsis thaliana
  unsure (1)..(416): unsure at all n locations
ttgacgtcgcatgcacgcgtaccgtagcttggatcctctagagcggccgcccttnngtggtgttgttcttttttttttttttttttttttttttttagtttttttgtaaaaaaanggaagggggataaaaaaaaagggttggggggtgcctattggaataaagaaccggctctttgaaagaaaaagatctttttctcttcaacaaacggtgtttttattccccctgtggtggctcaactccatcaatcgattaattgggtgtgcggtgtgaaaatcggttttttgtttgggcgacacacgttttttctgtatattttcacccaagtttgtggatggttttttaggagggggggacaattcttttttttgagagaaactgaaaaatttttctttgggagtctttctttttccctaaa

SEQ ID NO: 172710 - DNA, 520 bp, Arabidopsis thaliana
  unsure (1)..(520): unsure at all n locations
tatagaagaactatgacgtcgcatgcacgcgtccgtaagcttggatcctctagagcggccgccctttttggtttttttttttttttttttttttttttttttttttttttttttttttttttttttttttttttttnaaagcaaaaaaagggggttttttttgggggggaaattccttaacccaaacttttaaaaacataaaaggggccaggggcttattaccccctcgggggggggaacaacacacttgggggggggtccttccttaaaaggcccaatccaccgcccgggggggagggggttacaaacccttattttttttattaaaaagggatccccgatgggtcaaagcttaacggccccccccgggaagcttttccttgatcttggccataatcccctttttttgggggggctcaccaccggagccaccagaattatttccggatcccaggccgcccattgtttgagcttgaccaaactgatcatgaagacctggcaacttccccttgacctttgg

SEQ ID NO: 172711 - DNA, 491 bp, Arabidopsis thaliana
aatacgactcactttagggaaagctcgtacgcctgcaggtaccggtccggaattcccgggtcgacccacgcgtccgaatggtgatactagctacccatcctgagaagctacctctatctattctatacgccgaccatcatgatgcgacgaggcaacaccatcaaagtatcctactacatagaggctgctcctacgatcatcgcaacagcctatctggcaccaaccttcttatcagatcggtgcagatgatcgacccacatgacctatgtgaactactcgagcaggaacctcggctttagtttaacatactaccggtgacaacagacatactgtttggatcgcggacttacagtattggatgtaccataatatcctatactgctgatgtggtcataccggatagataacgtctgctaaaggaggtagagacaagcggacccatcagaccgatagatacatgcatagttgatccatatgtcacgccgctgatg

SEQ ID NO: 172712 - DNA, 868 bp, Arabidopsis thaliana
attgggacgacctatagaatagctatgacgtcgcatgcacgcgtacgtaagcttggatcctctttagcggccgccctttttttttttttttttttttcagttgagacgacattatatacatgaaatagagttttacatgtcaattcaaacaattcaaggtaaatctaaggacattgattattggagtataaaaaatctctgagaagacattaattttggtctgttggattcctctacacagttatgtagcatttctaattaaaaagtagaatgattatgtttcatgtcgtgccagattgcctcaaagcagttagactaaagccaagatgcaacatgacagggtaaggtcgaaaaaaatcggatgaagattgagtctctctgtgactctgatcctgaattgggaattcatatactgggcgtttggatcttggtccaaagtgggaagaggcatgacctgcccattccccattctgattctgagggggggggagtcatcggaatcctcgctttggcccggggggggccgaagttggggggagcataaggtagaccttattgttttgagtccggagatcccagaggttgaccgtattgattttgattcgagagagccaaaggtgacccttcttgtttttgagtcgggggaccaaagttgaccggcctagttctgagggcaggagccataggtggaccttctggttttgagttggggaaccaatggtggcctaactgattctgagggggctgcgaggctcgaatctacactgctggtctttttctctgccggtgcaaagatatttgcatattaaaacccttccgggaatgtctgtgtcatattcgaggcttctcttacactgacaagtctttt

SEQ ID NO: 172713 - DNA, 528 bp, Arabidopsis thaliana
  unsure (1)..(528): unsure at all n locations
atacgactctcttagggaaagctggtacgcctgcaggtaccggtccggaattcccgggtcgacccacgcgtccgcccacgcgtccgcggacgcgtgggcaacaattcacacaatttctcgttcttttttgtttatcatcaaaagttgtaatctaaattacgtatcatattccgagcaagatgactattcttggtgaacattgtgttcctgattcaagagtggatgacaagaaagtgatagatgagagggataatgaattggtgtnggatggagggttttgaggttcccaaatcaaaggaaactgatgcattgcatggttcctgatctgaattttttgggccattcctttaaggattattgataatggagaaagcgatagacatcaaggggtgaggatttttacggatgccacagatttaacatacttatactttggggataagatcgaggaaggatcttggaaaccttaccagaatggaatggaggattgggaacggttgggggttttcgacaatcgtggttgatgaa

SEQ ID NO: 172714 - DNA, 810 bp, Arabidopsis thaliana
  unsure (1)..(810): unsure at all n locations
gggggggggagtccttgagtaactcatacgacctctatagggaaacctggtacgcctgcaggtaccggtccggaatcccgggtcgacccacgcctccgcctaagcgtcaaccgatgcccagggctgacatcacacatgacatttgtagctctctggacactatctacagtaccagtcggactctccgctgggattgcgcaagatatgactcctcatggcgaagactctcttcactgagccgcgaggaagatgactagggaagggatccacgagcatgacttcagaattggaggacgatggacgccatgagaaaagcacagtccttagactctgtggggttgaaactcctgccgacggaacttacctgggtacgcgcggtaatgcataaaaaagatcgctcacatgtatcctaccaccaaagtgttggaggcgctctctcgagtgcgatggcatttacaccacaggctattacttggacgtagagagcacaaacggcgcgaagcagtaggcgatgtcgcacaaacagggggggatcggtcccgggaggataaaaacgctttatgaaaattgtacctcgggcttcaatgagccccaatacggctatttggttccgacaacggggggaatgttgcggaggcgggctcgcggaaaacaagaacgtgcgacggctggttattaaatttaggtggccaagagggacgataccataggttcntctcacggactcacgaggagaggctgtgtgttcgttgggtcctttaggcgggagtgcgggtgtgccggcgtggggggcgggtgacgcatgaagta

SEQ ID NO: 172715 - DNA, 811 bp, Arabidopsis thaliana
actatagactagctatgacgtcgcatgcacgcgtacgtaagcttggatcctctagagcagccgccctttttttttttttttttttttttttttttttttttttttttttttttttttttttttttttttttttattatttttattttttttttttttttttttttttttaaaaagggaaaaacccccccaaaaaattaaggggtttctcacaaaaccaaaaagaggggcctccattttggttcccggggaaaaaaaacctaaaaaaacacctcataaaaaaaaaaaaagcttgttttttttggggggcccgcgctataaaagggctggtaaaacccgggaaaaatttaaaaaaaaaaaatttttgaaccccccgggaaaaaagaaccacctcccaaaaaaaattttttataaggcaaaacgcaggggttccaaagaaaacccctttacctttagaaaaattttttaaaccacaaaacaaaccagggggggaacccttccctcccccaggggccacagaaaaaaaaaaaaatcctttaaacccgggaaccccgggggaaaaaaaaaaacttttttgggaagagaaacatcccccaaagcggaggtggtgttaaaaaaaaaaatttttatagccaaacaattttttataaaaaagggttaaatttgtgaaacaagggggaaaaagaaaaaacccccctggaaaaaaggggggtcttaattggaaaacggctcaacaaaaagataaaccccatgggggccatgttaaaaaccaaaaatccccccccctgcgaaaaataggtggagagcaaaaaa

SEQ ID NO: 172716 - DNA, 966 bp, Arabidopsis thaliana
  unsure (1)..(966): unsure at all n locations
cactactagattagctatgacgtacgcatgcacgcgtacgtaagcttggatcctctatagcggccgcccttttttttttttttttttttttttaagttcaataaaaaactctatgatcaggaaaatccatattatatatataaatatacaagcaaaaaaggatagaaattggcatatgatcttgcatacattgctccaatattgtgtaaccaatatcccaaaatgattggtttgaatctcaagaagctttgataagatgaggaagacaaatgagaaatatgcatttggattttcttggttggctttgcattttccttatccatgaggaaaacccacttccctctntcttctttctaccttttttttncttctgaaattcttttagcatcatattttggtcattttttttaactttaaattccttttgtggactttcaactttagtgccttctcaaaaggcaattattaagttccaactggctttttggtaaactcttcatgaaccggaggcggttttgctgaactaaattttcctggtcacttacaaattttgggttagaacccaacaattttttattttggaatagaacaagagacggagaacttgggtccccaatgaaggatcttaactttaagaataaccgggtttggaaggggaaatttatatagaagggaaatctttggggggaaccccttgggggttaaattcttaaaaaatcttaatttcgggtttaaaaagaaaaactcaagagacttggaccagaaagggtgtgagtttgctctgcggtgtcgacctcttagagaatgacaaacgcatatagataggacagggaaagcttagtggcccaggttgtgggggggaggtgtggccgccagcggaagtgcgttgcggagtccaggcagaagcgccacgggcgcccggcccgctccccgcccgcaagagtcaaaaacaggtgtatctgagcg

SEQ ID NO: 172717 - DNA, 781 bp, Arabidopsis thaliana
cactatagcttagctatgacgacagcatgcacgcgtacgtaagcttggatcctctagagcggccgcccttttttttttttttttttaattcataagcccatgtaagcccatagaatatttaatgaaacagttcctctttttctgataaactctcaatgtcgaacgttggtttaaaacaggtagaaaacaaacaaaccatgttacaggagacgcccaaaaccatgtggtgtgtacctaaatgcgataaccagatcaaccacacaccgacattgctggcgaagaattcataaacaacaggatgttttgcttgttgtcatccacctggagaagactttgcttcaatctttttttggagttgctatcgtcgtcctcctcctcttcctcctcctcatcttcatcggtacggccggaataatgcttcaggtcctcttctctcagctcctcctctctccgcttcatcctccgagcaatccttttgtcataatctttctgaactttgtccattatagtgtcaaaacccgggactgtcctctccagcttctggcctactcgaacactcaggttgtagaaaatccggaatagcctcatgacactcctattccactctctgatataaggaggaccagtggtgtaggtaccaagcgggtcacggtaccactctgcaccatagctgatctgaaccatagcttgctcgatactaatcacctcccatgcccttaaccctgagattactttggccaactctagtcgtaagtggtttggggatgaacttgttcggcat

SEQ ID NO: 172718 - DNA, 686 bp, Arabidopsis thaliana
atttaggcgaactatagaatactatgacgtcgcatgcacgcgtacgtaagcttggatcctctatagcggccgcccttttttttttttttttttatagaaaaccattgtttacttaagactagttcctgaaacagtttcaaaatgttaagaagcaagttgttaaattacaacactacagataatgttacaaaaagtaggttttacctaagtcttatctaccacttgctgccaaatttgactgggtctgatttagtactagcttcacctgtttcttcacccaactctttactctttcttaattccagaaccttcctatgaaagatttgagtgaatctcattcgagaacgtcggactatccggcggtctgtatttccggcagagcctaccagacttaaaccggactcccatgcttaacataaagtttttggaccgaccggaccggtttccactggggtgtgttgtgtggccacattggttgcatttcgtggaacacaaggaccagttcttggtttttcttccttaactgctctgttgtagctggtagtgattgggtgaaacaaggggccaacacgaatacgggtgaaactggtacgaaacggttgggatcttgggtgaccgggaattttacaaagctaggttaggtataatgtgacatctaaagagaggaagataggagtagcggataa

SEQ ID NO: 172719 - DNA, 703 bp, Arabidopsis thaliana
  unsure (1)..(703): unsure at all n locations
atttaggacacactantagaattactatgacgtcccatgcacgcgtacgtaagcttggatcctctatagcggccgcccttttttttttttttttcacaacaatgatattttcaacagagtactagtagagtatgtttataaggagggatagggaatttttttcaaacatagaacagattctctgagagagaatgttttcataagagagtattatatagctaactctgatttcagcaggtcaagagaggagatgacccactgcatttgacatcagaagcatcagaaaggcgttgtcttggagagagtgttgtaatcgctgcaacatctaacgcaagattcattataaccttccttttctgcaactctggtacacggttccttctctcttctgacctttaaccattgggactcaaagtctgtgtttttgctgctccaacgtcttttccatctgttgcgtataggattttttttatggacccaccaagaggtaagtgctctgtgtctgggttttgcagagaatcttacttctctgagtttaaagaataaaaatctctctcttttctaacctgcaatggaaagttacagtctgtgattttttatcataagcggccctggtaagattgttagctgaggttttaaaagggggggaattcccattgaagatgggagtcccgtggtgttggattgggctctgcttccggtt

SEQ ID NO: 172720 - DNA, 708 bp, Arabidopsis thaliana
  unsure (1)..(708): unsure at all n locations
cctatagacttactatgacgtcccatgcacgcgtacgtaagcttggatcctctatagcggccgccctttttttttttttttaattgaaatcagacttggtttaattagaatcaatcacaatagagaaaactggaattcttgtaggtacagtgtattacagatgcatcacagctaatagttataaatacaaacgtggtgtgttgttctgactcttatctacaaacacttaatctggacccaaccaaccataaacaaacccacactggtccattggtccacatagtctcttaattcggtttctttagcaattcttcataccacaatccatgaacagaacgtgacactgttgccacaagaacaagaatgtctgaaacctctatgaccttgtccgagagagaagctgctccgatctttcttagcattgtttccaccaactgctttctcttcgtgttgtttccggccaaaaccgcggctctaatggctaggtatatggtctgtgatacatgtgtgaacactgcgtctcctgcttgtagcttttcacaagcatgtttgcgattacttgtttctttgtctctgcatcgntagaatcaagaggctcggagaggtgttccatgatttctgaaagacctgcatcaggttttgcgtctagcatctcgtaaagacggtttatgcaagtccgtgtaataacctccatgtcaatcgaggatg

SEQ ID NO: 172721 - DNA, 934 bp, Arabidopsis thaliana
  unsure (1)..(934): unsure at all n locations
cactatangactagctatgacgtaccatgcacgcgtacgtaagcttggatcctctatagcggccgccctttaacctttttttttttttttttttttttttttttttttttttttttttttttttttttttttttttttttttttttttatttttttttttttggggggaaaaaccggggcctaataaaaaaccaaaaaaaatttttgtgtgtgataaaaaaagggggggggggggggccctttttaactaatcttccccaaaagggcgccctgaaacaattcaaaaaaaaggaaacaaaaaaaaaaggtcccccggaaccccttggggaaaaaaaaaaggggtctcggaaaaaaaaaaccttgggaccttaaaatttccgaaaaaccacttgggttgcaaaagaggacaccagcaaaggggtgcccttggtttggaaaagcccccaaaaccccacccagcgggggggtctataaaaacccctttcactccccgtttttttttaaagggccataacaagaggggggcaccgcggaaaacctcgaaaagggttgggaaaccaaaagagagggtcaaaaaggggcccctgggggaacccaaaaaaaaggggggaaaggccgaaaatccggtggttaccctggggcccggggggaggcgccccaccccccctgggttaagggggaggagaaaaaaaacccctggaaaaaatcccggagaaagggggggcataaaaccacccaaggggaagaagcgcgcccctcaagggggagacccctccaaaacggcggccaatttgggcaaagattttttgggagctctaacaaaacaaaaggggggtgggggactccagtgaagaagaaacccggccaaggggcccaggctgggcggcataaaaaacaagccttatagaacgagcggaacaatagaaaaagaagc

SEQ ID NO: 172722 - DNA, 586 bp, Arabidopsis thaliana
tatagacttagcttgacgtaccatgcacgcgtacgtaagcttggatcctctatagcggccgccctttttttttttttttttttttttttttttttttttttttttttttttttttaaaaaaaaaaaaagggattgaattaaagaaatttcaaactcaaacaaacagctcaccattttggcggtttttcaccaaactcaaattatatccctttccatgaaattaattcctcaccctcagattttgatccagaaaatagatcagataaaaattttaccattccccataaaataaattttggaatttttatggggatgatttattttatatgataattttttcctcaaaacttgaaaccgagggtgggcctttttttagcagaagactctttcttcggaggccttgcttgtggaccaaaaaaattctggagcgacttggttttgtagttcccggaccggccagtttccttaaaaagctgggccaaacgtttcttttggttttaaaaatccggtttcgcagtccggagcttttcctttctaagcttaaaaaccggtttaattttaatgggatcctttttccttccatagc

SEQ ID NO: 172723 - DNA, 507 bp, Arabidopsis thaliana
aatcgactttcttagggaaacctggtacgcctgcaggtaccggtccggaatttccgggtcgacccacgcgtccgggtcttaagatccacatccagactttgggtgatactgatccacgagttggagaaacttgcaggtactgagcataagcatatggacaagcgatagcacttcagtaaagcggatgagttatgcgatgaagactctagagattcaccgagcgcatagggaacctgcttcactggaggaagcacctgattggagagagatggcaattatctgctaggctaacggagatcatgaatccgctctagagcatcatggtcttgctagcatggctatgattgcgagtggacaacaatgtgaagacgcatagattgaagcagaatgggaagatacacatgtcactgtgccgtgttgatgaccctgtgtctaaatatgaaagggctctcactgtgttaaaggcttctaaaggagagactcatcccgacggaggcgtcagaggtt

SEQ ID NO: 172724 - DNA, 644 bp, Arabidopsis thaliana
tatagaattagctatgacgtcccatgcacgcgtacgtaagcttggatcctctatagcggccgccctttttttttttttttttttttttttttttttttttttttttttctttttttttcttttgttttttttccggaaaaatcccaaattttttatttggaaaaccttactgaattttaaaaccctttacatgggcccaccttcaaaacatgggcccttttaaacaaaccacagaaatccaaattctttaaaaacttaaaacttcccaaccaaacaaaaccacatgggcttttacttcttagttaggcggtttgaagaactggcccttaggcccatgggggcccatactccaatcccccctttgggaaaccgccaggttgatggcagttccaacccatcctaacccgaaggggaatccccattggaacttgttttgcgcgggttttttatccaaaccccccttgaggcggggttacccctttggacccggaagaggggtccccccgaccccccccgaaggctctgccaaaagggggagacctcccccgtgaaaaacgggcccaaacccaaaaaggtctgggaaccctggttgggcccaatttgaacacggttggtgggtctggttggggaaaccatgttaaaag

SEQ ID NO: 172725 - DNA, 667 bp, Arabidopsis thaliana
actatagctgagctatgacgacgcatgcacgcgtacgtaagcttggatcctctagagcggccgccctttttttttttttttttttttttttttttttttttttttttttttttttttttttttttttttttttttttttttttttttttttttttaaaaaaaaggggcccctttttttttcaggggaaaggtcccccccccttttggggggccaacttaaaacccccccgaaaaaaagggacagggtgggaacccgcctaaaatttgggggaaaaaaagggaacgcccccccaaaaagaaaaaaattcctgcaagagggcggacagttccccaggtttccccaagaaaaaaaaaaaaccgccaacaccgggtttaaatttggggggggggccccccgccccggggggcccttttttaaaaaaagggggaaacaccccccccccagggggccggagaaggggcctttacccctataaattccaaaaaacctttttttttggtgacaaaaaattttttcaccaacaagagggggggccggaaccccgagggggggaagggccccaaaagaagccaggggcacaaaagaccccaatagaaaaccccaacaaaacaggggaccgggggggttgaggaaaaataaagggggggaacccccaccgggggctct

SEQ ID NO: 172726 - DNA, 834 bp, Arabidopsis thaliana
  unsure (1)..(834): unsure at all n locations
actatagactagctatgacgtcgcatgcacgcgtacgtaagcttggatcctctagagcggccgccctttttttttttttttaattgtaaagatttttttcatacaagactgattcatcatccttcagggtcaaaggcttagacactcatacacaaaatctattatctacttccaaaagtcaagcaacaagactcactaatgaatctaaacctaacagaaaacaaaaaacaatccttaacgttgctcattgttctaggcgtgccttctgatcggtgagtgaaacacgatttccggtgaagattgccatcagctcagccacaagctgcttgtcatcatgtttgctaacatacaaatttaaaaacgactcactagtacttgtcaaaacagaagacattggagggagttcactttcaagcaatccttttgacatgagaactttgataacattacaccttgggacagtcctcttctctaggctgtatccaagtacctgagggattgaagccacagcctttactggccaattcatctccttgacccaaaactcagtcttcttcttcaccgnctctgtagaatatccaatacacggaggaaaccgcttgaacatcatcataaacacatctctgctgaatcctagacctagaaatgtttctatagagttggctaccttcttctncgatggttcaaagagcgtgggcactccttgaaatttgcctacatatcaacagagaaactacactttatagactcggatttttcttcatcgttttgcgctatttggaaagctatgcaagcgtgacaacgttgagggggtggatcaaaccatctaacacc

SEQ ID NO: 172727 - DNA, 598 bp, Arabidopsis thaliana
  unsure (1)..(598): unsure at all n locations
ctatagaattactatgacgtcgcatgcacgcgtacgtaagcttggatcctctagagcggccgccctttnttttttttttttttttttttttttttttttttttttttttttccataaaaccatctgggtatataatggattaaaatacattatccaccactaattaaggattttcatttctacatagaaatattatccccagttgttttttatatcctttttctaaagaatggaactattttgaaaaagcattatttcaaaatggataaaaccttctaaaaccccataatttggacccaatgaaaaccagttttagcccttttctttgtttctttaaaacaagattccgacaaaaacccacggccgttaacccctcgggtcttttcccgaccaaaaaggaaaaggttnttgacccttaggaatataaacttttggtttttaaaatacctttaaaaattaaccggggggtatggaaaaccaattggggacggttaaaattcgggaaaaaagggcggcggagtttttttaacgtactgacaaacgggggggtcaattaaatcactcacggtggatccggggaaaattatatttggcgggt

SEQ ID NO: 172728 - DNA, 652 bp, Arabidopsis thaliana
  unsure (1)..(652): unsure at all n locations
tttaggacgcactantagaagtactatgacgtcgcatgcacgcgtacgtaagcttggatcctctagagcggccgcccttttttttttttttttaaatgtaaaaggaattgcacaacgcacaataatgaactgtagtacataaaacacataaaattgtaacataaagcacaaaagaatgcaacaaagcaaacaacaaaaacatttcaacacaaacaactgcgcttaacgtggatattagttggtagataattataggtgaaggtcataagccttttgttacaggggttggccactgatccacctttggaacatgataaaggtctcgtttggtctatactctgccgtgtgtccacctcctttgatagtagcaaatgtcatcttattggaataagctctcgtgtatccagcgatntgattgtttatcatccatggcctccagttatgaatgggggagtaattgagagatcttatccaggcttggattgcaagaaaagggaccgcgatggcgtgatcaccactgtaaataagagaatcggatccactgatgctgttattcatgtgatatgggattgctgttacaatggcggggattggatggaaatagcccgattacatcgcgcccattttcctttctacccttttaatatgaaaa

SEQ ID NO: 172729 - DNA, 578 bp, Arabidopsis thaliana
gcactatagaatagcttgacgtcgcatgcacgcgtacgtaagcttggatcctctagagcggccgcccttttttttttttttttttttttttttttttttttttttttttttttttttttttttttgggaaaaaaaacccaaattttttttatttaaaatattttacagacggggggctttaaaagcattatttacatttttggttggttttttcacacacatttttttttacattatgggggagaaaagaaacattccctatctaaatattattacatggggtttctccgggggccttatcttttttaaactataatcccttctgagcatggctacattttttatttaagaggatgggcaaacctcaaattcaaaaggagttggataaaaattttaagtggcgatccccccctggggtttttcgtattatcggggaaaaaattttttagaaaatcggcgggcccccaaggaactctgatagccggatccgtgctgttaatacagtttctccttttggaaaaccaagatgccggaaaacacccttttccaagggaccataaaaatatggctgcttataa

SEQ ID NO: 172730 - DNA, 565 bp, Arabidopsis thaliana
cactatagacttactatgacgtcccatgcacgcgtacgtaagcttggatcctctatagcggccgccctttttttttttttttttttttttttttttttaagaaaaagaaatgcttttatttatatagaaagacgtatataagttatatatgttacaaggataagcatttcattgctctggaattttcaaataaacatggcagacaaaactgaagtcaggaacccaaattgccttatcgaaaggaccatgtgacacttctcttcatgtaatgacagtgggcttctccctccctgtgaagtccttcagctttgatacagacaatgcaagatcgattaaaggtttaagagctatttgtgcatccacatcatgttttgaaacgtctggctcaaattgttcaatgtatattcccactgtagctccagctgagccagttccggataaacaaatatgatttctggatccatccgtgaacacaaaccgaacaccttgcttggatgcaacacttccatcaacagggtctgtgtttgagaagtcatctgcaaactggagggacatagtttccata

SEQ ID NO: 172731 - DNA, 764 bp, Arabidopsis thaliana
cctatagctgagctatgacgtcgcatgcacgcgtacgtaagcttggatcctctagagcggccgccctttttttttttttttttttttttttttttttttggctggaaattacaggtatgtttattaaaaatcgttgagcaaacattggtaggtctcaacaagaagccagcaaaggaaactgattcagtaaaattttaacacacttttctccttcaaggggggggtaaatatcaaagcgaagaaaagagaactaacacggatgggcttatttagcagcttcaagagcagaagctccagagataatctcaataagctctgttgtaatagaagcttgacgagtcctgttgtatgtgagggtgagacggtcgagcatttctcctgcgtttctgcttgagctgtccatggcagacattcttgctcccatctcactacatgcattctccagaaccgcattgaacatcacacaagagaattggaactcggccagattctgcaatatttctccctttgtttccccaccttcaatctcatatgagtcaagctcgccaagttttcctccaatttcagactccttctcaaaatctcaggtgacaaaaccggggacacaggtggcagaaatgcgacaactggttggaacttggtggagacattgcgcaaagcatcaaattcaccgttctttaggaggcatcaagctaaactgacacctgggcataagggaggggggtcttattaactttggcacgagaggacaatggggtctttga

SEQ ID NO: 172732 - DNA, 938 bp, Arabidopsis thaliana
tatagactactatgacgtaccatgcacgcgtacgtaagcttggatcctctatagcggccgcccttttttttttttttttattatccatagtaaactgaaaattcaaaaagggagtacggcttacaggtcggtctgatttcggtttaccaaaccggttcacagtttcacacagaatatcaacattactggttcatacacctttttacaggatcattcaacacaagtacacaaaacataggcaagaagctctccatttatcatcatcccctccactgatccttcttgttccgaacttccctcattgtatcaattggcgacttgcaaccgagtttctcctgtatctctggcttatcaacacgcataaatggatttgtttcaagctcttcctccagtgttgaagggattgtggggaagatctgtttggcgctgttgacggccccatgctaacttctgtggatcttcccgtggttaggttcacagttagagcaaattcacagtcttaacggggactcatggccgcagaaaacctgtgtcgggtaagggaatgaggcctgatgcccacacagcacctgatccatgtggtaagcgggccctgcaaaaacttcccacttccgcaccaaaaagtgtttttccgggaacacgggggggtttttgcttcttttcggggcactattgacaaggtccccttggggggacaaggcggaaggagagccacttggtatacgccgcgaaagggagcggagaacttttaaccggggcggggaccctcggcttacgcagagaccgcggacctggtgtgtgggaccactgtttatcttgtcctgtgaccggtagaccaacggaaggagaggaggagaccgagtggttggggtcaaacgcacacactttggagaagcgatcagaccggagtgccaggcctgactccatacgagagagcg

SEQ ID NO: 172733 - DNA, 861 bp, Arabidopsis thaliana
aattgaggcagcactatagcagagctatgacgccgcatgcacgcgtacgtaagcttggatcctctagagcggccgccctttctttttttttttttttttttttttttttttttttttttttttttttttttttttttttttttttttttttttttttttttttttttaaaaccctttttcccaaaaaaaaaaggtttttttggggaaccggggaaaaggggaactcccccaaaaaaaaaaaaccccccctttttttggggggaaaaaaaacccccaaggaatttaacccccccccccccccggtattcttaaaaaaaaaccctaattttttaattttcccaaaaaaaaaccccgaggggccccgggcccccaaaaaaccacaaaaattccaaagggagaaaccctaaaaggccccccccctatcaccaaaaaattgggggccctaaaaaaacagcccccaaagggggtttttttttttgggacagcccccacacaaaagacgcccgttcccccacccagggggggcagagccaaaaacggggagggaaccgcttgggcaaaagcggccccgcccctctactgaggaacccttgggcgaaacccaaccccggccccgcttttagaaaaaacaaactcggagaacccgggggggggggcgaccttaaaaggagacccatagggccgcccccgagggccaaatttctaaaagaccccaagtggccaacgcccactggtgcggaaaaaaggccccaaaaaaaatctggcttccccgaaaaccccccctgtttaaaccccaaagagggtccccgacgcccggggcccagcgattcccgcccgccgagcgaccacgttccttaacgg

SEQ ID NO: 172734 - DNA, 534 bp, Arabidopsis thaliana
cgcactatagtatagctatgacgtcgcatgcacgcgtaccgtagcttggatcctctagagcggccgcccttttttttttttttttttttttttttttttttttttttttttttttttttttttttttttttttttttgttttttttttctttttctttttaaaaaaaagggaaaactttcaaaacacccggggacgacccacttgaaaattattccaaaatcccctctttcttgaaaataagccctctcggaaaaaaaaccctccttccctgaatgacggcgattccaaaacaaatggacccccttatttccttaaccccttttattgaaatttagtctaatcgggtgcacttcactttaaaaaagttgggcagggttttttataaaaccccgatgggaactggcaaaaacaacgaatgtttgggcagaaagcgccccaccggcaacgggggaatcttgggccatataacgcttaaaggatcgggggggaaccccgccaaggcttttaaaaaactcaacaacctccgcccccat

SEQ ID NO: 172735 - DNA, 800 bp, Arabidopsis thaliana
gcctatagcagagctatgacgtcgcatgcacgcgtacagtagcttggatcctctagagcggccgcccttttttttttttttttttttttttttttttttttttttttttttttttttttttttttttttttgggagaaaaaggagacccaaaagggggacaaaaaaaaaataaaaaagtgggacacgcacaaaaaccccaaaaactataaaaacaagggggacccgggcaaaacccggggaagaccagggcaaaaaaagggcagcgccgaaagaaccttgcccgagaggaaaaaaacccaagacatttctgcagagggggacaaatgcccggggaacgcgtgggaacgaaccccagaaacacggagaccgggaaaattgggtacaggacggcccggacttctggcccttattgtgagcaaccgcctggttatttccctcggggggaaagggggccgcggcattaccgccccagacaaggaggcccggacccaaccgggctgttggaagagtgtatagagcccctggggtcccaagggccgaaaccttgcgcctaccacctgaaaggacaaaacctggaaatgcccaacaacgaaaccgacgccgggaaaatcggcggagggggtccattcgcgggtgcgggggggacggtgccgcccaggaggccccaagagaaaaacacgcggacaaaacgcgagaagaacaggggtggaacggtgaggtggaaaaccagagggacagcgagaagggagaggagaggggaagggaggcttggggcgggggccaaggggagcaactggag

SEQ ID NO: 172736 - DNA, 769 bp, Arabidopsis thaliana
agctaggatcctctagagcagccgccctttcttttttttttttttttttatttttttttataaatggtttaaaattttaatggtttttatactttgagcctaacgcaaaagcaaagacatgcagaaagaggaaaaggacaatgcgaaagagaaacgctaaaagaagacacaggcgctctcgcatgggggtacagaaacatgagtgaaacaacagaacatcctaaaaaccgccaaaagcgtacattttgggataaacgcaacgatcctccagaatagatggccttcccttcccaatggagcctagactcaacgaccgtctcggcgaaagaaggcaagcagaatgcagctgaatgaatctcggcatgggaaaaccgcaaaggaccattggaattgctggagctctcgccaattgggagcagagggagttagaaggcaacaaaagagagcctcagacaaacaaagcataagcccaccgaccccactgggcgaagaagaagcgcagaaacaagcgggggcgaccggaccgggaagatatggcggaaaaaaggagaaagggagcccgagggccgcgatgccgaaacgaacgcccaggggggagagaaggacccaccgagggccaaaagagtcgcgcagggtggaagaggcgcgggcgcccacacgacgcggccccgcgcggctggcgggcagcacaaagcacacccacggaagacccgaggcagccccaacgcgagagcggagacaagacggacaggaggagggcgcaggaggg

SEQ ID NO: 172737 - DNA, 558 bp, Arabidopsis thaliana
tcagcgtctctacgactcactattgggaaagctggtcacgcctgcaggtaccggtccggaattcccgggtcgacccacgcgtccgtatagatagaggatttcttaattatttaataaagatgattcaaatgtatataattgttcaactagttcagttcgcttccaaaaaaacagcgacgtcttctctctcacggcgataaaaacagagaaccttccatttgtttctttgagcgcgtgaccggcgcgtggcggcttagttagcgccggcgtcggtcctccagtctggttttctttagggtttcattctctacttagtctggttcgtttttagatcctgatttgatgttggcaaggtgaagaatttttggatcttagatctgtaagagccatcgttgtgggctttgattcgtcgaaggttctgtgcgatcggaactcccttttctctgttttgagaaaattatgggtttctcctttgttcttgcagatcttgtttccgacgaaggttgcaaacgaaagttatgacggcggctaatgttattggtggtctggctccttctt

SEQ ID NO: 172738 - DNA, 520 bp, Arabidopsis thaliana
  unsure (1)..(520): unsure at all n locations
atacaagacnatgacggggcatgaccgcgtacgtaagcttggatcctctagagcggccgctctttcttgtgtttttatctcctctgagattcctccttttgattttttgaccttcaactcattgttcagagttccactctgaaagaaggattttttgacggggagaaacgaagatcttgttcttatggggattctatagtatcgaatactgtctttccacggtggcttttttctcgagggtgtgggcatcaacggcggttaaagcgaccattacgtatttatactagaagtgaaaaccacactttttggctattgtacgccctaccctgtggcccttcataacaaccggaggacatttccacccaaaggtttaagcgcctaggcttgaccagtaagcccctattggtggagcaagaaacattcctcactggtttggaatctcaccaaatgttaatgtgtttgatagccattccactaattacctccttgctacaggagacaattgggggccccgaaggtc

SEQ ID NO: 172739 - DNA, 567 bp, Arabidopsis thaliana
cgactcactattgggaaagctggaccgcctgcaggtaccggtccggaattcccgggtcgatccacgcgtgcggcaaaacccatgctcattgacaactctaatcttctctatgactaccaattgtgctagctacgtcctgcgcagggctcgatgttaaagaatgttctaaaatcaatcaatgatgtggtgatcgatgcgaatttagactgcttcatcactgtttgttgtttccagggtgttgatgcgactcacgctgctctgatgtatatcttgctaccatcctaatgcgtccaacactacctatgcaaccagaactctctccatgagtgattaaccctcggccacatcaggaagatgctctgatgcgccataaaatgatgaccaaccttaccataaaggtcttatcacctgtggagacaccgtcaccgtcatgttttagaagccaccagcgcaattacagacgtcttgagattgaatatgaagcagaccgaattcagacatgtgaacaaatggggaagaactagaaagatgagccccccttcagtggctaggactccctggcatata

SEQ ID NO: 172740 - DNA, 374 bp, Arabidopsis thaliana
gagctatgacgtcgcatgcaccgcgtacgtagcttggatcctctagagcggccgccctttttttgggttttttttttttttttttttttttttttctttttttgttgttgttagttttttctgttcacactattctctacctattgggaagcgacgttctgaaaaggtccggtgggggaaaaaaaaaggagcccaaaatgccaaggaaaaaaggggaaccataaaggaaagggcggaggaaaaacccccaaaggggccccccaacgatgatgtaaacgggggaaccgacaaacgggggggcccccaagggggatccccccggggcataggctcgaaatatgacgcgtgaagacacttctcaaaaaacgcaaata

SEQ ID NO: 172741 - DNA, 545 bp, Arabidopsis thaliana
  unsure (1)..(545): unsure at all n locations
acgactcactatttggaaagctggcacgcctgcaggtaccggtccggaattcccgggtcgacccacgcgtgcggttctgatggatactttctttggtccaccagaaactggtgtgtatagcccttctgtccaacgcactctctacctcatgggaagcgccgtactgaaaaggttcgctgatgtatcatcgattcacctaaaaatgccaaatattcattttctaccagtaaatctttcaacgaaggaaaacccttcaatggtgaagtttaaagatgatgtgtacctgccaaccgatgaacctcatggatctatagaagcaactctaagccgtataacctcgaaactatgaggttttaagacaatacatcatacatggaaatatcaaacacaatttcacaggttctgcaacttttggcgtttgcctcgtttatgaaataacaatttanatgaagtgtgtaaggtcaacttttggcttttgttgcaagaataatactgtaactgcaaacagtttcacataaaaatgtagcttacatatattatcaaaa

SEQ ID NO: 172742 - DNA, 548 bp, Arabidopsis thaliana
  unsure (1)..(548): unsure at all n locations
acgactcactatttggaaagctggtccgcctgcaggtaccggtccggaattcccgggtcgatccacgcgtgcgtgagaagtcaaaggctgagaacagggcacaaaagaagatctctgatgtgcatgcttgggaaaatagcaagaaagcagccgtagaagctcaacttaggaagatcgaggaaaaattagagaagaaaaaagcgcagtacggtgagaaaatgaagatcaaagtagctgcaatccacaagttagcagaagagaagagagcaatggttgaagctaaaaaaggagaagagcttctcaaagctgaagaaatgggtgctaagtatagagccactggtgtagtaccaaaggcaacgtgtggatgtttctaagcctttattgaatttgtatctttgtaacaattcatctctgtttctttcttcttcttttgtttttgtgtgattcaacaactctntttagttnttgttatttgtttggtcgtttgtgtcttgtttacatattgggtgattgtgtgtaaaagtgaaagattaatggagtataattgg

SEQ ID NO: 172743 - DNA, 539 bp, Arabidopsis thaliana
cagctctctacgactcactattgggaaagctggcacgcctgcaggtaccggtccggaattcccgggtcgacccacgcgtccggtagcctcctaattctggtcctaccaacaaggagcctgcgaaggaccaagcttctggcaagaagtcaaaggggaactcgaaaaaaaaggctgaaggaggtgataaagcgctctctggttcagggaacgatggtgcctctcatagtgatgaaagtgtcacagcgggttcatctgatgaaaatgatgagaatgccaatcaacaggaacagggttcaattcgaaagccaagctttggacagatgcttgctgacgcaagttctcaaagtacgactggtgaaatccaaggttcggtgcccatgaagccggtagccccggggactaatctgaatatcgggatggacttatggtcttcccaagctggtgtaccagtgaaggatgaacgagagctcaagcggcagaagaggaaacaatctaaccgtgaatccgctaggcggtctagattgcggaagcaggccgaa

SEQ ID NO: 172744 - DNA, 572 bp, Arabidopsis thaliana columbia
atgattcttcagcgtctctacgactcactatatggaaagctggtcacgcctgcaggtaccggtccggaattcccgggtcgacccacgcgtgggcccacgcgtccgcacaaacaaaggagcttggactaaggaagaagacgataagctcatctcttacatcaaagctcacggtgaaggttgttggcgttctcttcctagatccgccggtcttcaacgttgcggaaaaagctgtcgtctccgatggattaactatctccgacctgatctcaagaggggtaacttcaccctcgaagaagatgatctcatcatcaaactacatagccttctcggtaacaagtggtctcttattgcgacgagattaccaggaagaacagataacgagattaagaattactggaacacacatgttaagaggaagctattaagaaaagggattgatccggcgactcatcgacctatcaacgagaccaaaacttctcaagattcgtctgattctagtaaaacagaggaccctcttgtcaagattctctcttttggtcctcagctggagaaaatagcaaatttcggggacg

SEQ ID NO: 172745 - DNA, 567 bp, Arabidopsis thaliana columbia
atgattcttcaggtctctacgactcactatttggaaagctggtccgcctgcaggtaccggtccggaattcccgggtcgacccacgcgtgcgcgaacaagtcgtggtgagattttaggaagacgaagaagatggagagtatctggcgaatcgcgacgggacaagatccgagccgtgaagattacgaagggatcgagttctggtcaaaccctgagcgttctggttggctcacaaagcaaggcgattacatcaaaacctggcgtcgtcgttggttcgttctcaaacgagggaagcttctctggttcaaagatcaagccgctgctggaattcgtggatctacgccgcgtggtgtgatctccgttggtgattgtctcaccgtgaaaggagctgaggatgttgtgaataagccttttgcttttgagctatctagtggtagctataccatgttcttcattgctgataatgagaaggagaaagaagagtggattaattcgattggaagatcgattgtgcaacactcgaggtctgtgacggattctgaggttctcgattatgatcacaggcggtga

SEQ ID NO: 172746 - DNA, 498 bp, Arabidopsis thaliana
atgacgtcgcatgcacgcgtaccgtagcttggatcctctagagcggccgccctttctttttgttttctcttttttttactttttctttctattctatttttatagaatctaatcaaacggtataagaaagtcctaattcaaacacaaagagaaaacgaagaaaaggccaagggaaggcacccggtgaaagcaagagggatcgaggatcaaagtctggtggccgatggtcgcaaggctgaaacttaaaggaattgacggaagggcaccaccaggagtggagcctgcggcttaatttgactcaacacggggaaacttaccaggtccagacatagtaaggactgacagactgagagctctttcttgattctatgggtgggggtgcatggccgttcttagatgggggagcgaaaagactggttaactccgtaaacgaacgagacctcagcccgctaactagctacgtggaggcatccctgccgggcgggttctaagagggac

SEQ ID NO: 172747 - DNA, 565 bp, Arabidopsis thaliana columbia
  unsure (1)..(565): unsure at all n locations
atgatactccagctctctacgactcactattgggaaagctggtcacgcctgcaggtaccggtccggaattcccgggtcgacccacgcgtgcgcagaaaaccaccacccttctctctctactgcctttttaccacagagaagagagaggatccgtcggtgtgctagtctcactgacactacatccgatcgtcgccggtgacattttataagtgtggagtttacttcagctttattattcaggaattgatggatcagtacgagaaagttgagaagattggtgaaggaacttacggtgtggtttataaggcacgtgacaaagtgactaatgagacaattgctttgaagaagatcaggctagagcaggaggatgaaggtgttcctagcacagcaatcagagaaatctccctcttgaaagaaatgcagcacagcaacattgtcaaattgcaggatgtggtgcacagcgagaaacgtttgtatctggtttttgagtatcttgacttggatctcanaaagcacatggattctactcctgatttctccaaggatctacatatgatcaaaacat

SEQ ID NO: 172748 - DNA, 550 bp, Arabidopsis thaliana
acgactcactatttggaaagctggtccgcctgcaggtaccggtccggaattcccgggtcgacccacgcgtgcggagatgaccaagtggtttgacaccaactaccattacatcgtcccagagttgggccctgaagtgaaattttcttacgcatctcacaaggctgtcaatgagtacaaggaggccaaggctcttggtgttgagaccgtccctgtacttgttggccctgtctcttacttgcttctttccaagcttgctaagggtgttgacaagtcatttgatcttctctcccttctccccaaaatcctcccagtttacaaggaagtcattgcagagcttaaggcagctggtgcctcctggattcagcttgatgagcctctctttgtcatggatctcgagggtcacaaactccaggcttttagcggtgcctatgctgagcttgaatcaactctctctggtctgaatgttcttgtggagacctacttcgctgatatccctgctgaagcatacaagacccttacttccttgaagggtgtgactgccttcggattt

SEQ ID NO: 172749 - DNA, 561 bp, Arabidopsis thaliana columbia; identical to SEQ ID NO: 127668
  unsure (1)..(561): unsure at all n locations

SEQ ID NO: 172750 - DNA, 570 bp, Arabidopsis thaliana columbia
atgatacttcagcgtctctacgactcactatatggaaagctggcacgcctgcaggtaccggtccggaattcccgggtcgacccacgcgtgcgggagaagatcaccgtcgtttattctcgacgagcgacgaagctcgaattcacctccaatggcggatacaacacgaggtccttttcaaaaccctgattccatctccgcttattaccaaactcgcgcggcgcatcacggtgtcattacaagcgactggctagcccaagctcaagccgccgttggcggcgtctcaggcgatgcccagcatgacttatccgtaactgatctcgggaacgagaagtcgtttaatgtaattgaagagttcaataactggagaaaacaaccggatctggctgaagccgtcgcggctatacgagctttggctgctgttattcgtgcgagcgaagcgagcaccatgatggagcttgaaattgagctcataaaggcttctgatacactcaagtcgtgggacaaaacgtcgatctctttgacagctggatgcgatttgtttatcagatacgttacgagaacgtctgcttt

SEQ ID NO: 172751 - DNA, 431 bp, Arabidopsis thaliana
acgactcacttttggaaagctggtccgcctgcaggtaccggtccggaattcccgggtcgacccacgcgtgcgaagagactcacactgtcgatgttcccaagacaggttgaacatatctatagcctgaagagagctgacgatagatgctcgatactcactatggtccgatgcattggctctgccatctttggactagactatgctattatgactatcggggaatacaatgcttcagatagccacagatggtcctatgagaagcaacactggcggtcgttctagaggactctggctcacgtgcgcgtgcatgactacgttacatctatcttatagcgctacctaacttgaatgcactcgcacggagtatgacacacgctactactcgtgtataccctaggcgttgcccagctgactcgccttgctgcacatac

SEQ ID NO: 172752 - DNA, 531 bp, Arabidopsis thaliana
ctatgacgtcgcatgcacgcgtaccgtagcttggatcctctagagcggccgccctttttgtgttgtgggttttttttttttttttttttttttttttttttttttttgagaacttagttgggagccctactacctgctatggtcttgaaacaaacactaagcgactgagcaaatggaacccagcaacggagaacggaaacgggaaaccccaacgccatgacggcgcgggggggagggagggcattgggtcgggaaaaagaaaagggcacgccttaaagaacaaaagaattccaagccacaaaccaccggggggggcaaaccgaaccgaggctggcacccccccccactaggcccgggccggggagccaccgagaaagccttcaccccgagaaaaaaaaacccggggcgaagacaaagccctttgggagcaacgaaacggcttggtcctcaaaccccccccttaccccccggaccgaaagcaaaaaaaccaacgaagcgcgggggggcccgggaatagggcccccagggatc

SEQ ID NO: 172753 - DNA, 569 bp, Arabidopsis thaliana columbia; identical to SEQ ID NO: 127765

SEQ ID NO: 172754 - DNA, 569 bp, Arabidopsis thaliana columbia
  unsure (1)..(569): unsure at all n locations
atgatactccagcgtctctacgactcactatatggaaagctggtcacgcctgcaggtaccggtccggaattcccgggtcgacccacgcgtgcgcctatttttctttttgtcattttttgttccagccgtctgttgatatcaagacggttctttcgggtctaatggaaaggctttcgaactatgctgcatccagtgtggaagcattgcctaatttcctgcaagtagaagccttttcaaagttaaattatgccattgggaaggttgtagaagcacaggcggacttgccggccgcagcatctgtaacattgtatttgtttcttctaaaattcactctccatgtctattccgatcgtctggactatgtggaccaagttttggtataacgctttctgaggatggatcatgtgttactcaactatctgccacaggaaagctntgtgatgacaaggcagcaaaacagatcgtcgcatttcttagcgctccattggaaaagtataataatgtagtaactatcttgaagcttaccaactatcctctagtaatggaataccttgaccgtgagacaaaca

SEQ ID NO: 172755 - DNA, 538 bp, Arabidopsis thaliana
  unsure (1)..(538): unsure at all n locations
ctatgacgtcgcatgacccgcgtacgtagcttggatcctctagagcggccgcccttttttttgttttttttttttttttttttttttttttttttttttttcttatttattctatatgtgtatacaagtatatatgaaaaagaacataaaaaagaattactttctttatttgaatattcggttgtgtattggangtttaagtnctctttccatgtttttttgttctaggggtaacgcncttgatttcactctaaaacctattaaagtgtttcaaatgtgatctcataaaaaaaaaacaaacacaaagcagacaatcgggcaggccactgccaaaggtccgaacgccgcgcgcggcggacagggccaaggcgcagagacgtgaggccgggcaggttggagcgcggaggcaanagagagaaacaaggcgggcgagcggacaagagacggacaggcggcgggcggaggggacgccaggagagtgagtatggagggggggcgcccggcgggagccacagaggctgggcgagaatctgagata

SEQ ID NO: 172756 - DNA, 521 bp, Arabidopsis thaliana
  unsure (1)..(521): unsure at all n locations
atgatacttcaggtctctacgactcactattgggaaagctggtcacgcctgcaggtaccggtccggaattcccgggtcgacccacgcgtgcgattggtttagtcatagtatcttgttccttttaccttccaaatttattctatatgtgtatacaagtatatatgaaaaagaacataaaaaagaattactttctttatttgaatattcggttgtgtattggagtttcaagtcctctttccatgtctaaaagttctatttgtaacgttcttgatttcactctaaaacctcttaaagtgtttcaaatgtgatctcatannaaaaaaaaaaaaaaaaaaaaaaaaaaaaaaaaaaaaaaaaaaaaaaaaaaaaaaaaaaaaaaaaaaaanaaaaanannaaaaanaaaaaaaanaaaaaannnnnnannanaaaaaaaaaaaaaaaaaaaannnnnnagggggggccgttttaagggaaccaggtttacaggccgggggttggaaagaaaaaattttttaaaggg

SEQ ID NO: 172757 - DNA, 546 bp, Arabidopsis thaliana
acgactcactatttggaaagctggtccgcctgcaggtaccggtccggaattcccgggtcgacccacgcgtgggaactagctttctacaccggtcctacattgggtggtctattgaacgcaacgtgtggaaacgcgactgaattgataatcgcgattcttgctttgaccaataacaaagtcgcagtggtgaaatattcgctgctaggttcgattttgtcgaaccttttattggttctagggacttcactcttctgtggaggaatcgctaatatccgaagggaacagcggttcgaccggaaacaagccgatgtgaacttcttcttacttctactgggtttcttgtgtcacttgctgccattgttggtgggatacttgaaaaacggagaggcttcggctgctgttttgtccgacatgcaactgagtatatcgcgaggcttcagtattgttatgttgatcagctacattgcatatcttgttttccaactgtggactcaccgccaattgttcgatgcacaagaacaggaagatgagtatgatgacgatgtg

SEQ ID NO: 172758 - DNA, 544 bp, Arabidopsis thaliana columbia; identical to SEQ ID NO: 127767

SEQ ID NO: 172759 - DNA, 524 bp, Arabidopsis thaliana
atagtagagctatgacgtcgcatgcacgcgtacgtaagcttggatcctctagagcggccgcccttttttggggttttttttttttttttttttttttttttttttttttttttttttttgatatttttttttttttttttttgtttttttcttttctaaaaaaccaaaagggggaaaagctaactaataaaaaagagagagaaagaaatcggccaacgccattcaaaaaatcgggggaaaaagaccgtgttaggaaaaagaaggaaaaaaaggggattcgtcaaaacaaggcataaactgcccccaagggggggggacatattaaagaaaattgtgggtatcacaggagctagcgagaagaaagctctggaggggcccagcgccagtgataggcaaattgaagcagcgggggatgcgcctcacagaaaacctcaaccaagaagcaccgctggtcaaaaaaaacgctcggaggaacactaccccggaaaaaaagaccccggggggtgaaaaaaggccagcttatg

SEQ ID NO: 172760 - DNA, 541 bp, Arabidopsis thaliana
ggggaactatagtagagctatgacgtcgcatgcacgccgtacgtagcttggatcctctagagcggccgccctttttttggtttttttttttttttttttttttttttttttttttggttctacatttttttgatgtggctggtagagtttaggtcctaaaacggaaccaatatacctgaccatagaccggcgaaatggaccgcctataaggaggaggactactcactacaagcattcctgaaccaggggggagtaacggaaacaagcttagatggagcggaagcgagaggacctccacttaacgacgaggacccaggtgcaaagaaaggcgtgcaaaacgcagcgaaaggggccatgaaagggcactaatcccacgatgtgtcagggagataacggagggaacccggcccgacaaatggggactcaaggcagacgcctacaccgcactcagggagctaaaaaagagagttagaagcagctgaacagaggaagagaggggagaccggggcaccctacatggggcgggcgagacctgggggga

SEQ ID NO: 172761 - DNA, 554 bp, Arabidopsis thaliana
agctctctacgactcactattgggaaagctggtcacgcctgcaggtaccggtccggaattcccgggtcgacccacgcgtgcgagccactggcatgacagctgattcaaggtcattggtacaacaagctaggaatgaggctgctgagtttaggttccaatatggttatgagatgcctgcagatattcttgctaaatggattgcagataagtctcaggtttacacacaacatgcttacatgagaccccttggagtagctgccatggttctaggtattgatgaagagagaggacctctactttacaagtgtgacccagctggacatttttacggtcacaaggcaactagtgctggtatgaaagaacaagaagcagtcaatttcttggagaagataatgaaagagaaccctgccttcacatatgatgaaacagtacagactgctatatccgctctccaatctgttcttcaagaagacttcaaagcaactgaaattgatgtgggagttgtgagagctgatgaccctctcttccgttccctgagaacagaggagatcgac

SEQ ID NO: 172762 - DNA, 567 bp, Arabidopsis thaliana columbia
  unsure (1)..(567): unsure at all n locations
atgatactccagctctctacgactcactattgggaaagctggcacgcctgcaggtaccggtccggaattcccgggtcgacccacgcgtgcgggagaagatcaccgtcgtttattctcgacgagcgacgaagctcgaattcacctccaatggcggatacaacacgaggtccttttcaaaaccctgattccatctccgcttattaccaaactcgcgcggcgcatcacggtgtcattacaagcgactggctagcccaagctcaagccgccgttggcggcgtctcaggcgatgcccagcatgacttatccgtaactgatctcgggaacgagaagtcgtttaatgtaattgaagagttcaataactggagaaaacaaccggatctggctgaagccgtcgcggctatacgagctttggctgctgttattcgtgcgagcgaagcgagcaccatgatggagcttgaaattgagctcanaaaggcttctgatacactcaagtcgtgggacaaaacgtcgatctctttgacagctggatgcgatttgtttatcagatacgttacgagaacgtctgct

SEQ ID NO: 172763 - DNA, 544 bp, Arabidopsis thaliana
acgactcactattgggaaagctggcacgcctgcaggtaccggtccggaattcccgggtcgacccacgcgtccgaggatgcagcattatctcttcttatctctagagggcgtaggtgctagatcatctatctaagtctgtgtcctgatggacacgatcgacgtactctccggcgtcagatcgatgctacgagctgctttctcacgcagtgacgctgcttctactggacgcttctgctctcaagcgaaatacgctccaccattgctgagagccactgccagaggaagaccactgctctgtgctctccaagatactgtggaactgagcttctgagtggagatattgataccatattactcggctacaggttgagcgctaatgactagatagatgtctatctgtggccaaacctatggctggctctctgacgctcgcaatgatgatgcgtgacgagctagccagaggaacagtgaatctacagatgatgtacacaacctgtaccttgtagagccttcttctttagaaaaacttaggaacgaaaaccct

SEQ ID NO: 172764 - DNA, 557 bp, Arabidopsis thaliana
atgatacgtcagcgtctctacgactcactattgggaaagctggcacgcctgcaggtaccggtccggaattcccgggtcgacccacgcgtgcgcggacgcgtgggtccatctctcaagacgtctccgccgtaatcatgacgaacgcttcttcagcgccaccgccgccgcaggcaaaacgcagacttgggagaacgagtaggtccgctatgaaaccaaaaatccacagaacaaaaactcgtaaaacgaagaaaacgtctgcaccaccggagcctaacgccgatgtagctggggctgataaagaagcattaatggtggagtcaagtggagccgaggctgagctaggacgaccatgtgactactatggagatgattgtaacaaaaatctcatgagcattaatggcgataatggagttttaacgtttgatgatgatatcatcgatcttttgttggacgagtcagatcctggccacttgtacacaaacacaacgtgcggtggtgtgggggagttgcataacataagagactctgaaggagccagagggttctcggatacttgg

SEQ ID NO: 172765 - DNA, 209 bp, Arabidopsis thaliana
  unsure (1)..(209): unsure at all n locations
tgacgtcgcacgcacgcgtacgtaagcttggatcctctagagcggcccgccctttttttttttttttgtttgtggaagaactagcatctaaatacagcgtgataaggtattttaaagacagatcctagntgatacgtttcatgtgtcgaaatcttgaagcatcagaagcataggacttcgtaattagtctatctgtttctactaacaca

SEQ ID NO: 172766 - DNA, 715 bp, Arabidopsis thaliana
actatagaaagattatgacgtcgcatgcacgcgtacgtaagcttggatcctctagagcggccgccctttttttttttttttttttttttttttttttttttttttttttttatttattattttttttttttttttttttttttaattgttttttttttttttttaaaaaaaaaaaaaaaaatatgttttttaaaaaaaaaaaaaaaatgttaaaaattggggcaaaaaaggaaaaaaaaggtttattcaagaaataaaaaaaaagggttttgggggagtttggggaaaaaaataaaaaaaaaccgtttttgaataaaaacggaaaaaaggcttaaaagggaaaacgggattgtttttcaaaaaaaaagactaaaaagtgttaaggggctttttagaaaaaaaaaataaattacccgtttttttctaaaccggggggaaagaaaagttagaaaaaaaaataaaaaatcattggggggggggggcttttagctcaagaagccaacggaacccagttgttttgtaaatatttgaaaaaagaggggtttcctttcttttgaaaaaaaaggaacgtgcgcggagataatttttttaaaaaaaaaaaaggctttgttgaaacgaaaggctccagccgtgatgcggggtttatttttttgtgggaccacacagaaggcctaagtctttcaaaatagggggggaaagggggaatgttgaaaaa

SEQ ID NO: 172767 - DNA, 488 bp, Arabidopsis thaliana
atacgactcactttagggaaagccggtacgcctgcaggtaccggtccggaattcccgggtcgacccacgcgtccgatgtatctttccatcacccatccggtgaaattgtttgactgaaatataatgttaacaaatcactgcttattctacagaatctgaaccgccaaatctgcctttataaataagctgtgggcgagattgttctaaatcccacaggattgctgaagagatccattctgtcgcatgatacatcatcggatgcctaccgcatgtcccaacaggcgacaaataacagcctgcaccaaccgaacactccggattacatgctatcaggcaatactccatatcatataagtcctgctgtagcgccgccgtttgctcctccacgagcagatgtctgttgattcgacgctaacggaagccttaagagcatgcttagagctaccgttaacgtaagccaggggagagttctaaagcgcggcgaagaa

SEQ ID NO: 172768 - DNA, 542 bp, Arabidopsis thaliana
agagagctatgacgtcgcctgcacgcgtacgtaagcttggatcctctagagcggccgccctttttttttttttttttttttttttttttttttttttttttttttttttttttttttttttttttttttttttttttttttttttttttttttttttccgaaaaaaaaaaaaaaattcccctttttttttttttgggagggccttgggccaaaaaaccccgttttcccaaaaatttttttataaaaaccatttggggttttcccccgcgaaaaaaaaaaaaaattccttttttttttccaacggggggggaaggggaaaacccctattttccctttcctttaaacccctaaaaaaatcccggtggggaaaaaattcgtgggcccttcttattccctggaccacaaaattttttttttcccccaaaaaaaagggcccaagaaatggggcaataaattccccccaaaaatcggtaaacaggggggatttggtttgcccgaacccctacctttaaaaaaacccttttttcgccggggaaagaggg

SEQ ID NO: 172769 - DNA, 491 bp, Arabidopsis thaliana
  unsure (1)..(491): unsure at all n locations
cactatagangagttatgaggtcgactgcacgcgtacgtaagcttggatcctctagagcggccgcccttttttttttcttttgttttcttttttgttgtcttcaactagtattttacatcataagcagacatagggctgatcttgacatagacggcattgtcatagccaggaacctacactgaacccaactaaagaaattgatagagctctatgcctcactttttctaagctgtgaggtggatattactagcataaccaaaagagactccactctttctcctacaggttatgtgcaagtcagtgtttccagcggcgctttccctcatggtacacttactgatcgcgacccgggaaagctctcaatggctagtgcagtaggctgcatccgattgctctatatcgagcgcctacgttatgctcccagcctagcacggaggtcggagatactgctaagaattaacctctcactctctgaaaccacaggctgaac

SEQ ID NO: 172770 - DNA, 538 bp, Arabidopsis thaliana
gactccttaagggaaagacggcacgcctgcaggtaccggtccggaattcccgggtcgacccacgcgtccggctcaacgtacggtgtaagattttatgaaaacggacttaccggactgaactgtacagctagcattatgcagtaacatagaagacacatcttaaggatcatgtgataatcgatgctcgagataatcttcatcgtgatgttcattttctaaacagacagaacagatgataacggggacaatatctatagctagactaatatgtatacttgatagattgtcacggcaacaggctacgtgctgaaatcctatgtgtgttatcactatctttgctggaactgatagcgggaatgctccagcttgccattccagtatgagttcaccccgcatggtctgatatatattgagcaagcttgataagacgtaggagtgaggaatcattatagcaactatctctgaatatcactacccccagggtgctgctaatgactagtacaaccgaatccgcttaccttgtttatgaccgagctct

SEQ ID NO: 172771 - DNA, 908 bp, Arabidopsis thaliana
  unsure (1)..(908): unsure at all n locations
gacgtcgcctgcaccgcgtacgtagcttggatcctctagagcggccgccctttgtttttttttttgggttttttttttttttttttttttttttttttttttttttttttttttgtcccaatttttaattaaagaagggttttttagctttaaaagcagaaccatgaaaaaggaacccaaggggtccccccggccaaaaaaaaaggttggggggggggggaaaacaaaaaaaaaaaaaaagggaggccccccgggggggggccgggaaacccattttttttaatccaaaaaccaaaaaaaaaaagaaaggggggagccccnaaaaggggaggagaaagagaaaggccaagccaaaaaaaaaaaggtaaaaccacccggggcggggggcccccaaaaaaatgggtaaaatgagggggggggggaaacgaaaagggggggccccgcaccccacagagaggaggggcaaaagaaccgggacaaaaagaagggggaggagaaccccccgggggggccgaatcttttgttttaaaaaagaagagagggggccccccccccgatacttaagaaaaagggaacgcgggggcaacaaaattctagggacaagaaggggggaaaccccccgggagtcaaaaaaggagggaggccacctctgaaaagaggaaacacagggggggggggcgaaagagaaaataaacggggcccacaaggaggggagaaagggccgcggggggggccaacagaggggcttttttccaaccacacaccccggaagacatggaaaaaaagaggggggcggccccaaacaaaaaaaaagagggggggggcccacaaaaaagagagggggggccgcccaaaccagagggggtgggagaccacagggcggtgtaacacacccaaagagaaggggg

SEQ ID NO: 172772 - DNA, 585 bp, Arabidopsis thaliana
actatagaagattcttgacgtcgcctgcacgcgtacgtaagcttggatcctctagagcggccgccctttttttttttttttttttttttttttttttttttttttttttttttttttttttttttttgaggaaactaaatcattcatagaagggtttatcctccaacaataccaagcttcccaaggattttttcgaaatcattttcttttcaaaggcaattaaaacttggggggaaaacatggagaattaaaaggcacaaccacctcctgaagggggaaaataaacccttagccaaaaacccgtttttttttgtagagcaaattataaacctttaaaaaccatttactttggattcacggcccccccaccaacagaagggttttgtcccattgttccaaacttattctgctgcatcatatattgggttgattcattgccctgggtactatactggtgataatatccctgcatacccatttgattcccatagcctggaataggccccattgacgggaccggaaccggaacccccaactttccgtttcttcctcccccggcttgaaagctttgttgaggaaccggcg

SEQ ID NO: 172773 - DNA, 634 bp, Arabidopsis thaliana
  unsure (1)..(634): unsure at all n locations
ctatagnagagtctatgacgtcgcatgcacgcgtacgtaagcttggatcctctagagcggccgcccttttttttttttttttttttttttttttttttttttttttttttttttttttttctaggggtttaaatttttattttacttatggactattactgggtcgtttacctttaatcattacacaaaccattatacatgccaagatgcaaacattttttattaaaaacggacaaaaagggctgggcggtgcaaaagtccaaaaaccacttaaaaccgtggaattttccacctttcgcgcctttggaaaaacgaaaatttggataacccaacgacggataaaccctagccatccaatagttaaagggcgcaaaagggcatcctttaaaacattcctaatttttcgtttttatctaagatttttgggctcacatgtcaggtatatacaaataaataagttggggcaaataaaattcacatataaagaaactggcagcattcaccaacagaaaaaataaaatcctttagggatcgtaggaaccacaaatttaaataagtttgtgagaaggccggagttaaaatttaccaggggggcccaaagaggggattaaaaagattgcgaagttagaaactg

SEQ ID NO: 172774 - DNA, 770 bp, Arabidopsis thaliana
ctatgaggagagttatgacgtcgactgcacgcgtacgtaagctaggatcctctagagcggccgccctgtctttggtgatattattgatacattcattcggtgcttgtctttaatgactctttagcaaccaaccccaacacattcttgtaatgaactactattgactagcctcttttatctgaatcgctaaacgctctacctttaacctatctactaaatttgtccatggggacttgtatgataaaaaaatgtgtcagggctgcagaccaaaagagctttaaagaccgccccgatgattgtatcctttttctaaccattgacagggatcccgatcttggggatccttgctaacccaccctggcctgggagggcaggacacttatctggggcaacctagaaaaacttgaccggccggggtttcttatcggcgagactgggaacaccgggaccaaccctttcttaggggcccccccatggacccccatttggccaaatgccaggctattgaacctggcgaaccagatacgccctccgaaatggcgcccccctgaattccattggaccgcccttgctccacaaataacccccggggttcggggaacccccaaattcttccatttaatgaacaaacccccacgccggctctgcgtctctcccctctcctatatacctgggcgatgcttatcctccccgttaaaaaatccctcgcttttttgccaattaaacggacccccacgaccgaaaagtggcgtttggtccgcccaaaaaca

SEQ ID NO: 172775 - DNA, 491 bp, Arabidopsis thaliana
atgacgtcgcatgcacgcgtacgtaagcttggatcctctagagcggccgcccttttttttttttttttttttttttttttttttttttttttttttttttttttttttttttttttttttttttttttttttttttttttttttttttttttggaaaaaaaacgggggggcccttgggatttaaaaatgttcccctaaacaaaggtttggttttgggaacaacaaaaaccccggggaagctaaaggggggggggccttaaaattttttccttttaggggaaaaacccataacaagttttgttttttgaatttaaaagggtggggaatcaaaggggtttgtaccttcttccttttttttggggggggaagggttcctaaaaatttaaatttttttccttttcccccccccttcccccggaaacctaaggggggtttttttcacccccataataatatccggggttactcccccccctaatttttaataaggg

SEQ ID NO: 172776 - DNA, 691 bp, Arabidopsis thaliana
ctatagaagagttatgacgtcgcctgcacgcgtacgtaagcttggatcctctagagcggccgcccttttttttttttttttttttttttttttttttttttttttttttttttttttttttttttttttttttttttttttttttttttaaaggaaaaaaattggtggcaaacgggtttttacttttgggggtttaaagccccccccgcaaatttttttttttttttcaaaaggggaaaggggggacttggaaaaagaggccccccctcaggggatattttaaaccgggcaaaaaagggctttaaggaacctccccccttttttggttaaaaaaatttttggattttttgacctccttttttaagggggggaacaccccctttgccttgggtttggttctaaaactttttggccccggttttattcccttccacaagaaaaaaaaatatctccctggaacctttggtttaacccctgggatggggaagatttggttcccctttttttttttcaaggttccccctaccctcgggcctttcggtgtgactttttttaaaaccttttttaccaaaggagactttatttggggattggaggccaccacccctttaaaaaaacattttccccaccccacaaaggggacattttggctcacatttggcggggtttaaaaaatttgttttttgggcaa

SEQ ID NO: 172777 - DNA, 793 bp, Arabidopsis thaliana
  unsure (1)..(793): unsure at all n locations
actatagaagagttatgacgtcgcctgcacgcgtacgtaagcttggatcctctagagcggccgccctttttttttttttttaatatatatttttctttaattacttatcttgaaaaagcagcaaaagttttatttatttatatgagatgcaaaaacattacacgatatgaactatactgccttgacaaaataaaggaagatacaaaagaaaactatgaatcgtggggcctatcacatttacatatctaccaaaagacatgttccttaaaatgtgatagatccacgcaaatcttttgtaagagaagataaaaaaccgatagagaatcgagacgtaaacctaaaacggttttagttcgataatgaaatccacatgatttcaattccgcaatatctggagtattagttaagcccatttggcgataatcgacattccaccgcacccgagaagagccgcgattaaacacttgaactgcattttgatgctaccttgaagcttaggtcccatgaactccgcagctagatgatccacgagtgccatgtaaatgagcaatccagcggagcatgcatttagaagtccaaccgtgatcaaagcttttgggctatatcttggtaaacagtgaagacnatccctacgctattcgatggtgtgttaccggaaagacgcctacaattcttatattgtactagctgagatcaccgcagacatgctcgacattgaggaagaaagcgataatcttatgtgcaggatagtgtctaaatatcatgacacgtgacatatccagtcagacatgat

SEQ ID NO: 172778 - DNA, 786 bp, Arabidopsis thaliana
  unsure (1)..(786): unsure at all n locations
ctctactcactttagggaaagactggacgcctgcaggtaccggtccggaattcccgggtcgacccacgcgtccggcaacttcaactgcgccggaagaatgtggaagcgagtcagcgaaccccgtgcgtcaacaaagctaaagctatgcctctcaaagtcatagcaatcttcgtaatcctcattgcaagcatgattggtgttggagctcctctctttatccgtaacgtttcgttcctccaaccagacggaaacatcttcactatcattaagtgtttcgcctccgggatcatccttggaaccggatttatgcacgttttacctgattctttcaaaatgttgtcatctatatgtcttgaagagaacccgtggcatagattcactttctccggatttctcgctatgttatcgggtctaatcactctagccattgactccatggccacgagcctatacaccagcaagaacgcagtctggatcatgccccttggtcatagtcatggtcacgtgaccgcanatgatgttaccttaccaatagaagaagatgattcngtcaatgcacagctcttgcgataccgagtcattgccatgagacttggacctngggatcatagntcactccggggtcattggatcatctctaggagcaactagtgacactggcaccattaaagaactcatagcagctctttgcttcatcaatgttcgaggcatgagctcgcggttgatcctcagcgtagatacaattgagaaattgtatgcgtcttttcgcggacacaccatcggata

SEQ ID NO: 172779 - DNA, 692 bp, Arabidopsis thaliana
  unsure (1)..(692): unsure at all n locations
ctatagnagagtctatgacgtcgcctgcacgcgtacgtaagcttggatcctctagagcggccgccctttttttttttttttttttttttttttttttttttttttttttttttttttttttttttttttttttttggggttttttttttttttttttttttttttttttttttgggggaaaaaaaaaaaaaaaaacccccacccctcccccccaaagggggggttttccccccaaaaaaaaaaccaaaaaaacccctttttgccccttttccccgaaaaaaaattggccttccaaaaaaaggggaaaagaaagggcccccccttaaaaagagaaaagccgaaaaaaaaatttttttttttcctttcaaaaagggaaaaaaaaaccccaggggggggaaaccccgaaaccgggggggggggggccaaaaaaacaaccgtgggggggggggttttttttaaaaaaaaaaaatattccccccgggaaaccttttttttgaaaggggcaccccccgtttataggggttttttaggcttttttcccggggggtttttttcttggaacgggggcctaagggaagaggaccctggccacccccgagagggctgtcccgtgcccaaaaccggggggggaaaatatttggtgccccaaatacccgggggaaaaacggcccgcaccccccttttaaaaaggt

SEQ ID NO: 172780 - DNA, 572 bp, Arabidopsis thaliana
ctatgagaagattatgacgtcgcctgcacgcgtgcgtgagctaggatcctctagagcggccgccctgtctttggtgagattattgatacatttatctggtgcttgtctttaaagactctttatcaccaaaccccgacaacattcttgtaatgaactactattcactgacctctttgatctgaatggctaaaggctctaccttttacctatctactaataaactgaccatggcgacttgtatgataaaagaatgtgtcagggctggagacaaaaaagtctttagaaacgccccgatgattgtatcctttttttcaccattgacagggctcccgattttggggatccttcttaccccaccctggcctggggtggcaggaaacttatatggggtaacctagaaaaacttgaacgggcgggggttctttcgggcgagattgggaaaaccgggaccaaaccttttggaggggccacacaatggagcccaattttgcaaaaagacaggttaataaaccggcccaaccagatagccctctgtaaaattggcgaccactgaaatgccagtggcacgcccc

SEQ ID NO: 172781 - DNA, 645 bp, Arabidopsis thaliana
  unsure (1)..(645): unsure at all n locations
gaacaactatagaagagtctatgacgtcgcctgcacgcgtacgtaagcttggatcctctagagcggccgccctttttttttttttttttttttttgatcgcagtcaagactctttgactcttatcttttgtattaaagataaatgaacatgtgataagaataataacagattagatgttgcatgtaatactactagactagatctacagaaggatcaaagaaagttgtaccaaagtagacatcaataatgaaattgcaagcaaaacagaataaatgttgtctcctcgattgcaagcaaaacagaataattattgcaaattctcccctcgatcatcttgtgttagatatctgtgccgctgaagacacttctctcgaaaggattcgataaaaatcacagatacacatctcccaaactaacaacacagcacaaccaagcaatgcaaaagctttncaatgatagaatccagctcccatatataagcttttttaagatataaccggaacaagtntgttacagttggacattcttttttagaatttccggaaaaacaacatcctagtttcacacaaaagaaaactcaagttcatatataccatgaaaaaggtagatctgctgtttcttataaaaccaacatacacccgtgt

SEQ ID NO: 172782 - DNA, 663 bp, Arabidopsis thaliana
  unsure (1)..(663): unsure at all n locations
cacgcgtacgtaagcttggatcctctagagctgnncgcctttnttaatcctttttttttttttttttagggatacagtcgacaagcaaccttagatataaagattcttacagatgattaaccattctcagaatacagatttaacactcatcgctggctaaatcaggcatcttcagtgggaaactgcttctccacatccgcgactggcttctttgcatcttcgatctctggaccttccttctcatccgtctcttccaattccgccaaagtggacttgaggtcagccaatgcagactcgagacgtttgtggcaatccggaatcatcatcctagactcacccaacacattttcctgttgtttaaggtcgtagggatcagcacctttgtccttcatatcagcagtcttagccgcttctctctcaacttctttctcataagagtgaagctctttcacaatccttttacatgttgatgtttttatcttcaagttccttatcgttgccattggattcaggcgatgatgggagaagaaggttgcttccgatgaatctgagagagaggacgccgcgtanaccgaggaggaatcggagaacaacaattttccagttggccattggaatagcttcttttagctttgcttggcatggtgaattattaaaaaaaaa

SEQ ID NO: 172783 - DNA, 579 bp, Arabidopsis thaliana
ctatagaagagtctatgacgtcgcctgcacgcgtacgtaagcttggatcctctagagcggccgcccttttttttttttttttttttttttttttttttttttttttttttttttttttttttttttttttttttaaaaaacaagggagccaaattcctttaaaagcagcttaactttcacattcagaggtcagccaaaaacaatcggggaagaggggaaaaatctcggctaaacaaaatgcaagaaggggggagagggggggccccgcttgaccccagctttaatatcccccccttgggggacccttttccggtacattcactctgaggggccccccccccaagttctgcccatggggggcagaaatggctttgttgagttcatccccgtgagacgttgggacaaaccccaatccacgggaaccacctgtttcacgggcgaaaaccaccctaggttccacaattttaccatgcttactgaaaaggtggtctagacggcccttggccccccccaggggagattccctacatataccctgaaagcagggtcatatccccggggcccacgttggggacggga

SEQ ID NO: 172784 - DNA, 621 bp, Arabidopsis thaliana
  unsure (1)..(621): unsure at all n locations
ctatagnagagtctatgacgtcgcctgcacgcgtacgtaagcttggatcctctagagcggccgcccttttttttttttttttttttttttttttttttttttttttttttttttttttttttttttttttttttttttttttttttttttttttttttttttagggggaggggcccccacctaaaaaaaaagggcccccaaaaaaatgcccctttttggaaaacccgggggacatccccaaaaaaaaaattttttagggggtcttcaaaaaaaaggggaaaaaaaaatttccccccaaaaaccctgggaaaggggattccccccccccttaaaaatctaaatgccgggaaaaaacccgggtttttctccaaaccaggggaaaaaccctcaaaacttttaacctaaaagccaaacaggggttttcacaatggctttttgaaaaagatttgaaccggggcccttatttccctaaataaaaggggaaaagggtgttttggtttttttacacccccccgggaggagatttatagggggggccctaagcgctcgggcgcaacaaaaaaaaaaaaacagtggggggggaaaaaaaactgggggggaccccgggggagaaaaaaaccc

SEQ ID NO: 172785 - DNA, 608 bp, Arabidopsis thaliana
  unsure (1)..(608): unsure at all n locations
ctgcaggtaccggtccggaatcccgggtcgaccacgcgtccggctgagaatagtgttgaagagaagaattctcttaacagtttgagtgagcctgctaatatactgaaggttataaatgtgtangtgggaatccacctgttgaaaagctgtcttattgacagactatggaacatactagtaatatccggcactacaattgaggcattgaaggtatcttacgagagggagactctcaccacaccgaagaggactcgcacgcctagacgaaactctgacgtggatcatgttttaagctggcctggctacaaaaagaggtcacagaaggaagattagtcgaccgatctgcagatattttgaggactgtatcaaaagagagtaattgagatcaggctatgcccgagaaatgtatgagtgtgaggtgcgtacgagaccacataccctggtagtctgctgttgaggagccaacgccaataagaaagtagtttgtaaaaagaactggacatgctactgggggtccaaaaggggtgcatgggagaggaatcggtccagaaagggacagatgaacgccacgcgtggttattcggttatggagagattaccgggagaaa

SEQ ID NO: 172786 - DNA, 818 bp, Arabidopsis thaliana
  unsure (1)..(818): unsure at all n locations
actatagaagagtcttatgacgtcgcacgcacgcgtacgtaagcttggatcctctagagcggccgccctttttttttttttttagaaacggaccaaactcgttattcctttttttctttgattaagttcaacactaaaaattaaagaacacaaatttcaaccgccaaaacgtttactcctagccttcgttgtttatagaaagaactaaagtttacttatcgaacagccagagaagatataaaaaactttggttaacaaagaagttttaactttttttctttagttgtctttaaaatccttcgcctgtcattacttctggtcgtgcgcctctgtgcttcttcgacatatatggtccacttcgaacagcttcttgcaacttgtcaccggtttttagacgacgagggtcatcaacaaagttactacacaagaacgcttcgtgaattgctttgcagcagttatcccttgcttccattgctatttttgcagtttcagtggttgcatcccgaactatgtttattatctcttctttggccaagatttccaccaggcaccatggccgagccactaatgctgttaacgttcgataacccgcaagacgaatctctgagctttgttgaagaactgagaggaataaaccggatgggggtagttttgtgctctgtgctgcagcgtcgtatatcaaacatctaaggctntcttcagcttttccatcaactattctgttgctcttaaggtcgggttcacctgcgatgttngccagtgcatgcagtgcagccaactgttttcatgtgcattacgatcaaggcagagctccacat

SEQ ID NO: 172787 - DNA, 787 bp, Arabidopsis thaliana
  unsure (1)..(787): unsure at all n locations
ctatagnagagtctatgacgtcgcactgcacgcgtacgtagcttggatcctctagagcggccgcccttttttttttttttttttttttttttatctatctattggattttttttttttttttttattttttttttgtttccccaaaaaggaaagtcagaacaggatctaaacacaggaaaggacgcgacaaccacaagtacaaggaagaaggggaaaagatctctggccaccaaacccaacaacaggggggcgaaaaagtatgaatacaaaaccccctagcggagccaccctgaaggccccgtcctggctgggccacccccgcggggggcccccccgccccatttatgaaccttgggagagcagacgaaacaagcaattcggaaaataacaggccagctcggagaagggaacacaacacaccaaacggaaagaactcgcccccccgggagggacagaaatgggaaaaccctacctccttgcgtgcgaaaaagaaaagaaaactgggagaggaacgaaccctctttccttccttgcacagggtaggagaaacggctgaaagaacctcactgttctaattgaggaaggaggagggcctgcccctcccttctaaaggaggaaccaagggggagaggcttcccccgcaaccaaccccggggggagggaagatagaggcgcacccaacacaaaaagagcccccggggggggggataaatcccatagagaccccagaaggggcaacgcccggtcaaacacgccaggaaaaaaaaagggggagagacggccgga

SEQ ID NO: 172788 - DNA, 648 bp, Arabidopsis thaliana
ctatagtaagatctatgacgtcgcctgcacgcgtacgtaagcttggatcctctagagcggccgccctttttttttttttttttttttttttttttttttttttttttttttttttttttttttttttttggggcaaagcattcttgtccataaacaaatgatcccacagaaaaccaaaaagggacaaggggggaaactaagttcctgcactcgttcaaattttatttaaccgatctttggcctaacatgatccatttttattttcagacagaaagaaaacaaaaattctaataggggaatttgatttaatacaataaaaaaacaaccagtttttctttggcagaattgggattttggacaaaaaaaaaatcaacctctcatggaaaactgaagttccctcccacctaagttttaccagccgggggattaagggcaacccaaaaaaaaaaaatggtattggccccaagaccaaaccaaacttacccaatggggtggggttcttccttttcttcccattagacctttagaaaagggataaagatgcgccaaaacccacaaacggaaaaacactcccccaaagagtttaccccactggggaaccacactgtaaatcggcctggtgatatcaaccgcaatcgctataaaatt

SEQ ID NO: 172789 - DNA, 939 bp, Arabidopsis thaliana
  unsure (1)..(939): unsure at all n locations
atgatatcgccggcactaatacngactcactatagggaaagccggtacgcctgcaggtaccggtccggaattcccgggtcgcccacgcgtccggagaaccaggacgctattgatcagccatggttggaatgcttgctgatccgaaagaggcccgagctggaatcagagaggttcacttccttccattcaaccctgtggataagagaactgctttgacttacatcgactctgatggtaactggcacagagtcagcaaaggtgctcccgagcagatccttgaccttgccaatgccaggcctgaccttaggaagaaggtactctcttgtattgacaagtacgctgagcgcggtcttaggtcgttggcagtagctcgtcaggtggtacccgagacaacanaagaaagcccaggtggaccatgggaatctgttggcttgttgcctctttttgaccctccaagacacgacagtgccgaaaccattcgtagggcgttgaatctaggtgttaatgtgaagatgatcactggtgatcaacttgctatgtggaaggatacctgtcgcaggcttggaatgggaaccaatatgtatccatctgcngctcttctcggacccacaaggactcgaacattgcatccatccctgttgaggagttgatcgagaaggctgatgggtttgccagcgtctnttcagagcacaaatatgaaatttgtgaaaagctgcaggagaggaagcacattgctggtatgacccgtgatggtgctatgatgcaccgctttgagaaagcgatatcggattgctggcgcatgctcagatgctgtcgtgggctcagaatcgcctacggacctgnctagtgcatatagtgcgtctactacaagcatttcaagatgagactcaccttatcanctcacacatcgattggtggttatgctatgttataggattg

SEQ ID NO: 172790 - DNA, 441 bp, Arabidopsis thaliana
tagagagtctatgacgtcgcatgcacgcgtacgtaagcttggatcctctagagcggccgccctttttttttttttttttttttttttttttttttttttttttttgtgcaaccgactttttatttcatttttaagttttattgttgctgcttgcgaaaactaaaggagaagaatatcaacgagttaattttttggggacaaagaagcttacatttttgttaactaggaaaactggctttgcgcctaaacatctggggggaaaaaggcctatggggacaagagaagaacgaacatcatcatcatcatgatctactgcgagcgaatcttctgcggttatgcacggggcatacaccatgaaggagcaaggacaaaaaacgtgccttccatcaaaggtgaaaaactccgcggagacatctagccgggttgaagcctgcaaataaa

SEQ ID NO: 172791 - DNA, 339 bp, Arabidopsis thaliana
  unsure (1)..(339): unsure at all n locations
atgacgtcgcctgcacgcgtaccgtagcttggatcctctagagcggccgccctttcttttttttcttttttttttttttttttttttttttcttttctggtggtctattttttatattatcttgaacaaaaacacaacccgagccgggacggggggaggggggaacagagggcagaaacagccggaatccgcgccaggcttaaaccatagacctcaaacggcgaaacaccnagggcaaggggcggtcaaggggcccaccccggtcaaaaaggagtacaaaaaggggacgaaggacgacaagggcctgtaaaagggaagcagaaggacaccccgcccccc

SEQ ID NO: 172792 - DNA, 807 bp, Arabidopsis thaliana
  unsure (1)..(807): unsure at all n locations
aatacgactcctatagggaaagccggtacgcctgcaggtaccggtccggaattcccgggtcgacccacgcgtccggagatattgttagcattaaattaggagacattatcccagctgatgcccgtctacttgaaggtgatcctttaaaggttgaccaatctgctctaactggagagtcccttcctgtaaccaagcacccgggtcaagaagttttctctggttcaacctgcaaacaaggagaaatcgaggcggttgttattgccactggggttcataccttcttcggtaaagctgctcaccttgtggacagcactaaccaagttggacatttccagaaggttcttacagccattgggaacttctgtatctgttccattgctatcggtatggtgattgagatcatcgtcatgtatccgatccaacgccgaaagtacagagatggaattgacaaccttttggtcctcttgatcggtggtatccccattgctatgcctacagtcttgtccgtgaccatggctattgggtctcacaggttgtctcagcaaggtgccatcaccaagcgtatgactgccattgaagagatggcaggaatggatgtcctgtgcagtgacaaaaccgggacactaaccctcaacanatngagtgtggacaaaaacttggtcgaggttttctgcaagggtgtggagaaagatcaagtcctattatttgcagctatggctttcagggttgagaaccaggatgccattgatgcagccatggntgggatgcttgctgatccaaggaagctagagctggatcaaggaagtc

SEQ ID NO: 172793 - DNA, 588 bp, Arabidopsis thaliana
  unsure (1)..(588): unsure at all n locations
ctatagnagcattatgacgtcgactgcacgcgtacgtaagcttggatcctctagagcggccgccctttttttttttttttttttttttttatacagccctaaaaaacccataagaatatcttgctaaattaacagagggatgataaatatttgacacttactcacacgaggagggacaatggaaactaacctactgccctatgtggaacaaaaccattttatttagacgtaactgctaatttttacagatttcaattgcgcgcaaaaactattctggactaaaactacaccttttaatccctactttattgtaacaatatgcagcagggaagcgccccctagaccccctacagctttatatttgaaaagactacatcggatgtgtcggataaatcccactgaaagaaggcctctaatctttggataaagaaccctccctattgagaagatttctcagtgtacaaaacgcgctggctatgaagcttgcctgaaaaattttatcgccgaaagcataataaaacacctaaactttagaacatggtactgagaaatggtattgtcccaccgactgataaaacatgccgaaca

SEQ ID NO: 172794 - DNA, 530 bp, Arabidopsis thaliana
  unsure (1)..(530): unsure at all n locations
atacgactcgctanagggaaagacggtacgcctgcaggtaccggtccggaattcccgtgtcgacccacgcgtacgcagaaattgtaatggaccctctagctctcgggtctgtagtatcattcgaatagtgaaactttatcatcgctcacatgagaagtttggatgcgcagtaggatgagatatgactggtggagaggaagcatacttatgctnacattagttcgtatcctgagggaggagtgctaccatatgatggtatacaagtgactgtgtgatgcattggtggttactgcgttacacaatgaccgcttgtgttgatcttgtaattttacagggatagatgctgcctaagtaacgaataaaggatgataatgagactacgaatgtgtaaggatgcatttgtcgcatcatcattacatagaacaccgtggtaatggttgacacgaatgatgattgatgcacgaatctggaaatgactgaggaggatatcgaatggaattgtttacacatacaagatatggggaaataga

SEQ ID NO: 172795 - DNA, 823 bp, Arabidopsis thaliana
  unsure (1)..(823): unsure at all n locations
atacgactcctttagggaaagccggtacgcctgcaggtaccggtccggaattcccgggtcgacccacgcgtccgggtggttgtaaacatgcaaaacgacaatgtcgtgactcttccagggatcgctatcgtttggggactcaccattatggtcctcatttactctcttggtcacatctctggtgctcatatcaatccggccgttaccattgccttcgcctcttgtggccgtttccctctcaaacaggttccagcttatgtcatatcacaagtgataggatcaacgctcgcggctgcgacattacggttgttgttcggacttgatcacgacgtttgtagcggaaaacacgatgtgtttatcggatcatcaccagtgggatcagatcttcaggcgtttacgatggagtttatcgtcactttctatctaatgttcatcatttctggcgttgctaccgataatagagcgatcggagaacttgctggattagcaataggatcaacggtgctacttaacgtgctaattgccgcaccggtatcgagtgcctcgatgaatccaggaagatgtttaggacctgcactggtctatggttgctacaaaggaatttggatatacttagttgcgccaactcttgtggcgattgcgggtgcatgggtttataacacagttagatataccgataaaccattgcgagaaatcactaanagtggntcatttctaaagaccgtgagaatcngtagcacttgtaagagataagaaacatgggtggagtgatggagtattttaaatgattgtacaccttcacacacctacgatatggccttga

SEQ ID NO: 172796 - DNA, 499 bp, Arabidopsis thaliana
atgaggtcgactgcacgcgtacgtaagcttggatcctctagagcggccgcccttttttttttcttttttttttttttttttattttttttctttttttttttttttttatatatttttgtgcgccaaacgccgaaaaaaaaacacgacttgcctcactaaaaagacgagacgacgggggaaaacgagggggacgaaaaaaaacttttcttttcggaggggaaaaaaaaggaggggcgggaacgagaaaccggtgtcccgaggagagagcgcgggtcgagccgcgcgcaagggccgaaagcgccggcgggcgcccgcccccgggtgcgcgacatgtcagagccgcccgcgtaggttagccaccacgagcgcgcgaggcagcctactccaagcaccacccccagccgacaactaatccatacccccgcctacagtagcggcgcgccgacgcataatctcagccgcacagtccaccaacatttacctccccagcgcacatta

SEQ ID NO: 172797 - DNA, 695 bp, Arabidopsis thaliana
  unsure (1)..(695): unsure at all n locations
acactatagattgagcttgacgtcgcatgcacgcgtacgtaagcttggatcctctagagcggccgggctttttttttttttttttttttttttttcttaataacaactgtgtttttatttatgaacaacgtaaacatatcatgaaaaccaactattaacccattcttaatagcttggtatcatacaccttttagtcttttcttgatcatattatggaaatttaagtcgaataaaaagaaatatagttggtagacaggactgacaacaggggggaaaccgagcaactgcttaaaatggagccatggttgaataaccacaacagagtcaagcttcctggcagagccattggggttgagggacttcaatccttagatagtatttgaggccagcgacgaccttgttctgaacaaaacctaccgggtaaattggcatgggattcaaaattgccgggctctgttttcgcaatggaccctttngttcccttgctcgttctgggctttgttgatagaattggtccacgcgagacccttcaaggttgtgaaatttccttgtgggccccaaggttagagaccgcgaacttcccnaggaaactacgcttttactgaatgggntcgccgccgatggggtcacaacaggagatcaccgaaaaccttaccatggcattacaagaggagacccttcacatgggagccatg

SEQ ID NO: 172798 - DNA, 918 bp, Arabidopsis thaliana
acactatagaattactatgacgtcccatgcacgcgtacgtaagcttggatcctctatagcggccgcgctttttttttttttttgttttttctttttttttgtttgagaggaaaaagacacaaattaacaccaagtgtctcaatagtgttataacacaagcttgaaacaaacagaccaaaccagagtttggggagtgaaaatacaaatacttgttttaacacaaatcaaatcccacatacaaagaacctgttccattattgacataacattggtaaaaaaaaaatgggaaagggaaatgggtcaaataaaacgaattcctacttttgctttttcctgggaagacggttccttgtttttttttcaaaaccgttaaaaaaacccacttccacgggggaaacaatattcgccgaaacatttggttttgaattaaaagaaacctggaattttgtccctcggttgtggttctattattctaaaaaaactttgaacaaaattctaaaaatgtttaagggggttccccttccgctttttcctttaaatttttcttacaacggtgggaatctaatcctaaatttataaaaaaatttaatgttttttttccctacctaaccttttttttttgaaaccggggcggacccggggtcaccccgtaattccgaccgggacctggaggcggacaaattttccatagggaggggtttagattgggggaaattggccattttttccctgggaaattgttaacgttaaatccccaaaataaggccgaaacataatggaaccgggggccaagaggacaaaccaataattgggggccacatgcccttcaaggggaactgggccaatattaaaacccccccccgggaagggtttgttttggcccaggggtttttttaccagaaaggaaaaatatccttc

SEQ ID NO: 172799 - DNA, 500 bp, Arabidopsis thaliana
atacgactcatttagggaaagccggtacgcctgcaggtaccggtccggaattcccgggtcgacccacgcgtccgcccacgcgtccgagagaagaaaggagaggagaggaagaaagagagatgaagatgattctgatgagtctgaggatgaagatgacagacgtgtgaagagaaagagtagaaaggagaagaggagaaggagaagccgtcgtaatcattctgatgattctgattcagagtcttctgaagatgatagaagacagaagcggaggaacaaagtcgcagcttcttctgactcagaagcaaatgtttcaggcgatgatgtttcacgcgttggacgtggttcttctaagcggtctgagaagaagagcaggaaacgtcatcacaggaaagagcgagagtaggagatcgatctatatgagccattttcactctccatttctctcttatcaatgttatgtacaataatgaaacatgtctttgtatgttggatttgatttg

SEQ ID NO: 172800 - DNA, 542 bp, Arabidopsis thaliana
cctatagactactatgacgtaccatgcacgcgtacgtaagcttggatcctctatagcggccgccctttttttttttttttggttttaaataaattgtggtcatactcgcatgttgtgtgattgtgattattccagctcacaggtatccttattaaatcgatattgtctggctatatcatagtgtttatacacaaagcacaagatacattaagcaatggtacacagtatctctcactaaacatatttttctgggaaaccaaagattttcatcatgcttctcttgcaatgcatcttcctttttaatcacacccttcccattgttctgacctccaggtggcatttcactcattaagcagcagcagccgcagcctggttaaaaggataatctggtgaattctttcacatcttccatataaagtccttgacctgggtgtgagtaaaacttggttcttaagactggaaccttgaaggtccattttttatatgcttaaaaaaaagccttgagctttttttccggtggcgaatcaccggccaggtttttt

SEQ ID NO: 172801 - DNA, 441 bp, Arabidopsis thaliana
gggaaagcctggtcgcctgcaggtaccggtccggaattcccgggtcgacccacgcgtccgcacaaagacgcaaacctcgcatccattcctgttgaggagttgattgaaaaggctgatggatttgccggagtcttcccagagcacataatactgaaaattggtggggaaaaaaggttgcagggagaagggaaggcaatattttgttttgggaaatttggactggggttttaatttggtttgttccaaatggggaattgggcccccccttgggttttttttttaaaagaggaaaaaaaggacgcctttgaatttttccggggtgaattttttggccctcggaattgtggttttggagtggtttaacaaagaaaaggctgggggtgtgttgggggggctttttttcaaaaaattatgggggggtttcacctggagggggcccct

SEQ ID NO: 172802 - DNA, 602 bp, Arabidopsis thaliana
acctatagaattactatgacgtcccatgcacgcgtacgtaagcttggatcctctagagcggccgcgcttttttttttttttttgaggttcgcatcttattgtcacgggaaagcattacatgattggggttcaaactgagaggtgataaaaaaaaacggaaatgtagtaacttgacataagtttttcaatccgacaataaaagtgatccgagttcgaatctatcaaaaaccaaacgacaaaaactaatcacgacgacatagcgttgttgactacaaacagttacacatcctaactttgtagaaattggggatccacttttaatactcgtcaagctgtgggcaaacaaggaaacgggtttttttgattggggctttttgaccattattcccaacaatcatggttttttcttcctttgacccaagggctttaacttgggcctttttcggggttagacctcaatctttttttcttttaaagggaactttcaacttaaccaaccccatttttcgaactctctttcttgaacggcctgggattagggctaatcctttctctcttgtggtggggactgcgggtgtccttagtaggggttgcaacttttt

SEQ ID NO: 172803 - DNA, 555 bp, Arabidopsis thaliana columbia
  unsure (1)..(555): unsure at all n locations
cagacgccaccgcggcccgcggccgccggggggggggtagaatcgncggnacctatacgactcatatagggaaagctggtacgcctgcaggtaccggtccggaattcccgggtcgacccacgcgtccgcccacgcgtccgcacaaactgcttatcactacaactttccacaaaacgacgtcgtcgaagaatgcttcaactttttcatggatgaagaagacctttcctcttcttcttctcaccacaaccatcacaaccacaacaatcctaatacttactactctcctttcactactcccacccaataccatcccgccacatcatcaaccccttcctccaccgccgcagccgcagctttagcctcgccttactcctcctccggccaccataatgacccttccgcgttctccatacctcaaactcctacgtccttcgacttctcagccaatgccaagtgggcagactcggtccttcttgaagcggcacgtgccttctccgacaaagacactgcacgtgcgcaacagatcccatggacgcttaacgagctcttttctcc

SEQ ID NO: 172804 - DNA, 897 bp, Arabidopsis thaliana
ctatgacgtaccatgcacgcgtacgtaagcttggatcctctatagcggccgcccttttttttttttttttcaatcaaatcaactttccattttattcatcgaagtaagagatcagttcgatacatgtggaatataaagcacaactatatcatcatatgtatgtatatttctttcttttagatttgagtaattttaaatggtaactccaaacaaaagaagtaaattcaaagcttattctgggtaccccatggattattgtttgcccatttccactgatctctgacatctcatccacttcatattttgccttccagccaagttctttctaagccttctctgttgaagcataaaactggtgttgcatctcctgaccttcttcggacaagagttaatcgggaattttcttgccggaagccttttcaaaaggctggaaccatttcttacaacaaacgttcttgaccaggccctaaattggaaggcagacaaccaatccttggatcacacaaaaacttcctgaaccgcagcgattggccctttgcttaaacccacacaatgagaggagctcttaaccgactacattcctggggggaaagcctggccccgaccccgggttcacccggaaattccggccgggccctggaggggcccaccttccctttgggaggccgtttaaagctgggcgaatcatggccatagttgttccttggggaaatggtattcgttcaaattccccaacattacagccgaagcataaaggaaagccggcgggcttaagggagctacctacattaatgggtgcgctcatggccgttccaatcgggaacctgcgggccactggttataaatggccacccccggaaagcgtttggtatggcccaggggtttttttcccggaaa

SEQ ID NO: 172805 - DNA, 856 bp, Arabidopsis thaliana
  unsure (1)..(856): unsure at all n locations
actatagctgagctatgacgccgcatgcacgcgtacgtaagcttggatcctctagagcggccgccctttgttttttttttttttttttttttttttttttttttttttttttttttttttttttttttttttgggataaaaacaaagttttattgacccggaaaaaatatggaggggctaaaaagggggcatttcgggagaacgaagctcccggggggagagatccccaggagcaaaacagaggaaaagaaacaggcggggaaaaaagggaaaactgaaacaagaaccccccagctgccgggggggttttaaagactggaagggaaattgcagagaaggaagttttttgaagggggcaagcccttgggcttgagggaaaacaaaaaaacctttcttcagtgcccaaccaggatgctcatgggcgggaaacgggtacgagggtttgaaaaaaaaaaaaacaaaacaagcgccgggccccggagagagaaaacaaaaagaaaagtggctggcggcccaaacatttacaaccacaaaggtcctccgcagaggcccaggaaaaaaaaagaaggcgcttagggggggctgcgaagaaacaacacacggtaaggcccccgcacgaaaaaagccaaagcttaacaacggccggagaaaggcgccctagagacnagaaaagagaataaagccgggggggaagcgaaaatccaattggacacccgccccgagaggagaacaagaaaaaaccccccgggagggaggaaacggttcgggcccacaacgagggggacgagaaaaaaacccacaagggggggccgcggggggcgcgaaaaaaaaagggagaaaggcagaaaaaaaaaac

SEQ ID NO: 172806 - DNA, 539 bp, Arabidopsis thaliana
cactatagattgactatgacgccgcatgcacgcgtacgtaagcttggatcctctagagcggccgcgcctttttttttttttttaagagagaatcaaggatctagcgatcatcgaaagtgaaacccgaaagaagatcataggatgataacaacacaacatatggtgtgttcagcaggacctgaacatgattctactactggctctgtacatgaaaacgccggaactttgactgcacactagaagcaaggggaaaacacgttcttattagtcgcctccatcagcccagcggccattccggtcgatataaactctctaaacccaacacgatggttgcattcactgggaaggagacccgaaccgccacctgtcgctggcagagctactaccaccgacgaatccttgctgtaaatcctggctgtaactactgacctaccgaccttagcttcttctgaaccgaccgggatgaacctcaccaccggaatccaccagaggtcgccttcgctttctcgatcatatacttccacttgtctcttctttaa

SEQ ID NO: 172807 - DNA, 479 bp, Arabidopsis thaliana
acctatagattagcttgacgtcgcatgcacgcgtacgtaagcttggatcctctagagcggccgcgctttttttttttttttttttttttttttttttttttttcgatactgaaaccatattacaaactcattttattaaattgcacacaactgaaaatggtaacacactaacacatgcattaaatttattacataaaaattattgtctttagatgaaacgccttttgagagagatctaacataattggcagaccctattggcataaaggtactgacggtgtcatttcaaaataacagggctttaaacaaatttttaaacctatctttcatgaaatcggaaatttggcaaagcaataatattgcttgcaaccccgagcggttttgcccttttcccattggggcccccagcttttgctttttttagggggacgctgaacttagaccctgacttgaattaacaattttgaacgttttttttt

SEQ ID NO: 172808 - DNA, 754 bp, Arabidopsis thaliana
  unsure (1)..(754): unsure at all n locations
ggcgacctatagaagtactatgacgtcgcatgcacgcgtacgtaagcttggatcctctagagcggccgccctttttttttttttttgacgtaaatatcatttccattatattttcagacaagtattaacaatgagagatctgaaacagagaacccgcctacaaaaacccatgacttttgtctcccctgttagaacgctttcgatgacatgagtggtttgggaggtgacatagatctaagctcaggagccgagcttgggaacatcacgttcatcttatgcatcaatatatcagaccgtgatgggatctcgttcagaagaaactgttgcacgatcggtttcttgaaccactccatcaccaactctcctggtgccctcaagacgactttgctgacttcaaaaggcgactcaccagagctcagcatttgagcatttacaatctttaatgtcggtcctgtgactagctttatacgtctcgggactactccgtagtaaagcattcgttttctgaacctgtggagagtggaaccacggctatgagcgcagctccgacagataagtttctcacatcgagagaccagcaatgtgttgatcaaagacgatggcttttggaaagagtttgttctcgtacgctactttccagacacatcgagctcgngttatttgaccatcaagacaaggagttgagaaggacatcacaaagtacctagcagctccttcttcgagttcgtaatcaatcccttggtaaaactctttg

SEQ ID NO: 172809 - DNA, 326 bp, Arabidopsis thaliana
gggcaacactatagaattagcttgacgtcccatgcacgcgtacgtaagcttggatcctctagagcggccgcgcttttttttttttttttttgagaagaacgagaacatacgcattacgaatgaacggatacgatattttacacagaagttcagaagagagaaacaaagacaccagaaaagttcaagacatattaaacacctaaactccttttattgcactcgttgaacatccgaaggatcaagggaaacttttcttaacgttaaaaccttttgattttaagcatctacggtttcagctgaatctggtgcgggtaagaacagctccg

SEQ ID NO: 172810 - DNA, 518 bp, Arabidopsis thaliana columbia
agatttgccggcactatacgactcatatagggaaagccggtacgcctgcaggtaccggtccggaattcccgggtcgacccacgcgtccgtgttccttgacgagattggtgtggcttacgatgagcaagacacctacgttgtggttaagcacgcggctctgttcacatcaaccatcatgagcaagcttttggctcgtcctaatgtgaagctcttcaacgctgtggctgctgaggatttgattgtgaaaggaaacagagttggtggtgtggtgactaactgggctcttgtggctcagaaccaccacacacaatcgtgtatggaccctaatgttatggaagcgaagattgtggttagctcttgtggtcatgatggtccttttggagctactggtgttaagaggttgaagagtattgggatgattgatcatgttcctgggatgaaagctttggacatgaacactgctgaggacgctattgtgaggttgaccagagaggttgttcctggtatgattgttaccg

SEQ ID NO: 172811 - DNA, 391 bp, Arabidopsis thaliana
cctatagattactatgacgtcgcatgcacgcgtacgtaagcttggatcctctagagcggccgcccttttttttttttttttttttgagaacataaactgtaatgcaatttattacacacaaaaaaacttaaagctgatcataatttcacttatcaattcatccaaattattgtaatataacatttaacaaaaacctaatggaaccatgttttattggtaatacttgaactagtaacagggatgatgctgcttgagttggcggcatcaagagcgttggaagattcgtcatggatctgatgttggtgctcctgtggctggtgatggatgtggttgtggtggttatcatccatgaatggatatcccatttgctctgtctgatacctcatttgct

SEQ ID NO: 172812 - DNA, 578 bp, Arabidopsis thaliana
tatagactactatgacgtcgcatgcacgcgtacgtaagcttggatcctctagagcggccgccctttttttttttttttttttttttatggggaagacaaatatatctgactggaaatctatgatttgtctctaggttagatatatataaggtacttctaatgcattcatttacattttgctaatggactaagctttcttctctctaactttcagacatatttgcgagcaaaatgtttccaaatcaaaaacaacttgcttgaagaataaatattatgatccccaatctcagcttcaggcctttttcttcttctgcattctctgcagcttcctccatatcaggaaaattgggtaagacaatccaccgaacaccatcaacacacatcccaattgtttggaagaaaccggatcccccttcaaactgaaggtaccacgatgctcacaaacttctgggtgggggtattggccgtgttacctagaaacccaaatctcctaatggccaaaaagataacagtttggcctcctggcccaaataaccagtccttagaaatgccccatgctggctcaggcagttgtttga

SEQ ID NO: 172813 - DNA, 735 bp, Arabidopsis thaliana
  unsure (1)..(735): unsure at all n locations
tatagctttagctatgacgaccgcatgcacgcgtacgtaagcttggatcctctagagcggccgccctttttttttttttttttttttttttggtttggagaagaatgtaaatatcattataatgaagagttttggtcttacataagcttaacctgatggacattttcatgaagctaacatggtcccatgccaacaaaagacattcgagattcaattcatcagcaaggccatgaagcgattaggctcatcgtttccgatatattgaaaaatgttacattccatttatatacaacatgttcaaaaaaattcagtaagaaaattgataattcaccagcaccaatccttagagagatagcttcttaatctcaacgacaagattctcttcaaactatatcccctttcatttcaattttgacagatgatttcagctaaactaaccaatctcaaaaacttcaaatcctcatgtcaaatcgaagatgaatgacttcttctatgtgtacctttgttcactgaggcaaaggcaatgcagcttcgacttcattccacaagtccacatttctggtaaacttctctttaactaccgcaatgagctcctttgcttcatcgacctttgaacgacttgctagtccattaacaagccacttcatgacactannaactcgaacccaattctctccatactcttctacaaaggatcaaagctggctcaaagtcccctcctttcacaaacaatgg

SEQ ID NO: 172814 - DNA, 563 bp, Arabidopsis thaliana
gaactatagaattactatgacgtcgcatgcacgcgtacgtaagcttggatcctctagagcggccgcgcttttttttttttttttttttttttgattctttttttttttttttttttttttttttggggggaaagccaaattcagagagaaaagattccaaagctgttacatccccaaatcaatgagtggtagatagaggaaaacaaaaaaaaagggttttggagttacatctccaaatgtctgtgtttggaacaatgcatattgtttaccacaaagagttggtaatgagcaatttaaatttaggaaggttctcaagagccactgtgaagaggcccccaagaataaacttgcaaccagatgccaaaaatatcctccaaatgtatttagaactttgctttcgatttctggggttgataaatttgcaaaacccgtcgaaaatacgaaagaaacccggtggtggggatgggttttttccgttccaggtgaatcagtttaacaacttgttttaattccaaccaggtgcataattcaaaaaactagcatattcaccaaaactaaagggc

SEQ ID NO: 172815 - DNA, 515 bp, Arabidopsis thaliana columbia
tgatttgccggcactatacgactcattatgggaaagctggtacgcctgcaggtaccggtccggaattcccgggtcgacccacgcgtccgcggacgcgtccgcccacgcgtccgtacaaaaacctgacaatcgaaacacagtttttctgataataatatagacatttaccattatgcccttctaactgaaaacggcaattacgttccttgttatttgttttcttccttctccttctgtttcttttttgtggctttaatttttttcatattaattcggaaagagaaagactcttcactcccataacagtcgccggtaacagaatcactccgatgatcgagactggtaaataccttctcggcgccgccggtgctagcggtttcggctctaaatccaccgccgaggaagttaccgagaactgcgaccttcgttccatcacagcggttatcaccggtgcgacgtcggggatcggagcggagacggcgagagttctggcgaaacgaggagcgaggttgatt

SEQ ID NO: 172816 - DNA, 517 bp, Arabidopsis thaliana
cggcactaatcgactcacttagggaaagccggtacgcctgcaggtaccggtccggaattcccgggtcgacccacgcgtccgctaagagatgggatatgaaggagggagaggagaaagttgtgtttggtggcggaagagatgaggtggatgggtttggaatcaggggagaggtgaaatctaatgaatgggatgtgtcaaagccatggactttgatagcggatttttttggagttgtgtttgatcctggtcgcgaactgccgtttagctttgacactagcttgcgaaccggccgaagaagacttcgtttataccgatctccctcccacggacagaccgagctcccttctggtttccccgggccctgtcctagccttcggacacctcctccctattcctccctctgccctctcattcctctccatagttccccccccctgataacatttctatcccttcccccccttccctgctttcccttcacattgcccccctgccgcccggttatatttccagctct

SEQ ID NO: 172817 - DNA, 946 bp, Arabidopsis thaliana
ctatagaattactatgacgtcccatgcacgcgtacgtaagcttggatcctctagagcggccgccctttgttttttttttttttttgcttgaaaaaaacaagttctgaatataaaatctccgatggattatctatattaggactctataaacttactcactaactctcacaaactctcaacaaaacccctaccatagtccatggacttgatccagcggaggaataaaaagagtgctactaaccccccatttgtattgagaaaaaaacattcccatgttgaccacagacctgacccccactttggaaattttggctggagctgtcaatcattttaccgctctatgtgtcctcgaattgaacccatcaaaattcctgaccccattgggcggccgttcctgggggggaacggataatggtacaggctttgatttttattgcgcaaattccggtttgtgtaccttttacccaaaggttgccgctgctttgactaccaaaattgatagagaccgtccccaaccaatgttggtttcccaggccatcacccccggtagcttagaaacccttggtgtcctcaaccctaccaaagctaaccccttcctgctttaacctaaaaattcttcctaaccccagaaaaaccccttttccaaaaagtgtctcctttccccctttgccttggggtctttaaatttaaaagagttcgaggcgaacctatatccggggtgaaccaaataaccgcaagaggataaaaccatattagcttcccatgattccccattttccccttaccggcttaagccacattttccacccccttcccaaagtggaaggttcccttaagggtggaaacaaaaataagattcctttaacccaaaccttgcacaacctattgggggtgatttaacaacccaccccttgccacctgattttcctccccgtttctttccttt

SEQ ID NO: 172818 - DNA, 511 bp, Arabidopsis thaliana
ccggcactatacgactcatttagggaaagccggtacgcctgcaggtaccggtccggaattcccgggtcgacccacgcgtccggatttcgaaatggaggaaggtcgtgacgacgagtattgtagtttttctaattccggcgatcgcgacggtggattgagcggttgttttttcttggatcatgttggccaagttttgctttctcgaaatcatgatggtttgtcctggaaatgtttggattcttcagattgtgagggaacaacttgtttgggaattataatttgcgagaattccgaaactgagatcaaattctctgatatttatgctgtggagtttgttagctatggcttggtgcatagtccaaagttaggacttagacatgccaaagaatgtttccgggaacgcttgttaaatactcaagagatgtatcggttcactgtccacggatttcaaagttcaccaaaagagccttgtctttggaaccttgctgcattcacttttggacatatggat

SEQ ID NO: 172819 - DNA, 833 bp, Arabidopsis thaliana
tatagatgagctatgacgccgcatgcacgcgtacgtaagcttggatcctctagagcggccgccctttgtttttttttttttttttttttttttttttttttttttttttttttttttttttttttttttttttttttttttttttttttttttttttttttttcgggcccaaaaaaaaaaaaaattttttctttttacccccttggcccccttggggcaaaaggccttaacccaaggaacccctggcacggggccaaaggggggccccccaaaaaaaaaaaccccccggggggggttttttgtaaaaggccttaaacccccaccccccccctcctgggggtggggcccctcctcccttggggcccaccaaaaaaaaaggggctttcccccgtttaacccccccccaaaaaattttccccccccggggttacccccccctggggccaaaagactccggggctttgggccccagtttttgccagaaggccccacttggggggagggggaaaaaaagggggtttacgtcttccccctcccaccacccaaaaacctccgggggccccccttttggggattctttttttttttgtggaaaaaaaaaaatttttctttttttccccccgcgcgggggggcccccgggatttttcgcgcccgcccccgggggggacccaattcttctaaagggggggccaaaagagggggggagaaacaggggaaaacggttccccgggaaaaagcccccccgcaaaccccccaacaaaaggcggggaaaaaggggggaggcggggcgcccaaggggagcaccccctattgggggggccccacgcccctt

SEQ ID NO: 172820 - DNA, 612 bp, Arabidopsis thaliana
actatagctgagctatgacgccgcatgcacgcgtacgtaagcttggatcctctagagcggccgcccttttttttttttttttttttttttttttttttttttttttttttttttttttttttttttttttttttttttttaaagggggggaaaatccccaatctggttaaaaggaaacgttttaaatttagtaaacaacccccgaattaacatttggtcccaaacaaaaaaaacttaaacgaaactgtttcttcaaaaaagtaacccaaacgaacgattccccacccagaaggggggacccaaaaccaaatttaaaccaaaaacagggcgggggcccgcaaacaactttttttttgattaccagccgccaccaccgcctccggaacttccaccataaccgcctccggagccacctccctcacggggtccaccacccccgtatcctgggcccccaccgcctccaccaaatccgaaacctccggtacgtgttttgaaaccccccccggctcctcctgagtatccccccccaccccctcctgagtttcccccaccgcctccggttggggaaccaccaccgtttacaccaagggctcctccgccaccgccggtacc

SEQ ID NO: 172821 - DNA, 444 bp, Arabidopsis thaliana
acactatagactagctatgacgtaccatgcacgcgtacgtaagcttggatcctctttagcggccgccctttttctttttttttttgtgaggagaacgacaaaatcccttttcatagcgagaacaaatgatcattaaatacttgtggacgatcacaacgaatctaccaactgactgaaacacaacacttttattataacataacaatctcttttcgaagggtgatcatacgcggaccgcaatcaagatgcataatcaatgcgtattgtacaccaaggagccacaaaaaatcttaatggctaatccctgttaaacaggatgcggatgaacacacttggccaaggtaagagaaccaccacttagtatgcctgcctcccatatagagctatcttctaggacgattacgacgagacgcgattgcgcagaaccatcatgccttcaatctt

SEQ ID NO: 172822 - DNA, 583 bp, Arabidopsis thaliana
  unsure (1)..(583): unsure at all n locations
actantagatagctatgacgtcgcatgcacgcgtacgtaagcttggatcctctagagcggccgcccttttttttttttttttttttttttttttttttttttttttttttttttttttttttttttttttttttttttttttttttttttttttggaaaaccccaaaacggataaaactggggaaaaaattttatggggcttttttttggcaaaatgaggggggggaaacaaaaagagcattttgggtttcatataggggccccttttaaaaaaagggaggcatggttaaaagctttaaagactctccaaatgggggggggaacatttccccaaaaggctttggggttaaactttttggggttggcaatgggcttataaacctcggggaagggtttagacccgggttcattggcctgcggggggccggtttaaaaggcttggaccagggcttttaaaaaagcccatttgggctggtaaaacctcgcttggccataataaaagggggataaagccctttcccttaaaggacctctttaatggccttttcttttagggatttatgtttcgcccccggaaaaaaat

SEQ ID NO: 172823 - DNA, 482 bp, Arabidopsis thaliana
  unsure (1)..(482): unsure at all n locations
tacgactccttaatggggagctcgtacgcctgcaggtaccggtccgngantcccgggtcgacccacgcgtccgcggacttgtgctaataatattacactgatggcatacctgagtagagagattaggatgatgactacccacgctttcatgtactactcggcgggctatcacaggatatggatgtgattcttaactgatgtgcgatatcaagagactcataatggttattctgcgaagcgagaggctgaatcttagtcactgtattactgagttcttatccgatgaaggctgttatgacctccgtctaatataacgtcctgatactatacacatatatgcttaattgcaacaccaagatattcaagatgcaattccaatcctgacagaccagaatctaattgctcatgtaagaggagcaggggcttggactccatcttcggtttaaaatctctaacctgatctggttactgatgaaaaaaac

SEQ ID NO: 172824 - DNA, 416 bp, Arabidopsis thaliana
cgccggctctatacgactcattatagggaaagccggcacgcctgcaggtaccggtccggaattcctttttcgacccacgcgtacgcccacgcgtcccgcaaatcttccttagccattgaacatctgaacaagtatcgttgaggaattcagggcgcgaacatggatggccatggagagaacattgcacgaacatttatgttttacttcgctaatgcgacaacgcacgtcggctggtctcggtatacagcggcaggattctaaccatgagcctactctgtatattgtaaccaaattaaggcatgcctcccgctcgtcgcagccccctcgccgcggacgaccacagcggcggtttgatgatggaatggctggacgacagcaacatctcagaatctctaagcggtaacacagaggatacc

SEQ ID NO: 172825 - DNA, 577 bp, Arabidopsis thaliana
ctatgacgtcgcatgcacgcgtaccgtagcttggatcctctagagcggccgcccttggttttttttttttttttttttttttttttttttttttgctgtatttttgggtctttcagaccttacgggggaccgggcggtgacaaaaaacaccatagcgccaagaagggacaaaaaaaaacaaagagcccgaaccttttcccaaagggagacgatccactaagcccctaaaaaaaaaaagaacccccaacttctcctaatgctccttcgcacccaaaagagggatacccctgcaatccccctcaccttggggaggagagcccaaagcctttgggggtggttatagacaagcaaagactttttggacgcggccgccgggtaacaccaaggaggcccctttccagagggctccctctggaaacccctcgttctttcccacccttttgctaaaccttggaaacctcccgacgaagcccctccaaaaaaaaaaactatcgcaaacaacgcggcgccagaaaccaaaagcaagcgcccttgtgtgccttctgcacccagccggcgcggcggccccttgggggca

SEQ ID NO: 172826 - DNA, 541 bp, Arabidopsis thaliana
  unsure (1)..(541): unsure at all n locations
tgtggtccggggttggcggggggggtaggatcgcgggntactatacgactcatatagggaaagccggtacgcctgcaggtaccggtccggaattcccgtgtcgacccacgcgtccggcatttttgtcccagtattccttctacaaatcgttgttgatatgcttcatccagattttcttctcgtttatttcaggcgtttctggaaccagtcttttcaattcagttagcctgatggcttataacgttttctacaccagtgttcctgttcttgttagtgtaattgataaagatcttagtgaagcatcagtgatgcaacaccctcaaattttgttctactgccaagcgggaaggcttctgaatccaagcacatttgcgggttggtttggccgatccctttttccacgccattattgtatttgtaataaccatacacgcctatgcttacgagaaaagtgaaatggaggagcttggaatggtagctctgtctggatgcatatggcttcaagcttttgttgtggctcaagaaaccaattcctttacgg

SEQ ID NO: 172827 - DNA, 521 bp, Arabidopsis thaliana
tgccggcactatacgactcacttagggaaagccggtacgcctgcaggtaccggtccggaattcccgggtcgacccacgcgtccgaacaacagcttcgtattcgctcatcttcttcgctttctgatcttggaaatcgcaggcattgttcgtctactcgaggatttcaattttggtcatacaagagaagcgaagcagcgtcgccgttcaagacgaggtacagagaaaacgaagaagaagaagatatgacgattaaaccggcggttcgtatttccgacgggaatctaatcatcaaaaaccggacgattctaaccggtgtaccagataatgtcatcacgacgtcagcatcggaagctggaccggtagaaggagtcttcgtcggagctgtatttaacaaggaagagagtaaacacatcgtaccgatcggtacgcttcgcaattcccggtttatgtcttgtttccggtttaagctctggtggatggcccagagaatgggagaaatgggccgagatattccctacgag

SEQ ID NO: 172828 - DNA, 556 bp, Arabidopsis thaliana columbia
ggcagacggactatgcaccccccggccccgcgggcgtagtatcgccggcacatatacgactcatatagggaaagctggtacgcctgcaggtaccggtccggaattcccgggtcgacccacgcgtccggtctccttcgcttctgcagtcttccgcttcttcgtttcacggacgtttctcaccattagcggctccatcctccgcacgaatgctctctccgccgctcagacacgtggtgaaagtctcggcgtctggaactgtactggtcgagaaatctgaagccgagaaaactcaacgcctcaaaaccgcttacctcgagaggattatccctgcgctcaaagaagagttcaagtacgttaatattcaccaggttcccaaggtacagaagattgtagtgaattgtggtattggagatgcggcgcagaccgacaggggtttggaggctgcgatgaaggatatcgcgcttatcacagggcagaaccctattaagacacgagctagagctttcctttgctactttaaagatcagggaagatcaacctttggggattgctgtca

SEQ ID NO: 172829 - DNA, 770 bp, Arabidopsis thaliana
  unsure (1)..(770): unsure at all n locations
cttagattagctatgacgtcccatgcacgcgtacgtaagcttggatcctctagagcggccgcgcttttttttttttttttttctcaaattataaacttttttatacagacaaaaaaaaagttgaatatctccgaagagattcagattaatcgacataatatgcttctctgcattgttcttagctcatgagagatctcaagcaccaattgttgctgaatcttttccacaatatcagacacaccaccttcagattcaccaccaaaatccaaccaaagacatggctttattagatcagtttcaatgatctgatccaatgatcttgtaggagagtcagagcagagtaaactccagccaaaatgtctcatcgtctcgtgaatcagatcatcttctctaagggatgattctagattggggactctcgagctcttcgatggcgagaaaggccaaaacttgatgtcttgacggtaaatctcgcggagaatctcgtcggtgtaatcanaaacangaagaagctggtcgttgtgactaccgtgtgagaattcatcgagtagtgatgtgtcttcgttgcaccttgccataagattagtccaattcaatcttgaagcttcaagaactttcttcacaaactcatgaccagattctttttctataagatcaatgttaggatcatcaaatgataatccaatcttcttcttcaggttagattatttaacatttccggggataactgtttcgtcttccaatgaatccttcaagaacagagcaggact

SEQ ID NO: 172830 - DNA, 606 bp, Arabidopsis thaliana
ccgtcgtattcgccggactcctatacgactcatatagggaaagctggtacgcctgcaggtaccggaccggaattcccgggtcgacccacgcggtacggttcatttatgactgggagcgtacttctccatgtcacctgccttgctgagtatgcggcatttcttcataccggaatcgttcatgagtgcttttatcacggactgcactttctgcctcacgtctcaaagaggcacgttcgcttgactcctcaactatagtcgcgccctataatcgcattcgggattgactaatatggaagcgaggtacataatttactagccttcgggacgcttattctactgacacaattggcttgctctacgggcatgccaccccgcgttcagagaatattgcgttccaccagatacactctgaaccaacgtctgccccctgcacacagcatatgacggtcatccctgcttggtagctcgctatcttgactgccatcttgtttcggctacaagaccgcccctatagccggcgccgctctagtcgtattaatgccaatgctcttccctgcacctcacgcgctttacaataagactttgttaaagatatttaaggagaat

SEQ ID NO: 172831 - DNA, 550 bp, Arabidopsis thaliana columbia
ccacaaacctctatcggcccccccggcccccccccgtagtatcgccggctcatatacgactcatatagggaaagctggtacgcctgcaggtaccggtccggaattcccgggtcgacccacgcgtccggcttactttgaaggcagttttgatgcttgcagatcaactgattagcagagttgaatatatgcattcaagggggtttcttcaccgtgacatcaaacctgacaatttcttgatgggacttggtcgcaaagcaaaccaggtgtatatcattgattttgggcttgcaaagaagtatagggatctccaaacacataggcatatcccctatagagaaaacaagaaccttacgggcacagctcggtatgctagtgtcaacactcacctaggagttgagcaaagtaggagggatgatctggactctctcggttacgtactcatgtatttcctgagaggaagcttaccgtggcagggactaaaagcttgcacaaagacgccgaagtttgactgaattatctagaagaaagtttaactcctatacaggccttg

SEQ ID NO: 172832 - DNA, 805 bp, Arabidopsis thaliana
  unsure (1)..(805): unsure at all n locations
attgagacgacactatagattactatgacgccgcatgcacgcgtacgtaagcttggatcctctagagcggccgccctttctttttttttttttttttttttttttagataaaaacattatttattatttatctaacacaattcaaccaactgcaaaataacaaactgcaaaatataaatggtcaaaacattttttttaaactaataaattttacattaaaaatgagaacattataatgtaaaacaaaaaaaaattctctagaacatcaaagattttgaaacagaagaagtacgtatataattaattatggtaattccaagatgaaaatagcattgtaagaaatcaggcaagtcctgtcttgatatcctcgacaagctttttagcaattgttttgtaggctttctcggagggatgagcaaagtcatagaagacatatttatctgggttggagcatggtactattgccgtaagcatacaacaacatccattcttctcatgggtaaatccgtatttcctatgattggtgataacatccataagagagttgtacatgtcgacatagacaaacctagcacccctaaaatctgatgctcctctccaacttttaattccgcttttcaattttttggttgaatcttcagagattgtgtttgccaagaaattacaccacacgaagaacccaccaaaaataagtcttggcataggcaaacatcccaatggtatcactcccatcaccgcaaattttcttgctccgngatcatataaatcttttataaatttttttgtccaaccaactaatttactg

SEQ ID NO: 172833 - DNA, 548 bp, Arabidopsis thaliana
ctatgacgacgcatgcacgcgtacgtaagcttggatcctctagagcggccgcccttttttttttttttttttttttttttttttttttttttttttttaatatttttttgttatttgttaattttatggttaaatgaacattatatttacatgggagaaggaaaaaaaaaatggggaaaaagcgaaaacattggggaaatgggggaagaaatactaccgggaaaaaaaaaatccaagctcaaagaagagggaacatagtggtgatctgaaaatttaaaaaagggggagactctatttttggagagtccaagagggggggataaaaaacagggattgtgttaaaaacatgggggagcgcggtcacgggaatactaaaggggagggggcttaggaacttatggtgtttaacctttaaagtgacagggacaagcgaaggaaccgggtacattaacgatgacggtgaacgaggatgctttgagaaaccggaggcgtgggagcaaacgggaattgcggaacgagacatgtatgcgaacaattttccctaaagg

SEQ ID NO: 172834 - DNA, 431 bp, Arabidopsis thaliana
  unsure (1)..(431): unsure at all n locations
cactatagtaatagctatgacgtcgcatgcacgcgtacgtaagcttggatcctctagagcggccgcgcttttttttttttttttttttttttttttttttttttttttttttttttttttttttttttttctccaaaaccatattactatctttggaaaaactcaaaaaataacaaaggggttttaacccccgnaagaagaagagaagaaaggatggggtggaaaacgatttgaataaacaattaacaagggggggaataaaaggcaggggagggggaccaccaaaacattagaggtgtttccctcaaatcatttaacaaagattgggtttttttatagaaggcggcaccgacaaaatgggggggaccaaactgggggatctgggcccaaccgggcggatattgggaattgggacacccacacctgggttt

SEQ ID NO: 172835 - DNA, 523 bp, Arabidopsis thaliana
ttatttaggcgcactataaaacttgcgcgcatgccctcgtaagctgatcttaagcggcgccttttttttttttttataatatctaaatttgctcttactcactacacttactttgacccacaattttgcgacatccaaagatgataaaaagaacacacagttaaatgtacaacaactcaacaacactttcagctaatattattcaggatcaaaagaaaaccccaaacaaatgctgaaatttacattgaacattcacattacgtggttaaagtgtcaggaagagccatggaaggagctccaatgatcttaccaccaacatctgggaaaggtctcgtaatcaggaaaagggcttactttaccatcaacgtctacttgaaaaggatactttattaagtgaccttggagctctgagaatttcgggtctatgaatcttttccagttttcttcagagattgggttcaccttcttcagacattccagatctgatggctccacaaactcatcttcaagttttgcctaaatg

SEQ ID NO: 172836 - DNA, 491 bp, Arabidopsis thaliana
tatacgactcctatagggaaagccggtacgcctgcaggtcccggtccggaattcccggttcgacccacgcgtccgcccacgcgtccgatgggaaagagaaacacgtcttgggctagaaattctaatagaaaggttagatctaaggataagggttcagatgagtcagatgaggattatgtgatttccgacgaggatgaagaagagtctgaggctgatctcaaggaggagtatgcctcatctgttgacggtgagccatcctttgatggttttaatgggtctgatgcggtggaggatgaggaattagatgaagtggaagaggaagatgtgatgctgaggaatgttgaatggccaaaagtgaagactggtcctcgtggtaatcgaaaaatcacgggatgtaagtcaagaaagacgaaccaggtggatgcgcctgacaacgcggatcgccctctccctcgactcccctcacgacgatggttgtatccgcatttcat

SEQ ID NO: 172837 - DNA, 679 bp, Arabidopsis thaliana
  unsure (1)..(679): unsure at all n locations
gacctatagatanactatgacgtcgcatgcacgcgtacgtaagcttggatcctctagagcggccgccctttttttttttttttttttttagattactctgttttctcattaaaaacaccgactcttcaagcctactaatttacacagcaatgtatcttttaacataaagaagatgacaacaattagctttcattagcataaacaaaatgaccctttctcacatatgaacagattttctcagagccaatgagacaaaaaaaaaaaaacctcaagcactgcctcattgttagctttcactagcaagatctttttctattttcctcttatttgccagcataccagttctgagcacacttagcatcaacagataagtcgactgagagaatattcttgccgttgaagggttcagacatgcagttcacaactatgtctttagcgttctccgctgactcacttggtccttccaagattacttcatcatgaacttgtagaagcaatttccaaccaagctcttttagccgttgattatttgatatctccagcatagcgcacatagcaacatcagccgcacttccctgaacaggagtgttgattgctgctcgctcgatatggttcttttgggcacgtgaacggtattcagggaatttacgagcccttcccaacaaagtgagtacatacc

SEQ ID NO: 172838 - DNA, 954 bp, Arabidopsis thaliana
  unsure (1)..(954): unsure at all n locations
cactatagnagtgctatgacgtcgcatgcacgcgtacgtgagcttggatcctctagagcggccgggcttggtttttttttttttttttttttttttttttttttttttttttttttttttttttttttttttttttggggcaaaggggcaaaatgctctttttccccccctccaaaagacccaaccccgagagttagaaaggtaaagccgcaaggggggggggggggtagagggggggtttctggggtttgtaaaggggaaaaccgaatttttggggtagggcgttgggcctccggggggggttggggttttaggggcggggggggggtttggtcctttgggggggggttggggacccaaaggggggcatgggggaggggccccggctttgggggtaaggcccaattggggttgggctgggcccttgggatattcaggggcgaaggctttaagggagggggggctggggtcctttcccaaaggcggggggggggngcaaagcggggaggggggttttggccccctccaccccttcgggggatacggcccggccccagggaaaaagagagcccccgacccccggccgcttggtggggggggggggcgggtcccggggaatcttctttgagttggggcaacggcggttggtaaacggttccggcgggctaaggggggggtgccgggcccggggcgggagccggcgggggcccagaaaaaaagggggacagggccgggggggggcccctggaattagggcacgggcggngcctgcgcgcttcgggggtcagaacttaaactctatctctcccccagaaagggaaccccaaggggtggggcaggggaaggggcccccagcccngggggggggggggggtggggttcgccaaattaaaaagccaaactgcggggggggtggtggggggggcccaacccgccgggggggcgcgctggggg

SEQ ID NO: 172839 - DNA, 449 bp, Arabidopsis thaliana
  unsure (1)..(449): unsure at all n locations
cactatagnagtgctatgacgtcgcatgcacgcgtaccgtagcttggatcctctagagcggccgccctttttttttttttttttttttttttttttttttttttattttttttttttttttttttttgtgtgctaacatagatttcttttctctttttttaaaagggcgccgggcgggaaaacacataaaaagagtgcccccgtcccgaacgccaaagcggggaaaatccgaaaggcacaaaaaggggcccaccaacaaaaccctgcggagaaggcgcccacacacaacaaaccaggggggttaaaaggggggcggcccaggcggcacaaaaaacccgcccccggggactcccacccccccccaaagccccgcgaaacccgccgggggggattaaaagacctccaaaagggggggaccccccgaatggggtacccccacaaaaaccccc

SEQ ID NO: 172840 - DNA, 537 bp, Arabidopsis thaliana
  unsure (1)..(537): unsure at all n locations
gcactatangatagctatgacgtcgcatgcacgcgtacgtaagcttggatcctctagagcggccgccctttttttttttttttttttttttttttttttttttttttttttttttttttttttttttttttttttttttgggacaaaaaagtaaagcaaatcacttgtcaacgcccaaagctttggaaccaaaaacagtttgggtggttgtcaacccgacacataatccccaaccttttactggccggaaagaaaaaaaactccctgatcccccgacatttttaactccgggcaacattcaagcaggggacggggcggtcacgtatttgagcccgccagcttcagtaaaagcggggatgaacggtttaaaattcacgaaatccacctttgggcccacacggaaacaggttttttgtaatccaagggttcggcgccgaaaatgccccaccattttttcactaacatttttatttttcccctctccatgtgcgcttttttccctgggttttcccccggtttcaaacccgttggaaagaa

SEQ ID NO: 172841 - DNA, 793 bp, Arabidopsis thaliana
  unsure (1)..(793): unsure at all n locations
actantagatagctgatgacgtcgcatgcacgcgtacgtaagcttggatcctctagagcggccgcgccttttttttttttttttttttttttttttttttttttttttttttttttttttttttttttttttttttttttttttttttttttttttttttttttttttttttttagaaaaaaaaaaaaaaattggggaaagggggttgtaaaaaaaaggggggaaaaaccccaatttttggggggaaaattgggaaaaaaaaaaaaaaaaaagggggaaaaaaaataagaaaaccccgggggggggaaaccaggcgcaaaaaaattaaaagccccccaaaaaaggctgaaaccccgggttttgaaaaaaatgggacaaaaacgcccgggggggaaaaaaatttttttttcttcaaaaaaaaaaggggttttcttttttaaaaacgggggtaaatttttgaggggggagagggggaggggaaaactttgagaaaaacattctttcccgccataaaaaaaaaaaaaccccccggcgcctcaaaatagaaaaacacccgctataaacctcccgcccttctccacgggggggaggaaatataatatttatatctaacggggggggtctttttctccctccccctttgaaaaaaacggcccggagaagaaaaagagaggttgtggggccacaaaagacttttggggaaaaaggcccccgcgggataaaaaccccgtgttaaagaggagggcgcgcacatctattgttccgccccccttgggcaaaaaagaaagggccc

SEQ ID NO: 172842 - DNA, 675 bp, Arabidopsis thaliana
taggcgcactatagatgagcttgacgtcgcatgcacgcgtacgtaagcttggatcctctagagcggccggcctttttttttttttttttttttttttttttttttactaagaagcaacatatcgaattttaggggaaacatagtactactacaagcatagctagaataacatttttccgaaatacagaagaaccattatcggattttcttctaatttattcgtattggattgacctcgttacatcatagggggaatgctctgctcgtgtctaaagaagttctctggatcaacctttgctttaatcatcatcaatctgttgaaaattgttttgaagtagttagctccccagacttgagcttggttgatgcatggttttacgtctttcgggtccttcccaggtctaaataacggtagttcacgtaagcttctcgggggttacttgaaacataagcgggcatgtaactaaagagatctctgatccagttgatgggtctggctcggctcttgccactggctagccaacttggttccgtcctgaaccttgaagaggactctttttcgatgcggaaaagggatttgggattcggggattttcgccatcattccctccgaggggttccttgtcatcaatggaatatcctttttaaggagcttcttagaagacccttgaggcc

SEQ ID NO: 172843 - DNA, 893 bp, Arabidopsis thaliana
atgcacgcgtacgtaagcttggatcctcttgagcggccgggcttaatctttttttttttttttttgaggaatgccatgaagattttaactagataaacaacaagatacatgactaaatattaagtggataacaataacatgtgcattttacatatcaatgtattgtcaatacattttctttttgattatcagactcagaggcgggaaaaaggagccaagaaaggataacccgtgtagccaacaactggatcttggagtgaaaacgtcctccgattatatgtatccaacgtctccatcaatctggaacgcggaaaccaaattcggggtggggataaacaggcggccatatgaaaccaagaggagctcaacctgggggaacagcgtgcatacctagggcctaatggaacccccactagacataaagggtgcattaaaaaccaagccaaagcgttgattaaggtgaggtgtgtcccaaaactcctgggctacaaacgttgttggcccgaaggcggggggcgaaggttggaacgtaaaggtaacgagctggggcctaaaccctgggagtaatgagacggcaaccagggtagccaagggagggggggcaaaacgtgggggcggggaggaataggggaaaccgtcagaaactgtaggtgaggggtgaacacgctgggctattggttaagaagcaaacggtgagagggaccgcggtgggaagggcggagtgcgcccctctaaataggagttgggcggctgcccggggagcaactctgagccgaggatgtgggggaaggaaggaagagtcgcgccgaggttggagggttgaacagggtgaggtttcgggaccgggagaagggcagaggtggaagggtcggagatagggatccatagcgaca

SEQ ID NO: 172844 - DNA, 519 bp, Arabidopsis thaliana
ccggcactatacgactcatttagggaaagccggtacgcctgcaggtaccggtccggaattcccgggtcgacccacgcgtccgcccgagcagaaggagaaactgaagggttcttatgattttgtcggtatcaattacttcacttctacatttgttgctcatacggacaatgttaatccagagaaaccgagttgggaagctgattctcgcttgcagttacattcgaataacgttgatgggttcaagattggttctcagcctgctactgcgaagtatcctgtttgcgctgacgggttaagaaaagttttgaaatacatcaaagagaactacaatgacccagaaatcatagtcactggaaacgggtacaaggagacacttgaagagaaagatgtacttccagatgccctcagcgatagtaacaggaagtattatcatatgagacatctcatggcattacatggagcagtctgcgaggacaaggttaatgttaaaggttactttgtgtcgtcgcttatggatgg

SEQ ID NO: 172845 - DNA, 679 bp, Arabidopsis thaliana
cactatagactagctatgacgacacatgcacgcgtacgtaagcttggatcctcctgagcggccggcctttttccttttttttttcgaccaaaaaaacgcatttcggatttcaaaaggaatgctacaaatgtaacatcatcgctgatctatttacaacacaaagggtgactttaaaatcggtcatggcatgatggatgttggagatatattttgacctatgagagagggaatggagcgaaagagccacacggactcgacatatcatcccaggggagtgatgcctcgtttctttttgattacaagggcccgaacgcgggtgcctctactaattggctttaatcgcgggtgaggggccggctcagcacgtttgaaggaagacacattccgtatgagcgcgcttggggttagaagatcactatgccataatccgcatttattgggccaaggaagacggaaatgggcgctctaagaaaaagaagggggcgttgcacgaacagtgaagggacctagagaccaaatcattacattgtgagagagatgtggtgggagtacgtgcctgggggcccgtcgcgagcgccctggagtatacttgagagttgggttcgacacgcagcgagggggggccccggttcgagatgtcgagaggagaaacacgggcgttgggtgtggagattttgag

SEQ ID NO: 172846 - DNA, 643 bp, Arabidopsis thaliana
tgatttaggcagcactatagcatgactatgacgtcgcatgcacgcgtacgtaagcttggatcctctagagcggccgcccttttttttttttttttttttttttttttttttttttttttttttttttttttttttttttttttttttttttttgaaaggaaaaaaggggcaaaaaagggaaaaccccaagggggaacccccccgggagggggggaaacctccaccggggggggcccaagcccaaaaaaaaaaaagggggccaggttttaaaccttttttggccaagtaaaaaaaagcggggagaaaaaaacgggaaaagaaaaccgggggaaccaccatttaaaggctggcccaaaaaaaaacctgggggcttagcccccggaaaaaaaaaggggggggaaaaaattccggagcccaaaaacaacctcccgtggacaaaaaaccccttgggaaatcgaaaaaaggcccaattttctcggggagggggcccaaaccacccaaggcgggggagagcccggcaaacttcggtccccggttttagggcacccccacttgggggactctgggctcaaaagggggggacccccccccgagagggctggacaaaagaaaaaaaaaaaaacgtctcccccgggaccaaggg

SEQ ID NO: 172847 - DNA, 529 bp, Arabidopsis thaliana
gggggactcctctaggagttctatgacgtcgcatgcacgcgtacgtaagcttggatcctctagagcggccgcccttgtgtttttttttttttttccaaaacgacgaaaaggctttaacaactgtataacccttctgtcttccacaagtgtctgacactccgccggaatctaaaagactccgggccaaataaaataacaggcacctcttatgcttgagctccaccttatttatgaaaagcgaaatatgttgccaaaagtacatgggaaatctataggccccaaagcaatattgcagctggacaagaccctaggagaggtggcattaccagcatctctcatgagttattgcacgcaaggctgatagtggaaggagacaataatgatttagtcttctgtctcccttgagtagaaccaggaattggttcatgatattctgacgtgactttatcggagataacactgtgggcgggaatgaacacaagtcggttcaaaaatgggagcgaacgtacactcgctccctatccaccac

SEQ ID NO: 172848 - DNA, 482 bp, Arabidopsis thaliana
gacgtcacatgcacgcgtacgtaagcttggatcctctagagcggccgccctttgtttttttttttagaaaaacattgagaactaaagttacatataaacaaaacaaaattataactaagggatattctttaacacttttttttttatattaccctaaaacgaaattacttttggatataagtagcattaacaaaacttactatagcagacccaaaaaaactcaaaattgttagggaaaaacaaaagcacaaagctaattagttggttttcttgccatcttcttggacagagatcttctttgtatccacagactgatcctgacctgcaaaaccaaactggttgacacgtgttttgtccaaaggataaacccatctctgggacaagtatattaagaatttgacatcatctcggaagacagaaaggcgatgcaacattgggattttgatgacaaaagcaaagagaatcgtcaggatggggtgggg

SEQ ID NO: 172849 - DNA, 492 bp, Arabidopsis thaliana
  unsure (1)..(492): unsure at all n locations
tgacgtcacatgcacgcgtacgtaagcttggatcctctagagcggncgcccttttgttttttttttataataacacagaactagtatatataaacttttatatatccacaatggtttccaaatcaattaccaaaataaatgaagtctattaaaagaaacaaacaaaaaagaataggaagaaggctttgtggtctcagcaatcatttttggcattatagtagccattgttgttattaagacaaggatttagagtagctttctttcaccattgtcttaacaaaaagctctcctgctctatatgaagatcttaccagtggaccacttgcaacataacgaaatcctattgattctccgtatgttttccagaaatcaaacttctcaggtgtgacatactctttcacagtcagatgcaatggagttggctgtagatactggccaagtgttagaatatcaacatctatagctcttagatcagccattgcttccttcaac

SEQ ID NO: 172850 - DNA, 553 bp, Arabidopsis thaliana
cacgagcggcgcgcgggccgacgccgcggcgggggcggggaatatttgggacgcctatacaagtctatgacgtagcatgcacgcgtacgtaggcttggatcctctagagcggccgcccttgggtgttgtggtttttataaacaaaacatctctcataaaaggaaacagtaacaaatgagcacaaattcatgtgagtttatttttcactgtggggttaagctctaaattttaaagcttcatttggaggagacaatgaatagactcacctgatatgtcttttggggggggggacctttattatgggctaagacaaaatagcttgattaccacatagcaggcttcgcacgtaattctagatcttctgtttttgtgttaggccctttgctccacagaaggatccgatagtccttggtgttcaagaacatatacctttcccgttcagagccaagcccgttggatctatcttcaagtggatcatgtaaacggacgcgtgggtgcccccggaattcccgaccgggggctggggggggaccaggtttgcgtatatgcgggg

SEQ ID NO: 172851 - DNA, 535 bp, Arabidopsis thaliana
cgcgcccccccccctagtatcgccggctactatacgactcatatagggaaagctggtacgcctgcaggtaccggtccggaattcccgggtcgacccacgcgtccgctaagatgatccacttgaagatgagatgcagcgggcttggttctgaatggggaaaggttactgttcttggaacctcaggactctcgggatcttacgtggagcaaagggcctaaaacaaaaagagaagatctagaattacgtgctaagcttggtatgttgctattgcgttattctgtcttagcacataataaaggccaatctgaccaaaggacatatcaggtgagtcttgtcattgtttccttccaatgaagctttaaaatttacaagctcaacacccattgggaactaaactcacatgcattgggcgttcctttgctactggttccttttctggagagatctttagtttataaactcaaaaaaaatgggccgcccgctttaaaggatccaagctttactacgcgcgcctgcgacgtgctagcctctttct

SEQ ID NO: 172852 - DNA, 488 bp, Arabidopsis thaliana
ttgacgtcacatgcacgcgtacgtaagcttggatcctctagagcggccgccctttttttttttttttgccttccaaaatgtttgtttctactatggatcaatctctcattttcactcctagaaaatgtactagtgttacaagttacaaatgcaagaaagcagcaagctttacgggatatggactgaacacaaacggttaagcttaaccagttctacaactacaacaagcactcgatgtcccgatgttgtttcgttcgtcctcttccatttccttaaagccctctacatcttgatcacattggtgctcatggccatcgttaatggggtttactggctgagactccggttgactcgagactcctctggggtttaatacttggctgagattctggttgactcgagactccactgcggtttactggctcagattctggttgagtccacactactttgtggtttactggctcagattctgggtgactccaccc

SEQ ID NO: 172853 - DNA, 501 bp, Arabidopsis thaliana
  unsure (1)..(501): unsure at all n locations
tatacgactcttatagggaaagctggtacgcctgcaggtaccggtccggaattcccgggtcgacccacgcgtccgcccacgcgtncgcccacgcgtncgcccacgcgtncggaaaagaaaaaaaaaacagagtatcaaacatgtcaatcttgctctgtttcctctgtcttttacctgttttcttagtttctttatcaatcttgtcaaaaaggctaaaaccctcaaaatggaagcttcctccgggaccaaagacgctcccgatcatcggaaacttacacaacctcacaggtttgcctcacacatgttttcgaaatctctcacaaaagttcggaccagtgatgcttctccacttcggattcgtccccgtagtcgtgatctcatcgaaagaaggagcagaagaagctctcaagacccaagatcttgaatgttgcagccgaccagagactgtagcgacaagaatgatctcttacaacttcaaagacattggattcgctccttacg

SEQ ID NO: 172854 - DNA, 429 bp, Arabidopsis thaliana columbia
ccactccgtccggacgtatcgatcttgctgacccatcaattaaattttgacccaaaaggtcaaattcactataagaaaaacagaattcatttcatcaaaattccatttcacactttttctgtctgttacgattcttgcttgatttctttctaaacaaagcaaaagttgtctttttggagttgtgagcaactaattctctgaaattgaggaagagaaagcgagaaggtttttttggagtcagagacagaagaagaatttaacagattcttgtcggaaacatggatacgagtgaagcaaggaaccgtaaagttgttgcagttgaacaattcgatctcgaagtccctgagactgctcatcagattagcagcgattcatggtttcaggtagcttttgttctaacgaccggtataaacagtgcctatgtgttgg

SEQ ID NO: 172855 - DNA, 493 bp, Arabidopsis thaliana
  unsure (1)..(493): unsure at all n locations
cctatagaagtattcttgacgtcgcatgcacgcgtacgtaagcttggatcctctagagcggncgccctttgttttttctttttttttttttgatagaaaccatttgatgtttttatggaaagaaacccaatgatgtttttatttattttgccaaaacaataagccggttgaatattttcagctctattccaagttggggaaatctctcttttgttcaaatttgggaaagccaaccttttttgaaattccggaatgactacagaacttgttagagcggtttgttcaatggtctgagaagggacaaaaaaggcttttggggggaagagaaatatagcccctatgatgtttttattttttttgccacaacaaaaacccggttgaatatttcccgctcaattccaaggtggggaaatctctctttttttcaaaaaaagaaaagcgaacctttcttagaattccggaatgactacagaacttgctaaaccggtttgtt

SEQ ID NO: 172856 - DNA, 518 bp, Arabidopsis thaliana
ggacaactatagaagagtcttgacgtcgcctgcacgcgtacgtaagcttggatcctctagagcggccgccctttttttttttttttttttttgattacaataaatatattataaacaatctcaataatattcatcaactagtggcaacttttacaaactcaagaatcgatcaatcaataacttacaagacaagaaagagaacattctttgttcttccgtaagaaggaagtcacactccacatcgatggttcaagagacaaatagctaattaattaatgtttggttcgtacaaatccaagttcacgtgtcctcctcctgcttcaccatgtcggtatggcttcgaatcgatatctgtcgcagtcttgagcaccacatgcttaatttgtgtcctgttatatgtataggtgacgtggacattgccgtctccggcttgtataacagccgggtacgaatactccattcccggagattcctccaacgttaaaatatcggtccatgaatcaccgtcgtctaaagaa

SEQ ID NO: 172857 - DNA, 496 bp, Arabidopsis thaliana
atacgactcacttagggaaagccggtacgcctgcaggtaccggtccggaattcccgggtcgacccacgcgtgcggctcatggaaactgacaaactattgtttattgcacctctcaagaaggactttttatatacagacatgaaaactgagaacatgacagtagatgagactgatgatactcggaagcaagtgtatgaggaaaaaaaatcacggctagaaaagattataacgcgtcctagtaagtccttatcaaagggatcagattctttcaaaggacccaaagaatctatacttttgcttggttggcgtggagatgttgtgaatatgatcaaggagtttgatagttatcttggtccaggcagttcattggaaatattatcagatgtaccgttagaggacagaagaggagtggaccagagtatagctacaggaaaaatcaggaacatccaagtttcacatagggttggaatcatatgggatatgatacattaaggga

SEQ ID NO: 172858 - DNA, 512 bp, Arabidopsis thaliana
  unsure (1)..(512): unsure at all n locations
actatagaagagttatgacgtcgcctgcacgcgtacgtaagcttggatcctctagagcggccgcccttttttttttttttttttttttattactcgattcaatccaattttcataccatatatcaagaaagatgaacaacaagagtcattgtcatgaaacccaaacatttatttagcaaaagagtttcagaaaaactgactcagaagattcccacaagagtttttgtgaaatttataggcttgaaacaaaagaaattacttcaaactgtcaggttcttgtagaaaaggagtgacttcatgcttcagaatctgtgctcaagcttctcctgttccttgaaatactgagcataccagtaggttccaacgacaggggtaacgagaagagtggcgctgatccaattctcagagaccttgtggtggatcttctncggcagatccttccagagaccggtcatgatcttctgctgaaccggagaaagtgcgtaaaccaccgccttcaatttcaccggctg

SEQ ID NO: 172859 - DNA, 498 bp, Arabidopsis thaliana
gagggagcgagaggcccccacgggggattaaggggacgcctatagaagactatgacgtcgcatgcacgcgtacgtaagcttggatcctctagagcggacgccctttggttttttttatttatttataagatcatgataatcggataattacttagtctttttattaggaggaggcaaccgcacagataattttgccgtgtgggaggacaaaggaagcaaaaacaaagaagtgtgagccccgaagagaggagaagaaataaagaaaaatcccgacgtcgccccatttgggagacaaacggtgggagtacttttggtctgccggaaagtgaacgcaaacgaaggagaacgagcccacgaaagaacgagcatcccaacataaacacaaacagacacgtcaaagcaagcaaaaagaacgcatatagtcgacgaagccgagaaccggaaacaggcgactacaaaaaacagcacagtacaataaatccacgccggggagggggt

SEQ ID NO: 172860 - DNA, 543 bp, Arabidopsis thaliana
ggggaggggggaagggggtcaggccgggcgaggaaataatggggacacctatagaagattttgacgtcgcatgcacgcgtacgtaagcttggatcctctagagcggccgccctttggttttttttttttttttttccatcaatcaaaacatcatatagtaatccattggtttatacaaacatcaaaatacatttacctctgaaatgaggaaaaaaatgcaaagagatttttgaaaatttccaacaaatggagagaaaaaaaaaaccaaagaattaaatcaatcagtacatttataaaggttatgagacctatatgacacttattggtcaagtggcagccattccatttctagctctaattctccagactctacattctgaagcttgatctgaacctcctgtttcactttcccatcaacaatgttaatgatactgtcatctattaatgggttatcatgcgattttagcccatttcccaatctgcatatccccaaacattttttggatccccaaaagccattgcagatgttatcaaaggttggat

SEQ ID NO: 172861 - DNA, 503 bp, Arabidopsis thaliana
atcgactcattatgggaaagccggtacgcctgcaggtaccggtccggaattcccgggtcgacccacgcgtccgggagatattgaaattgacgagagacagagccaaagctccgaaccacgccatgtctctagtccccggcggaatcgctgttccccttttttgttaagactaggaaagctcagagtcagaggcatgtccagagtttgatcgtcgtatccttgggcttatcaatatcagctgactctcagagtttgctctcatgctttgcccaccacaagggcttagtggcggatgccttgatcgtcctctcggagttgtccctgaacagaatccaaaggctagaagctcttttcagaagatttgaaacctgcttcttgctcataccaacatcatttgaggagcatgacaatcttctttccttggcatatgacaactgctcatctgatcctgccccaccctcatcctcgctacacgaagcccattcacttcctgattccgatgg

SEQ ID NO: 172862 - DNA, 496 bp, Arabidopsis thaliana
atgacgtaccatgcacgcgtacgtaagcttggatcctctagagcggccgcccttgtttttttttttttaattaaatacaacaattggaactaatagtacacttatacacatagaatgtttttgaagcaaattaagcacattaatgacatgtctttaagatattaatttcacatcaacataagcataaaattcactgatacaacattcatgggataaatatatatataacatgcattagctttatattgcttgctcaacccaattctggtttttattcactcccggccatttccttcagcctatattacactaactggagagcggtttggtcttggcgacccgcggatgagtaatggtgattgttaggttgcaatgccgcgacttggaaataattcccggaatcaaacggttgagattgcgtttgaggggggggcataagctgctcgtagttaaatcctcctggcattagacttatactcggattgttcctctcatt

SEQ ID NO: 172863 - DNA, 507 bp, Arabidopsis thaliana
cactatagaagattcttgacgtcacctgcacgcgtacgtaagcttggatcctctagagcggccgcccttttttttttttttttttacttaagtaacatagcattcaaggaattaaacatctagtcaacaacatttcagaaactgaaaattaaaaaagatctacatcaacaattcaacaaatgaaacagtataaacaagtcattacacaccaatggcatcaccagtagatgaaccacgatcatcttctacagggaccaccacgttatcatacactaaagcagctgtggctcctccaagcagaggcccaacccaatacacagcttggttcttaaagcttccgtaaaccatcgccgacccaaaggcacacgcaggattcattgaacctccagagaatggaccagcggctagaacattggctcccgcaacaaaccctataaatataggtcccactgctaaaggtagcccacgtctgggatcgctagccgtgaacacagtataaaccaagac

SEQ ID NO: 172864 - DNA, 498 bp, Arabidopsis thaliana
actatagaagatcttgacgtcgcctgcacgcgtacgtaagcttggatcctctagagcggccgccctttttttttttttttatatggtaagataactgtttctcatatgaagaaataaacaaactgaaaatggctaaaaagcctggacaaatcaaaagaatagttgttccctaggttcagctacattatagcttctattcaagtttggcaacaaccacgttagtagaggattctactccagaagtttccctgaaaccactgttgggacctttgttgacaaccctttgtacattcctaaagcttgagcgatcatgctagcaggattgtcgacattactcggaagcagcattgttgtaccctccttagcaattttgccaaaagcttgaatgtattgctccgcaactctcaaactcgcagcctcctctccaccagcttccttgagggattgagataccatggccagtccctgggctgttgcttgtgctctagctataattgc

SEQ ID NO: 172865 - DNA, 491 bp, Arabidopsis thaliana
acactatagaagactatgacgtcgcctgcacgcgtacgtaagcttggatcctctagagcggccgccctttgtttttttttttttttagacgctctttctttcttttcttcttttcttttgtttctttttttttttttcaccaacaaaaaaaaaaaacgggggggtcaattgcttaagacctttctttctgactcctttaacggaccttccccaaattttaattttttcaccatttttttttttcattattagggaaaggagctgagcgttttttttgggctgtgtcaccaacctttttggagtttttttggtgtgttacccgaatcacttttttcctttttgcccacccgtcatttgtggtgggcttaccctaccaacaaaatccaccccctgacccacccggaagaccggggggggttcggccccacccttaacggggggcccccccggcggtgtggtgtttaaatcccggccccccataggattggggt

SEQ ID NO: 172866 - DNA, 521 bp, Arabidopsis thaliana
atacgactcacttagggaaagctcgtacgcctgcaggtaccggtccggaattcccgggtcgacccacgcgtccgcccacgcgtccgcggacgcgtgggttacatttccgatcatggtacatccgcttaacgagatcatagagcagaaactgaagaggatagactggcttcaaaagcatcataatgggtacagcaacgaaacaggttcagtctcaaaatttgcaatctttacaacgaggacacttttggtggtaggacttgcagcaatcgcgagtttagtcccagggtttggtacatttgcatctcttgttggaagtactatgtgcgcactcatctcctttgtgtcgccggcttcttatcacctcacgctgctcgggccatcactaaatgtattggaccaaatccatcgacgtattcattgtgatttgcgggttgatctttgctgtttatgggacgtacaacacaatcgtcggagtgtgaaaagggatagcatgtgatctgggtaaagcaccgatataactc

SEQ ID NO: 172867 - DNA, 509 bp, Arabidopsis thaliana
actatagaagagttatgacgtcgcacgcacgcgtacgtaagcttggatcctctagagcggccgcccttttttttttttttttcggaataataaatgatataattttgtgttctgtacaattaattaatttacattttattttgaagtttatattactgacaaaatttaagattaacatgactattacaagacaaaacacctcttctcaaccagaccaaacccaaaggccaaaacctctcagttcactggccacgaccgtaatttgcgcctcatagtatgactttacaaagagaatgccactttggcttttctaaaattaaataattaattaacaaaaaataaataaatgccaaatgctttgaaaattaaacacgttcgtgcaactaataacgcaattacttaaataaataaagaatacagaataattaaactatttttccactatttctccaaaactgttttacaagctcctgacaaaactaaataaattattaaaaaagaaaaaaagg

SEQ ID NO: 172868 - DNA, 480 bp, Arabidopsis thaliana
tatgacgtcgcatgcacgcgtacgtaagcttggatcctctagagcggccgccctttggggttttttttttttttatagaaaatataaatgttcatatcataagagtaaaattcagagttttcatttcacaagcattttccatcgaagacaaacagtaacaaaaagtaaaaaaagggtaaaccacaatcaccctaaaaaaagcaattattggccaggggggtcgacggcagtgaccatctgagctggctgaaccaccgtccattcttccaatgtaccggcgtaaggagttgggacatcctgagaagacaaacacatgaccggagcctttaaggaatcttgaacggtctcgtgtattgcagccggccaacgggccccgatacctcccgttgttatactttcctgcacaatcagaagccggtgcggcctcctcaccgggttccccatggggggcgagacgaacggggtgcacccaccttatgg

SEQ ID NO: 172869 - DNA, 493 bp, Arabidopsis thaliana
atgacgtcgcatgcacgcgtacgtaagcttgggatcctctagagcggccgcccttggttttttttttttttttttttttttaaaacaaatcttattacctttttaaacgcatcactattggctatggtaatgttacatcaattaacacctttttattgtctatgcatcttaactgcttaagatgagatatattgcacatttacattgtagtgaaaagtgtaagtctcctttgcaaaacacaaaagattagccacaagtcgcgaacaccattgctaaaccaatggattaaccggacacaaatatccctacagaagatatttaatcaggattttatgctccagattgggctcggtttccgatgttgaggattctcgatcgaataaacaagaagggctccatcttttgtccctgctaaaaaacacttttcctgagttactggcagagaggtgatttttttccctgcgccgttataccggtttactacttcaagggg

SEQ ID NO: 172870 - DNA, 514 bp, Arabidopsis thaliana
actatagaagagtcttgacgtcgcacgcacgcgtacgtaagcttggatcctctagagcggccgccctttttttttttttttttggattaaacactttagattctctgtaaataaaattgaggaaaaatcaagattggagagcaaagtagtgtcaaagatataactctactaaaagcagcaacacctacaaagtttagttcttcaagtgatgatcaaaagtattttcttttacgagtctataagtgaaagcgaaggactgttgataagacttctacttcctgacgatattgagatcgatgtgtacatacgcaagcgaagccacaaatactaagaagaaagccgatacaagcatgaatggttccgctagcatgtatattggtttgaatgtatagtacacctggaagggtacgttgtgagtgggaactacgttatctttttgcacacaaccacggttcttcccacaatgtcaaggtatgagtatttgacctgcaactcttgattgactgtaaagggc

SEQ ID NO: 172871 - DNA, 570 bp, Arabidopsis thaliana columbia
ccacccacccccccggggcggacgggcgacgaccccgcgcgcggaaatataggggaacgacctatagagatctatgacgtcgcatgcacgcgtacgtaagcttggatcctctagagcggccgcccttggggtttttttttttttttttttttttatttttgtttttgtttttttcttctttcctttacactacggtgggcccgcagtcccaagggaaaaacgcaataaaaaccttcccaatgaaaagcaggtgcccccgggaggtcgacctaaagggggctaaactcttcaccgacggagttccaggtctcgcccaacccttctttgctcgggaacccgtgtgtgcgggagaaaccccgcctgtcgggggaagaaagcgcccaccccccacagggcacccccagcaaaacggggagaggggacacgggcgtgcaaccgagcccccaccccccccaccagcaaaccgccgtgatcctcaccacaacgacaacaaaagggggacagccccggaaagccaagacacaccctggccggcgctacaagaaactcgcgccccggagaggtacacgt

SEQ ID NO: 172872 - DNA, 541 bp, Arabidopsis thaliana
cagaaagcgcggccccggccccgggagggggaagtatcgcgggactaaacgactcatatagggaaagctggtacgcctgcaggtaccggtccggaattcccgggtcgacccaggcgtgcgctcctctgctgccccagccgtgaaagaagctccagttggattcactcccccgcagctagacccaaacacaccatcaccaatcttcgccggaagcacaggaggtctcctccgtaaagcacaagtagaggaattttacgtgatcacatggaactcaccgaacgaacaaatgtttggaatgccaacaggaggagctgcgatcatgagagaaggaccgactctattgaaacgtggcgaggaaagaacagtgttcggctataggtacgaggtcgctgtcaaaggacaagagtgcttaccggctttgccgaggggcccctacccgacaggcgcaatatcttcacccaacgaaggagcacatccacacgaagtcgaggaccgacgaggcggggtgggacttccacgtgagattcatcggaacactggt

SEQ ID NO: 172873 - DNA, 499 bp, Arabidopsis thaliana
ccttagaagttcttgacgtcacttgcacgcgtacgtaagcttggatcctttagagcgggccgcccttggtttttttttttttttttttttttttttttttttcccacaaaaaatttgtttcgagtttttaaggtatttacctaagggaaaaatactttttacctattttcaaaattttttagccctttggaagacctcctccaatgaaaaaaaacctttttttttttccaaacccggaaatattttacgccggataacttaaaaatcgcgaaattccgtcaggcctttgaagccagaggatgaaaaagaagagaaggagtttctcttattaggcccaaaaaaaagcggatcttcaaatttcgcaaacggttgtttaccgcataagaaattttcacttggttttcccggcgggaaaatcggaaatgtcggtaaataacccccgatgtttttcccccgacggtcatacatacccggtggccccggaggtgaggaggttaaa

SEQ ID NO: 172874 - DNA, 539 bp, Arabidopsis thaliana
cggctcgctcgcggccgccggggggggagtatcgcgggcactatacgactcatatagggaaagccggtacgcctgcaggtaccggtccggaattcccgggtcgacccacgcgtccgaccaaaggtcgtggaaacctatgaagccacgtctgcagaagtcaaggctttggtgagagaccctaaggtggctggtttgaagagaaactcagcggctgtgcagaagtacctcgaggagctagtcaaaattgaattccccggatcaaaagcggtgagtgaggcttcgtctagcttcggagctggctatgtcgcaggaccggtcacgttcatattccagaaggtatctgttttcctcccggaggaggtgaagactaaagaaatacctgttggaggaagtgaaagctgaagaacctgccaaaactgaagaaccagccaaaaccgaaggaacaagtggtgagaaagaggagattgttgaagagacaaaaaaaggcgaaacccctgaaccggggccgtggagcagaagaaccagaggtagaagacaag

SEQ ID NO: 172875 - DNA, 487 bp, Arabidopsis thaliana
gacgtaacctgcacgcgtccgtaagcttggatcctctagagcggccgccctttttttttttttttgcaaaaactaggatatatgataagagactatcatcaatgtttgaactccaattttggttccacataactcaaaaaccattaatacgaaagagtctcacattgagtttaagacataatcaaaagaaacaataaacaacctcacaagtctttcttgtccctaactgtgaaaaaagagagccaatcgtccatcttagtatcttctgggtgccctgccgccgccgaaagcagggattggtgccatagcttgttgtgggtcgactgcagagatgccgagagtgtcagacattcctagagaagcaagcatctcaagagtctttttggcgaccttgatctcatcagtcttgatagcagactcatcgggaacaaagtccatacggcgttcacgctcttcttcttgaagcttgagtgagattccacggact

SEQ ID NO: 172876 - DNA, 490 bp, Arabidopsis thaliana
ggaaagctggtacgcctgcaggtaccggtccggaattcccgggtcgacccacgcgtccgcccacgcgtccgctctctcgcatctccaaatcgaaatcgctctctgcctctcttcgtctccgtctccatctttgtctccggtaagtaactgaaagatggggcgtgttagaaccaagaccgtgaagaaatcttctcgtcaagttattgagaagtactactctcgcatgactcttgactttcacactaacaagaagatccttgaagagggggccatcatcccatcaaagagactccgcaacaagactgctgggattctccacccacttgatgaaacgtatcccaaagggaccactcccgggaatgtgactcaaggcttcaagaagaggagcgagacccccgcgtggactatgcgccccatgagcctagtttcaaagactggggagatcaggggcgccggaaggaccctggacaggctggctggcttgggatgg

SEQ ID NO: 172877 - DNA, 513 bp, Arabidopsis thaliana
actatagaagattcttgacgtcgcatgcacgcgtacgtaagcttggatcctctagagcggccgcccttggttttttttttttttttttttttttttcaaaccaattgattgattcattagataataatactgtttatcacaaagatccccaacatgtaaaaaagtagtcatagatcacaaaaggagacgattctcaggccctgatccattcaaatatgtatgtgcacaacagtgtacgtgtatatatagtctatagacatttaattcaatcttaaagaggaaccatcatcacacgcatagccacagaaatactcctcaaagatgctaatctcagactatataaaccagcattgtgtgacacagtatcccgcaaacaaaaacactgaatttcattcatgaatgtaacctacctgcgatggctgcaacctgaacctccatttgtgccgccctgactttagaacccgtggttcggtggaagaactgttctctagacaacaacctaacattcctaaa

SEQ ID NO: 172878 - DNA, 517 bp, Arabidopsis thaliana
acactatagaagatcttgacgtcgcatgcacgcgtacgtaagcttggatcctctagagcggccgccctttttttttttttttcatgaaaattcaaacatttcataattatatactatatttgtaggaaaaagacatgcacctttaatatactctcacaaaattaaaataaacagagtattaattacgaaccaagaaaaggaaaaagataagaggagttaaccggcgattttgtaactcgggttagcgaggttctctaaaccggagacaacttgaatggattcgataacatcaccaactttaagatcagctagaaaatcttcgttatcagtaacgtaaccaaagacagcgtaacgaccatccaagatgttggaattgcttggtgtcagctcactctcttttagcagccaaaacacttggcttgatcctgagtcattctcaaactcttctcttgccattgccattgtcccaaaagcgttgaaaggaatcacaacctgagccttgtaaagaccaagtttt

SEQ ID NO: 172879 - DNA, 514 bp, Arabidopsis thaliana
atacgactcacttagggaaagccggtacgcctgcaggtaccggtccggaattcccgggtcgacccacgcgtccgtgttcttttcggacagaacaaaactccctaatccaaatgtcaattcctttggtctctctctgaataatcatctctcttcaaaccctattcaattttaactatcgatcttcggctaagtctccaatggcggcggcgtttgcctctcttcccacatttagtgtcgtcaattcctccagatttcccagaagaagaatcggtttttcttgctccaaaaagcccctcgaagttcgttgttcttccggcaatactcgttacactaagcagagaggggcatttacatcactgaaagaatgtgcgatttcattagctttatcgggttggtttaatggtttcaggaccttcgattgctttgcctcccatgctcacgcagtggcgaatccagtgattccagatgttccagtgttgatctcccggcctccgattaaagacccggaagcttt

SEQ ID NO: 172880 - DNA, 508 bp, Arabidopsis thaliana
actatcagaagattcttgacgtcgcctgcacgcgtacgtaagcttggatcctctagagcggccgccctttttttttttttttatcaagtgaattcggggtagtagttggttcttccttctgtttatcaccggttacagtggaagcctcttcagggtttctgttaccatgttgcttaagtttctgagttaagactagggacttcaaacgcagaccaagctcgaccattgatatgtgcacatcaggctcccatctgacggcaatattagaggcactgaagagcgaacagattgaaacttccttaccaccgcctattcgacgtacaaacttagcgttttggatgtcacaaagtgtcactctggaaacttggtgaggttcctccaaaaattcctggtagatcgcctttgctgtttcaagttctacctgtgtagactgaatctccttgtttagagtaaatccgaatttgagtatttcaaacgaaattatgtacttcaacttctcatgttcttc

SEQ ID NO: 172881 - DNA, 575 bp, Arabidopsis thaliana
atgattccgccggacggcgagggttattatttgagtcgacctatagcagatctatgacgtcgcatgcacgcgtacgtaagcttggatcctctagagcggccgcccttggtttttttttttcgtttaaaataccactatagtatttggatactggtgatttggtgttacaacataaatgataaaagccaatgaatcaagaacgtatagtttcaactctttaaaccttttgtggagagtcttgtggagtcaaagtatttattttattgttgcttgaaaggtggaactttttcctacaagcgtctgttagggtgaggcaacagttccttattagaaactaaaacggtcaaatatgttgttgagccatacagcagcttcttataactttgagggattgaaatttctaaaccatttctgccgaacaatgttataaacgggggagatcagagttagtcctccatgggaacctggagtgctttctcacaccggctctaaagtacctaaacaagctagaacgtcccctggtgttaacacttgcatgggagagaatcgcttgttattgcgatattctttaggcc

SEQ ID NO: 172882 - DNA, 509 bp, Arabidopsis thaliana
cactatagcagatctatgacgtcacatgcacgcgtacgtaagcttggatcctctagagcggccgcccttggggtgtttcttttttttttttttttttttgttttttttttttttttttttttttgttcattttttattgtttttttttttcctttttactgtgtatactttttcatttttccgtttgtcgggggccaagaaaagaacagagaacaacttttttttcccggggggggaacttttttttttcttttctgcgcgggagggaaaccccaagggtttattccccaccgcccctgggggaaacgtggggacaacaaaacaaacacccgagggaaaccgggggtgggattccttgtaaccacaacaaaaaaaagggggaaacggcgaaagagagaaagacaacacctgggtaagaaaattgcaccatggtaagaaaagaaaagagttggtcctcgagaaaacaaaactatactccgcagcgctggcggggggggaggaaaaatccg

SEQ ID NO: 172883 - DNA, 493 bp, Arabidopsis thaliana
  unsure (1)..(493): unsure at all n locations
atgacgtcgcatgcacgcgtacgtaagcttggatcctctagagcggccgcccttgggttttttttttttttttttttttncaaaaaacagaattgatattgtggttcaaccattaaaaatgttttttcaaaagcagaggaggtgctcttagctttttacacacttttttctcatacctcacattaccatcgaaaccagcccaaactttttgtaataaataggggggagagttatgtgttggttaaaccttgaactggttttcaagcgggacaagtcttaaccgagtacactttgttaacgtttttctatgtttttggccaacagcttctaaaagggcttaattccgtggtggacactaggacctgcgcggaaaaaaataataggatctatattgggggcccttattgtgattttgacccataggtagaggccggggctctttgaaaaaatcttgacggggggtaaaatgcatgactttttcatattttctggc

SEQ ID NO: 172884 - DNA, 498 bp, Arabidopsis thaliana
attctatgacgtcacatgcacgcgtacgtaagcttggatcctctagagcggccgcccttgttttttttttttttttttttttttttttttttttttttgggcgacagaagaaatttaaacccaaagttttttaagcgcggagattttggcatcctttcatggctttttctttttttaaaccctggggaaaaccctcttttactttaaactttaagctttggggcacatatcagtttttttatatccttttgagaaaagaaaccccctaaactgaatttttaacatgggggatcataattcagggattccacgtgattttgaggagtattttggtaccaatttcaagaacatgggggatttggcttttaataaccgcgccggaggatcaaactttggttctctaccggcgggtgaaaaccaaaactagggcactgtctttaaacagtgtggttgccggtgaggcataggggggagacccggggcgacttcaaacttctg

SEQ ID NO: 172885 - DNA, 535 bp, Arabidopsis thaliana
cggcgcaccccgcgggggggagttttcggggaacctatccgactcttatagggaaagctggtacgcctgcaggtaccggtccggaattcccgggtcgacccaggcgtccgggagaggccccagcaattatagaagatttccgcccgccttcctcgtggcctgcaacgggaacaattgagctagttgatgttaaggttcgttatgctgagaatcttccaacagtactccatggggtgagctgtgtgtttccgggtggaaaaaagattgggattgttgggcgaacgggaagcggaaagtcgactttgattcaagctttgtttcgattgattgagccaactgctggaaaaattactattgacaacattgacatttctcacattggtcttcatgatcttcgtagtcgccttgggattatacctcaggatcctacattatttgaaggaacaatccgagcaaatcttgacccacttgaagaacattcaaatgataaaatctgggaggcgcttgataaatcccaacttggagacgttggtag

SEQ ID NO: 172886 - DNA, 529 bp, Arabidopsis thaliana
cggccacgcccccgggggcggccgagtatcgccggcactatacgactcatatagggaaagccggcacgcctgcaggtaccggtccggaattcccgggtcgacccaggcgtgcgcagaatcttaaaaactttctctcaattctctctaccgcgatcaagatgcagatctttgttaagactctcaccggaaagacaatcaccctcgaggtggaaagctccgacaccatcgacaacgctaaggccaagatccaggataaggagggcattcctccggatcaccagacgctcattttcgccggcaagcagctagaggatggcgcgtacgtaggatgattacaagatgccagaaggaatccaccctcaacttggtcctcaggctccgtagtggtatgcatattttccctaaaaccctagcggcagagaccatcactcttgaggtggatagttccgacaccatgggcaaccgaagggccaggatccgtgagaagagggcctcccgcgggaaagcacagggtggcaatcccagagag

SEQ ID NO: 172887 - DNA, 556 bp, Arabidopsis thaliana
agaagatctatgacgtcgcatgcacgcgtacgtaagcttggatcctctagagcggccgcccttggggttttttttttttttttttttttttttttttttttttttttttttttttggttttttttgggggaaaaaagtatacacatgttttttggacccagtttagccgcccaccaaataaccgtgattacattgaacattttgggcaattttttttttaggggggtcgaaaatgcaagatttttgccccacccgtccttttttttttttacgaggagttttttgagaattttttttgcgcaaattttgggaaaattttttttgtttttcccggaaaattctttttgtgggatttttctttttcagaagattttctctgttaagagtttcccaacacgggaaacgcttaaccgccgccaaatgttgattttccttagtttttctagaatgtgggtgcctcttggaaacactgtttttgcgtgacccttaggagaaagttaacatctcctggtcggatgcgaaacccttctttttcttgttttttccccccccgcct

SEQ ID NO: 172888 - DNA, 493 bp, Arabidopsis thaliana
atgacgtcacatgcacgcgtacgtaagcttggatcctctagagcggccgccctttgttttttttttttttttgtaaaaaagtgaaacttgttcataattcaacttgatatccagacacccaaagacaaaacagattaaaaaaaccaaaatcttttgactaaaatatggaaagtgttccaaagcagacgagattattactggctagcaccgagccatttggtgaagttatcaaactcggtgtaatcactgtcggagatcatagtcttgtaccacgacttgcctgctgctttgattgccaacgcctcctccttggtaacggttttcctcttcttggcgagcttctccttcttagccttaactctctgtgcttcagctaacagtgacatcctcttcgcggtcttagcataaggattcaacttcaacatcacattgagattcttcaatggattcttcttaagaacagccctcttcgcatccttcttgatcggattca

SEQ ID NO: 172889 - DNA, 505 bp, Arabidopsis thaliana
actatagaagattcttgacgtcacctgcacgcgtacgtaagcttggatcctctagagcggccgccctttgtttttttttttttttttttttttttttttttttttttggccatagactatatactatatttacatgtaacagctggttagattaaaaaaaaaaaaaattgaattaaaataccaaaaaattgttatcactttctaaatcgggattattatttatccccttaacccattccccactaggattatctttaattttcatattagcgtttttattgttatcaccactctgtttttaacgttcttgtcttgcagcaaaaatctcttggacgattttctccacatccattttcgtatttacatggggtcccttatcaccaccggcgtccggcgccgggatatacgggggtctaaaaaccaaaataaccttgttcccaatttattcctttgaaaaaatcatgacccttgatttcctaaaggtggatcctacgggtaggatctt

SEQ ID NO: 172890 - DNA, 523 bp, Arabidopsis thaliana
cctctcgccctagtcccctctcccccccaccggctatgatttgggacgcctatagagtatctatgacgtcgcatgcacgcgtacgtaagcttggatcctctagagcggccgccctttgggtttttttttatgaattatacaaactgcttgcacaatttgaatctgaatatttatgactgggctttaacgtgagtgtgcttgcacaatttaaatctaaatatttatcgactggtctttacgggaaatggattcaggtataaatactaatttacgacggtgaagccctatcaatctttctatgacaacaatattatttgattaagtgggcgacctagactcggcgagcttcgtggttcctccaggaagaccatggttttatggactgcttctgattctttagtcttaccccacaagaacctctagagacctattatggtccctactgatccattatactttttagcaagaggcacaaaaataatgttagttcgtaaccctagcgttaccgtagactttaggcatt

SEQ ID NO: 172891 - DNA, 564 bp, Arabidopsis thaliana
gcccggcgggacgccgcagccgcccgcgcggcgcgggggggtgggtatcgccggctactatacgactcatatagggaaagctggtacgcctgcaggtaccggtccggaattcccgggtcgacccacgggtccggtctttctaacacacaaactcacatagaattcaagaaagagagaacgagggagagatgggtgaggatatgcgaggagtgaaagtagtctcaaaatggccaccgatgatagttatggtgacatcacaagtagcgatgggttcatgtaatgcactggtgaagaaagctcttgatgttggtgagaaccatatgatcattggagactcagaccggccataacgttcaggctactggacgatcattggatccggcgctttgctcgggggggagtttcatggcacgttttctatttcgtatgggctgagctacaccgggtgccgctgctgcgcgaggctctggttagcttgatgcctggaatcacctgtggttttgcttcttattcggacgaactccagcatcaaatacctcaagacccccgcccggaatgatcgcg

SEQ ID NO: 172892 - DNA, 505 bp, Arabidopsis thaliana
accttagagatcttgacgtccatgcacgcgtacgtagcttggatcctctagagcggccgcccttttttttttttttttcaaagaaaccactatgggattgtttaggccaaagatccaccacacttacaaataacaattgtctttttggagccggatttttttttttttgttctctgttttctcgcttctttgatgcaacatgcaaccaaccaaatattgttgagagactaagcaaagattaatctaaagagaaagagtaccaccaaaagtaccaccaaaggggggcatttcctccacttcagtaacgagaagttgaagaaaaaaaagaagcagcagcagaatctgacacggaaaaagttcttttttccctctcttcctcatattcagcatcatcagtctaaagctggaatctacagacaggacaggagttccttgttcctaaccatggcacaatacaatctccggggtaccaatgtccacacgggaacttctaaccagtttctcc

SEQ ID NO: 172893 - DNA, 526 bp, Arabidopsis thaliana
  unsure (1)..(526): unsure at all n locations
ctatagnagatctatgacgtcgacatgcacgcgtacgtagcttggatcctctagagcggccgccctttggtttttttttttttttttttttttttttttcaaacagagaattttaaatattttttggagaaaagaaaaacaatcaaatcagtgggtgttattcacccaaacaagaacagaacactacgcctgggattttacaagctgaaatctgttaaattttaaacggaggcgtgagtcagtaaaaccaaaacccggaaagataatgttttaatcgccggtccgttattcaacacttcttagtttgagcgccccggtaggaaaaaagtttgaaaatgattaaaggaggaacgatcccaaatgtttagtgccttgttaaaaaaagatcttctttccaggcctttttaataaaacagaatttatgttgggggaaggaccatcccttgggggcaaccttttactggcgccgcgagaattttggaccatttcctccacttttaaaataaaaattgggggggggggggac

SEQ ID NO: 172894 - DNA, 574 bp, Arabidopsis thaliana
  unsure (1)..(574): unsure at all n locations
tttaggtcgacctatagnagatctatgacgtcgcatgcacgcgtacgtaagcttggatcctctagagctgccgccctttgttttcctttttttttttttnttttttttttttttttttttttttttttttattttttttttntnntcttttntnttnnggggcaaagagaaaagtttgtttttttcaaaattgaaattagaaaaatggacccggatcctcgcccaaaaccaaagggggggtttaaatctatgggggtggggaataatccaacctttttatccaaaaggtttgccctatcactaaccgctttcgggaccccggagggttcaagattcttcgcctcctccctaaaaaccctggattttgccttttcctccaggagaccagataaaaaaaccaaattctaaaaaattgcccccccgggttagggtgtgttataacaaagttcccatattcccccccaccccccccccnccccttatgaacccctttttcccccccaaatttgttttttttccagaggggaggacccaagtttgtgactgtcctaccccccatgcttattggaaaagt

SEQ ID NO: 172895 - DNA, 207 bp, Arabidopsis thaliana
  unsure (1)..(207): unsure at all n locations
actatagaagagctatgacgtcgcctgcacgcgtacgtaagcttggatcctctagagcggtcgccctttgtgtntttctctattaaaaggagttacacaaccttctttagagaacaacctgactaaccggaccaagacacacacccgcctaagatgggatatatgagacataacaacgcagaatctgatcggctagtaacattaata

SEQ ID NO: 172896 - DNA, 837 bp, Arabidopsis thaliana
tatacgactcactatagggaaagccggtacgcctgcaggtaccggtccggaattcccgtttcgacccacgcgtccgagaaaatcgaacttttgattccaaaagcgatgagaccgattcaatcgcctccaggagtttccgttccggtgaaaagccgtccccgtcgccgtcctgatcttaccttaccgcttcctcaacgcgatgtttctctcgctgtacctcttcctctgccacctacttccggtggttccggtggctctagtggatctgcgccgtcttctggtggttcggcgtcttcaacgaacactaacagctccatagaagcgaagaactattcggacttagcgagaggtaaccgtatcggaagcggagcaggtggaacggtatacatagtgattcaccgtccgagttctcgtctatatgcacttaaggtgatatacggtaaccacgaggagactgtgagacgttagatctgtggagagatcgagattgtacgagatgtgatcatccaaacgttgggaatgggacgagatgtgtgacagatcggtgagatccaggtttgcttgaggtatggataaaggtggtttacaaagtgctctttgtgggaagaagcacatgtagggtgggtatgggcgggatggtgatggggggagtggtgtggtgtgggggggatggggctgcgggttgcggacgtgggatggtggggggggggggtgagactggggatgggggtgtgtggcgttgggatgtaagtggggcttggtggcgggtgggttggggcggcgcgtggtgtgggagggcgcgagatggcgcactgggcgtggcgtcgtgttgtgtgg

SEQ ID NO: 172897 - DNA, 879 bp, Arabidopsis thaliana
tatgacgtcgcatgcacgcgtacgtaagcttggatcctctagagcggccgccctttggttttttttttttttttttttttttttttttttttttttttttttttttttttttttttttttttaaaaattgggactggaaaaaattgggggtttaaaaacggaaaatttgggaaaatcctttccataaatggtcaagggaccaaacttcctggggtcggaacaaaaagggaaaaattccccttttttttcccaaatataacggcccccagggggccctagccaaaggcttccccttgttctttaggggggggtaggggacactgacccgcaaaattaatggccccctttatgggcctggcccgcgaggggtggcccaaaacccttttaatcccgcaaaaaacggttttgggcggttaaaagtaaccccccgaaaaagggcccccccgggaattaagttattaaccggccccaccaagggggccctcaaaagggtttttgggaaacccgttttagcggtgattaaatgacccccgttgaaacaccgtttcttgggttcccaacccgagtgggcccgcctgggttctccaaatttcccaaatatttagtaaggaccgacccacttggtccttggggggggcaaatttggattaaaaagaaaaaattgaaccgcccctttgccttttaaggtttttaaggggggacgggggaaaccctttgaccattaagaaaacgttctggctgggaggacgcggccacacaaatttttttttgtcgggattatatacacccggctacaaaaaattgaaaaaaactggtaccgcacggtgtttgttattaacgatactttcggccgggggccttacgtctcgctctcctatg

SEQ ID NO: 172898 - DNA, 469 bp, Arabidopsis thaliana
actatagaagagttatgacgtcgcctgcacgcgtacgtaagcttggatcctctagagcgtgtcgcctttttttttttttttttttttttttttttttttttttttttttaggagaacctgagaataaatttttttttagagatcaagtcttcaaaagaattatatttgcaacgatgaaaagggaaaaaatcatgttacaggccagacaaaagaaaaggaattaaaaaaaacaatcttgatgaaatctaagtagatatttgtaggaaaaaaaaaaaaaaaaaaaaaccatttgataataataataaacctccctgggagtgaaaagacaaaagggaacgaccacccttgcttaaaaactcatcagcctttctttcatctaaatcttccagtctctccagcaaagaactgaggcctactcgattttaatcttcttaagaaattcaaacttttattacaaaatggtttcaaa

SEQ ID NO: 172899 - DNA, 230 bp, Arabidopsis thaliana
  unsure (1)..(230): unsure at all n locations
tcactatagaaggcttatnaggtaaaacgcacgcgtacgtaagcttggatcctctagagcgttacgcgcgttgtttaaatcctttttgatataaaaaattggtttcatgtgaaatagtgaaagggacagcagagtggattgcataggggtgtggtaatgtgaggtgaatattgacatcgggggagaatgcgggaaagcattggaggtgaagacataggagaaaagacgtg

SEQ ID NO: 172900 - DNA, 691 bp, Arabidopsis thaliana
  unsure (1)..(691): unsure at all n locations
acgcctgcaggtaccggtccggaattcccggttcgacccacgcgtaagcccacgcgtcggacgatcgatcttgctgacccatcaataaattgtgaccaaaaggcaaattcactataagaaaacagaattcattcgtgaaaattgcatgggacactgtgtgtgtctgttacagacgctggcttgacctccttctggggggagcaaaaggggccncttgggaggggggggcaactagaccccgggaaggggaggaagagaagcgacgacggtggggtgggagggggcgacagaggaggatgggacaggagcgggggggggagcatgcgtgcgagcgaagcgagggaccgggcggaggggcgccgggggacgagggcggagcgggagggcgcgggagacggcgatcgggagcgcggcgcgggatcggggggccggaggcgggcggcgcgggagcggggtgagcggggggccatagggaggggggcgggccgggcgggaggcgcggcgtgggagggagggtgtcggggcggagggggcgcctcgcgaggagcccggaggggagggccggggcgctggtccggcgggggcgcgggcgggccagtgggaggcgggcgcgggccgggaggcgggaggagcgagcagcagggggggacccgaggggcagggtgccggcgggcgggcgcgcgggcagggg

SEQ ID NO: 172901 - DNA, 969 bp, Arabidopsis thaliana
actatagaagatctatgacgtcgcatgcacgcgtacgtaagcttggatcctctagagctgccgcccttttttttttcttttttttttttttttttttttttttttttttttttttttttttttttttttttttttttttttttttttttttttttttttttttttttttaaaaaggaaaaaaaagtttttttggggttaagggttttggaaacaaaggtttaaaaaaaaagggggggggttttaaaaaaaaaaaccccgggggtttttaaatttaaaacccgagggggggggaaaaaatataagggccaaacgggcaattattttttttttacaaaaataaaaaccctttccaaaggggttttttgggttttggaaaaaaaaaaattttggggaaagagggtttttttgtggggcccttttttaggggtgtcccccaaaaagaaaaaccggaaaacccccctgggggggtggggttttaaaaaccttgtttttaaaaaaaaaaaattttttataaaaaaaaggaggaaatattcttttgaataaagaaaaaaaaaaagagctcttttttttacccccttagaggggggggggccaaaaaggggggggggaacggggcaaaacaaccctgtggggggggataaaaatattttaaacaccttctttatctctttttgaaaagtcctaagaaaaaggggggaaaaacacaaaaaggcacttttttttgtttttttttttatagggttttcataggcaagaacaacaagaaattgttgaaaagaaaccattttgtgctccccatctttggaaaaccgtaatctttgttttccacaaattaatcggatatttgtttaagaaaaaacaaacccccgtttttttgttccctataaaaaatcctaaggaggggaaacgagggttttaaattttattccccggaaaaaaacgggtttaaaggaaaaaaaattcgcggg

SEQ ID NO: 172902 - DNA, 520 bp, Arabidopsis thaliana
gtacgcctgcaggtaccggtccggaattcccgtgtcgacccacgcgtacgcgatcagtgaaatgaaccgtgtgacgcgaggctgggctgattggggcgctggtgatgcgagaggggcatgggcagatatgagggattgcatgcgctcaagcgggagaaggagcaccaagagcccgggggcgaggggggattcctcttgagtgggacgctaagaaaagaatccgatcggggcgaggctggcaggcgcaaggctctgcgacggtaccagaactagagctgacagtagacgacgacaaagaccccaggtggaaaaccgagcccaggcagagacgtaagcaaagaggacgcgagacccagcggacaagaagggcctgcgccaacacagagtacgcgaggaaagcgcagaggaggagagtgattagaagcacagagacgcagcgggagaagagaaactgacaataaaatggagaaggtaaggcgaacatcgcacggagaagaccagccacagaccggtaacgagc

SEQ ID NO: 172903 - DNA, 1027 bp, Arabidopsis thaliana
  unsure (1)..(1027): unsure at all n locations
gtacgactacttaagggaaagacggtacgcctgcaggtaccggtccggaattcccgtgtcgacccacgcgtacgcaaaaatgatggcagatgaagcttgggtgcgtaggctttgagcctgtgagaaccatgggggctgggacagcagtggggagggatgagactgggactgggaccttagggaagagagcgcgggggggagggtatgctggggttcataatatggattctgccgacaggagggnagagtcgggatgtgtttggacgtggatagtgggagcggaggtggagggagtggggacgcgcgagtacgtcggcgaggggggtggggagtgcgcggaggggacgtgcgagcgggggggggagggtgtggagagcggtgggggggtgtgggggcgcgggggggggggagtgagaggagggaggggaggggggagagcattatgggagatgaagagggtgaaggggggggctggggggaggcggggggagttgggggggcggagggggggggcgaaggtcggggggcggaggtggtggggagagaggcgcgccggcgcggagggcgagggcggctccggatgggcgaagggggtgggcgggctgtcagcggaggtaggcgggggtggaggaggggcttgcgagcggagcggcggctgttggggcgtggacggggtggtgggaggcgtggcgggcgggaggctggggggtggngcggagagcgagtgggtcgggggcgcggtggaggaggtgagaggcggatcgagggggcggggagagttgagcgaggtggggggacgggcggggcggggtagggcgggagggggtgcggggagcggggtggggtgagggggagggaaggatggtagggtatggggtggggtggcgggtgagaggtgtcgagcggggggtggtagagaggggggcggggggggcggagggggggtgaggtgggggagtgggacgggcgagggagtggnggggcgaggtgtgcgggggggacagacgggggaggaggccgaggagag

SEQ ID NO: 172904 - DNA, 520 bp, Arabidopsis thaliana
  unsure (1)..(520): unsure at all n locations
ctatagnagagttatgacgtcgcacgcacgcgtacgtaagcttggatcctctagagcggtcgccctttgttttttttctttttttttttttttttttttttttttttttttttaaacttgaaagttttacgtttgtttcataatcacgtttcacacaaaacaaaaagtggaaataggggaaaataacccccaccccacactaatttaaacgggaaatttggaaatgttttcaccaccccacagtctaaaaaaaaggccgagaaaaagacctcccatagttaaaacctgttgaaacatgcgccaaaaaaaacccgcgcagattacaaccttggggagggtgagagcaccaatgcttttcccccgtagaaccccaacgggttgtttagagagacacattttatatcccggggaagcctgagggtttttgcccaaaacaaagactttttaaccgatggggggaaagaccggcacaagcaaaaattggggaaccagaaacggccgtgcccctttgggggaataa

SEQ ID NO: 172905 - DNA, 542 bp, Arabidopsis thaliana
  unsure (1)..(542): unsure at all n locations
cactatagaagcattatgacgtcacctgcacgcgtacgtaagcttggatcctctagagcgtgccgccttttttttttctttttgcaggaaaaccattgcaaaaccgattcaatagtttgaggacacgaaacgttcattcagaataatcatcctcattaccatcactatattgattggcatcttgttccggctcgtgtttccaagatctaccaaggccgtcttcgtcctctaatcttctcatcttggagctcgaagcaccaaccctagaagagtaaacccctgaatctttatgttctatcactgatacagntgatctccgccttacagttacccttgaaggtactggaaagtgttcaatctcatcaaaagatcttcctgtcctggcccttttcttcctaaagtcaacctcatgggtaggggcagatagctagcgtgcccattggcaaatgataccaggtatgtgccaggatcgtttgcatttggtggtacatgccagaggtattcggcgacccaagggttaggagattgttgggtttgatcat

SEQ ID NO: 172906 - DNA, 848 bp, Arabidopsis thaliana
atacgactcactagagggaaagacggcacgcctgcaggtaccgggccggaattgccgtgtcgacccacgcgtacgccggcgcgtgggctgtatgcgagtgagtgagactacaatgggtgaggggctcggggaaatggctctggacaagactggggggagaaggggacgcgtgtgaatgagaagatggggtgagggatgagagggggtgggggggatttttttggggagggcctgggagatgatatgggggatgtggtgggtgctagtgggagggtgagagcgtgggggaggtagggggggggcttggcgaggtcgggagacgcgatgagaagggggcgcgagtggagcctgcggacggtggtaataattgtaggtgtcaatatcctacctggaacggttgacgcacgccataatgactgttctgctgtgcatgagcgatctaaccgaacacacatggaggacttggccgagcggattggtaagctaacacatgcatttttgttagagactgagtggtaatgtgttattgcgatctccgctcttactgctcgtaacgggtggtgcactctttatgcatgacgcctatatagcctgtcttaagtcgtaactgtatgaacttttctttagtctcaactccgtgccggacaccgataatactctccttcgtaggttcaaggagtactgcagtgtaattagtgaggaagcatttggaaaggttgcttcgaggtataagatatatcagggtagataagaagaggtggtatcgcatccatctcgagagcttagccgaaggtagttgtgtcgtgattgtgatttgcacggtgtgtgagtaggaatcgacacgcggt

SEQ ID NO: 172907 - DNA, 406 bp, Arabidopsis thaliana
aatacgactcactagagggaaagacggtacgcctgcaggtaccggtccggaattcccgtgtcgacccaggcgtacgcgaaaattatattaccagcaaaggaacataatgggttatgttagagagatcgcgtgaagaccctctaaggagtttgctcttgagtaattattggacatagattgtcggtttgattttgtctttaaagaagatgggatgagtcgtttttttctttgacggggtggggagagatccggtgaactgtaagagagatcatctagtgttggtgagtgttttagactcgtgttgtgttttggatagaggtttcgttatagactggtgttaggaaaagggtgaggctgagctcgatgttgttcgggcgtggtagccgttgttaggcgcggtgattag

SEQ ID NO: 172908 - DNA, 490 bp, Arabidopsis thaliana
gcacgcctgcaggtaccggtccggaattcccttttcgacccacgcgtaactctggcttcttcaccactgtgcagattcgatggatcttgccatcatactattctcaggtgtgatactgatcaacgtgttagccttaggctgctcttggactgggattgaaaagaagatcccttgtcctctgtagaggctttgttattctgacgagataagagatgccactggactcaaggtgttgacagtcgccattcaggtctctcggatgtgacagggttgagcacgacatgtattgctttaggcgcgtggaagggcacgtgggctctgggctggagcgaagggtcgcggtctgggggggcgatggggggaggggcaagggagggggtgcgcggccgcgtgggcgatgggagggggggggggcgggggaagacgcgggaggggagcttgtgcagggcgcgtggggatgggggggagagcggcaggtgcgcggcgcccg

SEQ ID NO: 172909 - DNA, 986 bp, Arabidopsis thaliana
  unsure (1)..(986): unsure at all n locations
actatagnagatctatgacgtcacctgcacgcgtaccgtagcttggatcctctagagctgccgccctttgtttttccttttttttttttttttttttttttttttttttttttttttttttttttttttttttttttttttttttttttagaggtctgccccctttttccttttattgtcttcctaagcctcccaaagaggggggacccccccgaaaatttatccggaaaaaaggggcccccccccccggcaaaaaccccaaaaaatatttcttttaaggggggggagaccgcccacccaaaaagagaaccaaacacccgggccggggcccgcccttttttacaaaataggtgtaaattgaaaaaaccaacaaaacccctaaaacgcccggctaaaaaggcccccgtataaaaaaacacacccgggacctcccgcgccccaaagaaacgccccacataaacatctccccggtgttcttttaaaaaacaaaaaccggacccgccctggagccaaaaccggcccacacccttttttatatattttgcccccccgccccccgcgcccggagacccaaacttcttaaggaaggagcccggccccccttggcncgaaaaccgccccccccctaacaaccccggggggggtgcccccaagggggggggtgtattccccctctctttataagaaaaacccagatgccccgttaaccgccaaaaggcctggnaacccccggggggccaccccccgcccaaaaaaccggagaacccggggtgccgcgggaccttatccggacccccagaaaattggggaggaaagggaacccgggcacaacgcctggggggggcccccggacctgtaaaaccgggcccttggcccctggcttgagaacaaaaaataaaacaccgcctcccacaccgggggggggcgcggggcccaaacccccggcggggacaggaaccaccccggcggaaaaccaaatcgccacg

SEQ ID NO: 172910 - DNA, 358 bp, Arabidopsis thaliana
cgcctgcaggtaccggtccggaattcccctctcgacccacgcgtacgcgcaacttttatgatcagctgtataagtgcatggcgacacatgtgctgtggggaacatggggtctcgggacggactgggaactgtacctttgacgggcgcgaggggcggggagctgtgcggggacggcgggcgcgtggagggcgggtctctctcttaagatcaaacaacaggtacgcgggacggcggacctgcgcgaggcggcgacggacgcccccgacctgcaaccagacacacctcgaaagaggaccagcgacccacgccccgcgcggtcgcgcaaacccaccttccccgagacgatgaagggaggcgt

SEQ ID NO: 172911 - DNA, 263 bp, Arabidopsis thaliana
atacgactcactagagggaaagacggcacgcctgcaggtaccggtccggaattcccggttcgacccacgcgtacgccgtcacacacacacacaatcgggacagatctagcgcgggatcgggtgcgtgtcagaagaagaggcggatcaaacgcaggtgggacggacgaagaggagcaagagccgcagggcggggcggcacggaggagggaagacggggactcttctctgcgccacaaacgaggggacagcggccgccagacgcg

SEQ ID NO: 172912 - DNA, 672 bp, Arabidopsis thaliana
aatacgactcctttagggaaagacggtacgcctgcaggtaccggtccggaattcccgtgtcgacccacgcgtacgccagtgaagaggttccctcgtcagaaactcccaaggtagtagaagaagaagtgatagctaccaaagctgaagatgattgcgcggaaaaagaagagcaaacggaaacacttgctgcagcagctgaagctgaagaggtggtttctttctttgcagagaccaaaagtgaagaggaaattgttgagaactgtattcctgcaaactgagccactggtggaagttgatgtggcagaactgtagcgagggaagagggtgggaaggagcgaggggggggcgaaacaggtgtgggtggagggaaggctgctgggcctgggagggcaggaagctggtgtggggaaatggggggacgcgggctggggaggcgttgagaggggtgggcggcggggggggggagggggggggtgaggagcacggggtgggacgggggggctgggggaagcgggggggcgcgtgggtgggtatgttggtgggagtggttggtggggggggggggcggggctggggggggaggtgggggggggatggggcgggggggggggaggaaggggggctgggggggtgggggtgggcgcggtaggggggaggcgtggcgagggggct

SEQ ID NO: 172913 - DNA, 469 bp, Arabidopsis thaliana
  unsure (1)..(469): unsure at all n locations
ctatagaagagctatgacgtcgcctgcacgcgtacgtaagcttggatcctctagagcggttctgcctttggtttttttcttttttaaaagagtataacaaccttctttcaaagaaatcctactnagccagaccaaagcacatacgcgtctaatgaggagtgaagtaaataaacaaccaaatctaatcgctaataacatgtatgaaaagacaatttactctttatacgggtacgctaaattaacgcggcgggaatcaggaaactgttatagattgagtagataccgctggacttcgacaccagatcttcgaggagagctcacttctccagcgcgtgattccggcatcggctggatccgcgaacggtggcaccttcgggatcttagtgagaatctgaccagctttgtgtgtagtcggcctctcacaggttagcgttntgccagaggatccgatctataaaaacggcggcat

SEQ ID NO: 172914 - DNA, 566 bp, Arabidopsis thaliana
cgcctgcaggaagccggccggaattcccggctcgaccgacgcgggcaggcgaaaccacccaaggggaaaaggatagagctgtgctgaatgaaaagactgcaacagcacacattcagaacctagtaagagaaaagacagaacttgcgacagagggcgaaaactgtgagaaggaacaagaggaaatgaagtatgctcctggagagtggagccggcggatgggcggagaaggtcggggggaagcagacggaagggaggacaacgtcgtgacacggggagcggaggtgggactagggcgggcgggaggaggaggggaggaaggggcggggaaggcgcgaacggggacgaggggagaggcggggaggggcgggaggggggaggggggctggggacggggcgggagacccgggggagaggggggggagcggagcggcgggcgggagcggcgggggcggcggagggcggaggggagggcgcagagggcggacgggcgccgaccggagcggaggagggagagggacggggcggcagcggacgaggagagagcgcgggggcagggcgcggcgggc

SEQ ID NO: 172915 - DNA, 521 bp, Arabidopsis thaliana
atgacgtcgcatgcacgcgtacgtaagcttggatcctctagagcggccgccctttttttttttttttttttttttttttttttttttttttttttttttttttttttttttaaaacaaacaagggcacaaaaggggcttatttataaaaataaggtttttgggggggggaaaaaaaaaaggagaaaaggggggggtattaaaaaaattttaatcttgagggggggagaaaataaacgaaaaacccgggggggggaataaagcaggcccctcaccaggggggggaaattaaccacgaaacccgtttttgagaaaaggggcaagcgacttctttgggtgaaggaggagaccggaaaccggaaaaaccggaaagggggggaaatcggttgtacccaccgccttgatggaataataagaaagccctttccaaggaagacctgtggccggcgctaaaccttacaaatttgacacaacttttgggaagaaaaaacggtcaacgggggggtgaaacccaccgttcggg

SEQ ID NO: 172916 - DNA, 694 bp, Arabidopsis thaliana
  unsure (1)..(694): unsure at all n locations
atgatcctgccagctactatctgactcaccttagggaaagctcggtacgcctgcaggtaccggtccggaattcccgggtcgacccacgcgtccggacgaggcagataggctcgttacctcaaggctgctttggctgaaacgctgcgttatacccttctgtgcctaggatttcaaatacgtcgtagacgatgacgttttgccggacgggactttcgtgccaagaggctcgacggtgacctactcgatttactcgatcggacgtatgaaaacaatttggggcgaagattgtctcgagttccgtccggaacggtggctgacagccgacggtgaacggtttgagactcccaaagatggttacaagttcgtagcgttcaacgccggaccaagggacttgcttgggaaaggacttggcttataatcagatgaagtcggtggcttcagccgttctcctccgttaccgggtttttccggttcccggtcaccgcgttgagaaatatgtngtgcgctttatgaaaacggtacgtgtattgcactggggaggctgatataataggttatcgaatatgtgcattgagtaaatggttagacacctattatcatgttctcactcaaactatatgatttcctttggcttgtgtgaaaaaaaanaaaaaaaaaaaaaaaaaaaaaaggggcgttaagcaactaacctctg

SEQ ID NO: 172917 - DNA, 759 bp, Arabidopsis thaliana
  unsure (1)..(759): unsure at all n locations
cacgcgtacgtaagcttggatcctgtagagctgccgccctttgtttaatcctttgtttttttttttggggaaaccaatggagtggatggatgagtataatgaggccggtggatggcgaggatcgcggaagatggagaaaatgggaggggggggaggacagggggggagctgtgggggaggggcggggagcaaggaggagtttttttttacaaaaaatgttgggcgggtggtgtgaaggcagatggcagtgtgaacgaggagaggagaggggagngcggatgcggttgcgctgtggggtgagaggaagaggtactacgaaggtagcgatgatggctagcgcaggtaggaacagcgcagaacgaaggccttagcgaaattgttttggcagtaagcgtatgtctaaacatatcgctatagacggtgcgggatgattaggtaatttatcgctggtgtgatgtgaagatgtagctttactgatgtactggtttactatggagcgacatatcaacgaccacgatggaacgcgnaaattggcaatatgccataattttaaaatgatactcgatccgagaggatgtagttatggcgttaacatatcaccgaaacattatgttattatgctactgtagtacatgaagaagaggagacatacagtacaaatgacactatctgacacattcctatagtagtacgttgtagtagactgcgaatcgtcgacactgcattacaagtaatttggaaatagtgaaagaacccaac

SEQ ID NO: 172918 - DNA, 956 bp, Arabidopsis thaliana
  unsure (1)..(956): unsure at all n locations
aatacgactcactanagggaaagacggtacgcctgcaggtaccggtccggaattcccgtttcgacccacgcgtacgcgcattactaaccattaactataacttattagctcatagatgctgaggaaacctatgattaccatagaacgtgtcactctggatctatatattggtggccaacgatgctaatgagtgtatactggtccctaaagaaaacggatttttttaaaaagggagtcctgcgtactcatgggcgaagtgcaaatccttactacaggataatgcttgagtatcctgattgaccgtgcaaatattgcgaatgagggagagtgcagatggggggaggtggaggggcatcgggggggggaggaagggaggggaggaggggaggtgggttgaggggtcgctggacagaggcaaggggggggtgggggatgggtgggcgacgggatgacggggtgaggacggcgaagagggggggcgggtgagatgagggaggaggggggagggaagtggggaggggcagtgggtgggggtgtgtggtgagggtggcggagagagagggtgaggtggtgtgagggtggccgagtagtggaagggaacacgatgtaagtctgatagcgagtcggcggtggaaggggcatgatacaatgggcaaatcagcctaagatggtaattcacagagtcagtatacatatgacggtatcaaagcagacgtaaacagttagtgggataatatgtttactgaaagctgtacaagtagagttctagtgactacttataagcgatattatctatagctcgcagaatcgacccagagactagagctgcggtaggagaggatagagatgatgtcatatagacgcctcacattctgcgaagcggagggagtgcagagaattatatgtccagagagtgataattcgatcacgctgcgtacactgaccgctaatcattg

SEQ ID NO: 172919 - DNA, 482 bp, Arabidopsis thaliana
  unsure (1)..(482): unsure at all n locations
ccgtgcaggtacctggcactggaatacccggtccgacccacgcgtacgccatgatttcgacttacgtcgtcagctcatgaaactaaatctctcgaatgtcagatttctacgtacccgaaaatcgttaatctaccagacgcgagcaatgactcaaaatccggatccaaaacctgatccatggcaggttcttgtctatatcctggtggtcggagcagcgtgatgggcagattgaggatacagtcgacacagcgccggcgagcttgggctctccaagtgcgggtgttaagcattgatgctacagtagagagaggttgagcacactgcgaaaaactggctagacgcaaggatatgggtggtgcgatgcgggatgactctgaggtgtgcgggagatgggtgtggcagagatacnggagctgaggctggggatgctggtgattgtgggtggtgcgatgggtgggctagagctgggacgtgtggaagtg

SEQ ID NO: 172920 - DNA, 895 bp, Arabidopsis thaliana
  unsure (1)..(895): unsure at all n locations
actatagnagctcnatggcgtcgactgcacgcgtacgtaagcttggatcctctagagctgccgccctttggtaaacctttttttttttttttaattgttcagttgtttgttttatttttgtaaccaagttctcactggttctccgttcacctacacccgattttacaaacacccctaaaaaattatcccggaacaaaaaaaacacgagcgcaagaggttcctctctccgggggggagaaagccatccccccccctcgccgccagacccaaaaaccccccaggcagtagacaacgcacgcccctcgagcaaaaaaagagggcgaagaaagaaaagcaccgcgaagaagccagacgtggaggaggcgtgacgacgacccaggctggcagacacgcgacgacggagagatgcaacgaacagaacaggcgggcggcgcggagatgcgcgcgccagggagaggagccgagggagcccgcggggcgaggggaccgacggagccagtgaagagtcgggtgagcgagaagagacggcccggccgaggcgagagcgcgcggccagaggaagggggggggggggccggggccggaaagggcgcgagggaggcccgacaggaggagcagggggcgcgccgggcggcgagcgggcgcgggggagggcccggcggcggggcggcggcggtggggagaggccccggccaagacccgcgccgagaacagggcgagggggagagcacgcaccggcgatgccgcggaggggagaaggggggcgggagcagggggccggggcgggggagagaggcgggaggggaggagcgaggcggggggcgcaggcagcggggtggggcgcgaggagacagacaggagcgagggagcgagagggagcgcaggcgagcagcac

SEQ ID NO: 172921 - DNA, 691 bp, Arabidopsis thaliana
  unsure (1)..(691): unsure at all n locations
actatagaacctcnatggcgtcacctgcacgcgtacgtaagcttggatcctctagagctgccgcccttggtgaatcctttttttttattttcttttttttttcgctcttttttttttcgaggtaacatccccgtcctcaattcctaaaatcgcgcgtctgagaccacccccgccccaagcgccgcagggggctgcaccgacccagcgcaaaaaagatttcttgttgaggggggggcggcagggaccccaaggagcgccaaaaaacagccctccggggccggagtagaggggagaaaacacccccgcgccggctcccggattcaccgggggtcgcccccccccgggcataagcccgagccccccaccagagccctcatgccgaggggcgcgggcagcccccaagggaccccgccggggcgggacggggggcgccccccacgcgacgcgccggccgccngcggagcgagagcgccgccgaggggtaggcagggagggggaggcagaggcgcgcagaggggagagtggcgcccggaggaggtcgcgggagcggggcgagcaggcgggagcggagcggcaggcggggggagggtcgtaggcgtcgaggggggcgtagggagtaaggtgccacgaggggggcgcaggggcagcgggggcagggcgcgtcagggggcgggcgcaggcgccgcagagg

SEQ ID NO: 172922 - DNA, 517 bp, Arabidopsis thaliana
tgacgtcgcctgcacgcgtacgtaagcttggatcctctagagcggtcgcccttttttttttttttttttttttttgcgaaacagagcatgttattttttgggtatgtcatacgaaacaaaccagatgatattcatctggctaagactgacggaacacaccacaaaagttcaagaacacgtagacattggtatcaaagccactcttggattagaactgcaactgggttaaaaccataatccttcgtgaataagctccagcggagtgaatccataaggcctctttagagactttaataactagaaatccgttccaattcactttattacttaaatacgttaaaggaccggaatttgcttactttccataatacaatgcgaagaagcgaaactgaccattccatgtgatccaagcagacggggcaatgtggctgtcaatgagaggaccgaatgatcactgttcttgaggacgacattgaaaggacggccagaggaccggttttacagatccttttacagg

SEQ ID NO: 172923 - DNA, 686 bp, Arabidopsis thaliana
  unsure (1)..(686): unsure at all n locations
caatacgactcactanaggggaaagtacggtacgcctgcaggtaccggtccggaattcccggtccgacccacgcgtacgccttttcgtagccgcaagactcctttcagattcttacttgcagctatgggtaaagagaagtttcacattaacatgtgtggtcatttggtgcatgttgattgctggaaaatggaccacaactggtcacttgatctatgagctgggttgttctgacaagcgtgtgatggagaggttcgagaaggagggtggtgagatgaacaggatgggctggaagtgcccatggggtggggacaaacttaacgacgagcgggagcaggcgtgacgatgggagtgggggggatggaaggggcgagaccacagcgcctggtggaaacatgtgatagcgaagtacatggggtcgaatcacatactaaagacgcaactgggagaatcgttcttgagcgcgatttatgatgatatggagttgggggatctggtatcgctgctgtcgcgttatttcatgttgttttgtagtcatggcatgtagcttggagggtgttgcgtgttagtctgttgtgagtcagactgtgacctggctcggtgacactctattgttcggagagatcatcaaatggtacgcgttgtcgtatggtgttgcgaggtggtatgctcttgcagctggggcgtt

SEQ ID NO: 172924 - DNA, 926 bp, Arabidopsis thaliana
  unsure (1)..(926): unsure at all n locations
atacgactcactanagggaaagacggtacgcctgcaggtaccggtccggaattcccgtgtcgacccacgcgtacgcgaaaatcgaacttttgattccaaaagcgatgagaccgattcaatcgcctccaggagtttcgcgtaccggtgaaaagccaggcccgtcggcggactgatcttaccttaccggttgctcaacgcgatgttggtgtcgctggacttctttctatgcgacgtacttggcgtgggttgcagggggctgtaagggatgtgcagccggcttctggtggggggagggtgtgggaggaacactggcaggggggtggaggcggagatcgaggggggtggtgggagacgggtgggggggggagggggggctggggggcggggggcagggggggggaggggggcgaggggggggggtggggggtggggggggtaaaagggggcggggattatgcgttgggcacgggatggggaaggggcgtgaggtgggcgaggcggaacacgtagattcgatcaaatagctgttattgggcgagagtgttgagttatttgtacgtattgaagtgtaatttcgcaggtgactagtacgttgactttatgacgccaggggctgatggatctggatcgggaattggactgcgttcattaggtccagacgggttaacgcttcgatgatggtagacgcattgtggttgagggaggtatgccaggcgaattgtagtgctgttcgtgngtgtggtgcgcggcgccacgctagtgtagtacgtcatgtatcctgcgtggagattggagattcgtgtgtgataggtttatacggatggtagagagacgtctcatccgctggtgctgcggcggcgagagtagaggcaggtctggtcggggaagtggagcttgtggtctaacgtccatcgtgtgtacggccg

SEQ ID NO: 172925 - DNA, 985 bp, Arabidopsis thaliana
  unsure (1)..(985): unsure at all n locations
ccactatagnagagttatgacgtcgacatgcacgcgtacgtaagcttggatcctctagagcggccgccctttttttttttttttttttttttttttttttttttttttttttttttttttttttttttttttttaaccaaaaaaagttgggacgggggggagccctaaccataactaaaaacagggttgggtctttgaacgggaacaggaatagattcccacttccaacaacaaaaagaagcggcaaaaaattatcatcaacttttctttttctaaccaaattttttagggggggggagtccattttccagggggaaaggccttggaaaattgggacctttttgatacgatgtaaaagacgggaatctcagggatgaaaaacttaggttctttaaacacagaaggcaatggttttttttcgttaactttaaccatacccgaagaacctttcagggggggggggggttgggttgcgcttgggcccccttctccgggagtttaagcttggaaaccttttgtacctttaaaaaatacgggaaaactctcctcctaaggaagggaggtcctggactcgccctcgagtaaagctcaaaaacaacacgggagtattcggtgttcttatcccgggggagggggggggtggcctctgaaaaatcatataaagatgggtgggcaacagggtgggtaaaaaaaggcctaacaaagccccttgggtgggccttagggaaagaaccgggacacgcccggaggggtggtggtttatctaaaatgggtgttaaaaccaggagtgcggggcattggttggcgatttgactcggtggggagaagcgaagaaaacgctggtgaaccccacgtgaagcggaggcgatagggtgggtggcgggggatggggggggaagggtggcccagggggtcgatgcgtgccgggagaggatagagctgaggcggggtgcggccgagggtcacgggtagcggccacgagaac

SEQ ID NO: 172926 - DNA, 866 bp, Arabidopsis thaliana
  unsure (1)..(866): unsure at all n locations
actatagaacgttatnaggtctacngcacgcgtacgtaagcttggatcctctagagcgtcncgccttgtttttattcctttttttttatatattttttttttttgtatttttgttggtagattgtggtgttgttgagttaagaagcctagaagaaaggcatggttgatgttgataggatgaaagcgaagcggatgaagaggtggaagtgaggcgggcaaaagattttttttttaggatttaagaaagacggcaagatagcagaaaggagcatgaggacaaagaaaaaaattttgatggtaggccgcatctatctatgtatggtgggctcaaaaacaggctcaggctagcgtatcccatagcgtgggaatatgagtgcaatactattagtgattaggagataggacgaaagcgcagactcaaactgccgccttgatagttaggatatacgcaggaatatataaattgtaaaataatagtcacaaagaacgcataataaaatataattgggattccgtttgtatcattgaaatagagactgttagtattattaactaatgtagatgtataacatcaatggatatatctgcgtattggtgttcggtgttctagcttgtaaataaatatctcaaattatatatacttaaactagagacagcactgtaactgtcgaagtagccatttagagaaatatcttatgaggagtacgtgattagtacggattgctatgttatacttttattaaaacaagatagatgtacgtgtgttgataagctttttataaataccagtagaaaatttattatataactaagtaccattaattggtagtcttaaaatgtagaactattaaccagattaataacat

SEQ ID NO: 172927 - DNA, 453 bp, Arabidopsis thaliana
  unsure (1)..(453): unsure at all n locations
atacgactcaccttagggaaagcacgtacgcctgcaggtaccggtccggaattcccggtccgacccacgcgtccagtccaactcaaagccctcgctttaccgaagaagtaaaagaaataagagctgatcatgggtcatctaacaacaatggtgcttgttaccaaactctggatgaggaatgcggtggaggacatgggagaatgggnatgaggggctgtgttcctccttagaaagggcccctgggggggtgacattggcctgctaggggtgcttgaacaagaagtgcttgaccggtgtggggggttgctgagggggtgacagcgggggggggagggagggcactgtgcggggccttggggggggggctgatgatgggggcgtggggatggtgggcgctggggggggggtgggagggggaggcagggcactgtggctacgtaggccgggaggggg

SEQ ID NO: 172928 - DNA, 936 bp, Arabidopsis thaliana
  unsure (1)..(936): unsure at all n locations
atgatactgccagctctaatacngactcactttagggaaagctcggtacgcctgcaggtaccggtccggaattcccggttcgacccacgcgtccggacatgttcagacaacgagattttccatcccttattctatcagaccggtttaagctgcatattgctaggcttagcgttcactttcgctataaagtacaaacgtcatctaccttcacttatctctttacatggctgccgatgtataagttcgggtttcttgaagcccttatgacacaaaagaccagaacangttgaagacctatgactacaacctcaacacattatgttccaccgagaaggttcgtagtttacgagcctctcaccaaatcggatgtgaaagaagtgcaagacatgtaacatttaccctgctctatatgtcccgactaacgaataccagacagcttgtcagaggatacttctcatgggacataaggaactcctcacaagtttgacaaagacgcttccacatctatacatactgataagatacatagaatgctaccacagaatcaataggcagctagtaaaagctcgatgcgcaagacagcttatgttcagcagctagagactacccggttatagctatctcattcagagcaagtactcgatcgtgctanacaacacggcttctgtgtggggaacggagtatataccaatgctcttagtttctcagatacatgancgtcaggattgttgcatttgagatggatatggacattngttgaagacaaatcagcaatatgtgactaagacggtttacatgacagttagtgtataagctcctctctgtcaaatgcctaacatacttcactcttcatgaagcagcgtgaaaatnatgttttatcatgtcggattggaacttcgcaagcggtttctgtgaaggcgttaaacctcaagttta

SEQ ID NO: 172929 - DNA, 235 bp, Arabidopsis thaliana
  unsure (1)..(235): unsure at all n locations
tacgactccttaagggaaagacggtacgcctgcaggtaccggtccggaattcccgtgtcgacccacgcgtacgcccagtcttgcatataaatacatatatgatgggatcgggagcaataggtgcgatagatgggaatggctcgggcgatgggcagaatcatnggcagggcgtatataagcgcgtgaggaggggggatggctcggcgggctgtgggagaggtggaggaggtttttt

SEQ ID NO: 172930 - DNA, 559 bp, Arabidopsis thaliana
tgacgtcgaacgcacgcgtacgtaagcttggatcctctagagcggtcgcccttgggggttttttttattggaatagatattattttattgcaaggacaaaaacatatacaaatgcgcgatgcaggtgaaaagtatgtgacatacagcgcggtcgagcactagaaagtgtgaagacggacactagtcgatgggtggctggatttgtaagtcgagttttttttatgcagggtggtacaggaggccacatatatcatttagtataaagacggtagccatgcatccccgatacgagaatgaaagaatgcggttggctatgtcgcgatcaaagccgaagtcgtcgatctagcatatggtacgtggtgtgattttcatacgtgtagtgtgacatcgtataatataggaaaagcgcaggatgagaaagatggagggcgagacagggcgggaggatgtaaagacgtgatatagagaccagagcagaggtaatgcgtggctgctccttctgtggtctctgtctctagcttcttagcgtttagaggcagatatggggcaggctgcctcc

SEQ ID NO: 172931 - DNA, 507 bp, Arabidopsis thaliana
atacgactcaccttagggaaagctcgtacgcctgcaggtaccggtccggaattcccgggtcgacccacgcgtccgcggacgcgtgggatgcttctgaaaccattaaccttaagcaacgatgaattcgaagttgatgagtcggatgaactgggcttctttgctcccttctataaagatttcaggataaggttctctaaactgttgagtgataaattcaagaagatggattataaacttgcaatgagtgttttgaaccctaagatcaacttcccagaggttgatttgactggaaattcaccagatggatttttgaagaaactcgacggagttctttcaccttatgatatggagagattcagagcatacactgccaatctcgttgacttcaatctaggttatgacatctgcaaaactctagctcatcattattttcaagagaagctcccagtctcgcttgcgtatgttcaagcttctggactcctgtgtttgggcttgcaggagtcagat

SEQ ID NO: 172932 - DNA, 501 bp, Arabidopsis thaliana
atagaagactatgacgtcgaacgcacgcgtacgtaagcttggatcctctagagcggtcgccctttttttttttttttttttagcaccaaattattcttttagcccaaaattttccaaaagtacaacaacaaatccggcaaaaacacatacagaaaccaatttttgatttaccgacgaaaatttcaaatcagaaaaccggatttgatccaagtgggttcctaaaccgacggtttaaaacaattttttcaacgatgagcttttttcaagtcaaactagcgaaacagctatcagacctagacaaaacattagaaacacaatcatgatgatgatcttggtcgtctttagatggactattaggcatagatctaagcattcttggtgaatctaagctttttctcaagatctgtctcatgggagagatcaaatgtcctgtcggattcggtggtgggcttgaggatttgaacttattacacatgttcatgtgtctggccatagcttcct

SEQ ID NO: 172933 - DNA, 498 bp, Arabidopsis thaliana columbia
atgatctgccagctacaaatacgactcactttagggaaagctcgtacgcctgcaggtaccggtccggaattcccgggtcgacccacgcgtccgaaattctcagcttctatacaaacctttctcaattcttcttgacattagggtttcctctttctttgagagggctaaaaccctaatatatccctctcattgactaaagagttaagcctactctatctactttggaagcgaaattcaaagggtaaggtaaaagcccttgaaagaggaagaaagatacaagatcctcaaagaacctaaagatctaaaggttgtaagaagaaaaacaaatggcgtcgtcatcaaactcatacaactcaccatgcgcggcgtgcaagtttcttcgccggaaatgcatgccgggatgcatattcgcgccatattttccaccggaagagccacacaaattcgccaacgtccacaaaatctttggagcaagcaacgccacgaagctcctcaacg

SEQ ID NO: 172934 - DNA, 422 bp, Arabidopsis thaliana
gccgcgtacgtaagcttggatcctctagagcggccgccctttttttttttttttttaaataagaacagtgcatgcgtgtataattggggtaggtaatgttgtcccacacgacagtccatgcatgtggacaaatgagtggcggatgggagtaccacacgacactataaattgtatataagagagtaggatgagaggagtgaatacttttttattgggggggtgctgacaaaggatactggcttgatggatcgtatacctttagtgccaaggtgagaaaaggtgcgatgcgaccgctcctagtgacagagtagtgtgatgttttcatttaagaggactatgaccgtcgaatgcgtaataaccatttgagaaagtggggcaagtgtgtgtgattatgatgtatgtgtcggatgtaatagtcagcg

SEQ ID NO: 172935 - DNA, 533 bp, Arabidopsis thaliana
acgactcactttaggagaaagcacgtacgcctgcaggtaccggtccggaattcccgggtcgacccacgcgtccgaaattctcagctactatacaaacctttctcaatgcttgttgacattggggtttcctcttcctttgaaagggctacaacccgtaaatatccctgtcattgactaaagagttaagcctactgtatgtactggggagagcgaaattttttaggctgcgggtggaatgcgcctcgcagagaggattaaagattcatggaccctcaactaaacgctaaacaactacaaggtgtgtaaggatcaaaatcgaaatgactgtcagcatcaaacatcatgcatctcaccgatgcgcctgagtgcaaactttctcaaactcagaaatgcatagagtggcttgaatagtacagagccatatgtgttccctgtaggagctacacagatttgtggtagcgaaacacaataagttttattagcattcacgatcgatctctctcctcgagcgcgtagttctctttgcctatgtg

SEQ ID NO: 172936 - DNA, 252 bp, Arabidopsis thaliana
gcacgcgtacgtaagcttggatcctctagagcgttcgcccttgggttagtccttttcaacaaaaaagaagtttcggaagaatctccaacaggccgaaacgtactccccatcgcaatcggtccaattttataatactctggccatctcaccggcccacggccagcctctgctcgcatcttacacacgtttcttcttctatgggcggctacccgcctcatccccatccgttctgttcgacatagacatatctaa

SEQ ID NO: 172937 - DNA, 517 bp, Arabidopsis thaliana
  unsure (1)..(517): unsure at all n locations
atagnagagctatgacgtcgcatcgcacgcgtacgtaagcttggatcctctagagcggccgcccttgagttttttttttattaaatctttttgtgcataatattatcattgatacattggaaaaaaaaaagaagtaaccttatattagagactctaccagcatataagacataataatgatacaaatctgttgtgcatacataaaaatggttttgcttgttggaaatagaaagggcagggactccatgcggtgaattagggagaagtgttcataaggaggcatacggggtcctgaactagaactcactttgtaagacttgaaaaaaaaagtagatcgtctgggatatctaaacaagggcttgggagaacttgggaaaaacttacccacagttcaaaaaggaaccattgttttgggacttctctcaactaaaaaaagaacttttttttaggggaggggggagaagccatggttggaccgacatcgttgtggaagctgggaggggagcccgtagacagt

SEQ ID NO: 172938 - DNA, 507 bp, Arabidopsis thaliana
ctagaagagctatgacgtcgcacgcacgcgtacgtaagcttggatcctctagagcggccgcccttttgtttttttttttaaaaaatcctatagcgctagcgcttcgcgttctttctattttatctatctcatttcattccgggataggcggctaatactaatctaataagtgaagtagtcgtcgtctgaccaattgactcggacaccagaccgctcgtgcccgcccattctgtctcgccctaaatggaatggctctcttagttacgctgcaccccgacccgagtccccacgtccgctcttctccgtccgcaacctaagaagttggctttgccaacacaacattagggccgtccccttcattctatgctgaccccgcccggcccggggctggctttttgggaagcccgttcccaccgcgctcatggcccggttggcctgccagcggtagtgggaattatcccgttccttggtcaaagacttggttggatgcgggatctactccacgag

SEQ ID NO: 172939 - DNA, 514 bp, Arabidopsis thaliana
aatacgactcaccttagggaaagctcgtacgcctgcaggtaccggtccggaattcccgggtcgacccacgcgtccgctttttagcacgcgataggtcagcgaagcgtgagcgggcgcggagaaggaaaggccaaacacttcggccgaacgggaatgagcaacgacgaaatgacaagatgaggtgctccgggcacccccatttagatttagaaagaagggtcgaaggttttgggcctctagctttccccgtcccccctgagttgggtggtgcttgtgtggggggcgtgccaccagaaatcgggcttgaagctctcgccttaccaaggagccgacagctgatggctatggctgttggtcacgactactaccaaaaggttccaatgaagatgaatatttcacatggaggagtgtgcatctgtatgttgggtgttcttctgtcgtgcgacccggcggtttatgtgcgacctgtggcccacgcctcctatttgttcagggcgggcggcgtgaactctga

SEQ ID NO: 172940 - DNA, 494 bp, Arabidopsis thaliana
gcacgcgtacgtaagcttggatcctctagagcggtcgcccttttgttttttttttttttagcaccaaattatgtcatttattccaaaatttttcaaaagctcataaacacatatcggcataaacacatatcagaaacgcttttttcgttttacacgacgaaaaatttcaaaccaagaaaatcgggttttagatccaggaggtttttttaaaccagatgggtgtaaaacggcttttattaaacagatgagggttttttgcatgtcaaattatgagaaacatgttatagtatcctagacaaagacatttaaaaacactaatgtatgatcgatgattcataggtgcgcattgtagataggatctgttttgggtatgtattcttaaactttgcttgatacaatgctaaatctttctttctcaagattgtgtgcatactggtaatagatcaataggttctggtcagaattgttgtttagtgggcttaaaggtattagaa

SEQ ID NO: 172941 - DNA, 520 bp, Arabidopsis thaliana
atacgactcactttagggaaagcacgtacgcctgcaggtaccggtccggaattcccgggtcgacccacagcgtccgttaaatcaatgaaaccatagtctgcgagtgttctaagtgatcctacattgctgctttcaacaccgggaggtaatactgtgtctcttccagcttcgtgctacctcaaatctgtcggatatagatccagtattcgagtgacgtagagatctggagcatgtttaacccgaggtagtgttcctcaatgcgtacatattagatatgtcagtaacagcgttcatatgagtgaaatgagaccgtgtcgtactctttttgctgaagccttgcaagttatgaacgtcagagataaacgaagcttatctgttaaccgaccggtaagaacgttatgggtcctgacccaaagagacatgctgtgattatctcttcaaatcgctcaaagcctccccatccgtatgcatacaaggacatttttatctaatggacataagaaaagattctggatataaa

SEQ ID NO: 172942 - DNA, 491 bp, Arabidopsis thaliana
agggaaagacggacgcctgcaggtaccggtccggattcccggtgtcgacccacgcgtccgcacaatccttgttcttgccgaaatagagaatgttgtgaatctgggttcttagttgaggtgtttatataagattttgtagcgaaagacgacgagattgtgatgccgatccgatgtgtattgaagaagaactggcgaatcggtatttttcttgtcggggcgcgagcggatgtgaataggcatgcggaatgagcaatgtccccatgagtagggacgagtcacatcgctcattatgttgctggggtgggctcgtggttacttctggagctggctggttacagtgcgaagcattagccatgatgggatttctattcactgggatctatctgatgataggtttcattggttgggatgggatttgtttcggaggatagcgtgcgtgtgttgaagctctgaactgactggggacaatatgggccattggtgtgcagttt

SEQ ID NO: 172943 - DNA, 507 bp, Arabidopsis thaliana
ataggagagttatgacgtcgcccgcacgcgtacgtaagctaggatcctctagagcggccgcccttttttttttttttttttttttttttttttttttttttttttttttttttttttttttctctttttttttattttttttatttttttttttccggggggcattaaaaaagggaaacaacgaaactccttaaataaaaaacattcccccaaaaatttccaaaaaaaaggtggaccggaaaataaaacccccatttgaaaaccttccccaatgttggggggcgtttgaacccccctctcttttttaaaggggggctttgggccgaaaggaaatcttttttttccccttgatcccaaaaaagcccccccttgggcgggggggggcctggggaccccagaaaaccccccccgggggggggttcgaaaacccccacggggggctgcaactcctgggggggcaaagcttccagaaccaaaacaccgggctctggggtaaaaattgggggg

SEQ ID NO: 172944 - DNA, 505 bp, Arabidopsis thaliana
atacgactcacttgagggaaagcacgtacgcctgcaggtaccggtccggaattcccggttcgacccacgcgtccggaagaggtgaactggtagatgatgctaaggcaatagccttaaagtatctctattcttacttcatcattgatctactatctatccttactctaccacaaataagtagttttagacattcttccaagctgtcaaccaaccagtattcttttctaacacaagactaccttacattttccataatggctcaatatgcgaactcggactactgcgtatgtatacactttacactgaagggccatgaacactctggcatcgttactagaacattatggcctggtaactctcggaacctctctctctataaggcgccgaaccatgtcgcatcagctctatcttactaagtctaacgagagtcagaagactcatgctcgccgagccgctccgaagcacactcgacgtcgtacatcgcaccctctctccttgggaatcc

SEQ ID NO: 172945 - DNA, 394 bp, Arabidopsis thaliana
catacaagactatgacgtcgcacgcacgcgtacgtaagcttggatcctctagagcggtcgccctttgggtttttccttttatttatttttgttgtttgtttttttatttttctttttcttgctttagggcagggaatccaaccccttaagctaacccaaaattttctcgccaaggacatgatctccccaagtagtagaccaggcctgtttattacacctagttcttcttgggagaagtatttttttccgcgagagagagtgttttcggtcgaccgtcacataaaacagaagcccggcggagaccccccgcagtttcttttgtgcgcgacccggttgtaggagagcctaggcgcgcctggggcgcgacaagcgaccacctcgccctccgtccggt

SEQ ID NO: 172946 - DNA, 414 bp, Arabidopsis thaliana
tacgactcactttagggaaagctcgtacgcctgcaggtaccggtccggaattcccgggtcgacccacgcgtgcgggcgcggtatgatttctgtgaaacctatgagaataatgtgccaaattgttgatagacgattgctttgagccatcttcaagtgtcctgcggtaagattctgttttttctcaaggcacataactcgttagatttcgcgaaactgcgggtatacttgacggtgtactgcctatcatccgatcgacagcactcggtgacagtttcgagccttttgtctggctttgactatccatctgagcagtctttaaaggtcgccactgcccagcaccctggcttaccacttgcggcatttcattgttcctgtgttcgcttcctgctacttggagcgaagtctgcgttactg

SEQ ID NO: 172947 - DNA, 496 bp, Arabidopsis thaliana
cgcacgcgtacgtaagcttggatcctctagagcggtcgacctttggggtttttcttcacagaaaacatgaagccaacattaagattagtaggagagagaaacaatggccaagtacgtgtaaaggaaaagacaacacaccgaataaagtgttgggctacaaaaggggtaagggaacgagaacacaagtgtgtggggagagcttcttgttcctgtgcgttaggctagacatgagtcagcattgttcgcaggattgggggagcctcgatgttgcgaaatcccggatcgtggaacgtgagggggacgtataatgaggtccaggcaagggtggggacgcataattgtgctctggagaaccgatttgggtggatgattaagaatggatagataggtgtggatatagcgtgcatgttaatgtttgaacgtcgaaaacacagagtgtcggtgaggagcgtggtgagggccggggggaagatgatttcgggccagcgggtcatat

SEQ ID NO: 172948 - DNA, 567 bp, Arabidopsis thaliana
tcgcggccgggcgttggcgtgtgttggggtagtcctccagctacatacgactaactgagggaaagctactacgcctgcaggtaccggtccggaattcccggtttcgcccacgcgtgcgagcccaagacgagctccggtctcatttctcgttcttctgattgatagatcgctcggtacttggaaagcagtgtataaggcacggagggattagagtttcggcgaggatgcctatggtcgatgagcctttgtacgcggtaggtgtgcttatagagaagctaataaacgatgaccctcattccaaaattgacctgtctaatatggctttctaccattgttcaagctctgggacgagagctggcatgattgcgacgcgtatacatttcctttccggcagcattgatcagcgtttagatggcgccttccgctgctggcaacagagctcgtagcgcgccaacgccccgattcgtgcatgccgcgtgcattattactgacgcgcgcgggggcgtgactggcaggtcctactatatcgtgtcagtgttcgaatactggtgggcgccggcatggacc

SEQ ID NO: 172949 - DNA, 489 bp, Arabidopsis thaliana
atgacgtcgcctgcacgcgtacgtaagcttggatcctctagagcggccgcccttgggtttttttttttttttttttttttttttttttttttttttttttttttttttttttaggggggggaacatgcattaattaagcaaaaaaatttacagcttttaagttccttttgaaaccagttttatttaccattttttttattgaatttttaacccaagagtaactttgaagagcttccaaaaaaaaacttccctgtaatcacttttttttttttgaaacactttttgaaagcgaaaacccgagaacggggaaagaaacccattagggacggaatccctaccacatgggcatgctctttaaatgcgggtgttgaaaagtctaaaatccaaaaggcttgcttaatgtagagggttcccggtttttccatagggaaggatgtcgaaaaaatcgtaccgtctggggcgcattgcaaacgcgtataaggagagaag

SEQ ID NO: 172950 - DNA, 535 bp, Arabidopsis thaliana
  unsure (1)..(535): unsure at all n locations
gtgcccctctagnagagctatgacgtcgcatcgcacgcgtacgtaagctaggatcctctagagcggccgccctttggttttttttttttttttttttttttttttttttttttttttttttttttttttttttttttgggggggaaaaaaaaatgaactttcggagtttcaaattttgctcttttgctttgggggaagtccccccccggcggacaaaccaaaaggggcgggaagaaaccaccggcggtcctccgaaaaggaaaaaacccccccgcccccccccccttaagaggaaaccaaaaccccccgccccacttggaaaaccggaggaaaaaaggggccccaaacccccatgatgcccccagggcgggccccccaaacgggcttgggtgggggaagaagaaaaaaaaaccctggcttgggcggctcccctgggaaaaaacaaaccctgcttgggagaggggtggaaaaaaacacccccccccttggttgtcccaaaaaaaaggtccccctgcacaaagagggggggcaccct

SEQ ID NO: 172951 - DNA, 512 bp, Arabidopsis thaliana
aatacgactcactttagggaaagctcgtacgcctgcaggtaccggtccggaattcccgggtcgacccacgcgtccgcaaatctcaacattcgaatttttaaaaattcttcaaaatctcttcttcaatggcgacgggaaagagttactacgctaggcctagctatcgatttctcggcaccgatcagccgtcttacttcaccgcttccgattcaggtctcgaattcgacgaatccgatctcttcaatccaatccactccgattcaccagatttttgccgcaaaatctcttcatcagtcagatccggtaaaaaatcgtcgaatcgtccctccgccgcttcctccgccgcagcagcgtcgtcgcttcctgttaacgtgccggactggtccaagattctccgcggagaataccgcgataaccgacggagaagcatcgaggataacgacgacgatgacgatgataacgaagacggtggcgattggttaccgccgcatgagtttctggcgaagacgaga

SEQ ID NO: 172952 - DNA, 505 bp, Arabidopsis thaliana
atagaagagttatgacgtcgcacgcacgcgtacgtaagctaggatcctctagagcggccgccctttttttttttttttgatttattgattattctattaactagtttttttgaagactttgttcacattttgagtttatatgcacaagtgaggaaacacattttgttttggacatgatttgctgacagaaaactagggaaaaaaaagagagccaacactatgtaacttacacattattcacaactataaaggggaagagttaataacattatctagagacaataagaaccgcgcgaaaaaggtggcgttaagaggaggatcaagattcatttttggtggatgggatgaaaaggtgcggggagcaaatctcacatgtggaggccttgccctcacgactggctcatcaacaaagagggccttgaggaaagatggagttggcaaggaacaccgatccgtcattcggggatacacaaatgccaataatgagtctgaataacccgctaag

SEQ ID NO: 172953 - DNA, 503 bp, Arabidopsis thaliana
gcactaatacgactcacttagggaaagctcggtacgcctgcaggtaccggtccggaattcccgggtcgacccacgcgtccgtatggtgatcttagtacatcgccactctatgtttataagaccactttctctgggaaactaagtcttcatgaagacgatgaagagatctttggagtgttctctttcatcttctggacatttacactcattgctctttttaaatacgttttcattgttctctcagcagatgacaatggagaaggtggaacatttgcgttgtactcgcttctttgtagatatgccaagctaagcattttaccaaatcatcaagaaatggatgagaaactatcaacatatgcaacgggaagcccaggagagactcggcaaagcgcagcggttaaatcattctttgagaagcatccgaaatctcaaaagtgtttgttgctctttgttcttttagggacatgtatggctattggtgatagtgtcctcactccaacaat

SEQ ID NO: 172954 - DNA, 504 bp, Arabidopsis thaliana
tagaagacttatgacgtcgaacgcacgcgtacgtaagcttggatcctctagagcggccgccctttgggttttttttttttttttttttttttttttttttttttttctgcatctatatctcctttttcttcgttatataaactcaagtttaaagggattagtacagtattagctgattttattgatgactactaaaacaaattttagtatttgttttataagaagggaaaacccctaggatctttgatggcaacactttaaatatattgggatgcagttgggcgaataaccatataagcccccaaacgccccctcctgtctgaattcacccagttagccatcccggctcgaggtaccgcttctgctctcctgagttcaccacctgtcgaacaaattgttacctttaaaaagtgatccacactgaatgcctaggaatccgggcccaagaagccttcgtcattcccgcagactcacagctctattcgaccaccgaaaggaaacgtc

SEQ ID NO: 172955 - DNA, 519 bp, Arabidopsis thaliana
atagaagagctatgacgtcgcacgcacgcgtacgtaagcttggatcctctagagcggccgccctttgggttttttttttttttttttcaatcagattcaatattgctataaaatttggttaaaacccgaataaaatccatatagcagatatttgagagaataaagggttattaaccaacagccaaaaaaacaatgcttcgagatttatatatcaatcttgaataatctgggataatgatgatgagagaaacttacacactctctaatctttcttcttgataaaggcaaaggctcctttaggaattttgctcatcaccttactcaaaaccttgacgttaaactccacgtattgcttcttgatctccctaatggccttttcaccaaaggcatctactttatcttcatacttttggaaaagcacgggaatcgtgaagagaagtacagttgcgatgtaaattaaggcgggaccgtgggtcgacccggagaatttcggaccggtacctgagggggaccagcttt

SEQ ID NO: 172956 - DNA, 509 bp, Arabidopsis thaliana
atgacgtcgcacgcacgcgtacgtaagcttggatcctctagagcggtcgccctttgtttttttttttttttttttttgttttttttttttttttttttttttgggattcaaatctctccttatgcaataaaaaaccttattggaatacaaacataagtttcttgaatcaggttatattctctttaaacagatacattcttgctcttttttttaagagtgggtgcatcagggaatacttttttccagaaccaatggttactccataagagggtcatctcttctattggaactcctttggtttcaggcgacaggaaatacacaaagataggctttactggcacccaaccaggtaagaagaggaagattcccaacttgactggccagaggagaccaaggaaaggttgggctttgatgaaagggaagaggagatttacagctactgggatactctgccccgctgaacgagtccttaaccgaaagatttcgctaggtctgggcccacctagagg

SEQ ID NO: 172957 - DNA, 448 bp, Arabidopsis thaliana
atagaagagttatgacgtcgcctgcacgcgtacgtaagcttggatcctctagagcggccgcccttttgttttttttttggttttttactcgttctccattattaatttatgacgtttaagaaagactcacaaacaagatgaataaatgatacaaggggattttatggcatatgcagattttgtttatgaagaataatgtaacaaattgacattgattttctttccacagtgcccactatgctcaagaaaagactcgttaaaagcagaaccaaaagggggggatggctctttaagggcaatcaagttaggaatctaggagggagactcgcagtctagtcagggtggattggaatcgctgatctattagcagaggttcagtcgatcggagatggggaatgacgaacggatccgcggttatgttttggattatataatctggttggcgtta

SEQ ID NO: 172958 - DNA, 531 bp, Arabidopsis thaliana
tatagaagactatgacgtcgcacgcacgcgtacgtaagcttggatcctctagagcggtcgcccttgggggtgattttttttttaatttaacacctatgatttaagtctgggtaaataaagtgcaaaggataaattctgctgtaacatatttgttggcgtagctggctggccggaacagaaaatcggagacagagtgggctttgaggatgatcaagattatttttttaggggaggagtaaatagggtaggatacctgtttagatagttcgtgatataaggatagagagaggagccgagacaaatgtagattaatggttaactataagttaaatggttggttgataccttcatgactaggcttagtgttgagtgccgtcttttgaatgattgggaaggatccgtagcgttgggacgggcaaagtcggatgtggttatgatcctagtgggcatgataaatgttactgaaaagaagcgacgaaagaggaatgactaatttattaggttggtatatcatgatatagaagtatatat

SEQ ID NO: 172959 - DNA, 577 bp, Arabidopsis thaliana
tgttattgactgaaggagtattgtagtacctgccagctaacatacgactcactttagggaaagctgcgtacgcctgcaggtaccggtccggaattcccgggtcgacccaagcgttcgcccacgcgtacgcggacgcgtgggccctgcaccattaagaaacgctttcaacgatgtttacatcgcgtatgagttaatggacctagatctccatcaaatattcggtcaaattaagcattatccgaagaacattgccagtattttctttaccagatcctccgtggattgaatcacattcactctgcaatggagcttcgcaagggatttgagatcaagtagtcttctgctggaacgcaactgcgatcgtttaatgctcgatttctgtgtctaactacgagtcacttcctgagagtgatttcatggactgtcactggtggtctgagaagggcgcgtgaaccatagttttttctaaactctttctggatcgtactgctcctatgcgaggtttagttctggagagctgatcttcatgtgagttatgaggatcgtcttcaattctttcttgataaagatgatggtt

SEQ ID NO: 172960 - DNA, 502 bp, Arabidopsis thaliana
acgcgtacgtaagcttggatcctctagagcggtcgcccttgggggtaaaccttttttatttcgttttttttctttgaaggacacaaaagaaaaccgaaagagtcactgtctatagcatttgattacaattgcaaaatccaagaaaataaagtatgatacaattcgaggactaagaatgcagaagggcgaaacagttttttaacaggggtacaaccaggcataatctccgattgtgaaaaaaaagagaataacaaaagagggggagtcgaaaacgagaaaatagagcacagagagcacgtacagggaggtcacttagacacagacgcagacagccttggaaatacgccgttaataggatgataaagagtatacacaataacgacgcgatacagaggaatctaggggggagtaatgcagaagaagccttatcatgatcatgtgcatcgtttggatacgcctcgcagctaaacggagggagggaacattaggcattatttctctc

SEQ ID NO: 172961 - DNA, 496 bp, Arabidopsis thaliana
tggaacgcacgcgtacgtaagcttggatcctctagagcggtcgccctttgggtttttcttttttttttttttttttttttttttttttaaaaaaagaaagaagattcatgacatttacgatgggttacaggattatttacatccactcgaaaacgaatcagaatttttcctatgcaagtgtgaacatatatatatagatgtttttcgttcattactaaaacaaaaccaaacaagcgagaaatgtcttcttcatttctggattggagctctgaaatcacacatggtatacgggctaacgcgtctcgaagaggacacgacaaatgggacactttttgccttttttacaacatgtgctcgaaaggacttgatgtttactggggagaaaatccacgttgatcggattttcaaaacaaacttttacagagaatctttggggtttaaagcctttaggtcttttgcgggctatcactggggatttgtgttagctcacttaagg

SEQ ID NO: 172962 - DNA, 532 bp, Arabidopsis thaliana columbia
atgatcctgcaagcatcaatacgactcactttagggaaagctcgtacgcctgcaggtaccggtccggaattcccgggtcgacccacgcgtccgatttttattcacatacattaaaagagaaaataacccttaataatgcatttgccaatttacactagcaaagtcgtgtaactcgtgttgtatccaatagattactttaatattgatggtggatttgatagatgaaagttacatgtctaaggagcatctagacacggttatagattggataccatcaatgaagaatcttaggctaaaagacatccctagcttcatacgtaccactaatcctgacgacataatgctcaatttcatcattcaagaggtggagcaatccaaacgcgccagtgatcattctcaatacgttcgatgatcttgatcatgatcttatacaatctatgcaatctattttattacctccggtttatacgattggaccgctccatcttctagcaaaccaggaaattgacgaggttagtgaaataggacggat

SEQ ID NO: 172963 - DNA, 503 bp, Arabidopsis thaliana
gtgcactatagaagagtcttgacgtcgcatgcacgcgtacgtaagcttggatcctctagagcggccgccctttttttttttttttttttttttactgaaatggtggtcctttcttctctatcacaccccggagatcacaaacgaacgaacaagaagctaggtaatatttacaattgttatgtatatctatatgatcgcacaagggcaaaacgaacataaccaatacgacaaaactaagtggaaatgtggagacccaacacttaaagtgtgtgaggaagaaacaaaatagatgtatgctaattatgtagtagactaaccaaacaaagcgccacaccttcaaactttcaagccaggggatagtaatgatgctagttcaagcgatcatcaaacacaacttccttatcacatattgggcatctatcgtttctttcaatccactccagaagacaagagaggtgaaattcgtgctcacactttgtcgttagtcttggattctcaacatc

SEQ ID NO: 172964 - DNA, 477 bp, Arabidopsis thaliana
gcacgcgtgcgtaagcttggatcctctagagcggccgcccttggggtttttttttgttaattatataccggtttttttgtggttgcgtaacgtgggaatgtttcaactcaggacacaggattatagaatcgggaactggcgagtaatgtgaagcgcgcgcgcacgaggaatgacagtacaatataggtaaacctttttttttagaggaggtgcagccatactcggggtcccaaggagaacgttactgtaagcacttgacgtgactgaatcgggggtagatggcgagggggggggaggtgaagaggatatgtagaggttttgtggttaggtagggaggagtgttaatatgttttggcggattggctgtttgcgagtttcgttgttagggggatggggaaatgaggttaggtcgttcgtaggacgagctggggacggcgtggggttgttgaggtgggtgctggggtgggggcggataga

SEQ ID NO: 172965 - DNA, 440 bp, Arabidopsis thaliana
tacgactcactttagggagaagcacgtacgcctgcaggtaccggtccggaattcccggttcgacccacgcgtgaggcggcgccttagcatgaatcttgtgctgactcttgggcgaaggcgtgggtgcatataggccgtagactctgattgtagatgatgtaactccagaggatagagatagactaccaatgagctgatcctgttgtggggccattgaatttttttcgcggggggaagtggtgcctgactgtgatcacttcaagaagagtggatactggttcgtgtgggatggggatcgagggtgggtatgtgtggcgactgtccatgatgaaactgggtgacatagaggtaaatagattaggtattagctaatgaatctcgctgagactatgcggagaacggtaagaactaggcggacttcggtgagcttgaggggatac

SEQ ID NO: 172966 - DNA, 506 bp, Arabidopsis thaliana
ctatacgagagttatgacgtcgaacgcacgcgtacgtaagcttggatcctctagagcggccgcccttgggggtttgtttttttttttttttttttttttttttttttttttggattttcaaaaaattttcatatttgggagaaattatttgaacagggcctattctttttaacaaaggacccaaacccaagtaaaacaaaaaacaaaaatagttcacttttttttaatcggatgaggggcccggacacttcttgaaacgttttggaagacccagactgcctgaagccgccattataaaacttctttcgcggggggaagacctaaggtgcactcccccaatttgggccttaaaccagggaaaattcgggaaacttcagcccataaaacctaaaaaagtgaaacgactccttccttgggttccccaagggggaactttcttgaaagaaacccactacgcggggcttgggggggccaaaggggggctcctggggggcccacaaataagt

SEQ ID NO: 172967 - DNA, 534 bp, Arabidopsis thaliana
gatctccagctacaatacgactcaccttagggaaagctcgtacgcctgcaggtaccggtccggaattcccgggtcgacccacgcgtccgggtgttacttagtctcaatcttctctttgtctttgtttcatgtgcttcttccatagagtttgtttaccctaatttcacagcttctaacctcagattcgtcgatagctccaaaggagctttcctcttgtctcgtaattccatcttcaaagccggtttattcagtcccggcggcgatgattcctctaccggtttctacttctccgtcgtgcatgtcgattccggttcaacaatctggtcatcaaatcgagattcccctgtttcaagctctggtacaatgaatcttactcctcaaggaatctctgttattgaagatggtaaaagtcaaataccagttggggcaacgccgggtgtagcttctgcggttaagtcccttcggttaaccgacgccgggaatctccttcttcttgatcaccttgaacgttgctctatgggaaagcttttgatt

SEQ ID NO: 172968 - DNA, 510 bp, Arabidopsis thaliana
actatagaagagtctatgacgtcgcctgcacgcgtacgtaagcttggatcctctagagcggccgcccttttgtttttttttttgttgaaaaatatgaataaattacagaaatacttctacaaatagaagaaacgatgaatacagatctcactgattacacacgaagccctcgtattcacttattcttctaccctcacaccccttaacactccctcatgaacatagactctatggggatactaataaatatgaatgatcaaacccaattatgaaatacatattttaaaaagactgataaaaaaaaggaaaaaaggaaaaccagaaagaaggaataaaaagactatctgtatactaagttctgacagctttaagtaaagttccccatgtgagaaaaaacaaaggatcatcaagtggcaactatatgaaggagggcaaacgaccctatagggagatgactgtgtgtgttggatgagctgttttgacccgtttttgcacatgaagattctgctg

SEQ ID NO: 172969 - DNA, 521 bp, Arabidopsis thaliana
actatagaagactatgacgtcgcacgcacgcgtacgtaagcttggatcctctagagcggccgccctttgggttttttttttttttttttttttttttttttttttttttttttttttttttttttttttttttttgggagcaacagtttttgcggattggaaatgaaaaaaaacccccaaagaagtttcatgggtcttaaagccctcgaactgggaccgctcaaacaaaaaaaaatttgggggaaaaacaaaaagcgggtttatggagccctgaagccatcaagggggggggaaaaaggggggaaggggcgatcccccttagaggttaagcctcttgggacaaaaagtggggtgctccggggggtattaagggcctcttcccaaaaagggaagggcggagaaaaaaaaaactacctttccgtggaaccctggggcccggggggcgataaggaactccacaacgggagggggggaaaaaggagggtatctcgggtggaatggaatatgctgccgggggaaag

SEQ ID NO: 172970 - DNA, 494 bp, Arabidopsis thaliana
ctatagaagagttatgacgtcgcctgcacgcgtacgtaagcttggatcctctagagcggccgcccttttttttttttttttttttttttttttcgggaaaaaaattcactacaagaacaaaccagtcgaggatcagacaaacgagaaaaagctaggtacggtttaagacattttcttacaacacaattaaagagaggaaaaaacgaagcaggacgattctttaaacaggatttatagaagcaagcttacggcttaataataacacagcgtgtgtttgtcttacttgatgtattgagaaacccatttgaaaccttctccgtaacccattttcctgacaatgctgcacatgaaaacctccaatggcctaacgttcgaatccgttagattcactttaccctttcctgtaatgaagttggagaggccgaaatggtaacggagctcgtcctctgatgcagcatacggtatgtctatcttgtttcctagaatgaggaatg

SEQ ID NO: 172971 - DNA, 529 bp, Arabidopsis thaliana
ctacaatacgactcactttagggaaagctcactcgcctgcaggtaccggtccggaattcccgggtcgacccacgcgtccgcccacgcgtccggtttacttgacctagacgcagccgtttgtctatgtaccaccattaagctcaaacttctcaacatcgaccttgttctccccattgctcttgagcttcttctcgactgtggaaaaactccaccatctgacttcaaatgtcccgcttaatcgatgtagaacgttgagagtctctggacgactccaaaagtttcgtttcttcaagaaatttgttagtctcatgatctatttggtaatgggaggttaatgtgcatatgtgcgacctttaattacatgtttcatttgatgcaataaaaggcgttgtaattggggtttgagatcgaatgtcgtttgggctttcttggtatgttgtgtttttaagaagaagaaagaaagactggtaaacgatataactttctttttaatattgaacaagttgtgataaaaaaaaaaaaaaaaaaa

SEQ ID NO: 172972 - DNA, 491 bp, Arabidopsis thaliana
cacgcgtacgtaagcttggatcctctagagcggccgccctttggtttttgctttttattattagtaccggcgaaaagattcacgtagtgggacaaaccacacgaggtacagcctgacgaaaaaaggttagaagcaggttgacgacattttcgttacgtacgaagttgaacgagaggcaagaacgaaccaggaggattttttttttgggggggatgagaccaggcttgcggctaaaaaagaacccatgagggagaagtgcgcactgagaaagaagcggaaaaacctgtgttgaaccttctcacggagaggactggtcgtaacagagggtagggatggaagagcggcgaggggccttaggtgggccatggggatgaggacggacataaaagcgttgcgtgtattggaagtttaggagggccgcggctcggcgtcagttgcacggctggtgggagatggtgccaggtgcgcaaggcgggcgcgctgaagtgtgg

SEQ ID NO: 172973 - DNA, 518 bp, Arabidopsis thaliana
atacgactcactttagggaaagcacgtacgcctgcaggtaccggtccggaattcccggttcgacccacgcgtccggatctctctctctctctctctctagaccggataatatcggaacatagatggctcgaggatctgagttaatcatgtacatgatcgattgattctatggcattgctctctgtagtagggctaagtcatacagaggcctagatcttgtttttgggacgggggaatgatggtaaaaccactctgctagacatgtcggaagacgagagattggtacagtatcaggctacacaggatccaacttctgaacaactcatcattgggaacatgaagcgtaaagcttttgatttcgtggtgctcatcagattactcgcaatgtactgtaagattactcttgcctaaggcgggatgctgaggggctaatctaggccagtgcttacaacaaacgatatatgttctaaactcatgagcaggaacttgatcccctttctcttaagactaatgacgta

SEQ ID NO: 172974 - DNA, 465 bp, Arabidopsis thaliana
actatagaagagctatgacgtcgcatcgcacgcgtacgtaagcttggatcctctagagcaggccgccctttgggggttttttttttttttttgcgaccctggtgttcagtttgggtggctgagtggcgtggccaaaaaaaagaagaagaggggagagcttgtggggaaaaaaaacaaaaacagggggactgttggggaaaacgcaacaataacctgtggcggggtaatttggaacgggaggtaatcccccgccggggcgaaaagagaaaacatagtcttcgcggtttgaaaaagagcggcgactcctgttggaagtgggacaaaacatggatagaaggtgggtggggctcgttaaacacgatggatgcgtggggggcctccgccgcaggaaagggcccaaaaaggagcgcggatacctatcgtggcccggctagaaggagctttccatcgtgtgggggcggttaa

SEQ ID NO: 172975 - DNA, 497 bp, Arabidopsis thaliana
  unsure (1)..(497): unsure at all n locations
ctatangaagactatgacgtcgcatgcacgcgtacgtaagcttggatcctctagagcggccgccctttgggttttttttttttttttttttttttttttttttttttttttttttttttttttttaaaaaaaagcattgggggtcctttttacttggctcacttacccttatgcataaaagcttttcaatcacccctttaaaggatccaccaaatttaacccctttgatccctaaaaagaaggggggaaattccctaagggtccatgcggggacgttgtcgtcgttaaaaaagttgctcattttgtcgtccccacggggggggacgggaatgttcccgggacggtcactaagggtggacccatggcgaatagagttgtacctctccctaaacccggggggggtatttttgaaataatggccaaaggaagggaaattccgagggctttccgggtagggccaaaacttgggtctgttaccggttcttttcaccggcttg

SEQ ID NO: 172976 - DNA, 592 bp, Arabidopsis thaliana
acgactcactttagggaaagcacgtacgcctgcaggtaccggtccggaattcccgggtcgacccacgcgtgcggggatattccttaagcatggtatgagatggtagattatttgtcgtagatgtgtggtcgttgctttgcttctagccgatcgtctgcgggataacgacggaggctggaggaagagtctcgctcttttaggtacgctgtctcggcggaccaggggcgtacttttttttgtgtcaggggcaggaaagtcatgtcagatacctacggagcagaacacgaactagcatcgattttggagtagaagttgtatatgtggtacgaatgagatgcctagaaacacctgcgaggccattgggagcgtgcaattggacgcgtgtcggtatgcctgtgattctagttcgatatgaagtttgagttgcatctctttcgctgtttcagggcgcgctcactatcgcttggtgattctagtttcgtggggatactcttgtcattcgccaatatgtgcattgcatgtagcagttgaagatacgcttatgtccgagagttgggtcgtcattgtaggtgcgttgataaatgaggaaagg

SEQ ID NO: 172977 - DNA, 535 bp, Arabidopsis thaliana columbia
atgatctccagctacaatacgactcacctaagggaaagctcgtacgcctgcaggtaccggtccggaattcccgggtcgacccacgcgtccgctaaaaccttaactttttgctcttctccctccgcctcaatcgcacgaagacgataatcgaatatggcggaactaaagctatcagagagtcgggacttaaccagagtcgagcgaatcggcgcacactcacacatcagaggactaggtctcgactctgccctcgagccgcgagctgtttccgaaggtatggtcggtcaagtgaaggcgcgtaaagccgacggtgtaatccttcagatgattagagaagggaaaatcgcgggtcgggctattctaatagcgggtcaacccggaacgggttagacagcgattgcaatgggtatggcgaaatctcttggcttggaaactccttttgcgatgattgcaggaagtgaaattttcctattagagatgccaaagacagaagctttgactcagtcttttcgtaaagcgattgggggtaggatca

SEQ ID NO: 172978 - DNA, 477 bp, Arabidopsis thaliana
acatgcacgcgtacgtaagcttggatcctctagagctgccgccctttgttaatccttttttttcttaagaacctacaccatgcaataacgtaaaccactattcaaccaaaaatcgaggagtgatagataacactgaaaactaaataagaaaagcatgaaggaccgaaaagatttaagacgaaatgcgccacatactttttatgagagcgctgcattacatacggcatatgcgtggaagcgacacatatcgacacatcgccaagtaacatgaagcacgacaaaaaaaacgaactggaaacacaagatggaacagcgcccatggggtaaagcaccacactaggtgccgaaggacgaggggagcaaacccggaagccccgggaccgcagcatggagaagactcagatggaccaagagggggagagaaaggaagagtgggcgggaaggaccgaaaccaccggggtcatgaggaaaagggag

SEQ ID NO: 172979 - DNA, 465 bp, Arabidopsis thaliana
ccgacactttaaggcaagacggtacgcctgcaggtaccggtccggaattcccgtgtcgacccacgcgtacgctctcgctatggacagggacaacctcaatctgctcgctatttgatgtgggctaacacggagactctgtcatctcttctctactatatgtcttctccgtagattgcgcgccccacaaaaatgtctcatgagagggagagaggtcataatgatcgggcggaacattctctggtatgccttacgagtccttcatgaccttctcataactggagacaaaaaaatccatgtacggtcgatttgatggaaagaggaacgtgaaccgaattcgcaagcgtaatttactcactaaaggatacttctatcgaggggggtcgctgctaatgatccaacccaacgacacgagcgatgctaagaataactgcttagagggaaccgaaatgcaatcactgggcgcgt

SEQ ID NO: 172980 - DNA, 521 bp, Arabidopsis thaliana
  unsure (1)..(521): unsure at all n locations
cgattgatttaggtactactatagnnagattatgacgtcgactgcacgcgtacgtaagcttggatcctctagagctgccgcccttttttttttttttttttttttttttttttttttttttttttttttttttgggtttcacaaaattttcatttatctatctgtctcaaaggtttttcaacctttttcccctgatataggcaacaaacaaagtctcaaacaaaacaacccaagaatttttatcccaggaaccccccctaattgaacttgtgctttaaccccaatctaaaatctcatttgttcaaatcaccgaactaagaaactcaacccaaatttggtctggtctctttggcgccccaccgggaattgctcaaccggtgtgtcgnccctttgctatgcaccgccttggggaactcttgggaagcccgcgacgcctccttgagaaactttgaccgaactcgcccttaaaaagaaagaacttagaatcaacgcgcaatattatgtggattttaaatttagcc

SEQ ID NO: 172981 - DNA, 502 bp, Arabidopsis thaliana
cactatagaagatctatgacgtcacatgcacgcgtacgtaagcttggatcctctagagctgccgccctttttttttttttttttttttttttttttttttttcttaaaaacttcttcacacatatattaatataaagatatgtttcttaattaggggaattacatagcgtttatgagtaaaacttgtatccttttgcttgaataacgattgtccttatctcttccaattggcgatgggaccatcaagaaaagaccaaacacgatgcatacccagttggcccaccaagacaagctgtatttcttgggtttgtagatggctaaccaaatgacgcaggggaggaagtatgtggttggggcaaacgcgaatccaccaaagaacgccaaaagcccaccgaagaacgggaacgtcataccaacaaacatagttgcagcaacgtagaatttacggacaaagaaccgaagagttggggttggtctgaaatttagcttcttgaccaataaa

SEQ ID NO: 172982 - DNA, 504 bp, Arabidopsis thaliana
  unsure (1)..(504): unsure at all n locations
atacgactcactagnagggaaagaacggtacgcctgcaggtaccggtccggaattcccgtttcgaccacacgcgtccgcgccgggtacaaattagatggggagaaggaatggtgattagtgggtaaccaggagctcgcggggagaacagtttgcgtgagtatgatggtcttaatcaaggggagggtgagaagcgagtcggagatagggggggccgaggacgcgggtaggggagttttttttttggggggtgggcattgaggaaggtgagcgtggagcgggggggattagaggcggtgtggagatataggagggtgggtggaatcatagccggtggggggtgagtcggaaggtgggctctcggaggggagggagaaaggggcggtcgcagatggagagcgtcgaggggggaaggagagggggaggcggcgacagagtggagtagagcacgccgaagatgtcacaacgccggagctgccaggaatcaggagatgttaagcgaggga

SEQ ID NO: 172983 - DNA, 328 bp, Arabidopsis thaliana
  unsure (1)..(328): unsure at all n locations
gggaaagacgggacgcctgcaggtaccggtccggaattcccttttcgacccacgcgtaacaagcctatcctatatcatctatctgcgctatacatcagcctaggcagcgatcgagagttgagacgcagcgggcaggtggtgagactgatgcagagagcttgaggcgaagctggagagtgtgagagtagtgaagagacagagagcgaagggcaggagtggggtttttttctcgggggaggganacagatgctgagggagaagaacttagggaagagaacaagaaatagagaggagaggaaggaggcgagaggctgaggaggagagagag

SEQ ID NO: 172984 - DNA, 492 bp, Arabidopsis thaliana
actatagaagattcttgacgtcaactgcacgcgtacgtaagcttggatcctctagagcgtccgccctttttttttttttttaatataatctcttattctataaaaaatataacctcatcataacaaaaacattaagcgttatagaaattgtaggtccctgaatatatcattacgacaggctacagaatccaatgaaaagtttgttcctttttcttttttggtatcaccttcttcaagagttgaagctttgtgctgaagctttcttgagctcaagagctcgtttataaggcggtgcgatcggaggttgaatcgggtccaaactctggtatgatgatccatctgcttctctagggagtgggtaagaccggtctgagtcataaccggttaagtcaccacatgccaagaatggtatataaactttgttgggtccttcaagccaaccactactgcaatcgagatcgcttccacctgaagggcttccgactttctcca

SEQ ID NO: 172985 - DNA, 503 bp, Arabidopsis thaliana
  unsure (1)..(503): unsure at all n locations
cactatagaagagttatgacgtcacctgcacgcgtacgtaagcttggatcctctagagctgccgccctttttttttttttttgaaaaaggaaaaacacanntccttatcgaaatcanctagtcgaagtcgcattttgtcagataccctattgttttaacttcaaactctaancttccaagttnctataactataagaaaaagaaaacaaaccccaacagctaaaagtatatttaaagaagcaacatttgagatctcaacctctgtgttgttgagcatgaagtgattgtttgggctcagcaccacgcaatgtaccaatccaagctggtggctgcatccctgtctgctcataaaccgtatcaagaaccggtggtaacatcttgtagagtccagcaatatcgttcatcgtagctttaccaccaccgttcatcccctgctcagcaccaccatggttccacacgctgatcttaggctgcaggtccctgatcgcaacagcattggtctt

SEQ ID NO: 172986 - DNA, 486 bp, Arabidopsis thaliana
  unsure (1)..(486): unsure at all n locations
aatacgactcactannagggaaagacggtacgcctgcaggtaccggtccggaattcccttttcgacccacgcgtacgcccacgcatccgtgaggtctctgatgtgcattgcatggtgggaggcttggggaggcgacgaggctacgggcatgtcaggtggttgggcggggagagaggtgcacacgggcggtgtggttgatggacgaagttgcagtgcatttttttttccggaggtggggagaagggagaccgcgcagtgacggggggtgtggggacagaagtggggggggatgagggcgagaaagcggtgagttgctcgggcgggggagagcacataggcggggggaggtggagggagggtgtagggttgcagaggagggtgaaggcgggtgggtgacggagggggaggagagaggggtgccgcgcgggagagtgagggcaggtaggaaggagggtggcggagagggggagggaggatagaggaggg

SEQ ID NO: 172987 - DNA, 476 bp, Arabidopsis thaliana
actatagaagattatgacgtcaactgcacgcgtacgtaagcttggatcctctagagctgccgcccttttttttttctttttttttttttttttttttttttttttttttttggagcatttaaccattacatatatctgtcaactgaaaggttctataacaaatctaaaatagaattccatttgataagaagaacatgaaaacacatttagaaaagtttttttttctttgaatcgaaaatctcaggaaaaaaaatttatcaaaccgccggataagggctgctgctatgccatcctttagtgcaagggggtatttccatgaactcgtcaaactccttcacgtgaacatcgcaacatttccaccctttcagtctgtcggggaaaaccccaagacctggaggatggtacatgcaagccaaagattcgctttctctttgaatggtgggccaaatcctttgtttttgcaaacttgggggtga

SEQ ID NO: 172988 - DNA, 522 bp, Arabidopsis thaliana columbia
atgatatgccagcactatacgactcacttagggaaagctggtacgcctgcaggtaccggtccggaattcccgggtcgacccacgcgtccgatttgattaacaggcttcttgtccatgagccggaaaagcgactgggggcgaacggtgctgcagaggtaaagtcgcatcccttttttcaaggagttgactgggagaatcttgctttgcaaaaggctgcttttgttccgcaacctgagagtataaatgacacaagctatttcgtatcacgctttagtgaaagcagttgcagcgatactgaaactggtaacaacagtgggtcaaatccagattcaggagacgagttggatgaatgcaccaacctggagaagtttgattctccgccttattatctctcgctcattaactcttctttcaagaatttgtcacaattggcttcaatcaatcatgatgtgctattgcaaaaggatccagctaaaggaggaggagactcaccctttaaaagccatggaacgtacagctctc

SEQ ID NO: 172989 - DNA, 562 bp, Arabidopsis thaliana
gactaatttaggggaagaacgtacgcctgcaggtaccggtccggaattcccggtttcgacccacgcgtccgcccaggcatacaagattagttagcgagaatggtgagtgggaggtatggtaggagcggtgtggagaggggataaaaattgtggaagtgtttattgggaggggggggaggaggtgggttatgaggagagagcgggagggtggagagaattttttttatcggggggggtaacgggagagagaaggaggaggtgagggagggaaggtggcgtatgagagagtggaatagaggggcggaggtgcgcgagtgagagaggagcacaatgggatataggagggatgtgggggatggggcggttagtgggagggtgatggggtcgatgggtgtgtaggggcgcgagggaggagagagccgtaggagggtggggtagaaagagaggggagtgtgagagggtgtagggtggagagacgggagagagggggtgattaggggggtgagggagggggagagagagaggtaggtctagatagtggagtggagggggaggatagggg

SEQ ID NO: 172990 - DNA, 507 bp, Arabidopsis thaliana
  unsure (1)..(507): unsure at all n locations
taggtacaactatangaagattatgacgtcgcatgcacgcgtacgtaagcttggatcctctagagcggccgccctttttttttttttttttttttttttttttttaaacaacaacaaaaaaagcttttagaaggaagctatgcatgagttttacagagagaaagcttttgctacatatgaaacctaatcaaaccttattattcattattcatattcaaaaccattgtttttccaccatcaccttcacaaagcaagcttattatacctctacagttccctcctgctttagctctgagtacattcaaatgggtgaaagtttccttctgcaaattcttgcatcctaaacctttgcattagctccacagacagaggattctctcgattgcggcttagcttctgttgattactctccattacttccactacattggcgggtgctggtccagctgatcctcctgctacaattgatgggactgatgcggttgggctccatatctttattgggtt

SEQ ID NO: 172991 - DNA, 511 bp, Arabidopsis thaliana
accaacacccgcgggctggccgacactaaacgactcctatagggaaaacggtccgcctgcggtaccggtccggaattccctgggcgacccacgcgtccgcccttacctaaggcgcgtggtagttacgtgagggaagtcgagactgcgaaccacagaccacgagagcgtggaacacgcaaaaaagtggctcgggggagaggaggacggagatcggaagggcggggtgcgaacatgaggggcgagagtttttttttacaaggaggaaaaggcaagagaggggacgagggctgaaaaataatgggcgcaggagggtgacggctgcgggggacgggctgatggtggaagatcagggggggcgagccgtcgacgaagggagagaagcggaaggcagcgtgcgaggggcaagcacaaactgagttaaagaacagtggaccggtagaggcaggccacatgagcaatggagagacgggatgaggacggctgcgaggaatatgcaatctgactcagagcg

SEQ ID NO: 172992 - DNA, 539 bp, Arabidopsis thaliana
acgactaatttaggggaagaacggacgcctgcaggtaccggtccggaattcccgtttcgacccacgcgtacgccaatacttaaacagggatccagcagaacaaaatcaaagtgacagattgtctcatcgtggaggtaaccatgcgattgatggatgcacaacatggtaggaggcgaccgactggaggacgaactgcgggatatgtgaggcgtggagagagtttttttttcaacggggggcaggggggatgggagggggggcctgatggaagggactctggcacgtgagcgaggacgaggatgggggtggggagagaggaggggtgttcggggaggggggagagtgcgaagagaggtgggggagcgggggtgggatgtgggatggatgggctggtgagaagagagaggggtagtcggggagctggggggtggggtgaggggagaggggcaagtgatggaggagaggagtgggctaggggactagtgggggagggaggaagcggaggggtgagagagggtgcgtagagtgagtagtgtggg

SEQ ID NO: 172993 - DNA, 502 bp, Arabidopsis thaliana
  unsure (1)..(502): unsure at all n locations
actatagaagattatgacgtcactgcacgcgtacgtaagcttggatcctctagagctgccgcccttttttttttcttttttttttgaaacgtaaatatatantttgtatatatanttcatttatataccgggtaccgtacgaaaaancgtcgaccaactacagtanaacgtctaaactatgaataaaaaatcttcacagaatctcctccaccaatatatgtttttgtttacataaatataaacgcgtatccctttttcattcgtcaaaattttaagttttccttcaggtaacccacgatcgcttggaggaagcagagaaggatacaagcggctgcaccggggaataatgcgtaccaaaagttcagtttatgcaactttgctccgtctataaacagtagtggtaaactcgccgcaggcggatggttggcacgagtgatgaccatgaccgcgatggaagccgcgagagcggtactgggggctaacccagttggcccaaaggcgg

SEQ ID NO: 172994 - DNA, 483 bp, Arabidopsis thaliana
  unsure (1)..(483): unsure at all n locations
tatagnagatctatgacgtcgcatgcacgcgtacgtaagcttggatcctctagagcggccgccctttttttttttttttttttttttttttttttttttttttttttttttttttttataacaaatgtttttttatttttttaaaacaaaaccggtcattttaagtttttgaaaactgggcattaaacccacttaaaaaatggggaaaaaaccccaatttcaaacggggaattttttttttaaacccgcaattctttgctggatctccgcggtggttttgtgtgggtcatcgcgtcgggtttgcgggcaaatccaacctttcaaccaagaaaaaaagcccctgaaacaccaaaaaagaaaattcctgacccccccccaatagaaagctcctcccgccccccgttagaaacctcatcgcaagcccggttttctttttgaacaccaaccccgtcttttttttgaaccacacggctcattaaccct

SEQ ID NO: 172995 - DNA, 508 bp, Arabidopsis thaliana
tatagaagagtctatgacgtcgcctgcacgcgtacgtaagcttggatcctctagagcggccgcccttttttttttttttttttttaaacgaaccaccaaaagcagtatctgagatttcatcaccaagaagttccaagaacaactgtgatcaacagagcgagatcacaacaacaactaccacaagtactacatcaggagagaaatcaacggctctcaagaaaccggacaagcttattccatgtcctagatgtgaaagcgcaaacaccaaattctgttattacaacaactacaacgtgaaccagccacgttacttctgcaggaactgtcagaggtattggacagctggtggatctatgaggaacgttcctgttggctcaggtcgtcgcaagaacaaaggatggccttcttcaaaccattacttgcaagtcacttctgaggattgtgataataataactcggggacgatccttagtttcggttcttcggagtcttcggttacagagactgg

SEQ ID NO: 172996 - DNA, 504 bp, Arabidopsis thaliana
cgaagagttatgaggtcgactgcacgcgtacgtaagcttggatcctctagagcgttcgcccttttttttttcttttgcttgaaagaataattcactaatggaacttttttttcacacatgagccggaaacacatacatcagcggacggctgaagatgttgacaacgacgtctgatcgagcgaatctaccgcgaaacgacatagagcgcagactattttcttgggggggtagcggcaagccggagaagtgtggggtataggcagaggagattgattatgggatgtgacgaggcgcgaacgaagttacgagtcggttgctttgaagggggaggggggaacatcgggggtgtaggatggagcagtgtcggtgccggagagcggcgcagggaggaggggtggggtggagtgcggggttgatggggcgcgggcgagccggtaacagggttgaaggggggtggaggagggcgcccggagggggcgggtgttgtgggctattcgtggagct

SEQ ID NO: 172997 - DNA, 506 bp, Arabidopsis thaliana
ggtccggcactaatacgactcacttagggaaagacggtacgcctgcaggtaccggtccggaattcccggttcgacccacgcgtccgcccaacttttcgcaagtcgctgttaagtttcattcgcttctttatatatccacgcatactcttcctccatacagtttcgtcttgaatcctgagaaatttttgtaagccctaataccatctgaaagagcagagcaggaggtgattatctttaggaggggatgactcagagcagcatgcttgcgggggacgcggcttgttgcgaccgtatcagagggagattgcgttgagatggcgaggaagaacgtgtcgatacgaaaagcggtcgtgttgtgtgacgcgatggccgggcaggtgggttgtcacacacgagggcgggcctaatctgttgtgggccggggtatacgagagagggggtagagtctgaccggtagggcgggggcgggggaagggtgaccgcagcctaacgacctgtgtgaacgt

SEQ ID NO: 172998 - DNA, 455 bp, Arabidopsis thaliana
  unsure (1)..(455): unsure at all n locations
cactatagnagatctatgacgtcgcatgcacgcgtacgtaagcttggatcctctagagctggccgcccttttttttttttttttttttttttagaaactcacgatcaaaatcaaaaccttacggacccgaacaagacgttgacctaaggacggagatgattttttccagagactgaatctgaaccaaaatcacaatatatattacccgtaacaattaaattgggggggcgggcgttcctaaccgaattagaaccggtcgatataaactactacgtctttgctctagcgacaaggcgattgttttggagcaaatggtgtggatattgagaatgtgagtttttgacatgtgatttaagttttggactcttggggtgtgcgctcctacagcgaaaggaacgcacctaaacttgaacgggattttggattgccacattggccttgcttggggctgggga

SEQ ID NO: 172999 - DNA, 493 bp, Arabidopsis thaliana
aatacgactcacttagggaaagccggtacgcctgcaggtaccggtccggaattcccggtgtcgacccacgcgtccgcccacgcgtccgggcggtctggatacgaagcttatcaagtcagtcacaacttactcttgtcgcatgcttacgctgttgacgcattcagaaactgcaaacagtgtgctggaggtaaaattggaattgcacacagtccagcttgtttcgaaccacaagaccttgagcatgttggaggttccattgaacgtgtgcttgatttcatcctaggatggcatttggctccaacaacttatggagattatccacaatcgatgaaggatcgtgtcggtcatagattgccaaaattcacagaagctgagaagaagttgctaaagggttctacagattacgtaggaatgaattactatacttcagtgtttgcaaaagaaattagccctgatcctaagagtccgagttggacgactgattctcttgttg

SEQ ID NO: 173000 - DNA, 476 bp, Arabidopsis thaliana
ctatagaagatctatgacgtcacatgcacgcgtacgtaagcttggatcctctagagctgccgccctttttttttttttttgatcacaaacataatttatttatttatatttgtttggtttttttttgtttgtttgttattttaaatatctatctatagtttcacatctctaccaaaaacccagctaaacgaaacagaaggttttgacacaagtttgaccctatcattagctctttcctctaacctcttgatcctctgcggcaaggtgcacaagtactcctgtgctctccttccttctcctgataaccccaatcccaaactctccaccttccaccgccgcaacagaaactcaagtatcccagcgtaatccgccgccgtgtaaactccaatccgctgcgccacggcggcgtaatgatcaaacaaatcgttatctcttccgtcgtgcataagatgagccggcattgtgatccgtttctt

SEQ ID NO: 173001 - DNA, 533 bp, Arabidopsis thaliana
ctatagaagagcttgacggcgcaactacgcgtacgtaagcttggatcctctagagcggcctccctttttttgtttagtctatagtaaccaaagaacattttatttaaatcaaaggtattgtttactttttaaacaaaacttgggggtggtaattagtcaaaactactggagcaaaataggaatttgggaaacgaatgacactttatgcctcctttgtaggtgtttttttgccgggggggctgaaaagactgaagccattgcaacctagatgatatctcgcgttactcagcttacaagatgcagtgtgtgtggccacatgcgctggtaagaggggaagaaaagcacgaggggtggggaagcgtcattaggggacgtgggtgaggcagtagaggtgggttgcaaggggctggggtttggctatatacagaagtcggcgaggggagatggaagagagagtgagagaaagagcggcgcgtgcagtaggggtaattgagaggagagtaaaggagagcaaaggcgggagaggggcggcg

SEQ ID NO: 173002 - DNA, 519 bp, Arabidopsis thaliana
  unsure (1)..(519): unsure at all n locations
acgactcacattgggggaagctgacacgcctgcaggtaccggtccggaattcccgggnctacccacgcgtggaaaaacagagaccaatacaactaattaccatcctaacgagaaacataaacgaatagatatcaggtgttaaataaagtcgcacagatatactatcccatacacaaactacgaacctaagcgacgtgtatgccacggagagtaagggatgtttttttttggagacgggagctcaaggattggaaaattttatgaaaacagagataggtatatcggagagaagagaggtacctgatagctgcctccaacctcaatccgtggacataaacatacaacatgaaacacagacatgccaacgggatgagcgtgaaaagggccgtgcgccagcctccggagtaaagagccaagagaggcggggcgcccgggcggcgttcgagaacaaatagcggtgacggagtggcgagaggggtcagattcgccgagaggcgactagaggtgaaagcaccccgc

SEQ ID NO: 173003 - DNA, 563 bp, Arabidopsis thaliana columbia; identical to SEQ ID NO: 133134

SEQ ID NO: 173004 - DNA, 571 bp, Arabidopsis thaliana columbia
  unsure (1)..(571): unsure at all n locations
atgatacgtcaggtctctacgactcactatttggaaagctggtcacgcctgcaggtaccggtccggaattcccgggtcgatccacgcgtgcgcccaagttacgccctttacttaaaaaaacgttgcccaagtccaacaccggacccgaacgccgtcttgtactcccgtaacgatcgtgagactccgatggttgtggacaacatgtattataagaacatcatggcccataaggggcttcttgtcattgatgatgagctagccaccgatcccaggaccgcaccgtttgtggccaagatggctgcggacaataattacttccatgagcagttctcacgtggcgtcaggctcttgtccgagaccaacccgctcacgggagaccaaggggagatcaggaaggattgtcgttatgtgaactaatattgatggtccttgcataaaggatatatattgtggaaaagtaataataataatatatatgtgtatgaatgtctgtcaatgttttggattcaataagaagaaataccanaaaaaaaaaaaaaaaaaaaaagggcggccgctctagaggatccaa

SEQ ID NO: 173005 - DNA, 530 bp, Arabidopsis thaliana
  unsure (1)..(530): unsure at all n locations
atagnagagctttgacgtcgcatgcacgcgtacgtaagcttggatcctctagagcggccgccctttttttttttttttttttttttttttttttttttttttttttttttttttttttttttttttttttttttttttttttttttgggggggaaaaaaaaaaccccaaaataaaaaggggcaaaacccaccccctccaaattttttggcaaaccccccctttaaactgggaaatttggcttaaagggaaaaaagaatggggggaaaaaaccttttcatcaaaaaaccccaattcaagggcaaaaaaccttaacttttaaaaatccccaaaaagaaaaccaaaaggggccaatttttggggaccgggaaaatcaatttaaaaccaaatccaaaggggttatggggggggtattacttccccaaaacccccggttttaaaattggaccccaaaaaaaaacaaagggctttttgaacatattaagtaaaagggggaggttccgggcaaaaaaaaaacatttctgcttttcca

SEQ ID NO: 173006 - DNA, 540 bp, Arabidopsis thaliana
  unsure (1)..(540): unsure at all n locations
acgactcactatttggaaagctggtccgcctgcaggtaccggtccggaattcccgggtcgacccacgcgtgcgcccacgcgtccggaaagagttcgcagctgaggagatttcttccatggttcttattaagatgcgtgagattgctgaggcttaccttggtgtcacaatcaagaacgccgttgttaccgttccagcttacttcaacgactctcagcgtcaggctactaaggatgctggtgtcatcgctggtttgaacgttatgcgaatcatcaacgagcctacagccgccgctattgcctacggtcttgacaaaaaggctaccagcgttggagagaagaatgttcttatcttcgatcttggtggtggcacttttgatgtctctcttcttaccattgaagagggtatctttgaggtgaaggcaactgctggtgacacccatcttggtgggggaagattntgacaacagaatggttaaccactttgtcccagagttcaagaggaagagtaagaaggatatcaccggtaacccaagagctctt

SEQ ID NO: 173007 - DNA, 546 bp, Arabidopsis thaliana columbia
atgatactccagctctctacgactcactattgggaaagctggcacgcctgcaggtaccggtccggaattcccgggtcgacccacgcgtccggaatgatgagaaggagcttatgggtaaacctctaatgaagcgtgttatgcagacttggctccctgcaagtactgcactacttgagatgatgatctttcatttgccatctccccacactgcccagaggtaccgtgttgagaatctgtatgaaggtcctcttgatgatcagtatgcaaatgccatcaggaactgtgaccccaatggacctctcatgctctacgtatccaagatgattccagcctctgacaagggtagattctttgccttcggtcgtgtctttgctggtaaggtttctactggtatgaaggtcagaatcatgggtcccaactatatccctggtgagaagaaggatctgtacactaagagtgttcagaggattgtcatttggatgggtaagaggcaagagacagtggaggatgtcccttgtggtaacactgttgctatggttgggctgg

SEQ ID NO: 173008 - DNA, 519 bp, Arabidopsis thaliana
ttgacgtcgcatgccacgcgtacgtagcttggatcctctagagcggccgccctttttttggtttttttctttttttttttttttttttttttttttttttttttttttttttcttgaaaacctaaaaatttttattaggacccaaaatggaaacaacaaacaaaacgtaaaaaaactttttacaaggcaaacacaattttttactaacccacaattttttaaaggggagggaaagccttgatagttttgcgccgaaatagaaaagaaaaaccccaaaccaggacttagaaacgggaggggggaatggcgttctcccgcgggcgaaacataaatgcaagggcccaagacctaaaaggtggccacacaagagggaaaacgttcaaggagagaggagctcttgcagggagcggcgcggccttcaaaatagaaatccgagctttcaggtgtaaagaggggggggggaggggctgaacatggtcctccatggcttgaatagagggcaaagaggccggggctggg

SEQ ID NO: 173009 - DNA, 567 bp, Arabidopsis thaliana columbia
  unsure (1)..(567): unsure at all n locations
atgatactccaggtctctacgactcactattgggaaagctggtccgcctgcaggtaccggtccggaattcccgggtcgacccacgcgtgcgcccacgcgtccgcccacgcgtccggcaaatttcaaagcatttcaaaaaccctagcctatctctctttatctctcacaacaaaatctttgaaatggcgatctctaaggcttccattgttgttctcatgatggtgattatctccgtcgttgcatcggcacaatctgaggcaccagcaccaagtcctacttctggatctagtgcgatctcagcgtctttcgtgtcagctggagttgcagcagtcgcggctcttgtttttggctcagctcttcggatctaagttactgtgatggtgatttcgtacagagattgtttttgcggtataggccattcatcattattcgtcgtctcgtgtgtattccgaagcagcttatagatctcattttctatttgtccctcttcttcttcgttntctatcttaatcttcatatctgtatgaggatattactatttctttttagagtatttgtgggttttgg

SEQ ID NO: 173010 - DNA, 519 bp, Arabidopsis thaliana
  unsure (1)..(519): unsure at all n locations
cgtacgtaagcttggatcctctagagcggccgctcttnggttgttttaaagccttttttttttttttctaaaaagaaacagaggttcaggaactattgggacctgttttctttatttcatgctacaaagcaaaatctcatttacgattaccaacaatccaagatttgagggattgaaagaaggctgaaancccacttactcacataggggggggagaaacggaggcaggtccaaaacgggggcaaagcccacgaccggcaacaccacggggggcacaggccccccctgagaagccgactncaagacagccgaacaggagaacccgggggggctgcacaaagcgggggccncggcgaaagccttgggggcagcataggggatgaggaccttgggggtatgcagacttatgccctgggagggggaactggggcgctcccaggaaccggtggaaagggaaggatggggtatataaccgggggccacccactggccgaaagtcggggacctgtcggggggtgg

SEQ ID NO: 173011 - DNA, 544 bp, Arabidopsis thaliana
  unsure (1)..(544): unsure at all n locations
atagaagacnatgacgtggcatgaccgcgtacgtaagcttggatcctctagagcggccgtccttttttttttttttttcagaaattggaatatcctgattaatgtagatcttttattttgtgtttttcaatcttgaaaacattcaagtcatgtaaaactttttttgattacaacatcaaaacaaggctgggtttaaatctggtgctctttcgctctcttcaatatttttccgcattgagaaaaacccgagagcgctggtttgcaagaaccaccccattgcatttcctgggtcgactcgtttagccagaaaccacgcatagattccttctgcaacatgtagtacccactgctacaatgaagacagcctttacaatcgtgattgtccggaaaaagaaaaggtgtttggctcttaggaaaggacaggtcctatgagagggaaccatgccgggggaaaagaagagaattgttatgggacaacctctcccagggaccaggtggggacccgggagatgagggggcgtacataagcgccgggccccccccg

SEQ ID NO: 173012 - DNA, 377 bp, Arabidopsis thaliana
atgatactccagctctctacgactcactattgggaaagctggtccgcctgcaggtaccggtccggaattcccgggtcgtcccacgcgtccggttcgttctctggcggccgatcccgtcgctcgctaccttttaagatattttttttatctaatgaacctgaaattgtaattaggcatataattggggattatttgctgaaattctcatttctagatcgaaaaaagcgaataattcgttttcatttgattcttgcctaatcttagggtgtctttatttatctaccaaaagaatgtctaattatcgaggagatgatgctgagtacatggaagacgtagatgatgagatggaagatgttgaagatgatatggatgaggag

SEQ ID NO: 173013 - DNA, 524 bp, Arabidopsis thaliana
atagaagagctttgacgtcgcatgcacgcgtacgtaagcttggatcctctagagcggcctgcccttttttttttttttctttcttttggcaactaggaaaaaattataaaacttgtcagaggatggagagagaaatgttttaacattccgtaatcccatatgagtattaataaaacgagacttaatctcgatagagagagtcccttcctttgggaaaaaggctagtttgagactgggggaagcttaatgcttggcttacacctcacatgggggagccatcaataccttcaatcctttccttttcctgatatcagccagaaaatctgaagcctgagctcctgtctcaagagggccagatgacatcatttcccagggatcaaacacacactgcgggattgcctgttctgaggttgctgccttaagctgccttgggaatccgaaggactccacatctggctggtctgctttgcagttgaccaaggaattctctggcctgtgcatgtactataacacttgtccacgct

SEQ ID NO: 173014 - DNA, 530 bp, Arabidopsis thaliana
caggtccctacgactcactatagggaaagctggcacgcctgcaggtaccggtccggaattcccgggtctacccacgcgtccggaatgacgagaacgagctcatgggtaaacctctaatgaagcgtgatatgcacacttggctccctgcaagtactgcactacttgagatgatgatctttaatttgccatctgcccacactggccacaggtaccgtgttgagaatctgtatgaaggtgctcttgaggatcagtatgcaaatgccatcacgaactgtgaccccaatggacctctcatgctctacgtatgctagatgattccagcctctgacaaggggagatcctctgccttcagccgtgtctatgctgagaaggtttctactgttatgacggtcagaatcatgggtcccaactatatccgtggtgagacaaaggaactgtacactaagagagttcagaggactggcatttggatggatcagaggcaagagacagtggcggatgtaccttgcggtaacactgctgctatggtg

SEQ ID NO: 173015 - DNA, 563 bp, Arabidopsis thaliana columbia
  unsure (1)..(563): unsure at all n locations
atgatactccagctctctacgactcactattgggaaagctggcacgcctgcaggtaccggtccggaattcccgggtcgacccacgcgtgcgcaaattgtccacgcctcggtgaattgcccaagaacctcagtaagctacaagctctcgaaatcttaaggctatatgcttgccctgagctaaagnacattacctggagaaatatgtgagcttcctgggcttaagtatctcgacatctcacaatgtgtcagcctgagttgtcttccagaggaaataggaaagctaaagaagcttgagaagatcgacatgagagaatgttgcttctcggatagaccgagctctgctgtttcactgaagtctctgcgccatgtaatctgcgataccgacgttgcatttatgtgggaagaagttgagaaggctgttccagggttaaagatcgaagctgctgagaaatgcttcagcctagactggcttgacgaataaagtgtaaactcattgtttagagtctggtaagttaaatggcttgtatagagaactctntctactctgttttctaatttctaag

SEQ ID NO: 173016 - DNA, 543 bp, Arabidopsis thaliana
  unsure (1)..(543): unsure at all n locations
acgactcactatttggaaagctggtccgcctgcaggtaccggtccggaattcccgggtcgacccacgcgtgcggggtatcaaaagtgccaagttccctggagtgccatacacattcttctcgcagagacaaggctgcaaagtttctctgtaccaagatgctcatattccagacaactttgtccctagaattcctctcgctggagggaagaactatgagcctcanagatgttgggaggatatttttgatgctattagcaatgcaaaacacttgatctacattactggttggtctgtttacgctgagattgctttagtgagggactcgaggaggcctaagcctggaggtgatgtgaccattggtgagctactcaagaagaaggctagtgaaggtgtcagggttcttttgcttgtttgggatgacagaacttctgttgatgtgctgaagaaagatgggctcatggctactcatgatgaagagaccgagaatttcttcaggggaagtgatgtccattgtattctgtgccctcgtaccccggatgacg

SEQ ID NO: 173017 - DNA, 541 bp, Arabidopsis thaliana
  unsure (1)..(541): unsure at all n locations
cgattgtggtanggggcatctatagcagacttttgacgggcntaccngcgtacgtaagcttggatcctctagagcggccgttcttttgtttgttttattctttttttttttttttttttttttttttttttttttttttttttttttttttttggaaaaggataactactattgccttttatgggaaaaaactctaattatatcatggggacccatgttttacataaaaaccttattaaaacatttctgtttgagggggggcctcaagcaacacattttgtagcaatacaacacacggggagtttcagtttttaggataaagttttaaaattggaacacatttttgggctaaagtttatactttccctcgaaagatgcgtagcctgaaatcttgtatttgcctccccacctgttttctttggtttaagggatttggaggtaaatataatcatcctcaaagagtttaaaccccgggtggattttttaattatccccctcattaaagggggcggagtccccctttggaaaaattggttttgtc

SEQ ID NO: 173018 - DNA, 537 bp, Arabidopsis thaliana
  unsure (1)..(537): unsure at all n locations
atagnagagctttgacgtcgcatgacacgcgtacgtagcttggatcctctagagcggcctgccttttttttttttttttttttttttttttttttttttttttttttttttttttttttttttttttttnngaggcattaaccagcattagacccaatttggaagatcaaaagcataggacatattttgaatttggttatttaacgcacaggggccaaaattttttttacaaacgggggggtggtacattttcatatttaaaagaccaagaagcttcttataacaaaaacacaagaccttaatcaattttgaaaattttagagggtttaacgaaaacacaaaggctaaacaggggcttgattaggattggtctttttaagctttttaaaaggtttcggtggggggtttcgagacatttcgagctcttggttcaagctctttttcttcataatccnattgaggcaaaggggatgaaaaatttaagcaaaaaccttgaacaacctggtaatatgaaggggatagattttggaaaagaaa

SEQ ID NO: 173019 - DNA, 529 bp, Arabidopsis thaliana
agctccctacgactcactatagggaaagctggcacgcctgcaggtaccggtccggaattcccgggtcgacccacgcgtccgcggacgcgtgggaattgatgtggttgtccaacctggcaacactggtctcgacccatcccaaacatctttcttccaggtgcttaacatcccaaccaagattaacaagggtaccgtcgaaatcatcaccccagttgagcttatcaagcaaggtgacaaggtcgggtcttctgaggctgcgcttctagccaagcttggcatcaggccgttctcatatggtcttgttgtacagtctgtctatgacaatggctcagtcttcagcccagaggttcttgatcttactgaagaccaacttgtggagaagtttgcttctggtatctccatggtcacttacttggctcttgctgagtcgtaccctacccttgctgctgcaccggatatgtgcatcaatgcgtacaagaatgccttgactattgctgttgccactgagtacaccttccctcaagcagag

SEQ ID NO: 173020 - DNA, 540 bp, Arabidopsis thaliana
  unsure (1)..(540): unsure at all n locations
aggtgaccttatagnnagactttgacgtcgcatgcacgcgtacgtaagcttggatcctctagagcggccgccctttttttggttttttttttttttttttttttttttttttttttttggcaaaaagaaatattgcaacacttgaaaacttaagatgagattgatacataattcacattatatagccgaaattgcaatggccactcttgaaaccaacggacaaggattcatttaaaagatcgaacgatcataaaccccttgatgattcgaaattacacaaacggaaattaaaaagaccttaaaattcaaattcaaagtcgaataaaattccccaagagagaaaaagagagattatttcactcctctggggttgggagctgctcctgtgcggtgttgatgaaaaaaacttcgtagatgagtccagcgattccaccgccgacgagaggtccggcccaataaacccaggggttggtccatgtccagctcaccaccgctggtccgaaagccacggggggattcatggaggctccagagaaagct

SEQ ID NO: 173021 - DNA, 553 bp, Arabidopsis thaliana
acgactactatttggaagctggaccgcctgcaggtaccggtccggaattcccgggtcgatccacgcgtcggaagaaaccttcctattactttttctattctacaggatctgtttctatacatctgctaggatcatttatgctcacatctaaggtaataatggccagtctctcctggtctgatatgtaaattctaaacacgaaaatcacccctatgacgacaattgtatttaccggggggggaataggcgctagctcagactcagaaatagaatacctacggcacacacgaaattctaaatcaacgagaatgtggggggaagtagctgttgagcaagatactctgttgatgcaagccagacctaagagtgatagggacgcgtgaggagtaagtgtaaagtgttggcgctttaaaacccaccgcatgatggttgcagaaaaatgcgtagccctaaggttgagaagtagtgccgaccactgcagaggagatgtaggccaccggtagttaggaggtgactggactgggaatgtggtggataattagttaaaggaaat

SEQ ID NO: 173022 - DNA, 547 bp, Arabidopsis thaliana
  unsure (1)..(547): unsure at all n locations
aggtgccttatagnagagctttgacgtcgcatgcacgcgtacgtaagcttggatcctctagagcggccgcccttttttttttttttttcttttttttttttttttttttttttttttttttttttttttttttttttttttcaaaaaaaaaaaaactaggcattgaattttgcccttgattggtcaaatttctgaaaaaacaattcattggatggttaatctaatcctagggggcttttttcatctggaacccttttacgggcatatttaccagcttttgatcctgaactcagcttaatgaggacccctttttggggcaaacccaaagaaaccggcatttcgattccatcaatgggttcaaatgcttgatctgggtcttttgaactatggaaaagagccaatgccccatagccaccgccctgggtttttggttgcttcacatcaaggggaaactttccaaaaagaacttgcctaaggttttaagatggcccattgtgggggattttatgggaaaagaggtttgtttttcaaacctggacattctttt

SEQ ID NO: 173023 - DNA, 537 bp, Arabidopsis thaliana
cgtcgcatgcacgcgtacgtaagcttggatcctctagagcggccgcccttttttgtgtttttttcttttttttttttttttttttttttttttttttttttttttttttttttttttttttaaaaagaaaaacccttttttaataatggggaatgggaaaaataagggggtttccataaaaaggacaagggggggggatttcggttaattatttacggggggggggggaagaaaaccaaaagatgggggggtccaaaacgatttaaacccccttaaaagtcagggggggaacttggaaatgggttggttccaaacaacgggaagatttatttttttcctccaccaagattttggctggccaaaggggaaaccccgaaaaaagggggggggtttgcttttatggaaaaggggtggaaacctgttataaatcccggggggtggggatgaggatgggggagaagacagactaggggggggctctttggatgaggaggcaaagtgggcaaagttatggtatgaaattatgcgccttttccg

SEQ ID NO: 173024 - DNA, 570 bp, Arabidopsis thaliana columbia
atgatacgtcagcgtctacacgactcactatttggaaagctggtccgcctgcaggtaccggtccggaattcccgggtcgatccacgcgtgcgcttttaactctcggtcaagtatgaaaaagtaccatgagcgaataagatgaagatatctctgaacagaaacctcgggcaaaagataaagcaggcagtggacaacaatctgttggcagcatttcttctcggagctcccaagctagaaagcttcaacctaacaggaacatgtgttcttctattactccgcggagtgcagcatcggctccaaaaccatcaggtaaagtgtcaaacacctcttctgggaggcgaagatcagacacgtcgctcgcacaatctgttccaaattgttctgagcttataaaggagaacacgaaaccatcttctttagctgacagaactactatgcgatcacaggtgatgagtagtggtcgcaccaagactatcaaggaggatacactgctccaaagacctcgatcattaaggaaaagctcctctgggaacatagactttacggaactctccactctctgctctgatg

SEQ ID NO: 173025 - DNA, 523 bp, Arabidopsis thaliana
  unsure (1)..(523): unsure at all n locations
atagnagagctttgacgtcgcatgcacgcgtacgtaagcttggatcctctagagcggccgtccttttttttttttttttttttttttttttttttttttttttttttttttttttttttttttggggggcaaaactgggggccgttttatttatagaaacgacaagggattataatggcaattaatattggcataacaaaagcagggggattatcagtttgtttttttaaaaaaatcaaatagaagttacaagtttatgaaaccaagtaggttaattgggacaaccatttttttcaattaacagttcaacaaatctttttttaaatctttccctttttgagggttaaaatgcatttttaggggataagctttttatcaatggaaggcctgaaggagaaccatatgaagatggttacaatttactttataaaatttataaaacctgatttattggtggcattgtttttgcttttacatgaaacacctggtagaaactgcagatatttataatgcttacttgagg

SEQ ID NO: 173026 - DNA, 511 bp, Arabidopsis thaliana
  unsure (1)..(511): unsure at all n locations
taggtaccactatagnaagagtctatgacgtcgcatgcacgcgtacgtaagcttggatcctctagagcggccgccctttttttttttttttttttttaaaggagaacaataatttttcttttacttgtctttctcgtgagatgtcaaaaggattctagttacattacaatgacaaagctttttcccttctacatagcaaaaaaaagttatgattctacaaaatacagacactagaagacagaaaccaaccaaacaatagctgattcaatcaaattccaacactggtccttaccaaggtttcagatcagcgaccggtcctgccgtccagttcaacagcttctcacctggtctcagatacacactcctctcatgaggcagcttacgagccaacccattcaatacttgatgaaacgcatcccctggttgagccggttgcgggaacagcatggcttgtttcatcgacgggtttgccaacaacctctgttttctcagtataacctctggtgggatc

SEQ ID NO: 173027 - DNA, 497 bp, Arabidopsis thaliana
actatagaagagttatgacgtcgcctgcacgcgtacgtaagcttggatcctctagagcggccgcccttttttttttttttttttttttttttttttttttttttttttgggacttggaacagggactgggaaccacaccggtaggcgggggttcccaaaaattgggaccggtcgtttggttgactaccttaggaaacggaagcttttgggacttgggttttatttttttattcaaagggatcaatttggttttacttttaccccataccaaactggtttggccaagccctttgaaaaccggcccgaatatgctttcgagaaggatttttttaaccaaaaccaatgcgccgggggagggaggggtgattcttcccattggacttaacgacgttgtaaaaaccgggccacggtggttaatcacaaaggtttggatggaataaggttttcccgaacaaacaattcagagtaaaccggggggaggggccctgaattcatgc

SEQ ID NO: 173028 - DNA, 496 bp, Arabidopsis thaliana
ctatagaagattatgacgtcgacatgcacgcgtacgtaagcttggatcctctagagcggccgcccttttttttttttttttttttttttttttttttttttttttttttttttttttttttttttttttttttttggcaaaaaaatttacagggtttcccaaaagaatcaaaacttttacaatatttcaacggggcccacaaaaaattgaaatttacttttttacatttgtctccccactttaaattacaatccacacaaaacacacactttaatcaacacttgaggttctctacaaatctaaataaatttttttccaaaaaaaagcagccccgggaaaagcccttgaagcttcttttaaagaaacccataccacctaattggtctttttttggctaattcaaaacaaacttttgatacaaattccttaaagcaatcaccaccgggttttataacgggcccttttttgtcccctttaaagaaaaggaaacagaggg

SEQ ID NO: 173029 - DNA, 492 bp, Arabidopsis thaliana
atacgactcatttagggaaagctggtacgcctgcaggtaccggtccggaattcccgggcagataagtgggcaggagttcaaaaacaagctactcgagcctggtttagttgaccacatagatgtttcaaacaaatcagtagcaaaagtctacgtgaggagcacaccgaaagaccacaaacaactgacgttgtccatggtaatggtaacggtattcctgctaaaagaactggtggtcagtataagtactacttcaatatcggtagtgttgattcttttgaggagaaactcgaagaagctcaagaagcgttaggtgttgatcgtcatgaatatgttcctgtcacaaccgtctctgaaagggtctggtatcaagagttcatgaaggtttgcaccgactttgttgctcttgggtactctgatctatggtgccagacggatgcaaggtgaattgggtgtaggaggaactgcggtaagaatgggtcggggaattttaat

SEQ ID NO: 173030 - DNA, 490 bp, Arabidopsis thaliana
ctatagaagattctatgacgtcgactgcacgcgtacgtaagcttggatcctctagagcggccgccctttttttttttttttttttgcaaaaaagaatgtatacagtcattatttcgggctaatatacacacttacatttccatcgtcgttcatttcacagacttaggagattttcaacagaaaagttatctattccacaaagagagatatctcacgcattgtaaaaacagagagaatcccatcaaaaaacttaaaaccaaaaatggcgaaaaagagagagaaaatatggcttctttcttttctcagggaaaatgtttccaagattcgaaaactgatgagtaattcaacgaagaatcattgttattatacgtaaaaacttcttcttccgtaccgcttaaccaccgaggcatgtacaccaaatcctccaacgagtcaaatatcacgaactcgttcgactcgtttaggctcgttcctagactcggtaacttta

SEQ ID NO: 173031 - DNA, 499 bp, Arabidopsis thaliana
actatagaagatctatgacgtcacctgcacgcgtacgtaagcttggatcctctagagcggccgcccttttttttttttttttaatatgatatttttttgcttagggacaaaaaaaaacagcatcatcacaagcatcctaaagaaaatagaagagataaaacagagatataaaactaaagtacacaagacttcttgacacaaccataaggttctaaagagaataaagaaaataaaatccacataacaacagatagttcaattcccatctcaactagggaaaatagattttttgtaacaaactcaccaccacgaaccagataagacaagacacacttagaagcatttcctgtgaacaatcgatggacctgactcatcgtactcactctttgaaatccacatctgttggaaggtgctgagggatgcaaggattgatcctccgatccagacactgtattttctctctggcggggcaaccaccttgatcttcatgctgctaggg

SEQ ID NO: 173032 - DNA, 491 bp, Arabidopsis thaliana
actatagaagatctatgacgtaacatgcacgcgtacgtaagcttggatcctctagagcggccgcccttttttttttttttttttttgtcatcagatgcaagcaatatagcaaatgagtagcatacatatatgtctatctatacaaaaccaattcaagcagaaacattagattgaagatcgaacaataaaagagaaggcactacgatgtaccgagtgagattgatctcagaagttttgaattttctgggcttaacacttaaacccatggcaaactgagagcacgatgatgagaatcagtgcgataatgatggcgagcactatgagttttatcttcatgttctgaagccacatctttcttctcatctgcgttcctgttgttctgaaatcttgtgcctgtgagcgaagattttcggttttgtccaccaaaagctcaattttctcaccacggtcaagaaccttctcaatgttttccatcattacacccttaactt

SEQ ID NO: 173033 - DNA, 477 bp, Arabidopsis thaliana
actatagaagatctatgacgtcacatgcacgcgtacgtaagcttggatcctctagagcggccgcccttttttttttttttttttttttttccaactaggaaaaaaggaaaatcattcaggggatggcgaaagaaaagtcttcacaatcgggcataccataagagtctcaataaaacaagacaaggctaagagggggggagtacccaccctggggatttttttaatacgagtcttggtgaaccctaaagcttgccttggaactaagacaggggagtcttagtttggttaaaaccgttcatcttcctgatatcacccaccaaaaccgaaccctgagaacttggttgaggagggtcacaaaacctcttttcccaatgatccaacaccctctgggggaatgcctggcctgaggttactgccctaatctgtctttaaaaagggaatgattggcgccctgcgggtgttgcctgaagctgccat

SEQ ID NO: 173034 - DNA, 500 bp, Arabidopsis thaliana
  unsure (1)..(500): unsure at all n locations
actatangaagattatgacgtcgactgcacgcgtacgtaagcttggatcctctagagcggccgcccttttttttttttttttttttcaacatctaaaactcactctgattcagacaggtttcaacatggatttgataaggttttgttacatgacataactaataatacatgtttctgctccaaacatcttgagctatggatttaaccaagttggttctttttatgtttccctctagtaggtggggaagttggggttgacattgtctgcccaagcttcagtcctccaattatatccttagccgaatcaaaacccgactaacgaagatattgaaccagtttttggtaatcattcccgggtctggatacaacgaggacactaggattttggcaagattcaaggttcgcatggcccttctccttttttatagaaactgaaagaacttcttttacccgagtctcttaagttgcaagaggtatgtggattgaacccggggaaaaac

SEQ ID NO: 173035 - DNA, 494 bp, Arabidopsis thaliana
actatagaagatctatgacgtcaactgcacgcgtacgtaagcttggatcctctagagcggccgccctttttttttttttttgctacatttataactctacttgtaaaaattctgtcatcactaaggtcaacaaagaaacgaatacataatcgaaaaagaaaaagaaaagaagaaacagagtaaacaaaagtcaaactatgctttgcttactcgttgaacatttgcctaatacaacagcttcactgaaccaaacagtatggtttttgcgtgttaatagtccttcataaaactccacaatcttcgctgatacaacaactcttacacttggtctcaatctgaaaagtgaaaccatctttctcttacagggtcactgaaatcaattggttcctgctccgatgtgaagcagctcctcggggattgcagctggatctaagtcccaacagttttcgggaaagccgctggttgcatctttaagaaaccaagacggcacttga

SEQ ID NO: 173036 - DNA, 466 bp, Arabidopsis thaliana
gcacgcgtacgtaagcttggatcctctagagctgccgccctttttttttttttttaaaacataactatcgccattaaataacatatactttatataacttcaaaacattctattcatctcccgccagaaagttgagaatcagcgatggaagatccaccggtaaaccctttgaatacggaggaggaatacttttttcctaattcactaaatccgtcatgaaccccaaacatcatcccacttccggacaagtccaacggagacaattctggtaactttgcatctcctcttagataatgtagcacttgtctcatacttggtctagcccttgggtcagagtgagagcacaagagacctagcttcaaaaccatttccacctctttttcatcacattccgaacccatattcggatctttagcagccaagatgtctcccttgttccacaacccgaaaacccaatccacgagca

SEQ ID NO: 173037 - DNA, 491 bp, Arabidopsis thaliana
  unsure (1)..(491): unsure at all n locations
actatagnagatctatgacgtcagcatgcacgcgtacgtagcttggatcctctagagcggccgccctttttttttttttttttttttttttttttttttttttttttttttttttttttttttttttttttttccgaggaaaaaagggatatgtatcacatttttgtgggtaaaggacgcccaaaatactttgataaagggatttaaggaatagatttttttaagaagaggtaacctaaaaggggcaaaaaactagacaggaaaccgatttttcctccggggggaagcttttttttttcctaccccaaaggggaaaaagtgtttttaccaagcttttagcgctcttttttcttttttaaacgcctctaacaatatacactgccttattattggctataagatcccacatccaatggggggccaagatataaaactggcccttggcggttatttttcggatagtaattccccggttaaaaaacaaaaccaaa

SEQ ID NO: 173038 - DNA, 489 bp, Arabidopsis thaliana
  unsure (1)..(489): unsure at all n locations
ctatagnagatctatgacgtcacatgcacgcgtacgtaagcttggatcctctagagcggccgccctttttttttttttttttttttttttttttttttttttttttttttttttttttttttttttttttttttttttttttgggggggacaaaacattcataaagtctatttaagtttcctaaccattcaagtaaaaacaaaacagggtttggtttttttttaagattaccagaggaaaaaacccaaaaaaaaaaggcggtttaacaagaagctaatgaaccggttaactcttaaacatcctggcaaacaaagaatgtttttttttactggcccacacgggaaaggattttcccgggggtgaattacaaatcaaactctgcctaaaccctaaaaggctaaataaaacccttttctttctaatggttaacaacaaatgtccgggttttcccctctggccagaatttgtacccaaggaaccaatagaagg

SEQ ID NO: 173039 - DNA, 484 bp, Arabidopsis thaliana
  unsure (1)..(484): unsure at all n locations
actatagnagtttctatgacgtcacatgcacgcgtacgtaagcttggatcctctagagcggccgccctttttttttttttttttttttttttttttttttttttttttttttttttttttttttttttttggggggccctaaaaaacaataatccataaatttttttacaaaaaagtgtcataaaagctttttgaagtaagcaaaatgatttgcagagatttttcctttcaatggcctcatcaaatagactctttaaacccatcctggattccaaaatgaaaataaaatcccgaccgaataaaaccgatgaaagatatggcttcttcaggttgcttttgcctttggagcctttttcctgagttgcctaccgagtttccttgagtttttcattccaatgaagaagagcagtcctccaagaagagccaagctctgggtaaattttgaaaataggtggccgaattcctttctgtcaacatcggaatt

SEQ ID NO: 173040 - DNA, 538 bp, Arabidopsis thaliana
cttgacgtcgccatgcacgcgtacgtagcttggatcctctagagcggccgcccttttttttttttttttttttttttttaacaaaattccgttaaaatttaatcggaaaaaaggttccacacaaaccgatcaacacacaacaataaaaactaatctcagacgaagcaaagaagatacacttctttacgctcaaagaagtcctagaagagcggggcatctttatatggcactgggactctcaagcgtcttggatctcccttcaagcagtgggaccaatcgcaaccaagcaatcagtggtgttaataacacggtaacctctgttatagctaagtagctcatatatagtctagagcgtggtcttcccatactttcctcgatcgaagagacactcacgccgaggctttgggaatcaacattcaaatgggatcttgaccaatacgtccaccatatagagcagctatgagagactttccttcatgcagacttaaagcactctttcccactggaatggcctttaagggtacaaggaattgagact

SEQ ID NO: 173041 - DNA, 513 bp, Arabidopsis thaliana
  unsure (1)..(513): unsure at all n locations
cactatagnagagtctatgacgtcgcatggcacgcgtacgtagcttggatcctctagagcggccgccctttgtttttttttttttttgttttttttttattttttttttttgtttttgttttttttgtttcaaatattattggttcttctttttttaaaaagctacgaggtacctcctttgggcaaaaaaaaaaaaaaaaactttttacggcaaaaaaaatgcactttagcaggcgggggggggaaaatcaagaccgggggtttattacatatcacgaaaaaaagcggggagggagggacatttgatggggggggggaaagctacactgaggatctcaacccgccggggggctttctttgtttatggggggtaaaaaaaggttggtcgttgctgagggaacaaaaacccccgagaaatgggttcttattagaaaggaaacaccccgccccaggggggggtggaaatcaccccaaggaagaaaagtctggcggcgggggggggcccccccgggg

SEQ ID NO: 173042 - DNA, 428 bp, Arabidopsis thaliana
  unsure (1)..(428): unsure at all n locations
gacgtcgcctgcacgcgtaccgtagcttggatcctctagagctgccgccctttttttttttttttttttttttttttttttttatttttntgantgaaaaaccagggaaaaggatttattttctggttaaaaaaaaacttaatcccaagaacatgtttatagctatctggtttctatttattccctttgggctctatacatttttttttaacgggggggggacttctttgtgaaacctactttgtataatcaacattattccggaaaattaccaagaagcggttcttttttcgagaagacaaaagcagggaagaggggaaggtccgccccccaagatttgggcgaatactttaaccgagcgagtcagctggccgggcgatcgtcgagagcgccgcgggtatagctgaggggttgccggcggggcgtgg

SEQ ID NO: 173043 - DNA, 483 bp, Arabidopsis thaliana
  unsure (1)..(483): unsure at all n locations
cgattgatctaggtacgactatagnnagattatgacgtcgcatgcacgcgtacgtaagcttggatcctctagagcggccgccctttgtttttttttttttttttttttttttttttttttttttttttttttttttttttntgtggcaccacccaagaatcgatacattcattaatattttactaacattatacaagtagaggggggaaagcttttacaagaaacacataacgttttttaaattctgggggtataaactcattggtttggtttaaacagcttttgccatgtcctatactgatgggagaaaaaaaatgggtgggaaaaggttagtattttaagacttctccctcattttgggtttaacaaaaacaattccggggacaaaaccaaaaagatggcttggtggagtttggaaacgggggcggagcattggaaaaaaaccacccccacgattgattgaggtttggtgtataggaatcc

SEQ ID NO: 173044 - DNA, 497 bp, Arabidopsis thaliana
  unsure (1)..(497): unsure at all n locations
ctatagnagagtctatgacgtcgccatgcacgcgtacgtagcttggatcctctagagcggccgccctttttttttttttttttttttttttttttttttttttttttttttttttttttttttttttttttttttttttttttttttttttttaaaagaaacaagaaactttttgaccttcaaatgggggaaaaaaaaaagcaggtttctattcccctgtattttgaaggggggccccccaagaattaagaaggggaaaaatcttttcaaaagggtttaaaggggggtggggggttcaaacttcccccaaatatgaggaaagaaaacgcttttgaaaaagagcaaaagggcaaaagcccccctttaagggggtttaaaaaaacttttgggcggaaaagaaaaaaatttccaacccctagaagaaaccgagcggtttctcttaaaaaataccgggggggccctggggggggttggggccagggagttcctagaaaaaa

SEQ ID NO: 173045 - DNA, 478 bp, Arabidopsis thaliana
  unsure (1)..(478): unsure at all n locations
acactatagnagtttcttgacgtcgcatgcaccgcgtacgtagcttggatcctctagagcggccgccctttgtttttttttttttttttttttttttttttttttttttttttttttttttttttttttttttttatttaaaaacaaaaccaatttttttgggcaaacacctgggggttcttttaaaaaggcccccccccgggaaaaggaaaccacacatttcccagttgggggaatcttttttttcccaaagagtacccaaaaaaaccgtgggtcgaagcccccaaaaaaggaagattggaccccaaacaaaaacaaatcttttatgacaaggagggacccggccctcatcccctcctcttataccccctagaccgaggcggcccgggtgggggcaaaagagaacccccgaaaccccaaattcctttttccggggaccgaaggaatttagggacccagggcccggggcgcggggggg

SEQ ID NO: 173046 - DNA, 546 bp, Arabidopsis thaliana
  unsure (1)..(546): unsure at all n locations
ctcccgccgtcggcgcccccccccccccgccggcaaattaattgtgaaccactatagnagaatttatgacgtcacctgcacgcgtacgtaagcttggatcctctagagcggccgccctttttttttttttttaattaaatcttctttttcttttcatttctcatcatctaatgaacacaatgaaggagtcttttagaggtaaaacaatatctttcttacctctctttgatccgtgggaattaaacctttttcaccaacccatccacctttttattgaatcacaagcagtctaaaccacagatctcgagaataggaccgcctttcgccacaaacggattaacccttacccaaagaagtgttatactcgaggccaggaggatggaccacacgacaataatggttggcattctatcttgcttcccaagcaaacctttaaggaacgggtaaagatgaatgatgacccaaagtgcatagaacactctttctaaaagcggttcccacaaatcgtatccattgctgagtgatcaaaaactccggctatgactc

SEQ ID NO: 173047 - DNA, 513 bp, Arabidopsis thaliana
ctcgactcacattagggagaagctagcgtcacgcctgcaggtaccggtccggtattccacgggtctgacccacgcgttcgctcacgcgtacgcccacgctttcgtggacgcgtgggagaaagcagaacgacgaaacttcgggttgttaggcgtgaaagagatcctgattttgaagatggtgatgacgctgattttacaatgatgtatgagggaatgcacccttgtctttgatgaagggaggcaaacccgcaggattaatccttacggggtgtttattgcgctacatgttgagactctgcgcgctgtattttactacccgattcttgacccggtgaaaaagcatattctttgggggttttttttgttatttgcaaatatggtttggaggttcggggttcttgactgttcccaaatgggccctatcggcgagaaaatccttgacccgctttgttaaaattggggaaggaagggaaaccggggggattatcccgggggttgtttttgtttccccgg

SEQ ID NO: 173048 - DNA, 560 bp, Arabidopsis thaliana
ttatgctacattaaacgcgtacgcccccccccccgccggataataattgagggctcactatagaagatctatgacgtcgccatgcacgcgtacgtaagcttggatcctctagagcggccgcccttttttttttttttttaaatatcaaaggagtgtgtttcatccatcatcatcatattattgaaataagtaaacatacccatggataatggttctattcaaccaaaaagctctcagatgctaaaataacaaagattcttgagaattaatatcattttttttttctgcgtttggcacaaaaagaattgcaaaaaggggtaacatcagttttcttgggtgaggactgcctttccaatataagttgccccatcaagacttagccttcaataatggggggtggggcttcttgaccctataaccccaaccatgaaattcacccaaaaaacttactatcttcttttgaacccaaagcagcaccactaccacccatcttagcactcgggaccaactgttaaactcgttcgctgagaccccacccgggaattttcgcaccggtacct

SEQ ID NO: 173049 - DNA, 492 bp, Arabidopsis thaliana
tatagaagatctatgacgtcgcctgcacgcgtacgtaagcttggatcctctagagcggccgccctttttttttttttttttaggctttggttttttttttttttttttgtttttttttctggttccttttttttccttttttttgtgcgaggccaaaaccgtttgaatcaccccttaaaaaaaagaactacggagtttttcataagtacagaggggttttttccttgggggggtcccaaatacatttttgccaaaaaaccttttttttccgggggggggggtgccccaaaaaaaaaaaaaagcctgcccccgggggagcaggacatagaccagggggggggggggggggtttttaggggtctgtgggggtaaaaaccctatgtcccctttgttttttttgggcgcggggggggggcgagcagcctttttttggcccccaagacttttccttttttggtagaggaaaaacccccccttgttaccccataaagc

SEQ ID NO: 173050 - DNA, 502 bp, Arabidopsis thaliana
  unsure (1)..(502): unsure at all n locations
taggaacacactatangaagatcttgacgtcgcatgcacgcgtacgtaagcttggatcctctagagcggccgccctttttttttttttttgtagcctctggatttttctttcttctatgatttatgaactggtacccttttttacctattattgtacataattatataagtttgaatcacaccgagatcaattgtgcaaggagtgttcttattagaacatttatagaatctaagggacaaatagaaaatacaacagtgggataagctggtgaagcttaagcttatcaactggtgcttggtaaagctatggctgccaatggaggatcaagtacttggaaaagtcctgaagacagccttcttgtgaggtcctgtgcttcaactttcgcgacgtcagctctcattccgatatcagtagcggatctactcgcacaatacacaccaatcgctgtagcagccatctcatacacggttggaggcagaagccgcattggcgtggacaaac

SEQ ID NO: 173051 - DNA, 565 bp, Arabidopsis thaliana
ctatagaagagttatgacgtcgcctgcacgcgtacgtaagcttggatcctctagagcggccgccctttttttttttttttgaaggcaacaggattattcttcttttctaagattaagacaacaggtaccgctctattacctattatgggacatatattatatccagtttcgaagatcacgcgaaataaatctggacaaggcagagttctgaaattagaacaaggatgttttttttagggggcgcttaacaatatactaccagcgtgaaaagctgaatgaaaccctaattctgataaactgggagcttgggaaaacaatttggatctccaaatcgggggaccatattccttttcaaaatgccctaaagaacatccctccataataaggtatgtatgatgaaacatttaccgcggaacgccctctcttgtatccgtttataagtgttggaacccactctagtcagatttagaaatagttaggttcttgtaggatcgtcccattacctgttaggatggaagccccccccatttcgactgagactgaatcctcacaaaattggtatcct

SEQ ID NO: 173052 - DNA, 406 bp, Arabidopsis thaliana
attcgactcacattatggaaagctgcgcacgcctgcaggtaccggtccggaattcccgggtcgacccacgcgtccgctttgtagggaaaccatatatctcttttgtcttggagaaaggttccgcgaacaggtctgctccgcacaatgtacaacgttcacgaagctaagaacagatggggattatatacaccccaaatgtcaaatccggttatagacgtgaccattttgtagacatcgtggatgaatctttacatgtatgccaatcacggtttcgatgttggatatgatctagttaaccatcttcttaaaaaagcgaaggatgttataccaaaagtgtttacaatctcaaactagaagctgggctcatcccaaaaccccaccactgcttattctgttttaaactagg

SEQ ID NO: 173053 - DNA, 577 bp, Arabidopsis thaliana
  unsure (1)..(577): unsure at all n locations
gcacgcgtacgtaagcttggatcctctagagcggtcgccctttttttttttttttttttttaactcatatctctgatatttaacattacgctttcatgtatacttcctgtaggggaatttctaaactagaattctgtgtttatggaagaattatgggactaagacttcttgccatgaaggccggtctacaatcgcggaaagggantgtttttttttttgtgtgcgggggcgggcgtgtgaggccgtgcggcggataggatttcctttgggccccttctccagggctgatgccgtgtggttgcttccccccagccatataaccttctcctgagccgcggtggactccacgtgttctgtgcgggctaaagggaaatcgccccactcattgactttcagagggcgtggctcggctcccaacaacgtcactgcgttgtacggtatgcacctgggcgagaaccaactgcggcattggtatgaactggtccccctggccttcagggccacggttacccattgggtaggtacgtgccgcgcacctccttcagtgaggctgagggtcccggccgatttggggtcg

SEQ ID NO: 173054 - DNA, 487 bp, Arabidopsis thaliana
actatagaagattttgacgtcgcatgcacgcgtacgtaagcttggatcctctagagcggccgccctttgtttttttttttttttttttttttttttgcatctgcaaaaaaattaatatttttacgtattcaatacaagactttatgtggctgacaaaaacgcatatcctaaagaaaatcatatatctggaccccccaaaaaaaaaactaacatagcaactgatcctttgaagacgttttaaccggaataattcgggtccgcctgtatacttaaaggggcgttatcaccccacagtttaaacataccccagcttcgggttgtggacaatctatgtggagccaggagaatttggcccaacggggggagatgtgattatttgcaacaaaatcacccgcatggtgaaaaacccacctccccggcttatcagaatgtagatgcgagatagtggattggtctcgggaggtagaatctgtaacgggaccggtcg

SEQ ID NO: 173055 - DNA, 437 bp, Arabidopsis thaliana
caagctgctattctactcacattatggaaagctggcacgcctgcaggtaccggtccggaatacacgggtcgacccacgcgtccgaacttctgtgtcttatgtagactacttgatctctctactctatttcctctctagctacttgactcccttacgtcttcaaggagatagattgtctaattctgctcacaaaggaaaaatgttcctctgcatacggctctctctctatgttcttcatcgctatgacttgaatcacaaggaaaggatgaggcactatctgcactaagtagcacagatcagatacacgaatctagaaagctatcttcttatgactgacgggttaaaactttttgagggatgagcgctaagagatctaagcctatgctgatgtatcttcttaggacaatcttatcacaagttgctttgactatgctcct

SEQ ID NO: 173056 - DNA, 494 bp, Arabidopsis thaliana
tattctgactcacattatggaaagctggtcacgcctgcagtgtaccggtccggaatacacgggtcgacctactgctgttcggtttctagcggactgaaaatatagcatgtttaagggatgattctttataaaccttttgttactggcaaaacccttatggcacggaaaatcggaaagatgcgttactggtaggatccatagatttttaatgggcctgacgtgctgatcatgtttgctggtgagacacataggaatgtaaaagacttaatcgctgatgctgttcaataccacaggaccctcggtgatgctaatgaggtgcatgaagttattatagatgagattgatactgtttgcttgtcaagaagttcagccagctatggcacatgcgaccgtgatatcattgtacaccatcttttagtacagggaaatggtgtggaggccctaaacaatggttagcttatcggaatgataacaaaaaggatttgttagagaaa

SEQ ID NO: 173057 - DNA, 468 bp, Arabidopsis thaliana
atgacgtcacatgccgcgtacgtaagcttggatcctctagagcggccgcccttttttttttttttttttttttttctacaaatccaaaaatcataggaaacagtaaagtccctctacaaattgctgaggcaaaaacgttgtccatctgttctttaaactgatacaacaatgggcctcaaactttggggtcatatataatattttctttttccatttgagcagaaactgtctactaaacgttaatctgatgaccaaacttcctttggcgtattgctatagttggcttacgcggattattctcgtgccacaatcttaagcggatgggctttttttttgaaaacccactggtataatgaaacaacagatgagtgctaaaagagagaatttagatacttaaatattcctatgttaagaagaacgctggtcattcttggtgagctttcaacgcctatgattgacatccctcta

SEQ ID NO: 173058 - DNA, 492 bp, Arabidopsis thaliana
ctcgacacacatttagggagaagctgcgcacgcctgcaggtaccggtccggtatacacgggtcgacccacgcgtccgcggacgcgtgggcggacgcgtgggcggacgcgtgggccgacgcgtgggccatgcttggagctcttatgaaaagcatgcatggtggaaagatgagcttgagcctccgacgagagatggcactggtggctttggtggccttggagcaattatggtagagtcgtaacatgcactctatataatgggtgtagacgagcatttcctaagaggcagagagtgggttgcaagcctcttgtatttccacacggatttgacaccggattgttttagacaaccataaaatttgagggcggctttttacgggcgaaggcctttctggggacaaaaggtcccttgaaaggcttaggatatgacctccggtttttgggtggttgaaaactgcaagggggttcccttccgtttttttcacttgggaaag

SEQ ID NO: 173059 - DNA, 519 bp, Arabidopsis thaliana
gacgtcgcacgcacgcgtacgtaagcttggatcctctagagcggccgcccttttttttttttttttttttttttttttttttttttttttttcctttttttttgttcaattagagacaataatttttttcagggaagtttctgaattgtacccaccttagaaaaaacacccctctttgtggaggaaacttcagccaccgggcctttttttatatccggcggcccccgcgaatagagacccccccccctggttttttttttcccccccccaagtttatcctccctccccccccctggcggggctcgcgcgccccccctcaacgaggggaaacacgccctgcccccttctttccctttacacccaccccccccccgtttttttttttgtgtggggccttttaaaccccccaccaccccaaatatttgggggcctcaaaagggcctgcccttgagtacccgaaaaacccgggggttaagtttgtataaaaaaaccttttaggcccccccgggggggttttcc

SEQ ID NO: 173060 - DNA, 293 bp, Arabidopsis thaliana
ttctgactcacattatggaaagctcgtacgcctgcagtgtaccggtccggaattccacgggtcgacccacgcgttcgaagacgcttacgcttttccctgatgctgaacttactcactatttttctgggaagaatatcagatacattggaagttgctaacttcatcatagtaccaaacaagctgctcatatgtggtgcttgtctacacgctcctgcttatcctggttatagtgaggtggaaacttctaaaagtgtctcattataagcgacctgcagagctctgttttgctaggg

SEQ ID NO: 173061 - DNA, 452 bp, Arabidopsis thaliana
cagctctattctactcacattatggaaagctggtcacgcctgcagtgtaccggtccggtattccacgggtcgacccacgcgttcgcccacgcgttcgcccacgcgtccgaggacgcttggggagagatcatgaggtcaccggtgcaactccaacacggctcagacgccactaacggtttccacacgctgcagcctcacgatcagacctgtggtccgatcaatagagtgtgtctcacgcgcggtatgcatgtccctgaacacgttgcgatgcaccacacacacgacgttggtccggaccagtgttgctcctcggtggtgcatatgatccacgcgccgtctgagtccccgtgggctcttgtgcggcgtttcaataatccgaatgtttacaagaacttcatcaaacagtgccgtatcttacaaggcgatggtctacacgtaaggatatctccgga

SEQ ID NO: 173062 - DNA, 513 bp, Arabidopsis thaliana
  unsure (1)..(513): unsure at all n locations
taggacgaactatagnagnatctatgacgtcgcatgcacgcgtacgtaagcttggatcctctagagcggccgccctttgtttttttttttttattgatcaaaaagattgaaacagagcgggctacaaacctgttttgaatgttttacccaatttcaatattaaaaatgtgcattcggcaaacaaatgtcccaagggcagcgagctataaagtggactcgacaagtgatatattccctctagaaatagaagaggctattgtgtgatagcccgataataactaaaccgctagtcaggtccttgccgtcaaaaccatggtcgcggctgggtcacatacaaggaaacattctgtgagtcgggctgggtcgaaggctctatggggaaattttgttattagaacgctcattgatatttctggtggggaaggcccaagaaattcagcagaaaggttggtgtggtggtatttaggcattggggtttccttaataggtggggagagctgcactctagtctga

SEQ ID NO: 173063 - DNA, 427 bp, Arabidopsis thaliana
cagctctattctactcacattatggaaagctggtacgcctgcagtgtaccggtccggaattcccgggtcgacccacgcgtccgtttcttatgagattcgatcactatacatcaatcaaagctaacagaacagaacgtgtgttcatgataccagcgtacatggtgaggaggacctctaatgatggttatggtcgcagaaactacggccttaaacaagtgacgaccagcgtttcttctgtgagtgacgtaaagtgtacatctctggatcgatgaagcaagatgattgttgatacacattctgatccacagatcactacgatcatttctaatacgagtcataatcgtcctaagactgagccacaaagagaccatctgaatcttcatgaccatcgatctgctaatggatggtgctcgtacaataatgcttg

SEQ ID NO: 173064 - DNA, 506 bp, Arabidopsis thaliana
tatagaagactatgacgtcgcacgcacgcgtacgtaagcttggatcctctagagcggccgccctttttttttttttttttttttttttaatctaaagaaattttaacttctttcatcaaacaagtcatccaagttgaaaagtaggataagtttttgcagtcgatacactacattgcagcatcactgaagtttggcaaacattcattcaaccttgctttttggttccctaagcccataccatcactgatcacaacgattcttttttcttagcggatatatggtaaagctaaattgagatgcatcctaacaaaaaatttagaacttcatgacacagtttcgaccataacaaatcgatgcaatgtaaagattcttgccccatttttccttgacttgattactaggaaaagcagaggttccaaaagtctcctgtgtcttatcgggaagccttcctttttggcacactaaaaacaaaggcagcctggatcccaagttgcagcaacctgttg

SEQ ID NO: 173065 - DNA, 512 bp, Arabidopsis thaliana
cttctactcacttatggaaagctcgtcacgcctgcaggtaccggtcccctattcacgggtcgacccacgcgttcgctttttgttggaataaacggaccaaaaccacacattttgtcaataaacactgagggtcgcagaactcatactcaagtgggcaaaagagggggaggctgacaatggacgaggagggggaacaacccacatcaaccatcctatttgtcttcccagcccacactgtatctggtttcaccgtctttttttcctaaggaacaacgggaaatttaatgtccttgttcacggcttacacaacaaaattaaaaagcgaaagggggctgggtttcatttttcacgccgtgttggtttttttgacccgcctctctgtttctttaaataatggctccaaaaaacggatttccgaaaaaagttttccctttttaaacacaacctttttctcttttggaacgctttataaaaaaagggggaaaatacctttttttttccacggggggggg

SEQ ID NO: 173066 - DNA, 491 bp, Arabidopsis thaliana
agatctatgacgtcgcatgcacgcgtacgtaagcttggatcctctagagcggccgcccttttttttttttttttttttaagagctcgcatgtttatttgaaagaaaaaaaatgactccacagtgataatgtttccaattgactagcacgaagcaagagacgaagaagaacaaaagcaaaagtttaaattaaaggcattctggtcctcctccttgcaaacattggtattgcaacaaaccttgggatatataactcaagtctctggtgttaccagatttattgtttgatcaagttcctgataacgtattgcaaaaaccctccgtgatcgaacataacccaactccacctttgtgtcaaattggagtgtccatcgcaaaagatatgccatttgtttagggaggactgctacatcttgtcctggtgtggatctccctaacattggtctgggagctccatggtgtacagctcctgacccgttaggccaagggtctc

SEQ ID NO: 173067 - DNA, 496 bp, Arabidopsis thaliana
aattcgactcacgttagggaaagctcgtacgcctgcaggtaccggtccggaattcccgggtcgacccacgcgtccggtcgctattaaggttattgataaagagaaagttctgaaaaataagatgatcgctcagatcaagcgtgagatttcgacgatgaaattgatcaagcacccgaatgtcattcgtatgtttgaggtgatggctagcaaaactaagatctacttcgttttggaattcgtcactggtggggagcttttcgataaaatttcaagcaatgggagattgaaggaagatgaggcgaggaagtatttccaacagctgattaatgcggttgattattggcatagcaggggagtttatcatagagaccttaagccagaaaatttgcttttggatgctaatggtgctttgaaagggtctgactttggattgagcgctctacctcagcaagttcgagaggatggggttcttcacacaaccctgtggaacacccca

SEQ ID NO: 173068 - DNA, 515 bp, Arabidopsis thaliana
gacaacacagcttatgacgaagcaacgcacgcctgcaggaaccggatacgctatacacgggtcgacccacgcgtccggtcactcaccgctccctgaacctggatggatctacacgatccagcaacatcgagttcttattgagcattctttggaggcaaccacaataaaaaagcggcaagaaaatcatggatattgggcgggccttatcggaggattggtgttttttttgggtcgcaaatggaatatagacgctgatcacgcagttgctggttggccagctagagctttgttctgatgcggccggaggctagacatggtggggtcccttttagggcagtacgccaaacatgaagatggtctaacattcttcctgggaacattccctcccttttttgtgggcccccgaaacctaaaaccgtaaagacggcgcgttctgattattgataacgctctaccctcttcatcccgaacccgtatcgggttctggcaacacacacctatctatttccccgaaa

SEQ ID NO: 173069 - DNA, 508 bp, Arabidopsis thaliana
  unsure (1)..(508): unsure at all n locations
cagctacattctactcacattagggaaagctgccacgcctgcagtgtaccggtccggaattcccgggtcgacccacgcgtccgaaacatcaagctaaacgagctgtcaagcagagatctattcatgaaaacctaatttgatgccgtcatcgccagaacacgtgtatggaaaactactcattacaaatcacatggtgagtcacagaggattgacccggcaacgcaaattgtatgatgttggagaaccgcgtacaaaagctgagctcagagttaaggctggagctggtgtgatacatcanaggtagatgagctgacataaaatggggcatcggcatcagatgatgaggatgataacgatggtgataacgatgacgtggttgatgatgatcgtgtatcttacgatgatcttgcagacatgtgatcgctatcaactagctaaacgagctgccactgcagagatctattcaagaaaccttatttgatgccgtatgcacctgacacgtggatgg

SEQ ID NO: 173070 - DNA, 513 bp, Arabidopsis thaliana
ctatagaagagttatgacgtcgcacgcacgcgtacgtaagcttggatcctctagagcggccgccctttttttttttttttttttttttttaatctaaagaaataacaacttctttcatcaaacaagtcatccaagttgaaaagtaggataagtttttgcagtccatacactacatggcagcatcacagaagtttggcaaacattcattcaaccttgctttttatgtcactaagcccataccatctctgattcacacgatttttttttcttagcgggattatgggaaagcctattttgtatgcatcctaaacaaagagttagatacttatgacacgagccgaccataacaattcgttgcaaggaaagattcttggcccctttttccttgggggaaacaccagggaaaagaagagggtctaaaaaggtttccggagccttatcggaaagcttcctttttgggacacttaaaacaagagggggcctgatccaaagttggagcgcctgatgggattt

SEQ ID NO: 173071 - DNA, 498 bp, Arabidopsis thaliana
tctacaaaattatgaggagctacgcacgcctgcaggtaccggtcacggtatacaggggtcgacccacgcgtccgcttttttatggaatagtcgtgccaactcagacgttaggccaataactactgatggcacacagaagctcatacatcgagagggtgaaaagacggtgagggtgacaatggacgaggaggttgaacaaccaacaacaaatatcagatttgtttgcgagaacacaatggatcagcttttacagtgcttacataccacagaagcaacggatgaattgtaatgttgctgctacaaagctcgcactactcaattaaatgccaaatgcggatggaacattatcattcgtgtagatgattcaccgacctatttttttcgatcataactgcaggaaactgctgtaccgaaaagtttagaagtatttaccaaaccttttccccaagggaacggttataaaatagtggtaaaaaaattacttttttatagcagggg

SEQ ID NO: 173072 - DNA, 510 bp, Arabidopsis thaliana
tctatgacgtcgcatgcgcgcgtacgtaagcttggatcctctagagcggccgcccttttgttttttttttttgaaactaatgcaattaacttgtatcgtttcatcacattaactcgttgtgacaacaaaccatatcctactaataacaggaacaactaaagaaggtcacaaagattaaagattcaactttgcagaaatggcccaaaagctatataaatgggaaaccagtctttgtgtgggtttacaccacagggtgattcttatctctggccattggctgagcccacgacattatttcaaaccctctcattcattccaaagcttgatgtcagacaccacagttgctggcgttaatctaaagagttatgcccatgacaacatgtggctccgttcctgtaggaataataactgcagttattggctgtcgttttccatgcattacgaagaggaaacccttatatttagatttgaagccagctccttctgctgtgcgatcgcgcaattacgaga

SEQ ID NO: 173073 - DNA, 504 bp, Arabidopsis thaliana
  unsure (1)..(504): unsure at all n locations
aatacgcttctctatgcagccccccccccnccccggaatttatttgggacanccttagaagatctatgacgtcgcatgcacgcgtacgtaagcttggatcctctagagcggccgccctttttttttttttttcacagtgaaggcagtgacatcctcaatatccgtaataagtttacacgtttctgacaaagatctacattacaaacatatatttggagtgacactctctctctcactaaattacacaaaacggaccatatttacatacttgaagaatgttactacctcttaggatcttcagattcagctatgttcttaagcctgcgacgtccctgagggctttcacatttatgggcttaggatcacgacgctttgttctatgcaggaaatggcggatgaggcgaacatgcttagcctctggacactgtcaagagaatcatgtgttttagtcctgcactaggcgtaataacttgtgggctaataataagagatgtccactttcct

SEQ ID NO: 173074 - DNA, 439 bp, Arabidopsis thaliana
cagcactcactctacacaatctatgagaaagctcggccgcctgcgtgagccgggaccctatacaggggtcgacctactgctgttcgtccacgcctgcgaaggcgcgtgcggatgggatacacctagtaagctcacacgttagctgacacttaattcgttacgcaacatagtattaagagggagactacttttttatcctattaacggataggatgctatctgcacactcttggggaatcttgctacgagacaggatcgatagatgaagttcatcaaagcagtcatgaacagacacaggcgtcttctcacatggatcgagatgaatgcaacaacgctctgggccaagcttgctctgcttgttgatgtgcagaccataactttttgaacgtgcagccagaacaccggataactcctttcatagggggacactctgcatatt

SEQ ID NO: 173075 - DNA, 506 bp, Arabidopsis thaliana
acacttagaagatctatgacgtcgcctgcacgcgtacgtaagcttggatcctctagagcggccgcccttttttttttttttttcttcaagtcaatctcagtctcatttcgaacttcttcccaacaagtaacgacagtttagaaacctccacacttagaaacctcggatcatcattggccgaaaccgtctttataagagagattctaggactcctcattttcttacttgtcctaacctcggacgttttcacgttctccacgttctcgaacccaacaaacgggactttcccgatgctccatttgattttcgacgcatcctgtgggttcaccacttctgagctcagtacaacggatttttccggacacatagcaccggaacttaacagggggtcaagtccgggttgctgctacagctccatccgtaaattggttccggcatcagaaaccgttcgccggaaatgttctaaagccggttgggtacaactaaaagcgtgatggggtggattt

SEQ ID NO: 173076 - DNA, 293 bp, Arabidopsis thaliana
ctcgactcacatttatggagaagctgcgcacgcctgcaggtaccggtccgctatacacgggtcgacccacgcgttcgcggacgcgtgggcgaaatcaagatgttccaggaagattctccctttggatggtctgcggattgacatgactgactcatcaaatctcataacttctcctctatcctctggatctttactcgatgatccttcttacaagatcaacaattctttgtattaaaggccgatgaacaataagacagtacccgcaacatctatccattttggaaacattagtg

SEQ ID NO: 173077 - DNA, 527 bp, Arabidopsis thaliana
tatgacgaaacatgcacgcgtacgtaagcttggatcctctagagcggccgccctgtataattattattaagcctccacccctcaccccatcaccgtaaacacacctctaccgccgctcctccgctccccgccatgcgccgcgcgaataaccaatgtctgccatcgcacgcgcgaccaacgaataacaaaggcgaaggctgaaaagcacgacattttttttttttaggcgggaggggggggggggaagaagccgcgccgtactctctcacataaacccaaatatgtgcaccgcccaccgtgataagaatgattgctgggcgctcccggcgcgccgcaccatcccctcactccaatcaatcggaggacctgagcatggccggagacgtataaaactaaagcttacccgccgtcacgacgcacagaactctcgggcactagttccaccgacacccgcaccagaaatagacatgtgtaaggacagccgagcagaccattcccggccgccctaaaaacagcgcgccacccaa

SEQ ID NO: 173078 - DNA, 513 bp, Arabidopsis thaliana
ctcgacacacattagggagaagctgcgcacgcctgcagtgtaccggtccggtatacacgggtcgacccacgcgtccgcttttcaaatacagcaaagggtaaaggcttcaagcacaggggagcatcttaaagcattagcagtggagtcttccaatgctgactctgtatttcaacagctagacaaactacgggcagtttttgaagaatactcgaaactaactactttatttatggctgtcgctgagaaaactttgcacgagcatacagaagagctgggtcagaagtctgagctcttgatgacgatcaggaatcttgccagatatagctgacaagactccattgaagcactggtgcaacccctcgaaatgctgacaggatcttttagagaatcgtttcccaccaaaagaaaatcggacatcttgaatataagccttgcttctacgggcgcttggcggttaaaactttgtggagaaattccaatcagaaattaaagttgctttccacagcaccaaag

SEQ ID NO: 173079 - DNA, 460 bp, Arabidopsis thaliana
gcacgcgtacgtaagcttggatcctctagagcggccgccctttggtagttcttttatagcgtaccgtgcgtttgctgcttttctctcgacatggcaaaccataggtgtccctcggggctgtggggaatcgaatcgaagaaagggaaaagaacagcgtgttgataaacagggagaaccgccacccagcgatcgacgagggtgggctttttttttgggcgggtgggctccaaggttgctgaagcccgtgggcttcagagaaatcatgagagaggagagtcgccgcgacggtgagcggaggggtggaggaggtgtgcggcggtgtctccggcgtgaccttggtggcggagggcgagctcgagggtgtgcccacgccggggagttgcctttcgggcaccccctgccgtgatgcggaacgcaaggaggcacggccggagcggcggcagggtgcgcgggggtggtg

SEQ ID NO: 173080 - DNA, 494 bp, Arabidopsis thaliana
ctatagaagagttatgacgtcgcacgcacgcgtacgtaagcttggatcctctagagcggccgccctttttttttttttttttttttaagaaacttgcttaattaatacgagtctctgaattagaaagacttatatattacaaaaaaaaacgtagagaggtgttacataagaagctttcactttcacagtacttatatggatattcgaaagaaactcatctattgatctcacttggaaggccacgaaccagttgtgttttcaggagaagataagccattcgatacggtttcatcatcaccaagttgggaggattcttgatcagggaatagctccagtcgcatagacggggcaatgtttttcacatgaagccatggtagctcccataagctatttccaccaagagcactttcttgcaataagcacgcccttcggcttcttcaccagcattatgtttttgaagagctctggactggttctgggagctggcgcttttt

SEQ ID NO: 173081 - DNA, 521 bp, Arabidopsis thaliana
ttaggaaccactatagaagagtcttgacgtcgcatgcacgcgtacgtaagcttggatcctctagagcggccgcccttttttttttttttaaggagaagatagcatcatatagcttttcttagaactatataataaaaagtgaaatagataaagtgatgtataaacgagcattcgcaccatcttttaacaagatggaatattctccactatataaaataaaagtttcttctaaaaatcagaaactggacccgtttagggtcaaggatacaacttctgagagtagacaaaatgagactttttgtctcgagcttgcgcttgtttagtttagatggaccggagtgcacatagagcataaccggaagccaatgagcagaaggcgaatgcgacaaaggagacgtaagacagtgcgacagatgctctagctaagtctgggaacttgtctgctccccagtttgattgccaatcatctacgcggatcgaagctgaagttgaagctgatgcaagaagataagctagcattt

SEQ ID NO: 173082 - DNA, 582 bp, Arabidopsis thaliana
tgcacgcgtgcgtaagcttggatcctctagagtggccgccctttggtttttttttttttttatggattggtggtttatttgtgtgttgtgtttaagtaagggaaggagaggtggatacacagatatgaaggataataacgcgaagaatggtggttaagagatgggagcagaagccgtgtgcggcagccgacagcgatgaggcatgggggcggcgtagtgtggatttttgtttagaagggggggcatgagggggcaaaggggggtaggaaccctaaaacttgtgggagtaaacatcgggacgtccaggggtgagtgggtggaggcctgcggtggagagggtataggaagtagctgggggggctgcggggagagatggtcgtatggtggatgggggcgacgggggtgggaggaggagtagagaagagatgtgggagacagggggaagtggtggggggtgagtcactgtactgagttggtggagggggttggagagagataggggtgggtgggtgaatgagatgaggggaaatacatgagcgccgtgagggtcaagcgagggctgaggggggttaattggggggt

SEQ ID NO: 173083 - DNA, 493 bp, Arabidopsis thaliana
ctctgacacaatttatggagaagctacgccgcctgcagtgtaccgggacgctatacaggggtctgacccacgcgttcgcccacgcgtccgcctaaacccggaacccttatacacgcggagatccaagacgagccactatggatcatcttcgcgcgtgacatggacatataactcaaagaagagctgattatgaactttttcatgactatctacggccgaagagttttcttacacgttgctggtggcgcgggtatccccgtccagtacgtgaccaacatcatcatccacggtgttcacatacatgactgaaaaagaaaagggactggctgcgttcaagactctccgtcccattatgggagggggacactgtttgatggtaccccgtcttaattttggggggtcccacttttgttagccaatgctcgatggcaacatggctgaaggtctgtttaacgaatacttggatcacggggccttactttgtgtcaccctt

SEQ ID NO: 173084 - DNA, 558 bp, Arabidopsis thaliana
  unsure (1)..(558): unsure at all n locations
tctccttcctccgcgccgcgccaccgcccgccacccgcatattaattgggtacacacctganaagattctatgacgtcgcctgcacgcgtacgtaagcttggatcctctagagcggccgcccttttttttttttttttttttttttttttttttttttttttttttttttttttaaacaaaaaaaaaaaacttggcacttttactcattggggaaaattgggggggtaaattcacactggcgcaagatcgaaaatggttatgtacagaaacaaatattcggaaggggggtctaaaggtcaaaaaattaagtcccccataccaaaaattttcccatctctttggcttataaatggttaaaagaagggcacttcccttttattctattgaaccctagcacggcgtttaggcagaggggaggtcacccccccagggaggatctgagttagtcgggggcggcccagccacctcgcgttagagggcactaagatctaaacgtgggtcgctttttaggctacgcctccgcgactttgtcttgtgccccgcccaccccctttcgc

SEQ ID NO: 173085 - DNA, 506 bp, Arabidopsis thaliana
ctatagaagagttatgacgtcgcctgcacgcgtacgtaagcttggatcctctagagcggccgccctttgtttttttttttttttttttttttttttttttttttaaacagcccataagtgaaacccataaatcgagcccatgaacagatacgaaatctgtaaatccttttattacaaatacagagtcctttgttctatataactaaactaaaacatgtttttaagatactttcagttatgagccatgatctgttcctttcaaatgtgacccgtaaagctataaggcaaacataaaaaaaaacgtgttcgtttttaagggaggactaattgcctcatagctttttcaaaattttttcgcaggctcgctcgtaataagtcattctctgtatacattttacagcatcatcaaacttttggctttcaaacccttcggcgaaagagtcagaccatggctttaagttctcttgtacctgggatcggatcttggttaacgatgttgaatcttt

SEQ ID NO: 173086 - DNA, 519 bp, Arabidopsis thaliana
cagctacactctactcacattatgaggaagctgcgtcacgcctgcagtgtgccggtccgctatacacgggtcgacccacgcgttcgcggacgcgtgggcggacgcgtgggttaggattaaattaaaggatctgctgtggtggaagacgacggcacgagcttcaccgaagagcgaagatggtgaacattccgaaaactaagagcacttactgccagaacacggagtgcaagatgttcccttgcccatggtgacgcagcctaagaaaggtaaagatagccttgctgcccacggaaagcgtagatatgatcgtatacaatctggatatggaggtcaaaccaagcccgtcttccacaacatggctaagacaactgacaagattgtgctgaggcttcaatgccgaagctgcaagcatttgtcgcaacgcccgattaagaggcgcaagcactctgagatcggcggagacaagaagggaaagggaacctttctcttttaagttgttgtgcatatatctactttttt

SEQ ID NO: 173087 - DNA, 460 bp, Arabidopsis thaliana
tgacgtaactgcacgcgtacgtaagcttggatcctctagagcggccgccctttttttttttttttacacatagaaaagctaatcaggaatatgctttacatacaacattcacagctgaggtagatgcaattaggagagccaaactctcgaagaccctaactctatcataagaagaactacactctgtggatcacacaaaattttttttttacttgtgctggagtgaaaccagcagatgcttgatctagataacatgtatggttaccaataacgagggctcatatggtaatggttcaaagaggtcatattaaagtactaccatgaggacaaaccttctcaacctcccctaagaaaccccttttgatcttcttagtttctcttatctgcccaagtgcctcagcgatctcgagacgctgccgaacaaacgcggatccgtggtccttgaaaaggttccacgaag

SEQ ID NO: 173088 - DNA, 540 bp, Arabidopsis thaliana
aagatttatgaggtcacctgcacgcgtacgtaagcttggatcctctagagcggccgcccttttttttttttttttaatgagcctcgatttgcattttatatgaaacacaggatgacacacgtggatacattgaacacactgggtgacgcacataaaaggattgtagggagcagcagttatcaactatcaaatcccgagagaacagcagtgagttttttttctttggcggtgggctggggcgaccgacgccaacgaccagactagataaatacccgaggcgttactgctcctcctatcggaaaattcttgcctgttggggattctgttggcgttctaccattattggttgaaccggtggattgattactgctgttgcgggtgacaggatccctagcctagcggtttggtccatttgaatttattaggagctttgatattcggattactgtggcgcgaaagaagcctccgctgctcgggccgtcgaaccatttgaaagctgacgacagaccgagaccgaggaccgtgcagctaatacgtgta

SEQ ID NO: 173089 - DNA, 509 bp, Arabidopsis thaliana
taattggtacacactatagaagattatgacgtcgcatgcacgcgtacgtaagcttggatcctctagagcggccgcccttttttttttttttttttttaaatggatggtaaaatatttatatatggatagtaaaatctaccgtaaggtggtggtggttatacataattttcgttacaaatccttattgtttcaagagaaaaggttaaaacgaatttggattacacaaaaatttattcaacgttgagcattaggaaactattaacaaaatacacccagattagcaatttagtaaaaaagaccgtgcaagagacatgctttgacttactaactttttaagacccaagctatcgcttagagcttgaactttctgaggcaaaacaatatttagggtttgtaatgatcatgccatttgtcccaattaggtcaattatactctgatttactattttgagtatttctggtagattaagttaagctatgagtatgtattgtccccggcgaactataga

SEQ ID NO: 173090 - DNA, 408 bp, Arabidopsis thaliana
gctctattctgactcacatatagggaaagctggcacgcctgcaggtaccggtccggtattcacgggtcgacccacgcgtccgatttacgaccgtggccttatcggagccactcatgattggtgtgaagcctttgacacatacccacgaacgtttgatcttatccacgcatggaacaccttcacagaaacccaagcacgtggatgcagctttgaagatctgcttatcgagatggatcggatactacgcccagaaggatttgtcataattcgtgacacaactgacaatattagctatatcaagaagtatctgacattattgaaatgggataaatgggccacagagacaactccaaaaggtgatcctctgtcgaccaaagacgagaaagttttgatcgccagaaagaaact

SEQ ID NO: 173091 - DNA, 517 bp, Arabidopsis thaliana
  unsure (1)..(517): unsure at all n locations
caggtacaactctgactcaatctagggaaagctagcgccgcctgcaggtaccggtacgcaatacacgggtcgacccacgcgttcgagaagacacactaatagaaatccttgctacgttctattacacgacttccttgtactatccacgaatgctacacatacaaacaatcacctcccaaggtcaccgactgtgtattacggtaaagcatgctggaatgtagaatcaatagttcggcccgcgggtgagtctaactatgttgcagatgcaatcaatgctccatgcattattgcgtatgcactatcacgattggaatcgttcaaggctgtgacgcctacgtgctcctaggcggaacatacctctgagctaacggcgatccacaatctattgatgagagggtttactgtctttggaaaagctcctactcaactcgagaccgatagtactaaaacagaacccttgggcctaaatccttgcactcgatggacgtgaatttcgagcatanggccgggggacccg

SEQ ID NO: 173092 - DNA, 515 bp, Arabidopsis thaliana
ttaggtccactatagaagagtcttgacgtcgcatgcacgcgtacgtaagcttggatcctctagagcggccgccctttttttttttttttttaatacattttattttatatttttattcatattttggtacatttcccttcattctcttaacttgttaataatgacgatcataattggaagaaaatcttgcctcgagatatttaaccacgttcacatccagctgaaacgcttttgctaaaatctccggcataatcgaaggcttcgatccaaaaacggcgtctgcgattgtgattgtaccgggattttggctaccaagaccagcaaacgcaactgcgttcgtcctcccaacgttcacttgaaaatgtatcattcctatgggaaacacgaaaacgtctcccgggtaaagaacctttgagaacaatctgttgttgtcttggttcgatgttacaaaaccgactaagagtgttccttcgacaaccacgaggatctcagtggctcgtgggtgcgtgtgtggc

SEQ ID NO: 173093 - DNA, 472 bp, Arabidopsis thaliana
  unsure (1)..(472): unsure at all n locations
gaggaaggcagaggaaaggaggggggagtgttcttccggttactcgactcatgtaaggaaagctaacacgcctgcaggtaccggaccggaattcccgggtcgacccacgcntggcgaactcgggttcaaataaaaacccttaatcaaatcggaaaacgttttacaaagctagcgcagttttttataactgatacagggaggaaccatattctagttctctggattggaaggagagagagaataattgtgcaggggactagtcgggtttctccataaaaggtgggtaattcaagttgcgatctccattgattgatacgaaagaagatctaaaccttattatgacctgcttaatgacaatgaagataacctcctttcgcctgaagactggagattcacaacaggaagtctgagcaatatgggggacggcagggagatcgtcagcaaagactatcgacaagacactcaatgtcca

SEQ ID NO: 173094 - DNA, 494 bp, Arabidopsis thaliana
ttttgccatcccactcactattggaggacgacccctgcaggaccggccggaattccgggtttcccagcggggccacccgtcgacacaattggaatggacattgcacaagatacaaaccgtcttacacttcaccggaaaggagataggcccgacttttaccggaatacgcagcaaactcacaccaaacgcagccaactgaaccatctttgttctagaggtggtccaggaagctttaaaacgttcgatgaaagtgacttcaagcttgtgtctcacagaagaggattgtttcaatctgatgcagctcttttagacaatcaagagactaagtcttatgtcctcaagagtttgaatagtgatgggtctactttgtttaaagactttggtgactccatggtaaaaatggagtcggattggagtttaacggcgcacgttggggaagttcgcaagaagtgcataatggttaagtgtaggatatcgtacttcacatattggtg

SEQ ID NO: 173095 - DNA, 512 bp, Arabidopsis thaliana
  unsure (1)..(512): unsure at all n locations
gactcactacttggaaagctggtacgcctgcaggtaccggtccggaattcccgggtcgatccacgcgtccggtattatctgtaaaaacatagaataatgttcatattagcaacggtacttgcacttgctgaggattgggaacagcattgctaaaagattactgaattaacacacagcataggtagtcatactttaatgagcagctgatgctgagcaacagcaccttattatgcattggttgcacacagctataccattattctgacaaaatgaatgagcactcgaagctgacacagaagtattacttccatgactactgcatcatgaagagcttgttcatactgcaaatatacttactatcaaacgnggtgtgcatctcgttcctattgataggagcactctacgatccatatacagacttgatcagaggatctactaaccatcatacagcgtggctcgttctgtgcagtagaagatgatagcatatggaatttacactgtgaatactccat

SEQ ID NO: 173096 - DNA, 543 bp, Arabidopsis thaliana
cgcctcactattgggaaagctggaccgcctgcaggtaccggtccggaattcccgggtcgtcccacgcgtccggtttgtcttaacgtacaagataattcgaaaggtagacgtagacgttggatacttatttggtaggctcttaagaatcttaggtgtatctctttagttcgaaggctagattcagaatctctgtagattcattagtagcttttcctgtgtgatcgtcgtgttgtatgtatatagatcgaattgattctagctggtgaaaggtgaagctctgtgttgaatatgaagaaacacactttggatgagtcctgaaagtcattgatgctggctcctcctccaccgcttgttgctccctctcacggatctcgatcaagaaagatcgatggagacagcgtaaccaatgatctgatcagggagctgctgggaccagaggcgcaccatcgacgaggatcatcggtatctctgctatcaaggcttgcacctactgtgcagatgctgcgaatgctctgcgaattaggactcccgtcggcgtggaaa

SEQ ID NO: 173097 - DNA, 329 bp, Arabidopsis thaliana
cctgcaggtaccggtccggaatacccgggtcgtcccacgcgtccgaaaaacaccttcttacactaccaaaatattcatccacattcgtagtactaatcccctatctgtcttacagatccgaactcaaggccctatcaggtacacaaatcaatcgcgcacacacgacaggcaccatcaccgcttcaagatagttcaaccagctccaacagcaattttcctattttcagagggggggaaccacgcaccccgcttgataaagacattcatagaaaaactcccccacgtgtgtccttgtattgacacgaaacccaccgcctctttctatagca

SEQ ID NO: 173098 - DNA, 501 bp, Arabidopsis thaliana
actatagaagattatgacgtcgcctgcacgcgtacgtaagcttggatcctctagagcggccgccctttttttttttctttttttttttttttttaacgtcaaaagttctttttttaatagattaaaaaagaggactttgttctttgattctttaattgttacaatacaacagcttatcggatccatcagtctgatcataaccatctaaaaataaatcatgttataccaactaatcttaaggtaatttagtcgcctctgtggattcataagcagcatctgctgaagaagtatctatgacgttgagacccaactcctggttttgatcccatgacctctcgtactcttcaaatgtgagctgatggtcatctctgatatcatctgttactggtgcaataaaggaatgtgctaatttatcatcaagactcaatgtccacggctgctcaaagcttaggagcttaatgagcctggctacaaactctctccatttgttcaacttactct

SEQ ID NO: 173099 - DNA, 478 bp, Arabidopsis thaliana
  unsure (1)..(478): unsure at all n locations
acgactcactatttggaaagctgagccgcctgcaggtaccggtccggaattcccgggtcgaccctacgcgggcggccaaagctagattagattccctctctatcgattcttaattccttgctcctatgctcgtttctctaccggagacataacctctctgtctctgttatgcaccttgcctagatcgagagcgcatattcttggaatcagctgactctgcggtcatctgattaattgggattgagtaggagaaactttggaggtgatggacaacaaaaaagatcatgatcttgaggttagatcacaggttgaagctggttccgccgatcttttctttgtcgctcacctctatgnggttgacagcatgtacatgccctgccaagaagatgaaacanacatattcctattgaccttaatcactgactcaataaaggtcttaatatctgcattagattgccgcaattgcgccgaaaggaat

SEQ ID NO: 173100 - DNA, 499 bp, Arabidopsis thaliana
  unsure (1)..(499): unsure at all n locations
ctatagaagagttatgacgtcgactgcacgcgtacgtaagcttggatcctctagagcgtccgcccttttttttttttttttttttttttttttttttttttttttttttggacattgaaatgtatctattgttttcaactatcgtgtaggttttccttcaggttgtatctcctcaataggagacatttctccttgtatatcactatcaacatctgaacctacatcatctaaattcaattcatcatcatcatcctcatcatcagctgtagctatagctgatgcaacggatgtagctgatgttgtgttagtggatggagatggattggtttgggatgtagatgttgatcgnnancaccccggcgntatcctaaaacaaacaccatttccccctgattggccaaccgagtagaggtacgaccgagcctgaccatttgatcattcatcccaacgttactggatttgtcttattacataccctgatcgatttcatactcgctcg

SEQ ID NO: 173101 - DNA, 476 bp, Arabidopsis thaliana
cacgcgtacgtaagcttggatcctctagagcgtccgccctttggtttattcttttttttttttttttttttttcttgtcttgtgtgcctgaaagaagaaatcaggatgagggcccttacccgaaatcatcataccaccaatttgcaaatagcattggagccgtgaaatccccagctgcccttcaagagaacgaatttctctttttgcggggtggggaacaacgaactaaaaggcagcccggagaggcgggaataaaaggagccccacaggaacaaaccaagcggggggaaaaaaaggggtaatcttctgtcagaggccaaagcgaacaaaaacccgacctgctttttttgggatcggcaacgatggggagtgctgcgaccgtttagcgagaaagtcgccgcgtaaaaacacacaaaaatgtgtaagagcaaatagagaggcggaggagatacctagctggcgtggctgtaaagtag

SEQ ID NO: 173102 - DNA, 512 bp, Arabidopsis thaliana
cctgcaggtaccggtccggaattcccgggtcgtcccacgcgtgcgagcaaaccctaggtcatggatgggatgtacaatcaagacagagagcggaagtgcgcctattccgtcgtacggtggtgatggatacggcagaaggttttgttatggaggaggagatggtggatatccccgacgctgtgcataagcaggttggtagatagagggtgctacggaaaccgtggaggccagaggataaaaaatcgatcttagtagaggacgcggccctagggcgaagagaaaataggaaaggaacttagggatgaaaccaagtaccaaatcgctagaatgggcacgggcaaacgcaagagaagagaacattggaatgagagaaggagagaaggagagttgtgaagaggacgtgcaagcgatctggcgatgggaccgcggggcgggagattggtcggcgagctgaggcgtaggttggcggacaccttcggggttaactgagatcgtggagagtatagggggaa

SEQ ID NO: 173103 - DNA, 468 bp, Arabidopsis thaliana
ctatagaagattatgaggtcgactgcacgcgtacgtaagcttggatcctctagagcttccgccctttttttattcctttttttttttagaaaggcaaatttgtttattttctactcaaaagttcaaaacaaaaacataatgaggcggagatgtaagaaaaaaaacatataaggagaatataggtccaggaaaaaataaaaacatgtaaaacatagtttctctctacaagggtgggactgacaaaagaataacaacaccttgaaattgctttagagaaagaagagatcaacggctgagattttggcgacaaggtttcaatgggattttgacagaggaaaagagatagggggcgaactataaggaaggtgaggaagcccatgggttccagtgccggagcaagaattgcaattgggcataagcagagagcagcgcaatgctaaagcatatttgaaacggggcccccttaaa

SEQ ID NO: 173104 - DNA, 401 bp, Arabidopsis thaliana
ctgcacgcgtacgtaagcttggatcctctagagcttccggcctttgttaattcctttttttttttttttttttttccaagaaaggaaatcgtggtcgaattttttcttttgtgataaataaagcatgacatgtgtttacaatttgacattgcagttggacaatacatatgactccacacaacagacgtaagggaattagtccttagatgggcgataaaacaaggctccgaggtctgtatgatggaaaatatgcttgaagtaggcagtggggaggtgtcgagcgaactggccgaagcatgaccgagggaaactgcatggagtccctggggaggcattgaagcaccaaggtgtttagaagaaggtggggcccctggccggtggaactcgttggggtaaaagcg

SEQ ID NO: 173105 - DNA, 458 bp, Arabidopsis thaliana
  unsure (1)..(458): unsure at all n locations
cgactcactattgggaaagctggactgcctgcaggtaccggtccggaattcccgggtcgtcccacgcgtccgcccacgcgtccgcacacaattgggaatggacattgtccacagatcacaaaccgtctctacaacttcaccggaaaaggagatagtgacccgaacttagacacggaatacngcnnagtctaaactcagaaggaaaatatggcnagagcccaacttggaaataaacccccccccagcagganaagaatttttttttttttttttttttgtcggtagcggccgaacgcaccaacaaccaaaaaaaagttgctaggcgcgtggctgggcggccaaccgccgccaagggagtaaaacaagaaactaatacagtattttttcggttctgtgttggaggggcagtctagcagtaaaataacgacatactttaacatccagtcggtgctctcttg

SEQ ID NO: 173106 - DNA, 398 bp, Arabidopsis thaliana
  unsure (1)..(398): unsure at all n locations
actatagagatcnatggcgtcgactgcacgcgtacgtaagcttggatcctctagagctgccgccctttttttattctttttttatgataaactatactccaagaaaaaaaaacgcaaacccattctctctttatgggactaatataacatgacctattttatgatttaacaacccttgggacaccacatgtaacaccacacaacattctgagaagagtttttttttcgtaggggaaaaccggccccgaagaacctctgtcttaaaatactacctcaaccaaccatagtgcgcttctacgcaaactcataccaaaaggcccgttagaacgccagtccaacccacggataccatggaagaacccgacgaccttaaggaaaggcgacccggcgtcatcaat

SEQ ID NO: 173107 - DNA, 430 bp, Arabidopsis thaliana
gactcactatttggaagagctggaccgcctgcaggtaccggtccggaattcccgggtcgatccacgcgtccgctcacgcctgcgcacacaataagggaatggacatcgcccacagatcacaacccgtctttgcaacttcgccggcaatggagatagagacctgaactcagacacggaatacgcagtcaaactcacaggaacatgcaagtcttcagcttccacatcttatgtacacatggacccaggaagctttaccacgttcgaagacagtgacttcacgctcgagcctgacagaagatgattgacccaatctagatgctgatctgtaagagcatctagatactatgttttatgtgataaagacgacgaatagggatggggtctactctctttaaagactctggagaatccatggaaagaatgggtccga

SEQ ID NO: 173108 - DNA, 549 bp, Arabidopsis thaliana
agctctccacgactcactatatggaaagctggtacgcctgcaggtaccggtccggaattcccgggtcgacccacgcgtccgggaggatctgcttcagatctaaaggcaatcaaagagaagaagaagaaagctaagcgttcccgcaaaaagcagcttgttcaagaagaggaacgagtaaagggaaaagtcagcatgaaggtgtacttgtcatacatgggtgctgcatataaaggggctctgattcctcttattatactcgcacaagctgctttccaatttcttcagattgctagtaattggtggatggcttgggcaaatcctcaaactgaaggtgacgaatctaaagtggatcctactctgcttctcatcgtttatacggctttagctttcgggagctctgtgttcatatttgttcgagctgctctggttgcaacttttggtcttgcagctgcacagaaactgttcttaaatatgctcagaagtgtgttccgagcgccaatgtcattctttgattccactcctgcaggaagaattttgaatcgggtttct

SEQ ID NO: 173109 - DNA, 531 bp, Arabidopsis thaliana
ctactgcgactcactatttggaaagctggaccgcctgcaggtaccggtccggaattcccgggtcgacccacgcgtccgcgaagtccttggaagacgccgggtgacactgaggaagactgtggtcaatccatagggcccatcaggcagaccatggaacggatctgacagcgtcaagcacttgggtccattctctggtgaatgaccgatctaccttaccggatagtatcctttagactactgatgggacaccggccgactctcatatgacctggatacattctcatggatcggataactagaatgaatccacagcatgtggcccatgctgggagccctatgctgtatggttcgtgagctcctgaattcaaacggagcctagatctgagaggcggctcggttcaaggtcggttcacagatcttcatcaatggacgactccaatacttgcgaaaccgtatctaggttcacgctcagagcatgtttggcatttgggccacacaagttaattggatgggagccgttgaatggtacat

SEQ ID NO: 173110 - DNA, 544 bp, Arabidopsis thaliana
ctcactatttggaaggctggaccgcctgcaggtaccggtccggaattcccgggtcgttccacgcgtccgaaaaaaccttatttaactatcgcaacttcaaaatatagtacctaaaatcaaacgatcgtttcagaacgaaggaggaacaataagatcaatcagagtggttcgaactgggaacaactgacaactacgatacttacaatattaacacctttagtttcttttataaaagcattacttatagaagactggacactataacagtaatgactaccatgatgggtcaagtcttggagaaccgaggaacgattttgtaatacacacacaccgggtggacctgcaagggttgtgatcagtgcgaactcgcgcagctgctgttagctcaggtttccgggtctcaatttgtggcgtgctctgccggattgatacacatcagacagtatgatacctgatacccgagcctcgaagatgtccatacaccagcgtgctgaaacagcgtatgcagtggggaggtacgaggcgatatgtgtagagacatttg

SEQ ID NO: 173111 - DNA, 438 bp, Arabidopsis thaliana
gtcacctgcacgcgtacgtaagcttggatcctctagagctggccgcccttttttattcttttttttttttttttcgagtatttctcctatttcgtgtaagttctctatttttggtttttggggacacgaaaaacccaaggggggcgtcagaaatttattaaaaaagcacaagagacgcgggaggaaaagcctcccaagggttttttttaaagagggtttgtccctggggtggaccacggagcagggggtagtaaccgtaattttacccccgggaaaagaacaaaaaaatacgtggggtgggagtcctataagctccggagaaactgattttttttgggccggaaaagctggcgccgccatgggtgagcccccccaggaggggaagacccagaggggggaacgaagatgtgcaccattggaggccatcaaaaggggggt

SEQ ID NO: 173112 - DNA, 405 bp, Arabidopsis thaliana
  unsure (1)..(405): unsure at all n locations
cagcctcccccccagcgccagggcataggntagcactgctcaagtctactcgactcactattgggaaggctgacccgcctgcaggagccggaccggaattaccgggtcttacccacacgtgggaccacccgtccggacaaaccacattatccatacctaaagaggcttaccagggatctctttagcccagaaggccatcagcgacgactatcgctccccaacgcacaatctagaagcatccacagcacagacccaagcctccgactcagcgcgcgctttttttgatcaagcgttgagcagcgcccatcaatagtatcactcaaaatgcacaggtgagactagcagaaacatgtcctctaggacctccacggagcgcatgctacaggaatcgcccaccccccccag

SEQ ID NO: 173113 - DNA, 372 bp, Arabidopsis thaliana
tcactaatggaggctggacgcctgcaggtaccggtccggaattcccgggtcgatcccacgcgtccgctcacgcctgattggaaggagcatttgacagtgaaccatacagctgtagaacgaaagctcgaggtcataactatccagtattgattccaagagagctactttagagctatttgacactgagaagaagcccaacagcttccacccctatatatcgtgggtctccctgatggacaacggctaagacatattggttgaaacctaagatctggcaaaggtgttgagaagttttaagagcttacttatcaagtatgcgtaagagacattactacctgaacagcatcttcatagataatccggagaatcctt

SEQ ID NO: 173114 - DNA, 541 bp, Arabidopsis thaliana
gactcactattgggaaagctggaccgcctgcaggtaccggtccggaattcccgggtcgatccacgcgtccgcccacggccttcgaggacgcgtgggctgacattggcaaaccgggctggatccctcgtgttctcgggtatgatcaggagtagcatatacgaccgggaagcacaaaggcacgctcactggtccgtgattgatccacatgacgcccttagatgcttttgttttatgtgggtatacttgacatcactcataatgtcctggatactgcatcatcgattgcatgttgagaatgattcttgagcgtgggaccaaggctgtgtacactcatctgtatggtaagatcccgacctaatatctatgggcccttttatatatgagcgggctcagctaattattctttggatattgtcttcaattgtacgatccagatgctttcgaacctgtatcaagttttacgttagatcttgatggacctttggggcagacgacatatttggaattgaatccgatgaattctagcattaaaaaagaaaga

SEQ ID NO: 173115 - DNA, 545 bp, Arabidopsis thaliana
cgactcactatttggaaagctggaccgcctgcaggtaccggtccggaattcccgggtcgacccacgcgtccgattcattcttggtactgtacaccagctcaatctattagttaagacttagagatcgtaacagttaccggatctgatcgtaaagatctgttggacacatatgaataaatcacctctatatcattctctgataacgattattaacttgcgactgctgcactttatggagatagggtgacggacttgcgcatgtcaaagaactatccaaacctttgactttccatatgcactctagagagcagtttgaccatagtaagaacttatcttgtgattgttgctacagagatgacagtattccctgaagctagtctataaagcaaaatggaacccattcatgactgttcgagatctgtccggtacacgttaaggaactaatgttagtttggacttgactccgaatacgtagcacctcgccccaattggaccgtattaccaggatatttgcctaacctgatgatgacacttctgaagataca

SEQ ID NO: 173116 - DNA, 475 bp, Arabidopsis thaliana
  unsure (1)..(475): unsure at all n locations
ctatagnagagttatgacgtcgcctgcacgcgtacgtaagcttggatcctctagagcggccgccctttttttttttttttctcaacagattatttattctcatcggcaaaatatttattccccaaaacaccaacacctttttcgatagagaaaactccttaactaaatatgcattcccactcaaaaccctggaaaagagagcctcaaaatctttgggtgtttttgcggcgtgggatttaaacaaaacggatcaatagctcccccctctccttggtttgttgcttgtctatgatgtcctctcatgcgattttccaacacgacgtcgctactgattgctgcgatggacttcccggacgatcacccttaaccaccttacagaacgacccacggaggaggacaaggaaccggtacagcgggagcggctagggtttaacccgtgggtcacttggagatcaggaatccgatcggacttcaa

SEQ ID NO: 173117 - DNA, 490 bp, Arabidopsis thaliana
  unsure (1)..(490): unsure at all n locations
ctatagnagagtctatgacgtcgcatgcacgcgtacgtaagcttggatcctctagagcggccgccctttttttttttttttttcaacagattatttattctcatcggcaaaatatatatccccaaaacactatcatcttttttgatagagaaaaatccttaactaaatatccattcccactcaaaaccctaagaaaagagagcctcaaaatctttgagtgttttgcgtcgtcggttttgaacaaaaaggttcaataactctcctctctccttgtgttctttcttgcctattatctcctctcatcccattttcccaacacgacggcgttacagattccaccgatggacttcccggacgatcacccttaaccaccttacaaaccgacgacgggaggaggacaaggaaccggcacagccgggccggctagggttaacccgtggttcacttggagatcaggatccgaatcggacttcaatgggtctcggttaac

SEQ ID NO: 173118 - DNA, 488 bp, Arabidopsis thaliana
  unsure (1)..(488): unsure at all n locations
ctatagnagagtctatgacgtcgcctgcacgcgtacgtaagcttggatcctctagagcggccgccctttttttttttttttttttttttttttttttttttttttttttttttttttttttttttttttttttttttttttttttttttttggggacaaaaccggaattggttaaagaattgggcccttaaaccaaacccgggaaaaaaaaaaaaaagccctttccccgatttgggggtccccccaaaaaaccaatttgggggaaattaaaccttaagggtaatggtccccaatattattatgggggggggaagggccagccccccctggggttattggaaaaaaaaaaaaacccctggggctctttttggggaagcccaacgaattttttttggggggcaactttggggttttattaacccggcttcccaaaaaccccgcgggagaaaccttaaacttttcgcaaaagggaacccctttttgggaac

SEQ ID NO: 173119 - DNA, 502 bp, Arabidopsis thaliana
cctgcaggtaccggtccggaattcccgggtcgttccacgcgtccgcccacgcgtccgcaaataaacattcttatacctccactcctcctctgtctgattccttcacccaattcttgtctcgtttccatcaatccattgtctttgattccagaggttcttggtttatttggatgtggtgattatggatatggattcgtggttattgctgagaagggcatgtgtgctttcttttctccttggctattgttccgtgtatcaaagcctttgtgttgatgatgctcatgatgatccaaaaccaggcgtgactttgcaagtagatgcttctaatggacgtggaccacccattcctggaacgctctttgagattttctcgcggagatcaaccatgctggtgccaggagcatattggcccaactcttcaaccccagagggtgtgacctctgacgggcaaacacaaccctgtatattcggccatggcacaactgttcgtgatcattcaatc

SEQ ID NO: 173120 - DNA, 420 bp, Arabidopsis thaliana
actatagaagttttggagtcactgcacgcgtacgtaagcttggatcctctagagttgccgcccttttttaatcttttttttttttttgcataaaagaccttttactatatagaagttatgggtttcaaacttcaacgtacatcagaaaagaatcggatcaaaagaaagcaaatgaaaaacaagcaaaaggatccaaagagttgataactcgggttttttttacatgcggtgcaaacaaatgatcataattggtgtgatgaacgaaccacgaccggtgactacgccgaatcaagaaaaacaacaaactggtttgctggttcacttggctgtggcacagaacttgtttttttcgaggcttgagaacatggcgcggagtggatctccccccttgacaaacgggcagcggtacttgggctcaaa

SEQ ID NO: 173121 - DNA, 491 bp, Arabidopsis thaliana
cctgcggtccggtccggattcccgggtctccccgcgtccgaaaacctttgatcttcacgtgtctctcgtttttgtggccgactacgatcgctgattcgactgccggagattcctttaatcgttagattctcgtggagggataatgaatcctgaatatgactatctgtacaagcttttgctaatttgtttgtttggggggggtgaaagatgctcagctataaaatttgctgatgattcttccctggatagctacataagcaccatctggtggtgactataaaattaacacacgtggagaggaccgggagaccgtgctactgcagtagctgggcgcaggagggcagaaacgtttgaggacattcgtcgggggtagtacggatgagcgggtggcatgctgtatacttgtggtgggacgcgaagtgaaaggttggacggctgtctagaagtgggtgggtggaaggggccagggctgtggccaaagtgggaaccta

SEQ ID NO: 173122 - DNA, 495 bp, Arabidopsis thaliana columbia
atgattctggctagcgctacttcgactcactatttggaaagctggaccgcctgcaggtaccggtccggaattcccgggtcgtcccacgcgtccggaaccacgttcatgacctcagttgtggcagctatggtcatccacctcatcctccgagcctccggtttctcagctagtcaagtagacaccattccaggcatcctcctcctgatcttcatatgcgtcttgatatgcccatttaacacattctatttttcaacaaggttctgcttcatccgcatcttgcggaagattgtttgctcaccgttctacaaggatttgatggttgatttcttcatgggcgatcaacttactagccagattccattgctgagacaccttgagacaaccgggtgttacttcttggctcagagcttcaaactcacgaatacaatacctgcaaaaacgggagatactatagaagaatttgcttacttgatttctttcttaccctaactttgg

SEQ ID NO: 173123 - DNA, 535 bp, Arabidopsis thaliana
cgacctcactatttggaagctggaccgcctgcaggtaccggtccggaattcccgggtcgttccacgcgtccgcccatgcttacagagataaacatgcttatacctacactactgctctgtctgattcctttacccagttcttgtctagctaccatcaatgcattgtctttgattccagacgttcttgaattattcggatgacgcgagaatggagatggagttcgtgtatgtggggagaacgaaagcgagcttgcttttctccttcgatactgtcccgggctcacagccttgccggcgacgacgctactgtagatccaaacccactcgtgacttctgacgtggaccgctctttaacgggggtggacctcgcaaaaggccgagacagcggtgccgggactgatgtgctggggagatgacgcgctctttgtgcgcagcggcttattgctcccaaatttggcttggccccattgggttgtgcaaccaggggggaccactccatccttctaatttttctgcgcccctgtctgccgtgatc

SEQ ID NO: 173124 - DNA, 487 bp, Arabidopsis thaliana
  unsure (1)..(487): unsure at all n locations
ctantagaagattatgacgtcgactgcacgcgtacgtaagcttggatcctctagagcggccgccctttttttttttttttgtcgactattgagtgtcaaccatattatttggaaacataaccatacaagtataaaaaacaattactccgaagtccctagtgatataaattcacaacaattcaaccattcatcccaagtaaccaaaagcctcagtcccttgtaaggtgtaaacgggtttaaacatcagcctcaggctacaaccggatacgatgaacatgttgcaacaccacacatgttctttcccatttccatcttgaagtagccattgtctccccattcacctccccatgagttctttataagccagtacgggacgtcgtcttcaactccataaccaactgctaacactgcatggtttacatccattggagtgttaccacatgtattgctagtaaaaactcccttcttataaaacctgaattcatgt

SEQ ID NO: 173125 - DNA, 501 bp, Arabidopsis thaliana
cgactcactagtgggaaggctggaccgcctgcaggtaccggtccggaattcccgggtcgtcccacgcgtccgcacacgcgtccgcttaacaaacaattttcttcataatattaattctcaagatcttaaagattatattaatacgaagagaaaattcaaatgggtcttgatgattcatgcaacacaggtcttgctcttggtttaggcctctcaccaacgtccatgaattacaatgatgccatcaagaaatcttcctccactgtggaccatcgttccatcaggctcgatccgtggttgactctaagcctatcccggagagagctacaagatcaagactggtgccggcgccggcgaccaaatttgcccggagacctggtgcccacacggggtgttatctttgtggagcggatgggtacagagagaaagagaactctggggcgggtatggcgagaacatgccgatgacacaactgggacaggcgtgtgttgcagagtgagtgac

SEQ ID NO: 173126 - DNA, 488 bp, Arabidopsis thaliana
  unsure (1)..(488): unsure at all n locations
ctgcangaaccggtccggaattcccgggtctacccaggcgggcggaagccatttgaacattcacgtctctctcgttgtgggggccgacgacaatcgctgaattgactgccggagattgctttgatggggagattctagaggggggataatgggtgcgtgagtagactgtgggggagagggggcgggagttttgttctttgggggggggaaggaaggtgggcggtgggattttttgaaaaagccccccagagagcgagctaagcagcagcgcggagggtaagaaggtggcgcgagggggggagaggggaaaggtacggagaggggaggggggagaagaggggaaagaatagagatgcaggagaagcgaaggcaaactgagggggataggggcgggggaggacagagcggaggggagaggcggaagacgaggggggggcaggagaagggcaacgaaggagcggacgcaggaaggaggagaaacaaaaaga

SEQ ID NO: 173127 - DNA, 274 bp, Arabidopsis thaliana
actcactatagtgaaagctggtacgcctgcaggtaccggtccggaattcccgggtcgacccacgcgtccgatctgcatgctctcaacacccgacttaaatagacactttgcagatgttgctgtaacaagatggagactcccataatattggatatatacagtttttcacatctcgaagaacaaatgagatgagacggatatatagctcttctatactgtcgcagcgaaacatgcatgcttctgccttagcttgaatgcatctaatgcgacgaga

SEQ ID NO: 173128 - DNA, 426 bp, Arabidopsis thaliana
  unsure (1)..(426): unsure at all n locations
tgcaggtaccggtccggaattcccgggtcgttccacgcgggcgcccaagccttcgcttaacaaacaannnnccccataagaggaannctcaagatcttaaagattatattaatacgaagagaaaatccaaacgggtcttgatgatccatgctacacagggcttggtcttggctgaggcctcgcaccaccgcctttgtgctattagggggttgaaaacaaaacagaggggcgattttttttcaataaacccccccccgcccgtgcggggggtgggaccccccctattgaaaagaacataccaccccaccgcccaaaacccaaacgcccagcgcacaacacaccacgcacaccgccgcacacgccgcccccaaaagacctggtcgcggcaagcgcgcccgagcgcagcccacccggctcccacaacat

SEQ ID NO: 173129 - DNA, 531 bp, Arabidopsis thaliana
cctgcaggaaccggtccggaattcccgggtcttcccacgcgtccgaaaccctttacacttttcaacactgtctcgcatagaggacagctactcaacactgaaattgctgtgccacaaacatacaatcatagaagttttcctgcaagggcggtgtacccaccgacgtaagatcttagggcaaaagagagagggcaggttttctcctttttcagaggggtacgaacgccgagcgagtagcagggactgtgtggcacagcactccgcgacgagtggttaggttgaggagacccggcagggtaaagacgcaaagaaaccgacacccgaacgagacacgccggagggacgagaacgcacgggcgcgtcgcgaccaaaccgcggagcgcagagaagcgccgcggccacacgtgacgagaagcgacgaagccgaggaacgtgccgcattggccagacgcacaacacaggagaccggcctacgtcacacagacacggccagatagacggaggagcgacgcgacgagtgcgcgaccaccc

SEQ ID NO: 173130 - DNA, 479 bp, Arabidopsis thaliana
  unsure (1)..(479): unsure at all n locations
actatanaagattatggagtacactgcacgcgtacgtaagcttggatcctctagagcttccgcccttgttttttttttttttgaacacaacgaacccgaggagataaattacaatctgaaacctcccggagacgcgatacaaaatccaattgtcgctacctcgactctacatgttgcactgctagaataaagaagccatctaatcttttctacctactggtctgggcgcaaacaaattcttaccattccggatgatttaaggcgttcgattgtacttgagatgttgctcatagaattcaatcaggaaatgaggattgtgagccttgagaaatctggcgtccaccaatggttattttcccattgggacctagcgcgctaaaagggtacgccccactttctgcttgtcgttgttgatcttgcctaatgacgtgcatgatgttaatcgtgcgggctttattacttagttaaccgcatcctgc

SEQ ID NO: 173131 - DNA, 375 bp, Arabidopsis thaliana
ggggaaaacggtacgcctgcaggtaccggtccggaattcccgtgtcgacccacgcgtacgccttgatctacatgatatcatctggccctgagagtgattgagaagtatgctagggcctccccagatgatgcaaggttgcgtaggactgtgcccaagtgtaagctggaaggaggcagtatgaaacgtgtactaagggttacgggaggttttttttttttatggggaggtgagagaggagcacgggaaggcacggagctactgtgtattcccatatacggttgagacgccgaagggaactagctggatgagttggtgggtgagtagtggagcgtgatgattcaagtgagttgaattagggcatgcgcgcttggcgag

SEQ ID NO: 173132 - DNA, 491 bp, Arabidopsis thaliana
  unsure (1)..(491): unsure at all n locations
tttaggacacactantagagatctatgacgtcgcatgcacgcgtacgtaagcttggatcctctagagcggccgccctttttttttttttttttttttttttttttttttttttggaagaaaaatcaatacatatcagaacatatattacataaggttttacagacaactggtttttatcatttatggaaactttacactctcaaactttacatcttctacacattaaaatcatcataagatcaaaatcataagaccttcaggaccaaagatattttttcaactcaaagaacacaaaccaggatccgaaacgttccaaacttgccaggcttcagtttcccacagaccatctttttgatctgagtaaaaggctgcagcccccgtcttgagtcggaaaggatcgatgaaacagaaagctgaacatacagctcaaatcagtaaaccttggtcagacatgaagaactaaattaatatctattttggagtcatggct

SEQ ID NO: 173133 - DNA, 491 bp, Arabidopsis thaliana
  unsure (1)..(491): unsure at all n locations
ctgcacgcgtacgtaagcttggatcctctagagcgtccgccctttggtaaaactttttttttataaaatgtttaagcaaaaccaagaacatatagcgattgggacgaaacagcagtctactagtgttggggacacagagggattacctatctctgactaacagtaacatactatgaagagacgagagtttgagagacttgatagattcgagtggttacaccaacccntggttcaagctattcttaaaactaaccctgctttgttgattagaaacattcagactctaattaaactaaagaggctgatgagttttttccattcacaaaaaacaccctattacatccccgtggatcaaaaagacaggggggggcatttgcgatcttacgttttggtgttgaaagcatcttgcacaatagggatgtgaaaccttttgggattcctctggggagtaaattggggtgggaaaaaaaaattttttttttgtatagaaa

SEQ ID NO: 173134 - DNA, 493 bp, Arabidopsis thaliana
atgatatgccggcactaatacgactcacttagggaaagccggtacgcctgcaggtaccggtccggaattcccgggtcgacccacgcgtccggatagatcaaatgtttgacgacgtttaggaggccgatttggtatgctgcatatgaagacatctgctatgatatgagataatgtcgccgagcacctcactgatatccacttgctccgcgtatatgacgtaggagagacagatgttcgtttatgacgacttggtttactcttgacgagacctcatacatgctatggatacgcactatggcttctacggacgtccagttattgcggatcttcgagctacgccatatccccttatgtgttcggcggctagttccacccctaattccagcatcgtgatcttggtgaggtgttactagacgcaggatgtaaaactggagatagactcagagggagttgagcattggtaatcattgatagttggcactattggtggttt

SEQ ID NO: 173135 - DNA, 456 bp, Arabidopsis thaliana
  unsure (1)..(456): unsure at all n locations
tacgcctgcggtaccggnccggaattcccttttcgacccacgcgtccgcccacgcgtccgatctgcagatcatttatacacagccatttgcggaatcataccaaacatttctagcccagggtgcaggatatttcattgtggaggatcgggtgattaggacagctggaaatttcttgagggctgaacatttttttacaaggggggaaacagccatttccaaaattgcatccatattggagaaccagtttggcaggatggatgcccctactcatttgcttggggggaaagacgaagtaactatgctggggacaacccttagacaagaggggtatagaacagggagcaggtgcttgaagcccttaacaagaggccggagagagtgccacggacattattggggagagagggaccgatcggcgttgtggcactggagatatacagagggaaagtagagag

SEQ ID NO: 173136 - DNA, 485 bp, Arabidopsis thaliana
  unsure (1)..(485): unsure at all n locations
ctatagaagatcnatggcgtcacctgcacgcgtacgtaagcttggatcctctagagcggccgccctttgttttttttttttttttttttttttttttttttttttttttttttttttttttttttagctaaactatattttggattcccgggaaaaatacacatttaatgacctcctgaggacttttaataccgtaacaagttttttaaaaaaacacttttttttataaaggaaaggggttcgtcaaattttggggggattggacccgttaaacagaaaaacatcaatttgggcttttaaaaagaggggacgtaagaaacgacggcagggatgtcatcaaaattttctccgaaatacctggagccaggctcctgaaccccaattgcgaaagggctctgccgttttttgtcaaattgtttttgacgtgccaactctgaaatgttttgagctgggccttttgggtgtaaacacggcctttaccggat

SEQ ID NO: 173137 - DNA, 492 bp, Arabidopsis thaliana
ttggcgtagcatgcacgcgtacgtaagcttggatcctctagagcaggccgcccttagttttttttttttggtagaagaggtatgcagatagagaaaccatcgagaaacgcggcgaggaatcgtattgtttggaagatggcgcgtgttcggaccggtttcagttaacagacggagcgggaccatggagacgctgctcggtggagcacagtagcatcgtagttgagcatgttgggtgagggagaattgtgtaaggaaaaggaatatcataggggaataacgctgcgagaagcgtggtgagtgcgatagtgattttgagaggagaaatgaggagtgcgtgtagagaggcttactttttctacttatgagatcgcaccagcagagttgaggagacatgagcaatcaatcagcataaaggttacaagtagagagatttaagagatgtgaggaagcctaactccataggccccctagtgctctaatagacgttaggtg

SEQ ID NO: 173138 - DNA, 546 bp, Arabidopsis thaliana
  unsure (1)..(546): unsure at all n locations
ttaggtacacactatagaagagtcttgacgtcgcatgcacgcgtacgtaagcttggatcctctagagcggccgccctttttttttttttttctcataaaggttaggttgttatttaatatcagtatctacataagtgcaacatcttgaagaatttgaatataaatttttagttttcatataaacttctcatgaaagaacaagaatgtgcctgctaatgagacattgatgctaaaagctattaacattctacaatcttcttttactactaagagccagggatgagttgagatgagactcttctctcttggccatcacagtactactagcaaacacctntttttggtctncttccgtttttaccccctggtggagcaaaactccaattcaaggaatgggtttctgctcanggcggatcctggaaagggaagtgaaataattcagacctgatanncaagaactgaggggacannnaaggcgtcagggctttgcaacannactccatttggaacttaccccaaacatntgnnaagtatcaaaaagctttc

SEQ ID NO: 173139 - DNA, 473 bp, Arabidopsis thaliana
tgcacgcgtacgtaagcttggatcctctagagtggccgccctttttttttttttttgaccaaccaacatgaataccatatggcggacattctatatcgctggtacaaataagataccttcaggttgatccaggaggtttcaaggtcaaataatgcactcttcaaacatactagctaagtgtgagaacgaaacttttttttttacgggagaggaccccacaacttcaatcctcggctccgattactcccccccccactttcgttaggcttgacaacaaagtgcccagtcattggcggcgcctgattcttgaggcttgtttgagacctacatccaggatccttgagatttcgccctcaccagaggatcgcatgggtgggggctgtgcccgggcgacccgctcaccgcgaacggcggcgcgcggagcccgcgcgtcgactcacacatcgaggaaagttgataggtaggaaggcggc

SEQ ID NO: 173140 - DNA, 506 bp, Arabidopsis thaliana
ggcacgcctgcaggtaccggtccggaattcccttgtcgacccacgcgtacccccagagacgatccatcttggtgcttaactcagttgaactacatatctaactggaggctgcgacatattaaaaagtagagacatgaaattgaacctaaagataatgacgagttggatggcactatcactagagaaggttgaagccatattttttttaaccggagggggcgagcccataccgattgaaaccagaaagaatataatcccacattcaactttcacgactaatcagcaaaaatcatgtctgcaaaagtgtacccctagaacatcaatgacgctataaactgcatgaatgaatgagaggccaacaaatccggcacttcaaaaaagacccatcgcctgtcgtaagaccgcgataacgtaatgctacctgggtgagcaacgtaaacctagctcagtatgtgccacgtcgccccactgcgtaaagagctggaagggcagcaggaaaatacatg

SEQ ID NO: 173141 - DNA, 512 bp, Arabidopsis thaliana
  unsure (1)..(512): unsure at all n locations
agctccctacgactcacttagggaaagctgctacgcctgcaggtaccggtccggaattcccgggtcgacccacgcgtccgcgaaaccaatgaagaactgggtagtgaggggtttcgtgagttcatatctcttgttgatcttaagaaaaatggtttccttattggagattgttgtatgtttggtgtcaagttccatgggattgaacctgctaaacccggaacagcggatagttttagcttaatagagaagcctcttaatcacagagtcacttggatgatgaccatgttctcgtccttcaaccctggaaacgttcatcagtctaatgaatttgtcgttggaacccggaaatggagaattaaagttcatccaagagggtctatgggtgaaaaagacanatcattttctgtgtatctatcggcactaggggtttgtcaataatgcaccaaagactnaaacttacgcgaggttcaagctgcgtgtattggatcaagttagcaggaatcatgttgaga

SEQ ID NO: 173142 - DNA, 506 bp, Arabidopsis thaliana
acctatagaagagctatttatttttcatgcacgcgtacgtaagcttggatcctctagagcggttcgcctttttttttttttcttaaactggtgaccagtaaaatacattcttaacaacgaacactaaactccgggcggatttctagtgcttgacaaacacaaaccccatgttttggtgaccctcaccatcccattccctaaatccaaatgagggtaaaccatttttttctcctgggtggggcggccccacaacacaattcaactctttccgctcgtgctagctcctccctcctgcgccccaacccgctttaaaagacagcttccttagtttcgattccaacccccaggttcgttctccgcccctccacacatcgctctttattcgtcaacctccatatgttctttttctatcccgccgtacactaaaataggtcaaaacttctttcgtgggccgctgatgtctacacgccttacattatgcgaaatatctttccgggcaatggctt

SEQ ID NO: 173143 - DNA, 426 bp, Arabidopsis thaliana
gggaagctgcccgcctgcggtaccggtccggaattcccgggtcgacccacgcgtccgtgattttctgatggagccgctgttgcctttcatatgtctaatgcacatttgtatgaggaagaatcatgatgagatagatttcgagtttcttggtaacattatgagaagactattggactagctctcacaaacatttaccggtaatgtttttttctccattccgcgaaccagaagcagagatactaatctcctggttcagatcctcactgaagattttacatcaagactgtgtcctactggtctgattcttacatgatattctttgtagacaatgttcctatccgagaggtccccttcctgcggacatgggtggttacttttccatccccgcgaattctctctacccatcaattcgggaccgctctgaat

SEQ ID NO: 173144 - DNA, 487 bp, Arabidopsis thaliana
cgactcactatatggaaagctgccacgcctgcaggtaccggtccggaattcccgggtcgacccacgcgtccgtccacgcgtacgagaagatcctctttgcttcacttctcatatgctcactgatccaatccatccacggggcggaaaaagtaagactcttcaaagagctggacaaaggtgcacttgatgtcaccactaaacccagccgagaaggaccatttgttgttttggatgccggcaaggatacgttgaacattacatggacgctaagctcgattgggtctaaaagagaggctgaatttaagatcatcaaagttaagctatgctacgctccacctagccaagatgaccgaccatggcgcaaaacccatgacgagctcttaaaagacaagacctgcccacacaagatcatagtcaagccttatgacaaaacacttcaatcaactacttggactcttgagcgtgacatccccaccggaacctactt

SEQ ID NO: 173145 - DNA, 517 bp, Arabidopsis thaliana
tatagaagactgatgaggtcgaacgcacgcgtacgtaagcttggatcctctagagctgttcgccctttgtttttttctttttggaccataacaaaaacataaatattcaattttctggaataaacaataaatggactgtatcaatgaaacccaactattaatactgaatagaaacatagcggaccttgttttatatacacgaaatccaacaggtgaattttttttgtatctagttatggaatacacaacaacattaaaaagccttggataaaatgcgtttggaaagatctgtactctcaagaactaaagggcttttcgttgaatgcagtggttaggacaaatagtctattagacttgagaaccaaattggcctttgctgggtttcctgcttttaagcgttaacatagtaatttgtttctggtcctaccgcattagacccgtccgactgaaaaaatattcaaaaacccattatccaaagatagtattaagtttagttgcttcagcactacatcccctt

SEQ ID NO: 173146 - DNA, 491 bp, Arabidopsis thaliana
ctatagaagcattatgacgtcgactgcacgcgtacgtaagcttggatcctctagagcggccgccctttttttttttttttagttgaatctttgtctcattaacaaatttttacatatacaaaagcaaaactcatttaaaaagctgtaatagtaaccctaaatagtgtacaaactccctaagaagaattttccttgagaagcttcttctatattggattcatgacaacgtctccttctaacatccgcaacacctgagacattcgtggccttgagttagggtcacggcgaatgcagaggtaagcacatagtgccatacaataaacttcttgctcacagtagcaattcattagacgcggatcaagaagttcgttaatggcttgtttctgcaacaatggtcttgcccattcggtgagacattgttgacctttaggacgttttatgtccatagcttttcttcctgtgataagctcaactaagactaccccaaatga

SEQ ID NO: 173147 - DNA, 491 bp, Arabidopsis thaliana
atgacgtcgcctgcacgcgtacgtaagcttggatcctctagagcggccgccctttggttttttttttttttttttttttttttttttttttttttttttttttttttttttttgggggaaaaacctctactaaaaatattgaaaattcagtttttaaaatagagaaacccaaacttggttttatgaaaaacaaaaaccccgaattttccgtttttaagggggatgggaaaaaattggggaaaaaggaaaaaaatccttttggttatctaaggtgcctacttttaaacctattttcccttttaaaaacacaaaaatttaccaaaactttttttattatatatccttaaaaaaaggtcgcggggactttttttttttttgggaagcttataaaaagaatttggttgccccccctcctttcggggggtccccccaatgggaactttttttttttttggctttgggtttgggaactttttaacctttgaaccttg

SEQ ID NO: 173148 - DNA, 506 bp, Arabidopsis thaliana
atgacgtcgcatgcacgcgtacgtaagcttggatcctctagagcagccgccctttggtttttttttttttttttttttttttttttttttttttttttttttttttttttttttttttggggccggggaacaaaaatttaagttccattgggggatttcaaaggggtcaaaattttatcgttttacaaaaaaaagaggagggttcatgactgtaaaatccccctttttttttcaatttaaatttaacgggtccgggtttggatccgggtccactactggggctttgcaatccaccttatattgaaaagtttttttaaaaaaagtttaatatgaattatcccaaacaagtttgtattttccaaccattagcgtaaaaaagttcgcctggtcaacttcttaccgacgggaagggaatttcaaagttttttcccctaaaacatttattgaccccaacctaaaaccggattccaagcttattttggcttgaaacaaagaaaaatcccaaa

SEQ ID NO: 173149 - DNA, 490 bp, Arabidopsis thaliana
ctatgacgtcgcatgcacgcgtacgctagcttggatcctctagagcggccgccctttgtttttttttttttttttttttttttttttttttttttttttttttttttttttttttttttttttgaaaaggaaatagtttaatttattattgggaaaaacaccccttaataaaccggtttaggggttcaacaatttagccaagggaataaaaaaaaaattttggggggaaaaaaaaagggaggaacaaaaggttggctggaaaaaaggttaaacaatcccaaaataccaaaaaattgggggggctttaggggtttgaacaaaaggatttttaaggtttttaagggaaaaggggggggggtgggcttaaggggagctttttggttggactctgggtccaaaggggggggggccaaaaaatggagctttgggggagccaagggcctggccctttgggtcctgcctttgagaaacggggggaatggggggccac

SEQ ID NO: 173150 - DNA, 414 bp, Arabidopsis thaliana
  unsure (1)..(414): unsure at all n locations
ggtgcgtaagcttggatcctctagagcgcttcngcctgggggggtaaaaccccggaagctatggttctttacatatataaacattttacattgtatttcgcatgtaatcgtctgttcaaaggttgtatttttattggcctcaaagcccctaaaccacagagtcaaaggaaagatctttattacatctgatattttttttttctgaggctaggcgttcgtacatcgccttgtcttttgcccaaaacatctctcggacccgtacgcattgtgagaccaacatataaatacggcaacgctaccactcactttcgcaagctactccataccgtcacaaacatcccaagtttatcattagctctactcctcccgcacgccccctcttctctcccgctactctcttttgtcctcattcct

SEQ ID NO: 173151 - DNA, 206 bp, Arabidopsis thaliana
tgacgtcgcacgcacgcgtacgtaagcttggatcctctagagcggccgccctttggtttttgttttttaacacaacccaacctttttctattaaaactggaaatcattggggttctttcctttcttcctataggaacagacctatatggactgaagtcatattcgtcttcagattcagacccaggagtttccattattatcctatt

SEQ ID NO: 173152 - DNA, 296 bp, Arabidopsis thaliana
cccacgcgtacgtaagcttggatcctctagagcggctgccctttgtgttttgtttttcaattcaaccatacacttggccactcatcgggaaataatacaaaggcacaaatttctgcacacatgttttctccatctctcccctttctctttttgctatattttagagaactacagaacaaacaatgaacattttcttttttaaaaagggagatatatatggtccgaggccccccaaaaaaatttcacacacccttgcccaaaaaggggtccctaccaaccggacccaacggcgggaa

SEQ ID NO: 173153 - DNA, 325 bp, Arabidopsis thaliana
  unsure (1)..(325): unsure at all n locations
gtacgtaagcttggatcctctagagcggctgcccttttgtttttggtttttttttttaaataaggntatctatcttatatagcctataacaattaaaaaagtaaattagaggtgccactcacaaggaaattaatgataaaaaaatgtgaaaaatacaaataaaaaacaactcttgctgatactgaaacaattttttacttggggggacacaacacaattattcacccacacataaatttgtttaaaaaccccaaatcaacantcactaattttattgagtttttcctaaaaggaaaggatatatctttttcatggccttcttttt

SEQ ID NO: 173154 - DNA, 486 bp, Arabidopsis thaliana
  unsure (1)..(486): unsure at all n locations
gcacgcacgcgtacgtaagcttggatcctctagagcggtcgccctttgggtttgggcttttttataataacaancncaacattttaaaaaggaaacattgttgagaatattctgataataaaatcggccacaaagtagaaaccacctcgccttggggggtgtaacaaacttaattctatctataaaccctggggtaacctatttttaagggggagggcacaaaaagatactgcaccgaaaaaaaaaagacctttgttttaaaaaaaaaccaattccaagtttttttttcctttttcgttgaaaaaggccaaaaaggtttaactcacctttgatcacaggggttaaaggggaacccccccagctggaaaaaaaaaaccccccggggagacccctaagtcctcccttttttttcgcccggggggggaaaggctccacattttttccttaaattataaccaaggcctctagaaaaaaaccccccccccc

SEQ ID NO: 173155 - DNA, 549 bp, Arabidopsis thaliana
  unsure (1)..(549): unsure at all n locations
acgactcactattgggaaagctggcacgcctgcaggtaccggtccggaattcccgggtcgacccacgcgtgcgcgaaatggaacttctcgccggcgactgtcggaaacgagtcggcgacgactttgaggaagatattaacccattcgatggttcggacggtggttgcgggtggatgtacggtacccgncaaatgggtttctacgggaacgacgacgctttgttttttctggagggggtggctccacctccccagaaattggaacccaatatggtgtctcctctatgtttgctgtggtgtcctcgcattagggtggtgggtgcgtgtgggcggtgttggtgggcgtggtggttcgttttgcttctggttcgtccttctacctacccaggccgctcgtggtgtcggcgggcgtcgaggcgtgtgcccttgtgtgtaaagttcttctgtttccttttcgtctgtttggtgtgttttatggtcctccgtgtcttctggcatgctcctttcgcctatcagtcctgttatcgcctgcggcggcgcgtcgggtgcg

SEQ ID NO: 173156 - DNA, 470 bp, Arabidopsis thaliana
  unsure (1)..(470): unsure at all n locations
cgcgcagcacgcgtacgtaagcttggatcctctagagcggtttcccttttggttttgtttttttttgaggaaaattaanattataatctgatatgaaatatatacaccaaacacaaacacaaacataacaaagtcaaagtgtttagtcatgtaaatgtgaatcaggctagagaattcaaggaccgggagatttgaattaattttttttgtgagtgtggcccaccattacccaatcatgtaaaaatcaactactactcancaaatctttttttattctacttaaacttaagatcaaggctttatattccactttgtaaggggaggagttcttgctttaacctgaccctcaagacttttctaatagctttgtaaaagctgttctttgaaactccgcacattctttttaacctttcttaaagggagtttttgaaagaccggccgggggttcaccccgaaatttcgaccggtcc

SEQ ID NO: 173157 - DNA, 468 bp, Arabidopsis thaliana
gtcgcatgcacgcgtacgtaagcttggatcctctagagcggctgcccttttttttttttttttttttttttttaaacccaaacaccggggggagaaactcccgcgctctttcaaaggggtcataaccctaattggcgcacgggtaaaattaaattatcccaaccaccctccctcaaagaaacaaacacccctggccttaacaacctttttttttgggtcgtggggaacaaccctttgcgcctccccaacaaaaaaacccacgcgccgcccacattctttccttgcccccaaacaaagggcgtcaaacattccccgcccctcccaaacccgaaaggtgcccaacccccgactagagcgggtcggcgcccccccctttcgactgatcacacccgccgcccccccgatcgtcgcgccggggttggcggtcccccgtcgcggccgcgcgccccccagggcgctcccgcgagc

SEQ ID NO: 173158 - DNA, 526 bp, Arabidopsis thaliana
gtttaggtgaactatagaagagccttgacgtcgcatgcacgcgtacgtaagcttggatccctctagagcggtcgccctttttttttttttttttttttttttttattgcaaacgagaccatcccattcgagggaaaggcaagaaaaaccccccccaataggtgggaaaacccgttctctttttcccccgccgccttatttttttaaagcggcccgcccaaatctccccctttttttttggggttgttgggaacccctcaaagcgaccccaacaaaaaaaaaaaacgccctcgcctctcctacctttcctccccccccaaaacatatactaacgcgccacaccactcttttccgctacacaataccaccgccacctctttctctttcccccccccccccgtttccacgtacattgccccctgcccgggtcttccccccgttctttccgtgccccctgcgttcgtcgggccccgttagcagaccgtttctcacccgcaatgccacccccctttcccttcccgcttcgc

SEQ ID NO: 173159 - DNA, 459 bp, Arabidopsis thaliana
ctacgactcactattagggaagctggcacgcctgcaggtaccggtccggaattcccgggtcgacccacgcgtgcgcacaaacacacacacacacagcctttttccttcgttgatcgattgttaagctcgatccaatggcggataacaccgataatcggagatccttatggggagttccggagaagcttcagcttcacatagcgatgctgacgttgcaattcgttttttttcgggagggggcgtggggctgtttctcctctttacgctttaataacctacgctgacctatcgctgcgatatacttcacccagtaatatactctaatgtattgtccttcctcccgacggactgctcgctcgattaccttggcgtcccctccttactcgcttgttcctgcctttcttttcctttttttgctatgtcctttcactctgattcccgtcgctcatctctttctat

SEQ ID NO: 173160 - DNA, 555 bp, Arabidopsis thaliana
  unsure (1)..(555): unsure at all n locations
gccagctctctacgactcactattagggaagctggcacgcctgcaggtaccggtccgngatcccgggtcgacccacgcgtccgctgtcgcgtgtacttgtcacttactgaacccataaagccatcaatcccaaacacaccattacaatggcttcttctatcttcttcttcttccttatcttcctctccgtcgtctccgccgtcaaactacctctctctcccttctgccactccgtccaatcaccagaggacccttacctgtctctgcggcgggtgggtgaatgctgaatcggtggaggtgatgggcggaaacacctggcctgagtggtaccggtcttgtgtgtggttatttttccccgtcgatggcttttctctcgtactttcgttgttgccatttatgctactattcttctgccaatacgtatcgcgtttatccttgaggtgcttcacaccgctcatccgccggtgccactgctcttgaatatccgccctctaccccttaatcgactctccccatctcgcctctgaccccaaggtggtcccattgtctcttcga

SEQ ID NO: 173161 - DNA, 479 bp, Arabidopsis thaliana
actttgacgtcgcatccacgcgtacgtaagcttggatcctctagagcggctcgccttggggttaggggctttttaataattttttttttttttttttttttattcaacttggaacaaggtcttttttttggcaatcacaacttggaacaagttcttttttttggcatcacaacttgggacaaggtctttacaaaaaaaatttggggggttttttggcgtgcgggccaatattaatccccattttaataaaaaaaaaaccctttaattttttcccccctttaactctcttaagcgggaccgggcccggaaaaaaaaaggttccggaaaaaaagactaagggcggcctttaaaaaacctgggggccgggaaaaaaaaacccccgcggcgggggggcccccggttttccttttaggaggaagacttaacccaaacccctgttttttttaagccggggaaattaaaatttcgccggttttttt

SEQ ID NO: 173162 - DNA, 357 bp, Arabidopsis thaliana
  unsure (1)..(357): unsure at all n locations
gtgcactatagaagagcttgacgtcgcacgcacgcgtacgtaagcttggatcctctagagcggtcgcccttgggggtggggggtttttttttttttaaaaatctttatgaaaaaagagaaatgggtatattaactcacaggaggtaggcacgcgaatgcaaacaaaggaatccactttgttctataatcaatggacaagaggttcggatagagaatcccattttatgtgtcaggggggactangnggtcggtgatgattgatatacgatcaaccaactcatctaaagagcggggtgacgaacctccttggttaactggcctttttacttggggtgggaagagtttggttctacctgg

SEQ ID NO: 173163 - DNA, 544 bp, Arabidopsis thaliana
gctctctacgactcactattggggaagctggcacgcctgcaggtaccggtccggaattcccgggtcgacccacgcgtccgaccgtccccttgttatacacatttaatggagtttacactagggacagtgaaatgagttcttcattgactttgacttgcactgacggtgctcctgccttaaaacaaagaaccatcggtctcgctaacacccacttgtcgattccctcgcagctcatctccatgtaccagcttcctcataagatagctctttgtttgccttccaccgaacgaagtcagtctcataatggtgacctttggatcggtaaaggggaatattattatctgccctaccatagaagatgcgtgtgaaatctttcgctgcacacctctgatgtgataatacagtcccctccaaaacgtaaaccatgcagaataaatctctgcgtagacccgaactctatcctcggcatatatcctgatccctcctttacctaatctgcttccatctcaacatcctccgttacattactcgcataactaatgag

SEQ ID NO: 173164 - DNA, 512 bp, Arabidopsis thaliana
  unsure (1)..(512): unsure at all n locations
gctctctacgactcactatagggaaagctggcacgcctgcaggtaccggtccggaattcccgggtcgacccacgcgtgcggtgattcattaaccacttcatgataattataatcttccttctcttctgacgattgaattacatcttcttctgatagctgttctgatttttttctgtatacaaagtaaattcaaagtggacaaacatcggtattntaatctcctctcgatattgaagtgttgcttgttctctgggggggataagagaggggaacagaatgaccccgttggcgaagcataatggcgtgtctgttatgcacgaatagtacttcacttcggatgctcgaacgcttcgcctagctgcagttaacgttgtttccctcagaagacatgctatgattagtcccttcaattgccttctccctgagtgcgcatagtactcggtgctgtaccccatcagttcgaattcttcacgcggtagcggtagagatctgtgtgtcctcgtcatgcagat

SEQ ID NO: 173165 - DNA, 540 bp, Arabidopsis thaliana
  unsure (1)..(540): unsure at all n locations
gctctctacgactcactattagggaagctggtacgcctgcaggtaccggtccggaattcccgggtcgacccacgcgtgcgcacacactgctcccaagtcctctcacttcttcttcttcctccgacaccgttgcttaacggttttccatttttgtcccttcaagatgatctcatggcacgacctctacacggtcctcaccgccgtgattcctctctacgtggccatgatccttgcttacggctctgtccggtggnggnaaatcttctcacccgaccaatgctcccgnaatcaaccgtttgtgggggccatcttggggcggcctgtgggtgtgctgtggctgggaggggccgcacgacgggtgacgcggtgtatcctactgtctcatagggctgctacgcgataatacacacgcccatatctttcctatcctttcggcctgcgaggtttgttccctaatcctccgctccactcgccgtatatcctcaccttcctcgatactatttaacatgaagggtattaccgtccatccgcgttatattc

SEQ ID NO: 173166 - DNA, 439 bp, Arabidopsis thaliana
  unsure (1)..(439): unsure at all n locations
ttgaattatgtgttctatagaagagccttgacgtcgcatgcacgcgtacgtaagcttggatcctctagagcggctgccctttggggttgtttctttttttttttttttttttttttttttttttttttttttnnncacaatttaacaatcatattgcaacgggcccaaaaaaanaatcatttacattatttcttttttctgggcacatttttatcacatgtttacagaattataaattcttgagggggggggtttaatttgatctcattgccatggaaggaaattgtgaccccagcgttggacatgctacttccatcaatttccctcttttggggttaaggggcttttttgaaaaatggaaccccggttttttttttgaccgggggtttttttctccggggaaaaaaaaccggtaattcccttgaaccgaaacccggcc

SEQ ID NO: 173167 - DNA, 535 bp, Arabidopsis thaliana columbia
atgatactccaggtctctacgactcactattgggaaagctggcacgcctgcaggtaccggtccggaattcccgggtcgacccacgcgtccgctacaactgatttctacacatcccatgagtgtttgcttctgccttatgaacagtcccttacaaggttggattcaacttctggtctctactatgattgttctgcacacatggtctggtgcggagagcgtaccagacaattggatggcgctcatgtcgagtttctcagggggattgctaatcctctgggcattaaggtgagcaacaaaatggatccctttgagctggttaagctagtagaaatcctgaatcctaataacaagcctggaagaatcactgtaattgtgagaatgggtgccgagaacatgagagttaagcttccccacctgatcagagcagtccgcagatcaggccagattgtgacatgggtctgcgatccaatgcatggaaacaccatcaaagcaccttgcggtcttaaaacacgtgcctttgactcaatactggctg

SEQ ID NO: 173168 - DNA, 470 bp, Arabidopsis thaliana
  unsure (1)..(470): unsure at all n locations
gacgtcgcctgcacgcgtacgtaagcttggatcctctagagcgggcgccctttgtgtttggtttttttttttttttttttttttnnannngggcagaggagaggacaaaacccagaacttaattattttccattacaaagtgggtaaacaaacataatcatcttcccatggtttttacgtttgacaaaccaaaacaaagagaatttaattgggagtgggtacacaacttctctaaaacaaaaaaaaagaggggccgggtggttcttctttttcatctacgatcccgatatacccaaaaggccacatcggtcctattctttatcaagcctttttaggagatttgggaggagaagctttttccggttgggaagaagaagctgtttatttttttagaagaagaacttggttaatgggttgaaaaaccaccacccattcgcgatataaccccccttgagccactcccccgaatt

SEQ ID NO: 173169 - DNA, 390 bp, Arabidopsis thaliana
  unsure (1)..(390): unsure at all n locations
ttgacgtcgcatccacgcgtacgtaagcttggatcctctagagcggcctcccttgggtttttttttcttttttttttttttttnnccatactaaagggactgactttgtatataacataattgttcacaaataccccataacatcttatgcattttttcttactatggggggggggatatataacaagagttaaaaaaatagagtgtttttttctatggcagaagggaattaaaaagggggaaaaaaaaaggggagaacttttttctcttgggaaccacaaaccttatgggccccttataaggtgggcattttcctggggcgttatttcatataaatttaaagccccaccgggggagggccggtgcgttttatattggtttctttccccc

SEQ ID NO: 173170 - DNA, 316 bp, Arabidopsis thaliana
  unsure (1)..(316): unsure at all n locations
gtcgcatcgcacgcgtacgtagcttggatcctctagagcgttcgccctttttttttttttttttttttttaaaannnnannnnaaaancccaaactttcatcttatataaacgtgggaacagaaaaattcttcaaaataaagggcttggtacaaaggcttttggaattgaaaaaaaaaaatttccatgtataaaacaaaattttttttcgggatgttgggtntccactagggcgactccacaaaaaaataaaaccccgcgccccgcgacgactggtatcccgcctccgcgtccgcggaggagctcgcccgcgcgcg

SEQ ID NO: 173171 - DNA, 516 bp, Arabidopsis thaliana
  unsure (1)..(516): unsure at all n locations
aagactttgacgtcgcacgccgcgtacgtaagcttggatcctctagagcggctgncctttgtgtgttttgttttttcaatcagatcaaatgctgggaaagacaattcaaatcttgcagaagttgacattatgtatttggataaacacaccacacgactcgagacttatggaatcaaaataatgcatgcaaactacagacggaattatatgtcttgtttttacgggggagggacagcnctcccccagcaaaagtttaggttgattatatacccagggaggacttccagctcacagaatagtacaggacggatttggttttcttcgcgtgggtgggaaaaaatggttggaggcgcatgctcaaatctgaggctctcctccacctggggctggccaggtttctcaccacggggttaaaaccctttccaatggttttatcgaggggtaattctttggccccacacacactccgttgtgtgttttcaaaaggttaaccacgcttccgttggccctgaaatt

SEQ ID NO: 173172 - DNA, 395 bp, Arabidopsis thaliana
  unsure (1)..(395): unsure at all n locations
acgtcgcatccacgcgtacgtaagcttggatcctctagagcggtcgcccttttgtttttgtttttttaatagtattaaagcattacaaacaaaatcgtaaatacaatcattcagaaagaagaagtcagtcaacgaagatggagaaagaaaatctctcaaacgtgtcaacatcttcaatattacaacgtcttcacttgggaatggtgcactcgggggggtcttgncacccatctatgaaatataattacttacggaaaaaccagcgtgtttacaaagtgttatgaattcacacatatactactaactcacgccccttccggttttatcgatcaaaggccccacttgttctccgcacaaagcttttgggatgttcccagcttcccaaaaggtaaata

SEQ ID NO: 173173 - DNA, 471 bp, Arabidopsis thaliana
  unsure (1)..(471): unsure at all n locations
atgacgncgcacgcacgcgtacgtaagcttggatcctctagagcgtccgcccttttttttttttttttttttaatgtctaacgtttatcgacttttatttgtgtacatttcaaacatgtgacaaagtttggttccctatattgngtgatacttatctaatttgattttggttaaagagtgtctcgaaaaacagggtaatatgtgtcttatctcgagggggtctaaaatctgctgagttttccatagatatgaagagtgaccttccaccatatcggttacatccacgttttcgataccagggatacatattggttggattccggctaatccttgggaaattaaactagcacgaaatgcgataccaagggtccaatcatttgtggcataaacattgatgaatcttccagcgaccatcttccttacgtgtgggcagttttcactattgattgaaatgggtgctccaagaagaca

SEQ ID NO: 173174 - DNA, 190 bp, Arabidopsis thaliana
  unsure (1)..(190): unsure at all n locations
cctgcaggtaccggtccgnattccncggtctacccacgcgtgcggcgctcgctgttggttgtcctaatctggttaaattgaaggtgaagaaatgtaaaggtgtgactggtggatattgtattgtatttgttggtgtttagaatatgatatgttagataggatattgtaatttatttgatgagatagataa

SEQ ID NO: 173175 - DNA, 462 bp, Arabidopsis thaliana
  unsure (1)..(462): unsure at all n locations
cgtcgcatgcacgcgtacgtaagcttggatcctctagagcggctcgccttttgtttttttccttcacactacttgtgcgctatcgggttctcgcccacgcgtcccgcggacgcgtgggtttaaaggtaaaatcaacccanaaccatctttacttcctgcacaatcaaacacgcgactcatcttttatcgaaaaataaaacccattgctctttgggatgtgggaccccaaccggggagccaaaaaaaaaaaccccaccccaacaccgcactataatcccccccatacacccatgtcacataccccgcccaacattcccacaacgacccggcccccccctctatcaacgccccgcgcgccctccctcaaacttcccccacccctattccacgcccctatagcgtccccctccaaacagtccccccctccatcccataaccaccccgacaccatcccaaacccat

SEQ ID NO: 173176 - DNA, 528 bp, Arabidopsis thaliana
  unsure (1)..(528): unsure at all n locations
acgtcgcatgcacgcgtacgtaagcttggatcctctagagcggccgncctttgggntgggggcctttttttcatttntttaggtagaaacttttctttttcaaaccaaaaattatcggtttgggagaattaaatataggcaagggtggagtaaagccaccaaagtttattttcagctaaaaactaaggatcctaataaataaggccccttggaatttattttggttgctggcgccttttcgcttagcgggaagggaagaaaaaaagagnattaccnntaacccaccttcttccacccttccctacaaaactgtgaggcccttttttgtttattcaaatattacccggggggggcacacaacccacggcatatgcagctcatttttttaagagcttaggggggcccaattccaaaacacccttgccccaaaaagggggccttaaaatattcacaaagggggggcccaacattgaaacacccctttgcccggagccccccacgggtttacccgaggggggggtttgtccc

SEQ ID NO: 173177 - DNA, 470 bp, Arabidopsis thaliana
gcacgcacgcgtacgtaagcttggatcctctagagcggtcgccctttttttttttttttaaacaagaagattagtagtattaagtatcaataatacaaccatgttttaagattacacgagattaaacgttacaagtgtgaacttacaaccaaaccatgtaaaatactttaatagctgcgggctggtacaaaatggtcttttgcgccgtgggaggtctcactttctctttctccctcatttacacctttatcactcacaattaaaaccccaacccaaaaaaaaaacattaaaaagggaaacccccacaaaagtcaaagatcctttcccctgattttcctctcctttccataataaacataagaaacaaaaaggggggaggatccgcgaatttgccggggggttttcttttggctcgacccattttaacgtttccgatcgcctcaaaactcgcgtttccccacacccccctc

SEQ ID NO: 173178 - DNA, 504 bp, Arabidopsis thaliana
ctgacccgcctgcaggtaccggtccggaattcccgggtcttcccacgcgtccgccgctccttaaggctatcgccgataaataacgcctgctgtggttgctaccaccgacgcaaccttaacggcatttttaatggcgttttctgatgacgatttctctttacttggagactatcttacaaaccctaatcaacatcaccaccatcatctatttgttgataacacgccctacgctccttatccattcaatccgaaaccaccgaattatatccttttaccgtatcaccagattaacggtgtcgatgactacctgaccccatgggttggtgacacccgttatgttttacacggtcacggtgttaatactttgactggggacgaaaacgggaatccgagtgatcagatggggcatctgttctcgaatgcgaatactaccatgttcctggtcatgtgatctatgatgtggagtggtgggcggaatataccgcacaatgatgaggaagcacg

SEQ ID NO: 173179 - DNA, 483 bp, Arabidopsis thaliana
  unsure (1)..(483): unsure at all n locations
gctctctacgactcactataggggaagctggcacgcctgcaggtaccggtccgngattcccgggtcgacccacgcgtgcggtttttttttgctctctctgccttcttgactttcaaaagactctttctttcttttggattgattttggattctagggctctctttcttttagtgggtttttgatgggggtgttggtggtaggatagatttagaggggaggatagttttttttttaaagggggggataagtataaatattgagtatttgtagattgtctgagatgcatatcatttccttcttgttacacccccgcccgatccagaacagcgcaacccaccgcccctgtcgcttggtggcactccgccttactcgcttcatccccagcgcgactggaaccttcagcccactagacatgtgactatcatgttactttacggacgcgaccctcaggtcatgcctgacgtacattccacacccccatc

SEQ ID NO: 173180 - DNA, 536 bp, Arabidopsis thaliana
ttgatactgctagcgtctactacgactcactattagggaagctggtacgcctgcaggtaccggtccggaattcccgggtcgacccacgcgtgcgaagaggtcaaggatatattcaataaaccgttagagagcctaaatgggatcttttgagcgttgagactacatgaggtagatgagatggaaatctaagattttacaaaactatatgagtcgaataatatgtcagatggaagaaagaagaggtttttttttttagggggtgtgaggcgaacactttgcaaataataggtttattttagtctctatcctttagtgtttaattggtctataatatatgtgttctgattttgattgttttatcttattatttctttgtattgtacactacatctaagacattatctttctcttgttatacacgatcgcaattattgtattttatgtctgcgttaaatgattcttatttatattttggcttttttcattttatggttttttgtttttattctgtttttcgtttttttttttatacgtcg

SEQ ID NO: 173181 - DNA, 505 bp, Arabidopsis thaliana
  unsure (1)..(505): unsure at all n locations
cgactcactataggggagctggcacgcctgcaggtaccggtccgngatcccgggtcgacccacgcgtcgcggatctctctctgtctctgtcccgcggagtccccgagagattgatcaccatcacttttgtaccttccttgtactacctatggcgtctgctagcttcgttaagcctaacaccctctcttctccatggatcggccaacgctcctttgctcatactttctgctggggggtggccncctcctcgagtgtccttcgcgatccgcgccgccgcttactataacggcgcccgagatcgccggcgcgccgttgaatggtctcggaaactcggcccccccccgcgaacgagccaagcagagactctccgggtcccctcccccacatgacccgccccatccggagcaagcgcgtaccttatccatcatgcgtctacctttctctctaggcacagtttgatcgttaccgcgcggtggtcgtcgactctgttgggaattcagggctg

SEQ ID NO: 173182 - DNA, 466 bp, Arabidopsis thaliana
  unsure (1)..(466): unsure at all n locations
acgtcgcatgcacgcgtacgtaagcttggatcctctagagcggccgccctttgggttttttttttcaagatcaaaacacaaagggattntgctgttcaatattntgatgtatacatactgattactaaaatctgagcatacgaaattcaagaatcacacggggcacaaaggccccactagtaggagaaggaatttctgcatcaaattttttttgggaagaggaagacaactgttttttttttggctaaagaggaaacgccttcactggaacttttaaatccccaaaaaacaggtaagcccaaaatgggggtccggattgactagaaagggcgattccttgttttccgggacttgttcctatcgcctctcaccaccgtcctccgtcttttgggccgctccgcagatgttccccccgatcttcgcttgcccgtcccttcgggaggccgccgtggacagcgcgctatcc

SEQ ID NO: 173183 - DNA, 492 bp, Arabidopsis thaliana
  unsure (1)..(492): unsure at all n locations
gcctgcaggtaccggtccggnantcccgggtcgacccacgcgtcgcgatttcgtgagtgaagagatttagagtaatcatgggtttaactcgaaatttcattttatggattcttttgtcatctctcttcacggcgattcaactaacgtggcgtgaacggcacactggaccaccacgctgtgaagacggccgagctcttgctcttttaagggcggtgaccgccgcgccgaccccaagatcccgcatctcacgtctggcccgccacgcttaccatcccccacctgtccgcaaccccctcatgtgcgccccggcgctacatccctcccccgccgcccttactcgccctgacctatctgtcgtttctcctctgcgcctcctctgcgctgctccaattccctccctatccttcgcccatccccgacgatacccctcctgttcctctccccaccacctgctgcgccaatgaccctctctccactactctacccactccc

SEQ ID NO: 173184 - DNA, 445 bp, Arabidopsis thaliana
  unsure (1)..(445): unsure at all n locations
acgtcgcatgcacgcgtacgtaagcttggatcctctagagcggctgccctttggttttttttctttttttttnttatatgtaaaaacaatcgtttattaatatggacaaagtttgaggcccaaatattacaagtttcgtaaattatcttgcaaacgaaaaacaggctttttttcttctggatttattcggaaaaaggctgctagattggggtgggccccctcccaaacaacaatgatagatgctccaaggctttacacacaaacggttcaatcttaaacgaacacgtttttttttacccccgacccacttttgggtggctatcattaccccgccggaggcaacgcttctcctgtgaacccaccggaagtttgtttcccccctgggcccataaacccctcgttttgggtttgcccgtcgtttcgaatgccgcctatattggcgtga

SEQ ID NO: 173185 - DNA, 529 bp, Arabidopsis thaliana
  unsure (1)..(529): unsure at all n locations
tgatttaggtgcacttagaagacctgacgtcgcatgcacgcgtacgtaagcttggatcctctagagcggccgccctcngggttgggggcccttttttatatatttnttttccttnnncgcgntnncccccccccccccccccctcccnnnccnttttgaaacccctaccgctctcctcattttttaaaagccccaaacccaggggcttccaaaaaaacatggtgtaaaaaactcttcttccgttgttgggggggcatttaacacccccccaaaaaaaaaaacacgcgcccccgccccaaaaaattttttctccaaacccacccatttcccccccatagggggggggaaaccagatctctttccccccccctttcttttgaaaatttcttttttttacttaacgcctttgaccggggggcccaccacatccccaccccccggggactgtgcccccccttttgtgcgccccccccccccccattttccaaaattttggctttaaagaccctccccccctggccgaaaaaaa

SEQ ID NO: 173186 - DNA, 494 bp, Arabidopsis thaliana
  unsure (1)..(494): unsure at all n locations
aactatacaagactttgacgtcgcatgcacgcgtacgtaagcttggatcctctagagcggtcgcccttttgttttttttttttttttttttgttgaaactggaactttcttatagattctgattcagtttacaatatacaaaattccatgacaggggatgtaaatatgtaatgtaaggacttgtttgaattanatacaaagaatgcagaattttgtgctattttaaacaggagtggttgcctcatgggttgagtatcaattaggatctccacatctttggcatgaccttcctcggggcgggatcatttggaccttttgtctctttgtcctggagggaagtataacttgccatccaaataccaagcaggggtttgtttaaaggggatggggattttccaaataacataccattttaaggggtttaaaggtcaactcgaagaattcccccacagagaaacttcttttcgcgttcaaagaggctgttcctttccgcc

SEQ ID NO: 173187 - DNA, 458 bp, Arabidopsis thaliana
  unsure (1)..(458): unsure at all n locations
gcgtacgtaagcttggatcctctagagcggtcgcccttttgtttttttcttaaatcatatacacagaataaaaatggccccaaagatttaccaaccaaatcctttacattgggtagaaaaaacccaacccttatttccaaattataaaactttacatttggaaagagaggaaaaaaaaaccaaggaggacccgggttccatancttgggagtggggggaaaccttacaaggtggggtcaataaaaaaaaaccccccagggcgctttttaagccaaaaaaccccccttctatatctcgagagggctctcgccgcggcgggcggttggcggcgccacgcgccgccggccgggggcttataaatgcggtcgccacccgcccgcgcgtcgacgtcgtgggataccgcccggacgcgaggcgccagcgcgccgaggaggacgggtgcggggtcaggcggaggg

SEQ ID NO: 173188 - DNA, 401 bp, Arabidopsis thaliana
  unsure (1)..(401): unsure at all n locations
gtcgcatgcacgcgtacgtaagcttggatcctctagagcggctgccctctggggttttttcttttttttttaattttttanaaaatanaggggcggggaggggggccgagagngaaacaggcgcaagaaaaagaagagaaagcgccaaaaaacaaacaagcgagagccgccaagaaaaaattaccgtagttggcggaacatctaactaaaaaaattaccttcattggggatgtttggggccanccccccggtgggtcctttcataaaaaaaaaacccccctcttccatgggggggttgtttggttcctccccatttctgtatctccgttttgtttgtcgccgtttcttagcattttcggtgtaatcttttctattccggatcttctttttttaattgccgt

SEQ ID NO: 173189 - DNA, 470 bp, Arabidopsis thaliana
  unsure (1)..(470): unsure at all n locations
acgtcgcatgcacgcgtacgtaagcttggatcctctagagcgggtgncctttggtttttggtttaaattcccgagcaaatcttgtttccaaaaaagacaatggaattttatcttcttcttttggctctcaacactacaaatatgtgaaaacggtctctggttttgctttttggctttttttgctctccccattgattgattgatttttcttgggcgctctctctggggtattatggagggaccacttaattgtttggtaggtaaaaggcgtgggaatttgccccggatttaaccaaatcaatcttggtcaggctgacacaaaacagggcttgggtttgggaagttcttctggggaattgggcctccattttgttatcccaaacaagaacccccgtttttggtccgaccctgaaaggagcgaggttcttttctcgagtggaaccgggatctgggtcatcccaactctctct

SEQ ID NO: 173190 - DNA, 361 bp, Arabidopsis thaliana
  unsure (1)..(361): unsure at all n locations
gcgtacgtaagcttggatcctctagagcggtcgcccttttgttttttgtctttaaaaaaaaaaacanaacaaaccacaacccgaaaaaaccgaacgcacacaccaatcaacctagatcagacgcaaactaaccgcgcttaggcaattcgatactatagggatgacgggtttcgttgtcggagtgtgtctaaccgacacgcaagacaacggactttcnctcncttggggtagttggggacnacccccaaacgtgtatccccgcgttaaaaaaaaaaacatccacaccgtcagggtggaacatgcataattctagccaatacattcgcaccatgttgtaaatcgcgcgccgtccacacaatta

SEQ ID NO: 173191 - DNA, 171 bp, Arabidopsis thaliana
  unsure (1)..(171): unsure at all n locations
cgactcactataggggaagctggcacgcctgcaggtaccggtccggtattcccgggtcgaccccacgcgtccccggggaggcttnnccgattaataccgcagttaggttggtgttttgctgaattttcagaagcctttgtnttcttcaactctttcgatatgcttagaaag

SEQ ID NO: 173192 - DNA, 528 bp, Arabidopsis thaliana
  unsure (1)..(528): unsure at all n locations
cagctctctacgactcactatagggaaagctggcacgcctgcaggtaccggtccggaattcccgggtcgacccacgcgtccgcttccctttggttctcaaggcatgcaccagagcctcgagtcgcaagcttgggattgatcttcattcccttgtggtcaaatgtgggtttaatcacgatgtggccgctatgacgagcctgctctctatctactctggatccgggcgtttgaatgatgcccacaaactgttcgacgaaattcctgacagaagcgttgttacttggacggctttgtttagtgggtatactacttcaggaagacacagggaagccattgatttgtttaagaagatggtggagatgggtgngaaancnnntngnntttntattgtttagggttatgttgttggggttatgtaggaggattgaatattatatattttttgaattaatagaggttgtgggttgtttgtgttggtggtgattgttgaagtttgtgtttatttaagagtttgttttattagggaag

SEQ ID NO: 173193 - DNA, 155 bp, Arabidopsis thaliana
tggaacctctagagcggtttcctttgggttggggcctattcccttaaaaagaaaacccttcaatacttaaacttgtttgaaagcgggcctcaagggacataaaggaagaaaccacccctcctttaagcttctaaccaacccttcctaccatttag

SEQ ID NO: 173194 - DNA, 464 bp, Arabidopsis thaliana
  unsure (1)..(464): unsure at all n locations
tagcgctacacgactcactatttggaaagctggtcacgcctgcaggtaccggtccggaattcccgggtcgacccacgcgtgcggagaacagaaatctcgtgtggaacaaaagggtaaaagctcgtttgattctgattttcagtacgaatacgaaccgtgaaagcgtggcctatcgatcctttagaccttcggaatttgaagctagaggtgtcaganaagttaccacagggatatctgtcttgtggcagccaagcgttcatagcgacgttgctttttgatccttcgatgccnnctcttcctatcattgggaaagcaaattcaccaagtggttggattgatcacccaccaatagggaccgggagctggggtaggtggtgtggagacacgaggagtgtgccgtgttgggtggtttatcgggtggtgattgtgaatggttgattatgtttcgtgtgagtggctgattc

SEQ ID NO: 173195 - DNA, 447 bp, Arabidopsis thaliana
  unsure (1)..(447): unsure at all n locations
gtcgcatgcacgcgtacgtaagcttggatcctctagagcgttcgccccngggtgngagttttttttttacattataagaatcatttactatattattttcaagggaaaacgaataaatacaaagtttttttttttcttgagatatacaagaaaccaaccgcgtttaccatgcaattaaccttcttggcaaaatgcccacacccctttttttttggggggggggtgaaccccacaaagagactggaaccaaaaaaactaaattctccaccctcctgcgtgcgaaatgtcggacgacaagggtcgccaatattaccacgccccgcncgcagcattgacgcacacaccgacccccgaccccccggctctttttcgtcacgcgcgcgcgctcccgtgtccatcgttgcggcgcgcaccacccgttgaccctcggcgccggtcgtggcgtgc

SEQ ID NO: 173196 - DNA, 455 bp, Arabidopsis thaliana
  unsure (1)..(455): unsure at all n locations
acgtcccatcccacgcgtacgtaagcttggatcctctagagcggtcgcccttttggttggggccttttnanaaaaannnnnnaaggagaaataaaactggtactaaaactcatacaaaggggaagaacatatgaatcctatntaaacataagggaatgggggaatatagcagcccagggtttttatccctacaactgacctaatttacagggagtgggcaaatggggtcaaatttcccaaaacaaagcttaaataaaagtttttaaaagtttttggcctaaccccaagccgtttactttctaaaattcggggcaggccataccaacccctaattcttaaaccggggtttctcgcccttttggttacgggttaacaacttaaaattggtttgacaaacgcccctctttttttgggtcccccaaccagttccaggttcccttctcccatccctaaaa

SEQ ID NO: 173197 - DNA, 560 bp, Arabidopsis thaliana
  unsure (1)..(560): unsure at all n locations
gctctctacgactcactattagggaagctggtacgcctgcaggtaccggtccgngattcccgggtcgacccacgcgtgcgctttcacgttgatgcgtgctttcgatctagtgatactctatatgacgaacgcgggtgttttatagtgaaagatgcgagacgattacagactctccaatcatcagctggagatgagggatatgctccttcttgaagacattaatgatcttcttgtttttgggaagggtgtacnacntctgttgacaggttagttgtataaataccttcatcgtaatggttatgttatgggagtttcctacgtttgtgtttattgtttggtttttatgtatattttttgtctcattcaaatttctgtgtttttaatttcatatttggaatgacttattgcaattttttcattttatttatattttgttagtttgtatttatatacagatacataacgaattccgtttactctgcctctatttacgtatccttgattttatttatattttcatttttttatcgcttcatttagttagtttattttattagtgt

SEQ ID NO: 173198 - DNA, 537 bp, Arabidopsis thaliana
  unsure (1)..(537): unsure at all n locations
gctctctacgactcactatagggaaagctggcacgcctgcaggtaccggtccggaattcccgggtcgacccacgcgtccgctttcagcgtgatgtgcgctctcgtcctcgtgatactctctctgacgaaccgggtgtctttgtcaacgatccgccacccacgcagcctacccaagcaccacctccgatgggtcataaactccttcttgaagacattaatgatcttcttgagatagggaagcgcatacgacgtcgcttgacaggtaagttgttttcttgcttcatgtggtgctttgcttattgtgttcttgccttgngttttctggaattttgatggtgagggtactgcgagtccgggctccctggcaggaggttgtaggtgatatcgcgacagtatttcttctcagtgactttggttaaactacagtgtagtaatcgtgccctatatggtgctccgtcatttgagtgtctaaaagcccgaacttgcatgctgttctaatcccctcatgtggttctatgacaccctttctgaactgtt

SEQ ID NO: 173199 - DNA, 507 bp, Arabidopsis thaliana
  unsure (1)..(507): unsure at all n locations
ggaagctggcacgcctgcaggtaccggtccgngatcccgggtcgacccacgcgtgcgcccacgcgtccgtttgaagctctctctttaaattctgttcgtctctcgcgatctctctctctctctcagatagctccgaaactttcacgcagagttaagtgaagcaggatgggattgncattcgccaagcttttgagcacgcaattttttttatggggggggtggggccccacggaagggcaagagcgtgacagacgagccccccgaccgatccgcccgccgttcccccccgacctgtgtaccggaggcttatccagtggtccgcgggatcatgccaagggcaacacacgattgatcgcagcagcgggaaaatggccctctcaaaccccgatactcagcgtacgcccccaagccgagagaacccccgagaacgcgcccccccgccgcaacagtgccgctcactctctcggcagcctgacccccgaggacccacgggcgaaaggcacccgc

SEQ ID NO: 173200 - DNA, 548 bp, Arabidopsis thaliana columbia
  unsure (1)..(548): unsure at all n locations
atgatacttcagctctctacgactcactattgggaaagctggcacgcctgcaggtaccggtccggaattcccgggtcgacccacgcgtgcgcccacgcgtccgctctctaataattctccagaacattttgcacattccgtttcactccgtgttgttggatcccccaaagaaaatgagttgctttgggtgttgtggggaggatgatgatatgcataaaactgctgattatggaggtcgtcataaccaagccaaacactttcctccaggaaatgatgcaaggcaccaccaagcctctgaaactgcacagaagggtcctccagttgtgaagttgcagcctattgaagtacctattatcccttttagtgaactcaaagaagcaactgatgattttggatcgaattctctcatcggtgaaggctcttatggaagagtatactacggngtattaaacaatgatctgccttcagcgattaaaaagttggattctaacanacagcctgacaatgaattccttgctcaggtttccatggtttctaggcttaaacag

SEQ ID NO: 173201 - DNA, 425 bp, Arabidopsis thaliana
  unsure (1)..(425): unsure at all n locations
gcgtacgtaagcttggatcctctagagcggtcgcccttttgttttggtctttttgaaaaccaactttnaagaagagattggcgaaatgctcaaataaacaaaatgttttgcaaagaggtttactcccaaaacagaatcaaaaaggtcttctatcccccaaaaaagagatggaaaccacacctttcatctcttttaaagttttttttttctgggtcgtcgggaaacctcccttgcgggcctttaaaaaaaaaaaaaacacccccccccctttgggttcgcggcgtggccccccacggtgtttttttttcccccctcccccccaaaaccccaccttcgttggggttccgcggcgccaaaaacgggaggcgcccacccgccgcctttcctcgcaaccattccctccgcgcgcccccggacctcgcccc

SEQ ID NO: 173202 - DNA, 469 bp, Arabidopsis thaliana
  unsure (1)..(469): unsure at all n locations
acgactcacttgnagggaagctcgtacgcctgcaggtaccggtccgngattcccgggtcgacccacgcgtgcgctaacactgctcctaccctaaacatgtcatcaattgctcagaatcacgctatgttccacagcatgcccgaagcagcaaggcaaggttatcagatgatggctgctcaagcagctcaacaaaaaatgaactacggtgcttcactagaagatggagggggtgggtctattggtggngctgntactgaaaataatacccctgaggaacaaaggaagtcaggacgagggccaatacccacaatgagccgctggcactcgcccttcccattcgtcctccgcccccgcccgaccggttttattccgcaaagtactaacggtgttccccgcctccacctacgccggtagtcggcgctcgggagtccgccgggagtgcgcgcggttaccgggttacgtcgttccg

SEQ ID NO: 173203 - DNA, 486 bp, Arabidopsis thaliana
actcaccttagggaaagctgcgtacgcctgcaggtaccggtccggaattcccgggtcgacccacgcgtccgagagatcttaaacctgaaaacatactcatggacgtagatggccatgtgatgttaactgattttggtttagcaaaagaatttgaagaaaacacaagatcaaactccatgtgtgggactacggagtatatggcccctgagattgttcttggaaaagggcatgataaggctgccgactggtggagtgtaagaatccttctgtatgagatgctcactggaaagccgccgtttctcgggagcaaaggaaagatacagcagaaaatcgttaaggacaagatcaagcttccacagtttctggctaatgaagctcatgccttgctgaaagggcttgctgcaaaagagccagaaaggagacttggaagtgcccccagccgagccccggtattaacaaacccatttggtttaaggcggtaaactg

SEQ ID NO: 173204 - DNA, 449 bp, Arabidopsis thaliana
  unsure (1)..(449): unsure at all n locations
gggagctgccacgcctgcaggtaccggtccgngattcccgggtcgacccacgcgtccgcgctgttgtactctcaattcttgggtcgttctgagtcgtctccgcgttaaatcttttccctttttgatcctttcttcctttcttcttcttcttcgcattgatttggtcctccttcctcttctattctattcattaaagaacctttgttcttatgggggtgggccncnacatcgacggacctccacttcaataaattccgcgccggttcattattttcccccccccctgccccccttcccctcccccgctcccgccccgtttcccccgcctcctccttcccctttcccgttctctgccctcccccccccgcgcccctgctttcgccccggctgtatccgctattccccgcctacccttacaccgccggattccgccctccttttttcccgcc

SEQ ID NO: 173205 - DNA, 502 bp, Arabidopsis thaliana
gactcactatagggaaagctgctacgcctgcaggtaccggtccggaattcccgggtcgacccacgcgtccgatctgtatgactctcactttcttgagagcggatcgaacattttccacgcgaaaagttttaccttattcaatcccgctctttacgttacacatcagaggactgatgaggtccgccttactattctatcttatccatgaagaaactagtgttcttatgaggagggggaggtcttcacggactccacttagatcatccaggaaacgctattaggagtacccaatccacgagatccttttgtctgaagcaacaagctttgcgatattagactgagagacactgtttgagctaaggaaatcaccgcgctatctttccaagcataactgagtcgacctcaaggcttacaagccatatcctatcaattcagatgatgaatctgacaacaaacatacccttaacccttctaagaggactacctcctgagccctctttgg

SEQ ID NO: 173206 - DNA, 488 bp, Arabidopsis thaliana
  unsure (1)..(488): unsure at all n locations
ctgcacgcctgcaggtaccggtccggattcccgggtcgcccacgcgtgcgcttggactattgtatttacgagcattctacttatacgtggactttgggccggagtagcatacatgcaagagagccgcaacactaggatcaatgaactcgctgatgatcctcgtgcatggaacgggatgcaccccagtttcctttttctttggggggtggggcncaaccaatctgcggcccttcctaaaaaaaattcccccacccttttttcctccccctttcctccttccgttgccgcttccctctcgattcgcgccttcgtccctccggttccgcttgttctcgccctcgctccgctcgccttttttttccccctggcctctgccccttttcggcgcggacggtcgttcgcccctgtttccccctcctgttttccggctctgtatcccccgctttgcggcgtttctctgtccgtgtgcgttcacgttctccgccgcc

SEQ ID NO: 173207 - DNA, 460 bp, Arabidopsis thaliana
tgctacgcctgcaggtaccgtccggattcccgggtcgacccacgcgtccgcatttctctctgactacttcatttcctcttcccaacagttaaaaaaagttctgattcgattcaagccaagatccacgtctaaagatatgttcatgcctagagcgcctttttccacccttttatcattctccccccctccccttttttctttggggggggggcaaccccatcaccccattccataaaatcattccctcccttcttttctcctccatttcctcttcctatcccttcccttccattctcccaactccccccctttcccttctctcccctccgttctcccccctttttttccccccttcttttccctgtttctcctctttcctcttccccctttttcccttccattgtccttccctttcctccccttctccttcccccttccctttcccgcccttttctcccct

SEQ ID NO: 173208 - DNA, 489 bp, Arabidopsis thaliana
  unsure (1)..(489): unsure at all n locations
acgcctgcnagtaccggtccgnattcccgggtcgacccacgcgtgcgagcttctggctcagtgtggagagcatctggtgaaaggtgatatccaccagggtccagctgtgattggattagctatgtcttccaccccttacatacttatcctaccccctattttaattcgatctaatcttttttctcaacttttttctttggggtgttggggaccacttttcggtttctcccaaaaaaaatttttcctttccctccttatttatccatcacctttcatcatatctttgccacatccacaccttttcacccccatcccccccccctttcacattaaactaccctcaccttcctaccccactttttacctcctttttatttccactttttaccctctatacttaatcacaccttttttctatgacattattcattcaattattacccatgttatcatcctctcatcttttccatatccatccatttttccccc

SEQ ID NO: 173209 - DNA, 494 bp, Arabidopsis thaliana
  unsure (1)..(494): unsure at all n locations
ctactacgcctgcaggtaccggtccgngattcccgggttgacccacgcgtccagttgttacaggttcaaagattcttagccttccggggagtttttcttagaaaaaacccatacccccaaaacattatacatccacccttctttttcttactcctactcccataaataaaacacaattaaaccaagtaacccaccatttccctcatttgggggggggacaaatcanccatttacaccccatacacaaattaccttctcactgcctttataacacgcaccatataacccttaaaaccaccatatcacaacaaatactacccatctacctccccctttcacctatattcccccccccccccccccccccactatccttacaccccaaactcattacccgtaatacaccactatccatactttcccacccttttcccacacctttatgtacgtaccatattcccccccctttccccccactccacctttccacaatc

SEQ ID NO: 173210 - DNA, 541 bp, Arabidopsis thaliana
gcctgcaggtaccggtccgggattcccgggttgacccacgcgtgcgagttgttgtactctcaaattatcggagcgatgtgaggagtttccgacttaaatctccccccctccttgaaccctggaacaattactcccttctttttcgtcattcatttcgcatcatttaccgttcagttatttccagtggtccccgccagtttccctcacttgggttgttgggcacccacccaccctctatcccccccaaaaaaaataaatccacctcccacacggtgtttatcccacacgcatatcccatatgcgattcaccccgatcgcgcagatatattcgcaggaactgccaccacgcattaccgcttaatgctatcacgacccctctcctctcactataatatcccaatgatctcatctcccgtgttaatcgcaggtgtagacaaccattccccccacttataccgctacacctttttacattcctgttatccccgcacatatcatccgtgaacttcttatccacattcctacccgttattaccacact

SEQ ID NO: 173211 - DNA, 513 bp, Arabidopsis thaliana
  unsure (1)..(513): unsure at all n locations
atagnagagctttgacgtcgcatgcacgcgtacgtaagcttggatcctctagagcggccgccctttttttttttttttttttttgagaaggaaaataaacttctttatcacgaaagctagactttgatttttcattactccgtccttttacattgatgattagaacaaaccaggtttaaaaatttaagaaacagtaaagtggaacaatattgaattagtttatttgccgatgggtgggagttccttagtgcgattagagttgggacaacagaggattcttcatatcttttttacagatggttgcgtttaaacaatattttatatgaattcttcctccggatttcggaacatggactctctgatcttgatacccatgacatcttttgctttacccaaaagcacagggtaaggtcctaaattcacgcccaattcctcggataaaacttcacaggacaatttttcatggaaagaacaccctcccccacatggggacattgtctgtgcatagagggt

SEQ ID NO: 173212 - DNA, 506 bp, Arabidopsis thaliana
gacgtggcaacacgcgtacgtaagcttggatcctctagagcggccgcccttttttggtgttttttttttgagaaacaagatgtagattaaaacttgaagaaaacagattcttttacataataatactactccataatcatggtaattatacatatacactctatccaactctactatgtcaaagtagaggaggttacaacaagtcaactgttgtatgaatagtggaggggataaaaaaaactccggaaacttttcctatgacatgagtatgaatcactgcgtcagtagctttgcataaacccttatacctctctcatgggtgaactcgaagatacaaggacaatatctaaagctcaatttatccttgctagaactgtggactttaaggaaactccggaactcctgggttagcactaaggactgcttcgaaccttttcaggagccaaaaagtctagtggccaggttcatgcaagaatgacatttcctcactaggggaggacaaccct

SEQ ID NO: 173213 - DNA, 462 bp, Arabidopsis thaliana
  unsure (1)..(462): unsure at all n locations
gccngaggaccggccggaanncgggttgaccagcggcgggcactggaaaaaaggcggctctcctttgctccgagtatggagaaaatgagagggaagcgaatcagacaagagactccgggagttagtccaagatgggagatctgaaagcgagcgtaagacgaggaacacagagaatttttttgtggccgtaggaagaatcccaagaggaagaggaagaggagaggctccccaaccatctatttacctagacatttcctatcccgagaaggatattaaccctgacggaagcagaaagggtctgagccctaccgcggcatcatcggaagaccctgaccagtgacagagagtctatcttctgttccaaggggaaccacgagcgccctttgtttgacctgcttaacgagaccgtcttccgcaacgacccctgagggcagttacagctgcctgcccattcccgacgat

SEQ ID NO: 173214 - DNA, 495 bp, Arabidopsis thaliana
ggaaagctgctacgcctgcaggtaccggtccggaatcccgggtcgacccacgcgtccgagaacaccaaatttgtttccgtcttctgctaacatatcctctttttcatctgggaaccctaatttcttgactaacttagggttctattcatctcctttccgatcatttcgcaatcaaaagccccttactccccccactcccattttttgtttgggggggggggaaccccaacaccccttcgccataaaaaaaatccccccatctttatccccctcctttcccctattccatccgccctcacccccaattcctcccgtctccccctccctatcccaattctcccccccatctctctcgccgccttgtttgtcccccccatcatatccccgcttatcccctctttcccatcattcacccctttttccgccatcgatatattcatctctcatttcccccgctatcatcctgctccactttccgatgtcctcccgcctttc

SEQ ID NO: 173215 - DNA, 494 bp, Arabidopsis thaliana
ggggggtaccacgcctgcgtgagctgggctcctatagagcggtcgacctttgtgtgggtttttggttaaaaacactgaatggacaccgcatgtacctgtatgaataatataaacactaatcgtacacactgcttataaaaagcacccccaaatccaaacaaaattgggatcccttttgtaagataggtgtgttacggatgattattttttcataagactgttttaaaggcatttagtctcgccaggacaagctataaccggaacttaccaacacattcagagtcttttatgctaaacaaaatagctttaaagatctttcactcacccgcctgatgcttatgatccacgggtctgacctgaaccggaaacgaaacagcgggtacattaatgaaccctggaggcccaagctgatgttgttgagtattaccgcatacacaccagattctttgatgttattcgctggagatacaatcgctatggctgtcgctggatct

SEQ ID NO: 173216 - DNA, 493 bp, Arabidopsis thaliana
  unsure (1)..(493): unsure at all n locations
gggaaagcacgtacgcctgcaggtaccggtccggaattcccgggtcgacccacgcgtgcgcacaaccgaaaaaaacactaattgtgctttccctttagattcattagtattttctttagaagctcctcaacaaaggacgcatcccatgccacaacaaacccatctacccaacccaccaaaacagaaatcccgccctcaccactttatccttcggggggggtgggcncccnccacggcgcgttccccaaaaaaaaaaacccccccatcattcccccccccgatccccctttccatgccgccgaccccgcccgattgcccccgaccccccccgcatacccacatccccccccgcccccccccccccatatatccccccggcgacataaccacttaccgcgactacctcctccccgcccttgcccccaccttttctccctcccgccttcccccgcatcccccgcccctcgggccgcgccacccccctccccccccc

SEQ ID NO: 173217 - DNA, 523 bp, Arabidopsis thaliana
  unsure (1)..(523): unsure at all n locations
aggtgacctatagnnagactatgacgtcgcatgcacgcgtacgtaagcttggatcctctagagcggccgccctttttttttttttttttttttatttttttatcccttcattgaaatatataatgatcacaaatgacatcattgtgcattggctaacttcatatcataatgggaggagacagatacgagagcccattgccacattagagagaaaccaaacattgaagcgttattcaaatgggggggcggtggctatttaatctgttatggtaaaaggatgggggtgcttttcggcctaaaacatgcgtacgtaaaaaagaaaaaacctgtatttgctagggattgggcattactctgagcgggaaagaggttcataccgaagtcaactgacctcctttccacaagaaataaaaacttgaggggtgagaaaaggtttaagataaggaatcaagagcattttagacccagacaacacccccagagcttataggtggggctaacaaggaacagagtagcgcagggc

SEQ ID NO: 173218 - DNA, 455 bp, Arabidopsis thaliana
ggggagccggtacgcctgcaggtaccggtccgggatcccgggtcgacccacgcgtccgcggacgcgtgggtttacacaacacaaaatccatttttcttctttcataactatcagaaacaaacacaaattaaatcaaagtttcattagttttaaccccccacaaaaaaacatgggtagtgcaaaatcagccatgctgatcctcttattagggggggggaacccaccatgggccacggccatagatatgaccgtttcccgtgaagggcggagacccccccccctctgcgcgtatgcccctgagtcacgcgcttgggcatcatgcgggccttgggcgcgccgtttgttgcgggcatgctttccccgctgcctcctgctgcgctctttccgccgattggcgcgttcgtggatcgcacgggttttcgcggcgttcggcggttacgtctttgcccttcttc

SEQ ID NO: 173219 - DNA, 486 bp, Arabidopsis thaliana
  unsure (1)..(486): unsure at all n locations
ctgctacgcctgcaggtaccggtccgngantcccgggtctgacccacgcgtccggttttttattaccctgttttataaacagaggaagccctaaatttggattctctattctaaagttttctcatttcgctaattttggagaaaaacgattgttttttttaatcntttctatatttctgattcattcttcccccctttttttttcttgggggggggggacccacccatcgctcctctcccacaaaaaaattcccccccttcctccctcctttttccccccccttatacctatctttctcccatccccctcaatcacagccatctccccccccctttccgcttcatcctccccaccctgcccctcgcgtttttttctcccctcctctccccccgttttccaccccttcctagtttcctccgctgttcgcccgccggttcttcgccccgcattccgcgccatacctcttctctctttccggatccacc

SEQ ID NO: 173220 - DNA, 539 bp, Arabidopsis thaliana columbia
  unsure (1)..(539): unsure at all n locations
ggattgtttaggtgacttatangaagactatgacgtcgcatgcacgcgtacgtaagcttggatcctctagagcggccgccctttttttttttttttttaaccaaaagcaatcagaaagtttccaaggactaaagcaaaataggtgtggcaatcagtctagccgagccgaggatagtgtgattaaaagatacacatagataactaaaacaaaacaaggatcggatctgataagtcaaattcctagggggactttgttcaaagacttcattgttcatcccacttgtcacacggctccaagagttggacattgcaactatatatatccttgtactcttctatcatgtccaagataagatcatccacttgagggtcgtttccaaacggtgaaggatcatactcttctctatagatcttcatctccttcaaacatggaaagttgtccaagaaatgctctatcaggtgcatctctttcattgttactctaaactctttaatctctaccacttttactggaaaaaatttgagcgaacggcctttat

SEQ ID NO: 173221 - DNA, 359 bp, Arabidopsis thaliana
gcctgcaggtaccggtccggaattcccgggttgacccacgggtgcggaacccttcaaatctggaggaactcttctcaggtgaggttgcatctcctcgcttcaccgatcaacccgaatacagaatgagacccaactttttaaaacaacaacctaccgcaataatgaagaaaggaaaagaaggaaagatttccgccctcccctccaattggatgtgggcggggacaccacaccatagaccctccgaaaaaaacaaaaaccccacaacgcggggggggggggggggaccacaaaaaatccgcacacaaccacgggacgcaccacaagatacacggaataccccccccaccattctcacatca

SEQ ID NO: 173222 - DNA, 514 bp, Arabidopsis thaliana
  unsure (1)..(514): unsure at all n locations
atagtnagactttgacgtcgcatgcacgcgtacgtaagcttggatcctctagagcggccgccctttttttgtttttttttttgtttgttttatttttttgttctttctcactaaatagaattcaaagctgtgttgggtttttctctggccgaggggagaaaaacggaaccctaacttggtcatgcccccaccaactcgtggacaaaacgaatgcaatccggcccttttatatcgagtcggaagacccacgcgttcttttgcgtctccttgaaaccagagaaaaatcactaggtgctttgtctgcttcagccgccacaactacaattggagtgttttcgaggcccgttaaacccactcgaaggtgaataacaattgattacactggatgcggctgtttgtagggggctacacgagaaatcggaggattgatctcgagcttgtgaatcaatctgggcgagaaacaagggggggctttaccctccgagcccgtaagtcgaaaaaggtagatgtgctg

SEQ ID NO: 173223 - DNA, 477 bp, Arabidopsis thaliana
  unsure (1)..(477): unsure at all n locations
cgcctgcaggtaccggtccggaattcccgggtcgacccacgcgtgcgtgattactgatgatgattttagagatcttgtggacaaggttcctncaggttgcagaatgacaaccatttcagactcttgtcacagcgatttttcatcatactttccctttgttaaatacccaaaaacgcacatttcgcagattcctcccttggggggggggaccacacacaccccaaccccccaaaaaacaaataccccactcccccgtgttttttcctatctactatatttttatcataaccccataccctcctaattcctcctcatacacccccgcctttccaaatcatcaaacctatccctctaatcacctattatatcccgggttcttagagcccttttttcctaacattgcgtcattcacaccttctatcccgcaacgctttttaccatctagcttcaccccaattcgtgcttctctcgttacgc

SEQ ID NO: 173224 - DNA, 533 bp, Arabidopsis thaliana
  unsure (1)..(533): unsure at all n locations
cgcctgcaggtaccggtccgnattcccgggtcgacccacgcgtccgggactctgaaatttctacgtatccccttggacacgtctacgagagaggggacttcagatggagctgcatctcaacgaatcacccatcttcaacgattatctattccccaccatgtcattctcttcttttccctccttaccacccacaccctttctcattttccggggtgaggacctcactccatttccctccccttccacaataaaccctttctccccctcttctttttctcctccctatttccccctttctcttccccccccttccccctccctatttccccccccccctccccccccttttcccatttcatccccctccctccatctctccccccttttctcttccccctttctcccctctccccttttccctctcctctccatcccctcctccccttcttcctctcttcctttcttcctttcctctctccccccccatacctccctcccctctatccctcttcctctcccttttccctccccct

SEQ ID NO: 173225 - DNA, 456 bp, Arabidopsis thaliana
acgcctgcaggtaccggtccggaattcccgggtcgcccacgcgtccgctcatcatatatatacaaataaattacattaccaataacaccacatagattcccatccaactacacattaccatttcatacccacagcataactacttctctacacacggatcacacatcacatctccaaaccacccccacaattttttttcgaatgttgaccacaaaaccctctcaccccaaaaaaaaaaaccccatacccctccttaacccaaaacacacccataccatccccaacaccccaatacccccatcccacccacttcccttctcaccccctcccaccccccccaaacatacccccaaccaaacaaccaaattccccctctatcctcatcccacctacctcccatcctctcttcactccaacactcacccactacctacctcactacattccacctccatc

SEQ ID NO: 173226 - DNA, 490 bp, Arabidopsis thaliana
  unsure (1)..(490): unsure at all n locations
cccttttgggggnaacacgcctgcagtaccgggccggcattcccgggttgacccacgcgtgggaaactttgtttgttcatttgatctttcttaaaaatatgaaaattaacatcagagattccaccatggtccggcctgccaccgagacaccaatcactaatctttggaactgcaacgtcgaccttgtgatccccagattccataccccttgtttctacttctagggaggcaccggcgcttccaatttctttgaccctgaggtcatgaaggaagcttctttccaaagccgttgtcccttgttaccctatggctggtggtttgaagagagacaatgatggtcgtatagagatcgattgtaacggtcgctggtgttctcttcagtggggctgatactccgtgaggtatcgatgaatttggggagtatgctactacccttaatctccgataggttattccctaagggagacactcgggtggcattaactcttta

SEQ ID NO: 173227 - DNA, 480 bp, Arabidopsis thaliana
  unsure (1)..(480): unsure at all n locations
gggagctactacgcctgcaggtaccggtccggattcccgggtcgacccacgcgtccggactttgtttgttcgtttgatctttcttaaaaatatgaaaattaacatcagagattccaccatggtccggcctgccaccgagacaccaatcactaatctttggaactccaacgtcgaccttgtcatccccagattccacactttcctgnttggggggggggacaccccaccccactcccaataaaaaaaaatctcccctccctccggaatttatatccacatatttctttcctataccacctcccctcaaattcaccccatcccctccctctttcactatcatccccccccaccccccccccccttcttttccccccatctttttcccttattcccactctttcaattcaatcccccaatacagccatcaatttatcccaaccatatacgcccggttcgtccgtttcctcgctccccgtcctc

SEQ ID NO: 173228 - DNA, 504 bp, Arabidopsis thaliana
  unsure (1)..(504): unsure at all n locations
gggagctgcacgcctgcaggtaccggtccggattcccgggtcgacccacgcgtccgagaactgaaactgaaactgaaacacttctctctctctctctttctcgcttccacgaatcgagagttctacaaattcgcttcctagggtttctcaattcttctaatttcttcatttctatggcgagtcaatgagcgaaatggcttttttttccggggggggtcttctcnatatcaaactcccacaatacaagaattcccctaccctccccactttttcccccctcacttctctcttccttcccccccttcccccccctattcccccccctccccccctcacctttcccctttcctcccccctcctccctccccgcccccccttcttctccgcctatactcacatcccatctttcccccacctctccctcatttccgcccgttttcgcccctccttcattccggacccctcaacccccaccgttcctgccatcccacctttgccccatcc

SEQ ID NO: 173229 - DNA, 499 bp, Arabidopsis thaliana
  unsure (1)..(499): unsure at all n locations
atagaagacttagacgtcgcatgcacgcgtacgtaagcttggatcctctagagcggccgcccttnnntttttttttttttttttttttttttttttttttttttttttnggggggtacaaggtttaatatcatcagccatatttgatcacatttacaacttctaagagcataagtctttgtatatgaaactctcgcaaagtagtctgtactctgtagtataagccaatgagcttctgtttatcgncaaacttctactttgcttctttacagctcataatcctcaagtcacttgaggtcggagtttccttaacaaccacttcttgcgtagtttcacatctagagccaagaaagttttcgccttgagtttatcttcaagcagatcacaaccatccaatatagttcatcgtccatgtctggaaccgcttaaatagcctcaaccgtgtcctttattgacagggttggggttcataaactcgaggctttttcgggttatagggc

SEQ ID NO: 173230 - DNA, 516 bp, Arabidopsis thaliana
  unsure (1)..(516): unsure at all n locations
gggagctgccacgcctgcaggtaccggtccgngattcccgggtcgacccacgcgtgccgggagttcatgtcttgttccttcactgccaagttcaagtttctttatggcaaagatgttttgaaaaacaggcataagacattgaggaacttgtttaaatctgtgaataatcttttgatagaagatggttttagtttgccaccatttcctctttgggggggggccccccccccccccaacacccccccaaaaaaccacccccctaaaccccccccccatatccctccccccctctctctccatcactctcccccatcctccccactatccccccatcctcccccccctttccccatcctcccccccccctctccctcccccttccattcccccccctctccttcccccttcccccccctcttccctcattcccccctcttctcctctccctttttccctcccctttacccccccctttcgtcctttcctcgtttccccttcgcccccttctcccccccc

SEQ ID NO: 173231 - DNA, 462 bp, Arabidopsis thaliana
  unsure (1)..(462): unsure at all n locations
atagnagagctttgacgtcgcatgcacgcgtacgtaagcttggatcctctagagcggccgccctttnttttttttttttttttttttttttttttttttttttttttttttttttttttttttttttttttttttttttttttttnccctttaccaaattttttttcttgtcgcctaaaggaaaaagtgtttgatacctcttcaaaccttttgtttttccaaattaaaaaaaaccaaggggaagagtccttgaaattgctttattttctaccgggccccttcccaagggggagcccttttccctttttttttggaggagtccctgaaaaatacctcccttttggggggtgggaagggaggcctcccccgtcccattttttttttttcccaatcccaatcccttgaaactgggattcttcaaacctctttggtttttggacctgggaaaattttggggggcca

SEQ ID NO: 173232 - DNA, 493 bp, Arabidopsis thaliana
  unsure (1)..(493): unsure at all n locations
gggagctgctacgcctgcaggtaccggtccgngattcccgggtcgacccacgcgtccgcttggaggaggcatatgaagcattaaagactttggagattcttggaattgataaaaagtctgatcttagctcaaagacttgtgagaatgtggttaaagttcttcagtcgtcttcttctactcttaaggatgcattttatgcgtttttttttgaggggggtctaacatgtacaaccggtcaacctgaaactaatcccccccgtttctcaccttcccgctcccctttcctacccccagctcccccctttccccccctctccccccccctttccccttcttccccccccccctccccctcccctgtttttctcccctactctcccccctttctccccctcctcccctcctcccccccccccccccctcctttaatccatccacttttcccccccttcccccctcccctcttccccctcctcccccttcccccctccct

SEQ ID NO: 173233 - DNA, 464 bp, Arabidopsis thaliana
  unsure (1)..(464): unsure at all n locations
ttgacccacgcgggggggcccnnnnnngcacccncngcccccaccacaancaaaagacncanacncnnccccggagggaaaggggagacaagggcccgacgccccgcagagggcaacaggcggacggagcagagggcacgccgacgaacacggaacgagagatttttaaaggtgagggggagctagagcttggtctagggctgaacctaggcggtggaacggtgtgccaagatgggtaaatcaggcggacggcgccacacgcggagagcgtggaagggtatagaacggctaaggatgtctcctgatcgaggggatctaaaacgtcgctggctgataagtggaataggaatgcaagggaccacgtgccccctgcgggataagacagaaaggcggggaaggagcctcctctgcgggtcaacacacgatgaaccaggtgtggctgaaagacgcagcccccgaggtgc

SEQ ID NO: 173234 - DNA, 185 bp, Arabidopsis thaliana
agtacgcctgcggtacggtccggattcccgggtcgcccacgcgtgcgatctagtgaaccggagagtcaaaggttgagccaagtggtgaaacagatggcgacttgaaaaccaaaacaagatatcatcacgccatcttattcttcatacatatcacattaagatcagtaacatcatgatcaaaaaaa

SEQ ID NO: 173235 - DNA, 502 bp, Arabidopsis thaliana
cgtcgcatgccacgcgtacgtagcttggatcctctagagcggccgcccttttttttttttttttttttttttttttttttttttttttttttttttttttttttttttttttttttattttttggttttttggtggggaacgaagggggaaaaggaaaaaattaaaaaaaaaacgggaacccggggggagaaaggcccagaaaggttttaaaagaaggagggggaaccgaaaaagatcacttgaggggtcaaaaaaagctggcataaaaaaaggacaaaaaaaaaaaagtcgtaaggaagcggctaaaaaaggggggtgaaaaaaaactttgggggaaaaaaggggtgaggaaacacagatgggggcataaccaaaaacaatgtcttggaaaaacacctgattgaaccagcgaaaacgttgggaaaaaccagaaggggcgagaccactcccggagggggggggggggggtttagggcacacttagggggaggaaaagaaaag

SEQ ID NO: 173236 - DNA, 191 bp, Arabidopsis thaliana
  unsure (1)..(191): unsure at all n locations
gcctgcaggtaccggnccggaattcccgggttgacccacgcgggcgaaccgatgagcgacaganacgacnctgcnagacgccggacccgggagccagagggagaagaagccaaaaaacaaagaggcaaccgaggcctttgtaacaggcagacaagcgagagcaagacggaagcagaaacagacggagaagc

SEQ ID NO: 173237 - DNA, 479 bp, Arabidopsis thaliana
  unsure (1)..(479): unsure at all n locations
tgcacgcctgcaggtaccggtccggattcccgggttgacccacgcgtgcgatcctcttctctctctctcaatctcaatggctctggtttaaaaagggcaaattagagagatttcccctctaataacaaaaaaccctcttttctttctctttttccttaaaatatcttcctataaatcaacaaccacttccaacttccctcaattggggggggggcaaaccccncaaccccccatccccaaaataactctccctccctttgtatcccccacaatcccttttcatatcgccctcacctcatttctatctctctacctcccctttcccaattattcccaccccccctccacccccgcatttttccctacatctcattatcctaattaccaatctatccttatttcgcccttttttcaaacatctgtgtaaccgttcctaattttcatccactatcttcacttccactctttccccctttctc

SEQ ID NO: 173238 - DNA, 499 bp, Arabidopsis thaliana
  unsure (1)..(499): unsure at all n locations
ctgctacgcctgcaggtaccggtccgngattcccgggtcgacccacgcgtccgggttacttcatcgccacgatattcccttcgcagcttcgtgcaggaaggacagtgaccaaatgcaaaacttacctttacaaatctccactcgctgattgcgattttccgaccgatgngaacaaaggtgttcgcggactgcccttttttttttcggggggggggtcaacccacacccccccttcccaaaaaaacatatccccccccccttttcccccccccatacctccccttctttcccccttccctacatttaccccccttctcctccccccttctcccttcttctcccccccccttcactccctccattttttcccccttcctattacactctctccccactcttcacaccttcccacctctttccccatccatactactctcttcatntttcccccctcttcctccctatcactttctccttctcatcccctatatccccccca

SEQ ID NO: 173239 - DNA, 190 bp, Arabidopsis thaliana
cctcacttagggaaagctgctacgcctgcaggtaccggtccggaattcccgggtcgacccacgcgtccgcccactgtcagaactctcccttcttcacacagacaagacgaaaatctctaagcctatggataaagtgctctttacatatattcccaagctccacagaaccagtttgcatagacccgatgct

SEQ ID NO: 173240 - DNA, 365 bp, Arabidopsis thaliana
  unsure (1)..(365): unsure at all n locations
ggaaagctaccacgcctgcaggtaccggtccggaattcccgggtcgacccacgcgtccgcatttttcttcttgaaacccatggctcgattttccttcttgaatgtgtgaaaggatgntgngngctattctaaatgactcccccaaactgcttctcacgaacaaaaagtttctgtcctaaaaacccaactcccctctaaaacctttttttttcgggtgtgtggaaaacccttttccccccatccacaaaaaacatcttcctcccctatttccccccactatacctccattccttcacccgctcccccacacattcaccccaaccctcacccacattccccttcataccccaccacccctcgccccc

SEQ ID NO: 173241 - DNA, 513 bp, Arabidopsis thaliana
ggggagctacacgcctgcaggtaccggtccggattcccgggttgacccacgcgtgcgacactctcaaatctctgattcttcgatacgataaattctttctcgatatagaaaccactgattagatcctaattcgtgggctagctcaaaagatggtgcttcttcccaagctgtatgatgcattgtaaggatctttttgcccttccctcattgggtgatggggaacccccacacctcgttctcccaataaacagttccccctttcggtgcgtgttttcccccccggttcccctcttcgttcccccgccccccgctgtttcccccctcgttcgcccccgttcccctttcgttgtgcgcctcggtctcctcccgcctttcttaccgcccctgctctcgtccgtttgtccgccgcttttgctgcttccgcccgttgttcgctggtcagtttttcgctttcgtttttcctcccgtattgtccgttccgttgttccccgtccgtccgcgttttcgccgcgc

SEQ ID NO: 173242 - DNA, 530 bp, Arabidopsis thaliana
gggaaagctgacacgcctgcaggtaccggtccggaattcccgggttgacccacgcgtcctgatccctgtaatcccttagatcttcttttaaaatttcaatgtgcgccggtgatgcccagttcccctcaaaaatattacattcccaccttttaatcctactctatcacacaatattaaaaaatccattaacacgagaattccacaacaattccttccttggggtgtttggccacaacacccaaaaaccccccataaaaaaaaattcccaaacgctcccttctaaatcacaccaacattttattattaaatcaaccaatacccacacaattaccccgcaatcctcgccccatttaccattaatcccacaccaccacacccaactcactataaattcaccaaaacgcataaacacgtaaaacaaatgtataagacattccacacccttattcacccatacataacttccaaccaaattttaccaacaattcaaacgatacaatatacacacattcataccatataaccacaat

SEQ ID NO: 173243 - DNA, 511 bp, Arabidopsis thaliana
  unsure (1)..(511): unsure at all n locations
gggagctgcacgcctgcaggtaccggtccggattcccgggtcgacccacgcgtccgcgaccaacattttcgttcgctgcaaactcatggctgtaagtttttaatcttccttcgctaatccacgatttcgattccgctatttcttttcgtaacccatttccattattaatttccatttctctctataaccctccaaaatctttttccttggggggtggggaaacacccatttccccctttccaaaaaaatcttttcccccccaattttttccccctcccattcccccttttcctttcccaccttacaccctcattttcccacccatctccgccccccatttcccctatcatccccnccgaaccgcctcgccccgcgttattttcacgcgctacgtctaccccctttatccgggtctttggctgctatcccgcctcttccgccgggcggttatccggatcggtattcccccgagtactcgcgtacgtcattcccgcttacacccgcgtatccg

SEQ ID NO: 173244 - DNA, 505 bp, Arabidopsis thaliana
cgactcactttagggaaagctgctacgcctgcaggtaccggtccggaattcccgggtcgacccacgcgtccgaaaatggcaacttacttagcctcactgaaccacgaggaaacaagactagcgatttcatgcgagagagcttttcttgaaacgctagatggctcatgccgtactcctattgctggatacgcatccaaggacgaagaaggcaactgctttttcagaggggggggtcgcttccccctgaccgccctaaagatacttcgcgccctcccgaaacgcgcccatcccgtgccttcacgccccgctggcacccccgctatcgcccccgtcgcccccccctaccccttcctccccccccccgcccccccccctttatttgccccctcctcttccccccttaccccccctccgcgcaccccccgcgcctcccctcccctgtatcccgtgccttctcccgccgttcgcccccgcctccgcccgcttccccccctaaccccccccc

SEQ ID NO: 173245 - DNA, 436 bp, Arabidopsis thaliana
  unsure (1)..(436): unsure at all n locations
cgcctgcaggtaccggtccgngattcccgggtcgacccacgcgtgcgcacggacgtanntaaccattagcggcttcatcctccgtacgaatgctctctacgccgttcaaaaaaattaattataacctcccccacatcttatactttattcttaacagattaatacccaatcataataatcaaaagagacccataaaaaatttactccatttggggtgtgggggaaanaacccacatacacccccataaaaaaaaaaaacatcttccctttgtcggtttcgacaccgcctctatttcaattccttccgcacatccgcaccgatttactacggaatattccccacatttccctatattacccctctccgcctcaaccgagcatttataagaagcaatcttttacaccgaaaataccctacgatacttcattccccgct

SEQ ID NO: 173246 - DNA, 526 bp, Arabidopsis thaliana
  unsure (1)..(526): unsure at all n locations
gggagctactacgcctgcaggtaccggtccggaattcccgggtcgacccacgcgtgcgagcacgcgtccgaacctggatcagatctagtcaggggtcagatcggagagccggcaatataatggcagcggggagacgattacggacgctccaatctcagnctggagaacaaggccttgcgcaaataaaacaacactttacaaattttttctcttgggtgttggggacaaacccccctgtaccccccataaaaaaaaaataccccctacatcccttggtctccacgccaccatctcaccatttcgttccacctctaccccacaataaacccacatctcacacacctttccctctcattcccccccatccacccccgcccgccaattattagccggggtagtattctccccttttaaccggttttacctagattgcaggatattcgggcgtacttttttagcaagcccgtttgggaccggtatcgtacgctagcctattacccaattggcggcgcatacacggcgacgg

SEQ ID NO: 173247 - DNA, 532 bp, Arabidopsis thaliana
  unsure (1)..(532): unsure at all n locations
gggagctactacgcctgcaggtaccggtccgggattcccgggttgacccacgcgtgcgaagccatnacacaaaaaaattcaacttaccaagtgcaangtcgccaacgaccatgacatatccacctcttacctatggtctaaaaccttttgtctgcatttaactttccgcctgtttcgtcgccacaatgtaccagtattcccggcatttcctcttttgggttgttgggcgccacaacaacccaattgcgccccaaaaaaattactcccttatagctcccgtcatatgccacgcccctttttttcgtttacgttcccccgatccccaccgtatttccacccctcctaacaccgtaacgcgaatattagagcgccctcagaaggacgccggattaattacccccgtgattccgtccctattatccccggctttcatacgttcgccccgtattcgcgctaacgtaattccgacactctaatcacacccaaatcgtcaataccacattacgctttccacacccgttacccccccggt

SEQ ID NO: 173248 - DNA, 481 bp, Arabidopsis thaliana
  unsure (1)..(481): unsure at all n locations
ggaaagcagccacgcctgcaggtaccggtccggaattcccgggtcgacccacgcgtgcgcgcacgcgtccggcttcttcataaatctctctctcttctcctctcttctcaaagatcgaacctttcgatttcagtctcttcagagttctttcgttttcatcgaaacaatggcgaagaacgttgggattttggctatggatatctatttccctcgggggggtgttcaacaggaagctttggaagcacatgatggagcaagtaaagggaaatacactattggacttggccaagattgtttagctttttgcactgagcttgaagatgttatctctatgagtttcaatgcggtgacatcactttttgagaagtataagattgaccctaaccaaatcgggcgtcttgaagtaggaagtgagactgttattgacanaagcaagtccatcaagaccttcttgatgcagctctttgagaaatgtggaaac

SEQ ID NO: 173249 - DNA, 526 bp, Arabidopsis thaliana
  unsure (1)..(526): unsure at all n locations
atagcagagctttgacgtcgcatgcacgcgtacgtaagcttggatcctctagagcggccgcccttnntgggggttttttttattttttttttntttnnntttnnnnttntntnnntttnnnttttntttnnnnnngggggaccatgaaccaattctaaaactgataacaagttctcacattcaccactttaaacatttaatcataaaaggaaatcgaaaatttgtttttttttaatgggaaaaaaatgggggccctgaaccagttaagggaaccactggggtatccaaataagggcctgggtttttttttgtggaaggggcctccccttttattacgggcgaaggttttgggtttttcaccactcttaaccaagaattggatattatggaaaaagttttggggtgttacaggcaacccggtggttgattaaaagcgtttttttctttttttatccttttaagaggggaggggcccgggaaaaaagctttcttttgggcttgggggggggtttaaaggggggcaaaa

SEQ ID NO: 173250 - DNA, 529 bp, Arabidopsis thaliana
gcctgcaggtaccggtccggattcccgggtcgacccacgcgtgcggtcattagggttctatatgtttagaaaaaaaatgttggtgttagcattattttccatttacttcttatcaatagaagctcgccggcattgattcatttcctgcgctattagcctcttgcagattcaacgtacgggtctcgaaattttctcatttggtctgttaggcaacaccccggggcggcccgctacacaaaaatccctcccacccccgtgcttttcccctcgcccctcgccatttcgtgtccggcctccccccccagttatacccgccatcctcctccccgttctccggtcttccgcgcgccccccgcgcgccgccgttgtattgtcccgcctgcctcctctcgccgcatctcgcccgcgttcacctattttcgccgcggtcttcctcgatacgacgttgtcgctaccgtatcatacgccgccgctttcctcccgcaaccggccgttccggacttcgatcctgcgattaagcccaccgcat

SEQ ID NO: 173251 - DNA, 401 bp, Arabidopsis thaliana
  unsure (1)..(401): unsure at all n locations
tagggaaagctggcacgcctgcaggtaccggtccggaattcccgggttgacccacgcgtgcgcgacaactgcatactgcgaggcaagagctaagtcacgctttgtatcagcatgatgctgcttgtcgtgtgattgctaggcttaaaaaagaaagagacgaatcacgacaattgcttgcagaggctgaaaggcagntgcctgccactttttttggggtagaggggaccctcctccgaggaccgcgaaaaaaaaaatccctgttggtgaagagttgcccccccccaaatatatgtgcggtcgggaaggcgccccatttcccgcacgcgtcgcgcccaaaccgccatcatgacgcctataggctctcgcgcagctgaatgtgcggggggactgcggccccgttg

SEQ ID NO: 173252 - DNA, 476 bp, Arabidopsis thaliana
  unsure (1)..(476): unsure at all n locations
ctgccacgcctgcaggtaccggtccggaattcccgggttgacccacgcgtgcgactttcgcagaaaccatttggagttggagctttggacgacnacaatggccccgaagaaaggagtgaaggtcgcttttaatcacaacaccttttcatcagtcttacccctttttattttatcattagtcccaaacacatccgaacttttgtantttggggggttggccaacacccgggggccccccataaaaaaaatccctctccttcgtttttataccctatccttcccttttcctctcccgctcccctccatttgcttccatcttctccccctttcccttctttctcctatcccttcccatacctttttttccttctgtctatttcccattttccacgtgtacctcattcctcccttattccccttcttttttacattctattttcccgttttcttgttactacttccctctctccccatta

SEQ ID NO: 173253 - DNA, 489 bp, Arabidopsis thaliana
  unsure (1)..(489): unsure at all n locations
cccctgcaggtaccgggccggaattccccgtttcnacccaggggtggggcgcgtcacatataacacttntttataanaaaatgccaactggcangattcataaggggagtgtgttccacttggatgaagaatgctctgccttacgagaagagtaaaaactgtccctcggcgccgatatttgctaggcaatttttttttgaggtgtggggtnatcctaagggggccgatcataaaagaaagcccccggactggtatttctccattacacccattcctttcagaaaacacctaccgttcccaaaaatctcggtgttaacacttgggccaatatttttctttcttttggattcccaacacccgcaaaatggtttctctcttacaaggaaaaacctcacactcgtttggtccgggggtggcccctctccgaagacttaggttgtgcttttcttttcggcgaggcgctccccaaatgaaacttttgcgccgccc

SEQ ID NO: 173254 - DNA, 529 bp, Arabidopsis thaliana
  unsure (1)..(529): unsure at all n locations
tgatactccggcactaactcgactcatttagggaaagaacggtgcgcctgcaggtaccggtccggaattcccggttcgacccacgggtccgggagcatttgcttcaccctcatcaggtgtgatgcctgattccaccaatcctactatgagtgtgaatgcccaaggccatgaaatccaaacgtggnggtggaacaacaagccagttctcatcggctttgtgggccttaatggactttttacctgaaagtgcggnctctaggggggagggtccaaatacacgaacctttttacgtatgtctacctccccgcccatgagggtcaaagggaaaggctaatggcaccgccattaatttcttccctaacaaaagagggtgtttaaaaacagggggtttttttttataatcaatcggggggtgctttggggcccctactgcgggggggtggagccccccctgtcgtcgtctcaagtaacaatctttcttttcaaaaactggggggggctctcttaactcttaacccctggggacgc

SEQ ID NO: 173255 - DNA, 541 bp, Arabidopsis thaliana columbia
atgaactgccggcactaatccgactcaattagggaaagcacgtacgcctgcaggtaccggtccggaattcccgggtcgacccacgcgtgcggttctctgcttttgtctcccccaaacaaaaggataaagaaagttgcagaaaacaatctctctgttctttgagctttccctttgagctctcacacgagcggcttcttttgtcatctcaccttttccttcattctttcttccttcatattctgggtgggtcacagatcgttttctcagattttgactctttttggtgttgttgttgttcttctccttcgcgaagtggaagaagaatataacaaaagctgggttttttatatcctggaattctgaagaaattcttcacggatttgatctgtttaaactataaaagtcttgatttttataaatcagctaaaaataagacccggtttagggtttatggtttgactaaaaacaacattactgaagtgggttgggagggttcaaaagtatgggcattttgttgtgtctctgaccctgaaggatctaa

SEQ ID NO: 173256 - DNA, 447 bp, Arabidopsis thaliana
  unsure (1)..(447): unsure at all n locations
ccggcactaatacgactcacttagggaaagccggtacgcctgcaggtaccggtccggaattcccgggtcgacccacgcgtgcgcccacgcgtncgcggacgcgtgggtcgaatcgagctacttcctccgccggctttgctgtgtgtgtgatcgttcgtttactaaatctgaaacaagtatctaacgccttgccggagatgtcgagctcaggccaaactcagttccgttatacacagaggccgncnaaggtggttcatctgcggaatcttccatgggaatgcgtcgaagaggagctcatccacctttgcaaacgattcggcaagatcgtcaataccaagagcaatgtgggcgccaatcgcaatcaagctttcgtcgaatttgctgactagaatcaagctatatcaatggtttcgtattatgccttatcttcagagcccgcacagattc

SEQ ID NO: 173257 - DNA, 558 bp, Arabidopsis thaliana
aaagacgtacgcctgcaggtaccggtccggaattcccgggtcgacccacgcgtccgcacacgcgtcccaaagatcctccagactacaatcttgcccgtgtcatcttcacattggcaacatctctcttgattggcacagacgcactggccaatccgcgcgctaccccttcgacccgctccccccccccccgacccccccccgccccttcttcttccgggggtggccaccccccccccccccccccacccacaaagaccgccgcgccccacacgccacccacccgccccccgccgacggagccacccccagcgcccagcccgcccccccacgcgccgccccgccacctacaccgcaccaggccccccaccctcccacccccacactcccccactacccccaacccacccccacccaccctctcaccccgcccgccacccaccccccgcccgaccacaccaactccccgcccccacctccccgccccccccccccgcaccccgccgcctcccccccattccaactacccccctccccctcccacccccccaccccccaccc

SEQ ID NO: 173258 - DNA, 448 bp, Arabidopsis thaliana
  unsure (1)..(448): unsure at all n locations
tacgactcactaaggggagcacgtacgcctgcaggtaccggtccggaattcccgggtcgacccacgcgtccgaccctctcttctcactctatatactcccaaaatggcttataanctaccgttttgccattcttcctcggctactctgccccaccataaggcttcatcccgcgcctcaattgccaccaccttcgccacacccctccaacacccccacggcaatttctcatttggggggggggcccccgcccacccaccaaccatacatcgataaaaaacaccaccacttacaaggtttgatatcagttatattttgttcctactcccttatgattttcccccttatcccacccatcacaatctcgacagtacatttgattacatcactcccccgactactcacatatttagtcgagccgatctcgatacgtgattatctgtccctcta

SEQ ID NO: 173259 - DNA, 525 bp, Arabidopsis thaliana
acgactcactttagggggagctcgtacgcctgcaggtaccggtccgggattcccgggtcgacccacgcgtccgcgactcgtttcatttggggacaagcttcttcgattttcctctcagaccaatcgggctttcgaatcccatcagtagaaatggctacatcaaggttccaagcattcttgaacagccccattggcccaaaaacaacccacttctggtttttttgggggggggggcccccacccgtcttccttttctttaaaactcctcctcccctttcatggcttctccatgcccccggtctcctcttgccacttacctccccagctcccctccctccgccaccgcgcccccggtgcgctctcctccgcctctcataatcctttccttccgtctccgctccggccgctgcccccctcctccaccgtcagtcctctccttcctccccgcctctctcaccctcttctgccccctctctctccccactttctgcattcatcgccccccccccattatctctcccctct

SEQ ID NO: 173260 - DNA, 517 bp, Arabidopsis thaliana
  unsure (1)..(517): unsure at all n locations
ggggggagcggtacgcctgcaggtacgggtccggaattcccggttcgacccacgggtcgcagcaaaccgaaaaaaacactaanttgtgctttccctttagattcatttgcatacggctcgcgcggcctgctcaccccggccagcggtcgctttcccggagtacgctttgaagctgtctcggtgctcccccgcgccggcccgaccgaccagctttttctttggtgtggtgggncgcgcacccccggctgctctacgtaaaaaacgcctccccatcgtgaggggcggcgcgcggtgagagcccgcacggcgcgccgcgctcgcacggcggtcgctccgccggtcttccgtgcgtgcgccccgtcacagaaagccctgctcccctaccacccgaccctacccngcacgcccccacagacctttaagttctcccgaatccgcccagcatccacccaagtggacggtgcctccgcagcggcgccacaactcgccgtcccccctggatcagcccgcacccacg

SEQ ID NO: 173261 - DNA, 531 bp, Arabidopsis thaliana
  unsure (1)..(531): unsure at all n locations
ggtacgcctgcaggtaccggtccgggattcccggttcgacccacgggtaaaccccntnaaaaaaaancataaatannaaannaataatttagataaaatgaatttttataacctccaagaaatttatattatttatttatacgctttatgtttgtacttaatttctctctttcacgaaacaacccgcaaaaactttcatanttggggggggggcncccaaccctctccctttccctataaaaaaaaaaaccccacatataattctatcctctataattatttccttagtagctatgactatatacctttatgactcagtcttaatgtttttaactgattatatatttttatatctcataacccgagcaatgtaaccttccagaacatctaagcaggtattaaacatccattccaaccaaaatctgaacagaatacttacatccccactcacatactcatcatctcataatgtagccgaaaaacgcataaatagatagaatatatatacaaaaccaactttaaaaccctagc

SEQ ID NO: 173262 - DNA, 534 bp, Arabidopsis thaliana
  unsure (1)..(534): unsure at all n locations
tcactttagggggagcacgtacgcctgcaggtaccggtccggaattcccgggtcgacccacgcgtccgttcttttattctcatcggcaaaatatatctccccaaaattttatcatatttctcgatagagaaaaatcattaactaaatatccattcccactcaaaaccctaaaaaagagagcctcaaaatctttgagtgcnnngcagcccctgcctccctgagggggggccccccccccccccgcgccccctcgggaaaaaaaccccccccaccgcggggggcccgggcccaccccccccatgttcctcccgactttacctatatgcctccgactgccatcgccttcctccggaccaccccacatcgacgcactgtccccccccccattcgcgtgtccccacaccgcccctcccgttctctccggcccctgccgcccccatgcgctccccaactcctaacgtatgtctccctaccgccctcctcctcccgcttcgccaggatgcctccccggctctcgtcgatcttcttagtctc

SEQ ID NO: 173263 - DNA, 524 bp, Arabidopsis thaliana
  unsure (1)..(524): unsure at all n locations
tacgactcactttaggggaagctcgtacgcctgcaggtaccggtccggaattcccgggtcgacccacgcgtccgccttcccgtcgtcggaattacttcgccggcgctcatcacccacaaaaatcacgccaatccaaagatacagagacataatcaatctacctccgagaccactgtttcatggacttctcgcatcaatctcctcacgcgcaatggtcgattagcggaggcgagcgaaggaattctccgatatgacactcgccggcgtagagcctaaccacatcactttcatagctctactctccgggtggtgggatttnccctcctggaagtgtacctctatcccccagcctgattgcacttccttccccccaggctccgcccctgccctccgcgcctcttaccttctccccgccccgctccctccccttgttcctttccctccactctcgccaagtcctgtccttctgctacccccccccccctctcttatcccttaccgctacccttcccttctttaagcgt

SEQ ID NO: 173264 - DNA, 501 bp, Arabidopsis thaliana
  unsure (1)..(501): unsure at all n locations
tacgcctgcaggtaccggtccgngattcccggttcgacccacggttccgcaaaaccgaaaaaacactaattgtgctttccctttagattcatttgtattttcttttggagcttttgaacaatggagtcatcacaagcaacgacgaagccaacgagaggagcaggaggaaggaaaggcgacgaccgcctttcctctttggggggggggacnccacccacacattactataaaaaaaaaaaccccccacatcgctgtaatttcaccccccccctctcgctcctcccctactccattcaccatcctctattactcttttatttttctctccctcacccccctacccaactccaccacccccccatcatttacctacacctaacacccacccatccccatccacacactactccaccccccctacaaatatacaactcacacacacacactcccacccctctatacaacccaccccccacatccccggcccaccgtctgctcaca

SEQ ID NO: 173265 - DNA, 332 bp, Arabidopsis thaliana
  unsure (1)..(332): unsure at all n locations
gtcgcatgcacgcgtacgtaagcttggatcctctagagcggccttgctttttgtgttttggtgtcatccaagagaataatatatgggaaaaatgtaacacttatacattatatatttctttccggccccagcgaggcacacagaaggagaccacacccgacaacattaccctcgcccgacgagcccgggccagcacgccccacccccgccccacgattttttcttaggggatgatgggaaatcttcaaggggggagtctaaaaaaaaaaaaangccccgcgccgctagaccccggccgaggcgacacgcatgcggacggagcgacaacggag

SEQ ID NO: 173266 - DNA, 548 bp, Arabidopsis thaliana
  unsure (1)..(548): unsure at all n locations
agactttgacgtcgcatgcaccgcgtacgtagcttggatcctctagagcggccgccctttttttgttttttgcataaaagagtactctattatacaaaaaaagaatcaaaaatctggaaaaaagtaaacataagtaacaaaacaatttctctaaataggatatattgtaataaaaatgataagtactatgctttaaggatgggaaaaatgtggaggtttttttaaagggaagtggggctttttcagggggggaaanaaaaaaaaaaaatccccccgcccatggtggcggcggcgggcgcgcggtcggccgcgcgccggcggatctgtgacgccacgcgtttaagggtggtctcccagtggcctgtcgccggttgtgcgccgggagcggtgctccccgcagccggcgggccggcgtcgggggggcgggggcgccgggtggggggcgtgccgtacgaggtcgggatgcgagggtcggctgtgagtagttgaccagcggtttgtaccgcgcgcgctccccgcttatgcccgcgcgtgagcgcgcggcaccg

SEQ ID NO: 173267 - DNA, 564 bp, Arabidopsis thaliana
  unsure (1)..(564): unsure at all n locations
gtcgcatacccgcgtacgtaagcttggatcctctagagcgggcttccttttttgggtagggcccacaaaaaaaaacncccaccaccccgtcgcaccatcttcattcgccacgtacgcgcactccccacttaaacgactataagtatttttttatagcatgtgcagcctagttccgaattagtattataggaggcaccgccagcaaccgattttttttcgcgggggggggtggttggagaaaaattagttatattaaaaaaaaaaattgggtcgaacacacaaacgaatatgtgtgataaccctgaatgcaaacaaatagataagaccacaagcccgcgaccaatagatatatactttatgtcatctgcagcgatatgaaataagatctgatattctccacaatccaatactacaactttgcttacataaattcacagtagatctcccgtacgttacaactcgactcaacgataatatacgctactcagaatagctgaaagacgaaaatgcattaacagtcacaaacacaccgatacgcaggtacgggacgaacggtgctctcga

SEQ ID NO: 173268 - DNA, 544 bp, Arabidopsis thaliana
  unsure (1)..(544): unsure at all n locations
cgactcactttaggggaagcacgtacgcctgcaggtaccggtccggaattcccgggtcgacccacgcgtccggacgaactgaagaaaacctctcggaagaagatgagcaattggaaaactcttctccttcgcatcggcgaaaagggacctgagtacggcacttcctccgactacaaagaccacatcgagacttgtctcggngncacccncacttcctccttggggtggggacaccaccccccccccctctaccaaaaaactccccccatatcacccttcccgacccccccctcctctcccccttcttgctattctcaccaatatacctctcaccactctcccccccttcccatcccttctcccctcccgtcctcctcccccccccctcccctcgcctttttgccaccttcctcccccccgtccccccgtcctctccatcttcccgactcccttgcaccgctcccttccttcgtacgctcctcctcctctgcccccttcccccgatcacagtcccctcacgctctaaatacgcatacgcctcctt

SEQ ID NO: 173269 - DNA, 477 bp, Arabidopsis thaliana
  unsure (1)..(477): unsure at all n locations
acgactcatttaggggagcacgtacgcctgcaggtaccggtccgngattcccgggtcgacccacgcgtccgaggacgcgtaaacaagaagatagagataaagacttgacctttataaagtataatctcgagaaccacactaagtaaaatgaagtaaaattataaaataaaacaaatagaatacaaaaaaaactaacaaccaaacacagaccacaccagatttttttctttgggggggggggcaaaacacagaaagaggatacactactaaataaaatatatcaaaaatactaattagaaaagagaagaaaaagatatacaaaacagaagagaagaaaaaaaccacaaaatcgaccagaccataaccataaacacaacaattaaaaattgttatgtaacgatcagaatcgaataccatatataatcaaaacgataaaggtaaaataccgacctctccaatcaaaacttataacatcct

SEQ ID NO: 173270 - DNA, 523 bp, Arabidopsis thaliana
tacgactcacttttaggggagctcgtacgcctgcaggtaccggtccgcgattcccgggtcgacccacgcgtccgcgaatttttgctatttttattattttccgtgtttaatttctgattcagacaggaagattaatattaagcactagttgtgcaaattcacaatttctctttggggctcggcaacacattcgccgcgcccaccccgcacgcgcccatctttttttgggggggggcccccccccaccctccctcccccccaaaaaaatccccctccccctctcttcgcacccgtataccttttttccctcgtctcctcgtgccgcccgccccccctcccgtacccctcgttccccctccctctgttcacccctcctcccccctcgttcccctctctccttccccacgcctcctctccctcgtcccccctcatcccccccccccggttttttctcccctgtacctccctgcttccctacctgcttctcttccccctcctctacccttttccctcatctctccct

SEQ ID NO: 173271 - DNA, 460 bp, Arabidopsis thaliana
  unsure (1)..(460): unsure at all n locations
cgcctgcagntacccgntcccgaaattcccnggtttcgacccacgcgtccgatcactcccaagattcgcattacctttcttataatcgccgagattgttcgagcctgaataatcaaaatggttgtgcttgctgctgccattgaggttttaccttttaatttattaacctatctttttcctcacccacaccccaattttttttttggggggggtgacacccacacaccttctctccatatataaatctccctccccatcacctctctctcttttgcgcccctctactatcaatctccctcctctggttttccacgcatccttccttccctttccacttctctactctactcctcacttttcactccctctacatctgttcccccctctcctacacctcatatttatactgttcaaaactaatccagtaaccttcttactactttctcccttcccttttacc

SEQ ID NO: 173272 - DNA, 521 bp, Arabidopsis thaliana
aatacgactcactttagggaaagctcgtacgcctgcaggtaccggtccggaattcccgggtcgacccacgcgtccgcccacgcgtccgctttttgaagagggatctgcttaggggaatatatgagaagggttttgaaaaaccatctcctattcaggaagaaagcattcccattgctttgactggtagtgatattcttgctagagccaaaaatggtactgggtagactggtgccttctgcattcctacccttgagaaaatcgatccagagaacaatgtcattcaagccgtaattctagttccaacccgagagctcgcccttcagacatcccaggtttgcaaggagctttccaaatatttgaaaattgaggttatggtcaccactggcggtaccagtctgagggatgatatcatgcgattgtatcaacctgtccatttactggttggaactcctggaagaatattagatcttgccaaagagggtgtgtgtgttttgaaagattgtgccatgcttgtaatggat

SEQ ID NO: 173273 - DNA, 559 bp, Arabidopsis thaliana
cgtcgcatgcacgcgtacgtaagcttggatcctctagagcggcctcgctttttttgtttaggccccaaaaacaaaacaccaaacccgtgcgggttaactaattagctgagatgacacaccgcggaacgcatggaaagtgattttaaagtctcaacgtactagctatttaagtaatagattgctagaacgctcgcggcgaagccagacagggtttttttataagggggggtggtaaattatctgaagaaagataagagcaaaaaaaggccccctccaatactagactaatagacaatatatcacaagacctgaaacgagaagtgacctccccctattattgtcgatcgcaaccagcatctcaaggtaatgttctaacaaattaaacctaaccatgttggataacagcgaaataaagaatcgcaaatggtcggtgacagcctatatggaacaaccgtctccaactgtaatagactctctgcgtacacattatgtggcgagtgaccgcatcttagtcccttatgtatcacgctagttctctataatttatacgagcgtgtca

SEQ ID NO: 173274 - DNA, 512 bp, Arabidopsis thaliana
  unsure (1)..(512): unsure at all n locations
ggggagcacgtacgcctgcaggtaccggtccggaattcccgggtcgacccacgcgtccggcctcatcatgcatctacctctagtgcagtatctagttgagaaagagagagatgagatggagctcaccatgggtaaagagaagntnnacttttacattgtgatctcgngaacaaggagatacctcgacggcgcgaacacacaacatccctcccttgggggggggccncaccccccccccccaccaaaaaaaaaaacccccccaccccccgggaagctggggccccccctccttccgcctctctttctcgatttcctgggctcttgctccgcttcctaacgctccccgggcccttcagctcctcgcccaccgcattcatctactccctctactatttttgccagctctcccctacccactctccctcttgtttttgttttctctcttcccttaactaccgaatcctgatagccctcaccgctctattgctggtccgcactcgcgctccaccccc

SEQ ID NO: 173275 - DNA, 538 bp, Arabidopsis thaliana
  unsure (1)..(538): unsure at all n locations
gtcgcatcacgcgtacgtaagcttggatcctctagagcggtctcccttttttgttttaggccttaaacacaaaaacanatttggatgaatgaaatgaagttttcacagacgaagatcgggcgacagcgcgaggggacacggtagtagtgttttatgtatcatggtcgagacgaacgaggcggaactcatgcaatagacgatgacccggcaagaagatttttttttaaagggggggggtaggaaagtaaatgtgtgatatggtggaaaaaaaagggtgcgcgggccacaacgtacagatggaatgtgagaggtgaatatgtaggacaaaatgcatcaatgtgctagaaggtacttgatgaccctatccagacggaccgcgagatcacaacgaacaatgagattagaatgacgggacgcagcccaattaacagcactcacgcataagcaccatggcgcaaaataaacagttgctcaacgataaataaacgtcgcaccgccacagtcacccgccgaggcataggagcgaacacataaatga

SEQ ID NO: 173276 - DNA, 527 bp, Arabidopsis thaliana
  unsure (1)..(527): unsure at all n locations
cgactcactanagggaaagacggtacgcctgcaggtaccggtccggaattcccgggtcgacccacgcgtccgatttggaaagtagagaaatgagcaaaagcaagaagaagaagattctctctttgatccactttcctccattggtcgcgcagagagagtggagatattcggattcagtttatgaacgccaacctggagctacaggacgngacgtttttttcttggggggggggcccacccccgcgaaccactccccgagaaacatcccctcctcgccccgccgccgccgcgccaccctcctcacagccgccgacaatcgtccgccccgccccgcccccgttcccgcgaggccccactcgacccccgccaccccgcctgcgactgtaacccggcctccccgccagagtggccggaactgcagtgcctccagccggcagtccacccgcccccccccatccccgccccgaggccgcggcgccaggccggcccccccgcccanctagctggngtccgccccacgccccccc

SEQ ID NO: 173277 - DNA, 378 bp, Arabidopsis thaliana
  unsure (1)..(378): unsure at all n locations
gtcgctagccgcgtacgtaagcttggatcctctagagcggcctcccttttttgggtggggcccnaaaaaaaaacacaccaaaacgaagctcaagatctcctgcagaaatagtacatcgcaccatacccggctctgcgcaagagtgatgtagaattccaccaatggcggaaaaccgaatacgagggactacaaccggacccgaacaaaaaaaaatttttttttaagaggagtggtggtagaacaaaataaagaaattaacaaaaaaaaagacgcgccccgcccagacacaagtcgagatcaaaaggagacaccaacacccaccccaacatatgcctaaaactgactcaaaacacaaaatgtgccatatgcgcctatgag

SEQ ID NO: 173278 - DNA, 532 bp, Arabidopsis thaliana
  unsure (1)..(532): unsure at all n locations
atacgactcactttaggggaagctcgtacgcctgcaggtaccggtccgagattcccgggtcgacccacgcgtccggacatgttctactcatcccacctcatcctagacaatgctggcctgtctgaaccagttttcgccacgccttttagcccgtcctcgtcgcatgaagagattacaagccagttttgcactgcagagaacagtcctcagttatactcattttcttntagaagcaaacgcagcgcttncacccgttgttctatagctcccagcgattgaacaaaaagctgctttctcgttcactgaaacccacttttgttcttccaccactctcacaatcatcgaccaacatcaacttgctctcgcctcttccctcgcttttacttcttctctcctcttcttatttctatttctcctttccacactctctcaccttcttcgcttctcccctctgttccgtcccccgcccctgtctccccccgtccctgccgtgctgagtcatcagcttgtcgcgttgctgatccgctactca

SEQ ID NO: 173279 - DNA, 463 bp, Arabidopsis thaliana
  unsure (1)..(463): unsure at all n locations
agactttgacgtcgcatgcacgcgtacgtaagcttggatcctctagagcggcctgcctttttttgttttttttttttttataaaagacacttcctaagcaaggaaatgacacatcaatatataagaagcttacacaaacagatagttatccgatcaccagagtcaacatctctaaagacaacaaataagtaatcaaacaaatacaaatatatctctttcataactggaggcgggttaatgaacaaaggggganataataaaaaaaaacccggacggttgggatgggtttttaattcctcgctgatgtgatgagagcatagcctggggaacagagggagcggggacccctggagggctggtgggggagtggggtggtgggtgggcgggtgggtcggcggtgggcggggcgcggtgcgggcgcggaagtacgtcgaagtggcacgagagcggtacggggcacccc

SEQ ID NO: 173280 - DNA, 410 bp, Arabidopsis thaliana
  unsure (1)..(410): unsure at all n locations
gggggagcacgtacgcctgcaggtaccggtccgnattcccggtcgaccccgcgtccgtctgtcgaccctggtgatatggtccactgttgatatgcggtagcacaagcaatctggcattttgaggcatggatatttagccgctcccctttttaaagaccactgcgcccatcccccccccccccccaccaccccggcctttttttttttggggggtggcccccccccccccacctcccacaaacaaaaccccccccccctcttctcgccctcctttttctccctccctctcccccgtcatctccgccctctctccacttccaaaccctcatcccccttacccttctcctcctcctccctcctctcttcttcctcccatcatcttcccctctctctctttctccccctccctc

SEQ ID NO: 173281 - DNA, 515 bp, Arabidopsis thaliana
  unsure (1)..(515): unsure at all n locations
tacgcctgcaggtaccggtccggaattcccggtgcgacccacgcgtccgataatcgggttttatgnncagcatctccgacttncggagttaagtaattaagatctgtgaagacagaaaaatctaatttaagaaaatatatacaggaaataatacgatatgtgataggagccaggaaaaagggaaaaaaaaacattttctcattttgggggggggacacacaaattgtgtgatttgataaaaataaacacttaaataatttggatcgcttagaaaaaaaaggaaaaaggctagatatacgtaagtttatcagataatttagagaaaagaagttagaattgaataacaaaaataatagataagacttgttattctttattatgtataatcctcgtcacaaaggcaactagaaaaatcgaatatgaaataaaagataagacgtattaaactaataaaaggaagtaatatatgatttataagtattgcgtatacaattttatttatatactatgcattg

SEQ ID NO: 173282 - DNA, 537 bp, Arabidopsis thaliana
  unsure (1)..(537): unsure at all n locations
atagaagagctttgacgtcgcatgcacgcgtacgtaagcttggatcctctagagcggccttcctttttttgtttttttcaaagataaactataagtttataactttagttggcattaaaagtctgaagttacttatccttctacagagtgttattttcaagtgtttgcttttttttttttaaacagtaaactactacacagtctctgcagaaagagatgaagcatataaaatgtgggggaacatttggaatctaccttaaaaacaccaatgcacccatgttcgatgatcggttttcgaagagaacccacttcttggttgcttcttacactgcatcaaggttgaaactttactttgcggtgatgactagctcggagaaaagatcttacatgatcaaaattgtttctgaatgctgcaccttgtgattgttgttgggcttgaacttgnggttgatgtgttgaaatcaaactgttttttaggaaaagacctgggttaaagtataagccagctcccccacagggggatcaacaaactgaggg

SEQ ID NO: 173283 - DNA, 460 bp, Arabidopsis thaliana
  unsure (1)..(460): unsure at all n locations
gggaaagacggtacgcctgcaggtaccggtccggaattcccgggtcgacccacgcgtccgcttcaccttgtctcgatccaaaatttcatcttttaccaaaactattacaatatccctcactctacttgtaaagcttcaatcttcttcacttctcaacaaacagataaacaaaaagcttcaatctttgatactttctcgatggatcntatccggagtcttcccgacgacgnngntcgcgagagaaaactccctcctcctggggaagggggctgccccatttttggtggcagagcctgaccctnaaagagattatttttcaaagtggctgtagggtggggcggcctccgtccgttcccgacaggtgcgggacggcgcgacccttatcccgtgcgtaatccggggtcgatcggtatgccttggattatggcttctcgggccgcggggcggcgggtggtcgccg

SEQ ID NO: 173284 - DNA, 568 bp, Arabidopsis thaliana
  unsure (1)..(568): unsure at all n locations
agggggaactcgtacgcctgcaggtaccggtccggaattcccgggtcgacccacgcgtccgaccacgcgtncggnactgnaatttccggcatgggaagcttgtttngagggaactaaggagaaccctagagagggacgagggaagggatttttgaggggcgaaagcgacaaaaaaggaggcaaaacgcgaggagaacagcacgggaaataccttgcgggggggggtgggccccacccaccacccccaacacaaaccaaaaaacacccccccacccanagggggggagagggggccccacactttgtaaacccggcaggacagggaaggaaagagcccaccaggcacaccgcaccggacagcgcatcaaagagggtagacaacaaactccacgccctcacggacccgcccatccgaccaggccctcaaaacgaaggcgaatcgagcaacgtgggaaagacacgcaccaacaagacacaacccgcacaccgacagcacggagagccccccaccatagaaagagaagccacataaaccggccaacgccaaaaagtaagagcatagaggaga

SEQ ID NO: 173285 - DNA, 548 bp, Arabidopsis thaliana
  unsure (1)..(548): unsure at all n locations
agggggngatcgtacgcctgcaggtaccggtccggaattcccgggtcgacccacagggaaggccgaattagnnanaagnannnnnaaaaaagggcacagcactaaaagagacgagcaaagcgacgcccaaaccaaagacccaacagaaaattttcgaacacccgcagagcgcaaacgtccgacaggcacggacccagagacaacgacaggaacaaaattaacctccngggggagttggggccacacgccacacgcacaggacgcggaacggaaaacaaacacacccaccacacccgggggcgggggccgggccgcccacacaaaagggaagaccacgacgacacaagaaagcgacagccgaagggccacagcgcgcnccccgcggcgccagccgacacaccagagacaggagcccacgcagcagcaagacaagagacggcaacggggcaacgcgacgcaggaagcaccacaagaccaagcagccaccaggacggcaccgatgaaaagcgacataccacaacaacaccacacacagaacagagaccgac

SEQ ID NO: 173286 - DNA, 528 bp, Arabidopsis thaliana
  unsure (1)..(528): unsure at all n locations
gtcgcatcacgcgtacgtaagcttggatcctctagagcggactcccctttttgttttttgcaatntatatcacctttaagttttacgagcggggcgcccttatgatatgaaagcgcagggcggccccaggccccggccaggatgggcgaacaagaagcggaactcaccggggagcatatgttacggtgccggcccggacgaggcagcacgacattttttaaaaagtggggggtgtgatactaatttgttagaggggtgtggaaagaagcgagccgcgcggtacaggatgaaacgcaacagccaactgcgacctcagcccaaggagccggcacagatttcagacttgctgcgtcgcggtgagccgtgcggtacgtgctgttcaactaccgatgcgggtgtaggttctaccctcgcacggtcactcggcgccgagcggtaggcgcgtgtgtacggtcggttctcgagcgcgtgcgccgcaggggcaggttagttgtggacgagtgtaggtgcggaggcggcaccggggcg

SEQ ID NO: 173287 - DNA, 528 bp, Arabidopsis thaliana
  unsure (1)..(528): unsure at all n locations
tacgactcacttttaggggagctcgtacgcctgcaggtaccggtcccggattccncggtcgacccacgcgtccgttcatctcctttcgcgagcgtcagttctgggagtcgcagtcctccacgtcgtggaaaaagtcctcgctggacctgctaggcgaggtcgctctcctcctcctccaccatctaaaggagcattttcaccctccaagacagcccgccatttttttggggggggggcccccccccctcctaccaaccaagaaaattccccccccccttcttctttctttcgcccccctatttttcccccctctctgtattcaccttctccccccccctcccttctctcccccctattttccctgtccccgacctctactttaccccttctccccccccccctctcgccccgcccgccccccctcttccctcctacttctcgccccccccctccccgccccccatgtcgccccttcccccctccccgcaccactcctctcccttccgcttctcctcctctttctcttct

SEQ ID NO: 173288 - DNA, 510 bp, Arabidopsis thaliana
  unsure (1)..(510): unsure at all n locations
ggggagcacgtacgcctgcaggtaccggtccgcgattcccgggtctgacccacgcgtccgacttcccctaatttcgcttcgaattcaaaagccctaattcgaaaattcccatttctcaaggtttttaaaagagtattgcaaagatgtcttctgattcgtcccgggaagagaatgtgtacttggccaagttagcccagcaagcttttttttaggggggggggcnccccccccccggcaaaccacaaaaaacccccccccccnccggcccctccgggcccccctctcctccttctcccttctctcccccccccccggccctccgcccccctctccctttctccccgctccctctctccgtctcccctcccccccccccgccttgcccctccctgcgccgccctccccgccctgtcctcgctgcatcgcccactgccttcgctcttcgccgccccctcccctccccccctcgcccactccgcgctctacctgcctattcccgcccccccggcg

SEQ ID NO: 173289 - DNA, 524 bp, Arabidopsis thaliana
cgtcgcatgcacgcgtacgtaagcttggatcctctagagcggccttcctttttttgtgttgggcaaagagacataatagttcttctctcttaattgaatctttctttacaaaattatcaacaaagttataaaagaaagtcccaataaccgaagaaatcgagacttacaaggcaaagtaccaaacacaaactctggtggaatcgacggtcatttttttggggtgtgggggggaaaattatggggtgaaaagaaaaaaaaaagccccctggcgatcgggctagagaaaggtgtcgcgagcggtgtcacggctggtcgcgcgtcggcggcagtcggcggcgcgtgggacagggcgacgcgtctgatatagtgtgtttatggagtgtacccctgttgtgtgcacgctccgacggtcgtctggagagcctggtgctatagtgtaactgtcaaacggatagaggagactggcatgcgacgcggaggtaggcgcgcgcctcggcggcagggggcccgccgtgctggggggg

SEQ ID NO: 173290 - DNA, 484 bp, Arabidopsis thaliana
  unsure (1)..(484): unsure at all n locations
tatacgactcattanaggggaagctcgtacgcctgcaggtaccggtccgngattcccgggtcgacccacgcgtccggagaaatcttttgaactcgaggttaaagctgcagataatcgcatcattcagcaaacactcaatgaaaagacatgtgaatgtgaagtgttgcaagaagaagntgnaaatntaaagcagnanntntntgaggacctggaantattttttttggggggggggananaactcaaacaagagaagtaaaaactgtcctcccctacttttcggggctgataactagctctacccgatttctggccgctccgaacggactccatcagtcgggatcttcggcacttgcttgttttccgcggccgagactgctcgaccttctattccccggtagcgcccccctatgccgtcgcgtcaggcgtcgtaagtacttcagctgcgtgagcgggggttgtcccacccgagcgatcacccctt

SEQ ID NO: 173291 - DNA, 455 bp, Arabidopsis thaliana
  unsure (1)..(455): unsure at all n locations
tacgactcacttttagggaagctcgtacgcctgcaggtaccggtcccggattcccgggtcgacccacgcgtccgctttactcagagaaccaaaagaaaaataaagagaaaagaacccaaaaaaaaaaagccattgtaaattcagaataaatggaagaacatctaaatccattagcagtgactcatcttcttcaacaacactaagaagcttatgcatttatggaggggggaacgcccccacccccgcccccaaaaaaaaaacccccccacnccaccgagcgcgcacctcccccgcccccccgccgcacggagcccgcggccccccccccggccccggcccccgccgcgccaaccgccccgccgccaagccaccttcgctgctccctccctccccctctcgtcgtcgcccctcgccccgccctacagggactccccccctggccccccctgccccgc

SEQ ID NO: 173292 - DNA, 404 bp, Arabidopsis thaliana
cagactttgacgtcgcatgcacgcgtacgtaagcttggatcctctagagcgggctcccttttttgggtttttctttctattgaataatgaatactattaattataaaaatttacaagtacaacaatttttgtataactggccgaacttaacttttagcaatcggagtctaatgatatgaaggaaattaaaaacaatagaaatggggaatcgagggttttttttttttgggggggggtggtgtaaaagtgggggggggtgtgggaaaaaaggggccccgagaggttagtgatgagtgcacggacgggtgagtggttatgcagcgcgctccttagcacgcgtgggattggtggtgagcgctacgctgcagtgtagccctgagttggtggccgtgggcgggactctg

SEQ ID NO: 173293 - DNA, 463 bp, Arabidopsis thaliana
  unsure (1)..(463): unsure at all n locations
ttgacgtcgcatgcacgcgtacgtaagcttggatcctctagagcggcctcccttttttgtttttggtttttttttttgtgattaacacaaacnaacgacttacatttacagagtatacaaacaaacgccgggtaatggcagagtactcattacactgactgaacaccaaaagaatcgagaataaacatccaggaaatgggatctccttggtattcgaaattgggggggggtcatctttccagggtttggataaaaaaaaatagcggatacaccccaactgggagagggtttttaaccaaaaaatttctgaaagagtaatttcagggtttgccaaacttaaacttttgatgacctttgaatttttcagccttccctttttaatgaagaatcgcttcaccaaccacgtggttgtagccatcctttcaacatcacttttatctgggaacctcaccggtttggaaaa

SEQ ID NO: 173294 - DNA, 412 bp, Arabidopsis thaliana
acgactcactttaggggaagcacgtacgcctgcaggtaccggtccggaattcccgggttgacccacgcgtccgctcaaccgtaagataccatggcctcatgttccagaagaaatgagtgctgaagcccatgatataatagaccgatttttaacagaagatccacatcagagacttggagctagaggggcagctcaggccaagcagcacatccacttttatgatttggggggtggcacaccacgaagggacaagtgccaaaaaatccccccccacagaggggctggcggagcaccccatcttctcgcgacgacgagaggatgccgaaacctctgagataatcactgtgttctcatctcgtgttcgcccgcggcgtcgcccgtccactcttctgtcttctaggtcggtatcgcc

SEQ ID NO: 173295 - DNA, 580 bp, Arabidopsis thaliana
  unsure (1)..(580): unsure at all n locations
gggggaggcacgtacgcctgcaggtaccggtccggaattcccagggtcgacccacgcgggcgagcncctgaacaagactcaaagcacaaggancgcgaagcgagcagaggaccagcaccccgcgcaccccgcgcgccgccgaggaccaccaggaccagcgggaagaggccgcccacgcagcggtcacggagacccgagaggcggcgcgcgcgccccgattcctccttcgagggggggcagccgccngcacgcgcacggggagcgaggcacgcgaacgaaacgcaaccgccggaggggggggaacagcgcaggcaggacggagacgaggggagggacgaggggccgcgagccgcggacgcgcccgcggcgaaaggacaacccgcggagcaacccgccccccccggccgccccgccgcccgacgcccgcgaagcgccccgccacgccgcccctgcgcggcgcgccgcgacggcccgcgcccccgcgccgcaagaacgggcgccgcgggcgccgcggcccagcacgcgggagaggagggagaggggaggggaggggcgcgcggccgcaacgcgcaggcgggcg

SEQ ID NO: 173296 - DNA, 539 bp, Arabidopsis thaliana
  unsure (1)..(539): unsure at all n locations
tacgactcactanagggaaagatcgtacgcctgcaggtaccggtccgggattcccgggtcgacccacgcgtccgctccatcctatttttcttcttcgccaaagtgttattcctcaactttatatattacacaaatgtctttagccgtggataatgtgttgttggtgcgcctcagcgcgtcactttcttcgtgtggagcctcgggggtcgtaggggcttttctcttcggggggggggcgacccacccctcccttcctatttaaaaatctcccccttggttgctgaccccgcttccgcttttttcactcttgttattttattccccgtctcctcctctctcttcctcacttctctgctttagtactcggcatccgctccatgggcccgggtcgcacccggggtatccgtttcgcgcacgccggtgcgcacggtctgccctggaccgtcccccctgcctcactgcgatgtgtcttagtcctcccgccgtgatccctagtcctctctcggacgtagcgctcgtacacatgatatgcctgtttg

SEQ ID NO: 173297 - DNA, 526 bp, Arabidopsis thaliana
  unsure (1)..(526): unsure at all n locations
tttaggtgagcttatcccaagactttgacgtcgcatgcacgcgtacgtaagcttggatcctctagagcggcctccctttttgggtttgggcgggntaaataaatttttttttttttttttttttttntttttgggggtattactgggagttataataagaaaaataaaagcttacagtaacccttttttcatcattggaagattcataacaatgctcttaatatgaatatacaaattttattttgagaggtatatcgnaaagcgaaaacatattgtttaaagaactacacttcaactgggaacaatgggggaacatctactaccctttcaatttcttccaaccgggcatatggagcaatttgggtaaacccggggggccggtttttgagacaagggattttccattgggccgatggccttagggttcatattttcccttacattcccatattaaactttttggttttccagcccatttattccaacttgtgggcaaattattatttttttttgccgggggaggggg

SEQ ID NO: 173298 - DNA, 590 bp, Arabidopsis thaliana
  unsure (1)..(590): unsure at all n locations
tacgactcacttttagggaagcacgtacgcctgcaggtaccggtccgggattcccgggtcgacccacgcgtccgcggacgcgtnnnnanangcgtncgatatagatttttattgtagaaaatgccagtttcttcataccacagtcagcatgccggcataaatttttttcttgattcagcacccaatgcattatgctatttcccatcacgcaaccctagccaaccagacaatttctcctttgggggggggtgggcgcgccacacccaccccctccatggaggttacaaaatatcacctccccacccttggttttatcttagtaggccgttgtttttgtcaaaaggctcccctcaccagatcgatccgccactctcttatttctaaattttgtgagacacaaccatcattatagtctactgcgcgcttaatccttacatcacatcctctccgccgatccaccgtattcctacatctccaactcatcctctttttacccttctccctcaactacccgccccccgcccccctactcattcttactacccatcccttttgcttaccttgtccgcgcacgacttatcctgtcgcgc

SEQ ID NO: 173299 - DNA, 499 bp, Arabidopsis thaliana
atctacgactcacttagggaaagacgtacgcctgcaggtaccggtccggaattcccggttcgacccacgcgtgcgagggttcagtacaaaattcggaatcgcaggtttaagacttttacagagtagagcgaacatgcccttaaaacccgtcattcatcctactttaccgccacaccgcacatcctttaaacactacaaaacccagaagcacacacaacttttctcttagggggggggacccacaccaccccaataccgtgatatatataacccccctccactaaatactatccgtaagaccaccatacatttctcgtcataactccacaattcaactactcctaactattcccacgtatccccacaacattaacgtccccccctcaccgtgcgccatctacccccgataatcggttatgctcctcattctccacgcaaacccatataacagtcttctctcatcctacatacactacctcactcccgcttcacgcccccc

SEQ ID NO: 173300 - DNA, 324 bp, Arabidopsis thaliana
  unsure (1)..(324): unsure at all n locations
gactcacttttaggggagcacgtacgcctgcaggtaccggtccggaattcccggggtcgacccacgcgtnnaaatccctnnnaaaaatatattttttaaataatcactatcttccttttgctatacgtcatttcaacgacccctccccatgtatcttctatttccatgaggatttcggtcacccggcgtgagagagctgtgtatggtggtcgtgtgctgacgctcgcacgcacggcgcgtttccctcctttgggggggggtggacaccaaccacccgagcttatgcagattttcttaaaaaatccctctctgcacctgtttgtt

SEQ ID NO: 173301 - DNA, 544 bp, Arabidopsis thaliana
ccccagagctttgacgtcgcatgcacgcgtacgtaagcttggatcctctagagcgggcttccttttttggggtggggttgacaaactttatgataaattacttagaatactataatgacatgactctaaaacaaatccaaaatttttgacacaagcatacatgcatgcagcaatttattacaaaagaataaacacaggttggtgcaaaagcccccaaacatccattttgggggggggggttttggctccatggggaagtacttaaagagggggcccaatcattttctcgggaacaacaagagtatcaaacttgttcggaaggaagaacacctaactttataggtggggggcttaaggggccatccttttttggggagctttttgggctacggctgggagaatggccatacccatttttagggtcacatgggggcccaggcataagaggctgggccaatagtttgagatcccttttttggggggcctcatggccttaacaacagtttttttaaagggaggtggggcgtttggtttttagctaggg

SEQ ID NO: 173302 - DNA, 529 bp, Arabidopsis thaliana
atgatactccggcactaatccgactcacttagggaaagacggtacgcctgcaggtaccggtccggaattcccggttcgacccacgcgtccgaccggattaaacactaagaaagggtttgatgtaaagatcgctgctgcagtagctgaagaaacaaacttgccattcgtcaccgcagaaaacaagtttgaagctctggctgcacacgatgcttgtgttgaaacaagtggatctcttatcacaatgggcgcatcattgatgaagattgccaatgatatacgttttcttggaagtggtccaagatgtggtcttggtgaactttctctgcctgagaatgaaccaggaagcagtattatgcctggaaaggtaaatcctacacagtgtgaggccttgactatggtttgtgctcaagttatgggaaaccatgtagccgtgacaattggtgggtcgaatggccattttgaattgaatgtattcaagcccggttatcgcaagcgctctcttacattccattagactaatagcagatgc

SEQ ID NO: 173303 - DNA, 508 bp, Arabidopsis thaliana
  unsure (1)..(508): unsure at all n locations
atgcacgcgtacgtaagcttggatcctctagagcggcctccctttttggggtttgttgaaataaactgtgtaaatggtacataaattttgcagaaattttttaagaatcaaatctaaaaacagagaggttaatcgcaatggaacattcagaaatcgaaccaacagttaaacccaaaccgaaccgggttatcccaagcgtgactttgtcatggggggggccaanaaccaagcagggttaccaagaacaatcttagcccttagtggaccaaatcttttatacaaaccctttaactcctttagatttcagaattttcccgaaaaggctccatcgaccccgggtttctcgggtttttggatccgcgacttgaaaaacactttcaaaacgtgtggggggattacctttccccaaagggaagcgccggggctcgcccgcgctggatgaatgaccttgtggctagggtgggaggtgggggggccggggggggaaggcgcgtggaggggtgggggg

SEQ ID NO: 173304 - DNA, 552 bp, Arabidopsis thaliana
ttgacgtcgcatgcacgcgtacgtaagcttggatcctctagagcggcctccctttttgtggttgggttttcggactctataataaaggcatactatgaatattacaggaacttggtatttttggaaaatagagagctttgggtccatactcaatttcccagaatttgacacaaaatttcaaaatttaaataaaagtgcggggggggggggtcaaaacttcgggggtgggttaaggggggtggggggggtttaaaagaaaatatttctctcgcttcttggacaggagggggggggccttccggcttcctaaaactctggggtcttcctttttaacttgtcttgtgggggctctttccttggagctttctttgggttcatggaccccaattcttttttaactttttttgtttcttgaattgcctttttaaattttgtgggggggtcttgctgcctcgccttgcggtttgtttcggtagaaaaataaacctgtattttgcgggtcttttatgtgtggggaagggcattcctaaagcccccgtttttgggtggggg

SEQ ID NO: 173305 - DNA, 545 bp, Arabidopsis thaliana
  unsure (1)..(545): unsure at all n locations
acccacgactcacttagggaaagcacgtacgcctgcaggtaccggtccgcgattcccgggttgacccacgggtacgagccaataataaaataacatcccacaaacatgcaggtccgttagacaggcagccccagagaaccccaaaggctcccgacctcccctgatcatacagaaagccacaactacgcgatgcaacagccgcggcgagagaacctagcacgcagacgtttcctctttcggggggggcacacncaaccctgggccgaacaaaatagaaaaaaacggccccgcagaacgggatgatcagaagccctccacggagcgtgtcaccacaaggctaagaggctaccaacacccgaccccccgcacagcacgttgggcactagcgatgatctcgactgcttccgcacatgaaagacagatacagcccgactagacaaaacaaaccacacggcacccctcgacgccctcctacgcaagcacttatccccacggataccgctccctagcagactacgtgcctaatgccagcccgctcacggtcc

SEQ ID NO: 173306 - DNA, 470 bp, Arabidopsis thaliana
  unsure (1)..(470): unsure at all n locations
tacgcctgcaggtaccggtccggaattcccggttcgacccacgcgtccgctctcagcgtgatgtgcgctctcgtcctcgtgatactctctctgacgaaccgggtgtntttgtcaacgatcccgcacccacgcagcctacccaagcaccacctncgatgggtcataaactccttcttgaagacattaatgatcttttttgtggagtgggggcacacacccacccccctctccaaaaaaaaaaacccccccctcccttccaccccccccttccccaacaccctcccacccacctaaccccctaaccatccaccaaccctcacacacccccccactctctttactcccccacttacccttcacccccctcacctcccatcactccccccccaccccaccccccaacaccccctctttcccccaccctcctcaaccaccccatatcccccccccttccacatccctcccccccc

SEQ ID NO: 173307 - DNA, 545 bp, Arabidopsis thaliana
  unsure (1)..(545): unsure at all n locations
agggggaactcgtacgcctgcagggaccggtccggaattcccgggtcgacccacgcgtccgagcacgcgttacggaggtccagnnnattatgatccctatgagtgttnncccaaaccaaacacccctcaaaaaaaaagcttccgttaggcgtaagaggaggcgaacggattatatgagagcttgggaggaagcacgggagcggagctgcctccttgggggggtggggacccaaacccctacaccctttgaaaaaaaaagctccccctatacacgtgcgttctgacgacccacccggatgacgccaaggagaagggaaagtcaaagagaccatcttggttgtgagacgggggatctccggtctagataaccgcgccgcaagggcagaggcacaggaagccgcggggagcgcccgagaaagcaggcagaaggaggccagcgaaggaagtggaagagcagggccccgtcctaggcgaggatcggggagcgcccccccactccgacggaagattgatatagacttgccagggcggttgtgtctgcagcg

SEQ ID NO: 173308 - DNA, 535 bp, Arabidopsis thaliana
  unsure (1)..(535): unsure at all n locations
ctcatttagggaaagacggtacgcctgcaggtaccggtccggaattcccgggtcgacccacgcgtccgtgcaaactcttctgtttattattattattataggtagctttttaatataaaacggatattagaattttgtaacaaagaaatcggcgggagtcgtgtgctttagcccaaaaacattggcctcgttgtccaacgngtgtatttggtgtgttacaggggtgggagggccacatatacatctttctaattacactttaccaatattaaacacatttaaggggcctcaatcctcggcgtaacattttgccattaaggccccatgttgcttgctttaaatgtcggcgcagtcccttcgcccttatctatagcgtgtcctccccgcccccccgggccgcgtgctccccttcgcctccgcccctccctcccgaaaccccgagcgaccgatgcgtcgctcgcttctctgcgcgtcgcccgcgcgccccgctccgtgtttccggccccttgccccttctcttcgcctccccctttcc

SEQ ID NO: 173309 - DNA, 512 bp, Arabidopsis thaliana
  unsure (1)..(512): unsure at all n locations
actcacnatagggaaagctgacacgcctgcaggtaccggtccggaattcccgggtctacccacgcgtgcgcacgtcacatgtgcactggtttatgagaaaatgccaactggcaggattcataagggagtgtgttccacttggatgaagaatgctgtgccttacgagaagagtgaaaactgttcctcggcgccgatatttgttaggcaatccaactttaagcttacttctgagtgtaaggtaccgatcatcatgatcggtccagggactggattagctccattcagaggattccttcacgaaagactagcgttggtagaatctggtgttgaacttgggccatcagttttgttctttggatgcagaaaccgtataatggatctcatctacgaggaagagctccagcgatttgttgagagtggtgctctcgcagagctaagtgtcgccttcttttgggaaggacccaccaaataatacgtacagcacaggatgatggacaaggcttcttatatct

SEQ ID NO: 173310 - DNA, 417 bp, Arabidopsis thaliana
actatagttgagctatgacgtacgcatgcacgcgtacgtaagcttggatcctctagagcggccgccctttttttttttttttacaacacaactccacccttattagaaaaaaactattggtcaaaaggtgtctacagtttattgacacaggaacaagcatatattataggagggttaatcactataaaaagacaacccaccattttttctttgttaggcgaaggaacgccagactacttatgtacagagccatcacgggcgccaaataaacctttccaatatacacagaccatagcaacaaatcagtgcgcgatagagagcccacctaactaaaaccaatggttccaaaccgcacgatccacgggtcaactagttgtgcatccaagtagttattagaggtccacgaatgcaagataa

SEQ ID NO: 173311 - DNA, 300 bp, Arabidopsis thaliana
  unsure (1)..(300): unsure at all n locations
cacgcgtacgtaagctaggatctctagagcgccgcccctttttttttttttgtttttttttnttnnnnagaggcaggacaaacaatgtggatgttataaaacgatacgtcacataattggttgaagggcagaaaacacgtgaggttgggaaaacggaggggggatgtgaaaaagaccttttctttttaggggggggagacaaagaaaacaaaagagaagagacaagaagagaggcaccaaaatgaggacgttaaacgaatgaaaaccaggattaaaaaaagaaagggaggtaacctctca

SEQ ID NO: 173312 - DNA, 543 bp, Arabidopsis thaliana
acgactcactatttggaaagctggaccgcctgcaggtaccggtccggaattcccgggtcgtcccacgcgtgcggtgacacatgcggcgatagagtcgctggataaaatgcgggaaggaagtaagaaagcaacactgcagctggttgacatggagtgcagttacctcactgttgatttcttcaggaaacttccccaggatgttgagaagggtggtaaccccacacactccattttcgaccgctacaacgattcctatctcagacgaatcggatccaatgttttgtcttacgtgaacatggtctgtgctggcctgcggaattcaatccccaagtccatcgtatactgccaagtccgagaagcgaagcgcagtctcctcgaccatttctttgcggagctcggtaccatggatatgaagaggctctcgtcgctattgaacgaagatccagcaatcatggagagacgcagtgccatctcaaagcggctagaattgtatcgagcagcccaatccgagatcgatgctgttgcttgttccaagtgataccg

SEQ ID NO: 173313 - DNA, 1009 bp, Arabidopsis thaliana
  unsure (1)..(1009): unsure at all n locations
actatagatttagctatgacgtaccatgcacgcgtacgtaagcttggatcctctatagcggccgccctttttttttttttttttttttttttttttttttttttttttttttttttttttttttttttttccnaaaacaaacacacttaattttacattgcatttaagaaacaaacactcaaaccgacctctttgggcctacaattttttttatttaaagggcaaacccaaaccccaacccaaatccaaatttataatatttctccccaagagaaatttatttcctccacttttaaaaaacacgtaagaaacaaccaaatttggggggattatttttgggtttacaccatatattcaaaaggcatattatatccccaccctttcctgttttcccaggtttaaccccacacaaaaacacgaaatgttaacccgggtgcgcccccaccccattaaaaaaaccaaccccccttaaaacccgacccgggctttgggagaaaaaggtgggcggtttgtttttaaaaaaaaaaacaaaccccttaagtttctttttaaaggggccctggggggggcgcttttaaatattaggctttatggcggggggggggttaaaagggttcctttgtctgggcgggggggttctccctcccctggaggattgtggttggggaaaaaatccccccccccccctccggtgttctttaaacgatacacctttttacggggggggaaacattggttgggtttaaaaaaaaagttttttgtttcctttcgggggggggggtgttaccctctctcggggggggtttggtctcaccatccttaaaggcggtttttttgaaaataaacttggggtggaggagcttcccaagaagtggaacctaaaaattttggaaaatatttgggtgttaacaactttctttaaaaagataaaattgtttgtcgaggggtctttttaaagagaggcatatggttgtcttttgtataggaaattttttttaaaagggcgggg

SEQ ID NO: 173314 - DNA, 514 bp, Arabidopsis thaliana
  unsure (1)..(514): unsure at all n locations
cctgcaggtaccggtccggaattcccgggtcgtcccacgcgtcggagctctcgtatctaacaatcatgaggcgtactcaagttgtctacctaaatgcaggaaaatgtgagaacgccttgctaggagctagggtggaggtaaaagaaagtgaaaaaagagagccaaaaggagccagagacaacgccagaagagattcnctccttatgggggtgtggaaccaccagcgcgctaacgcacaaaaaaagtacccgtcgtaacaaggaaacacaagggagacgaagaagatccgccgcgctacaatcgagtcatagaagtcagggccgccgccgatcggcagagctccgcccaaagaacgaaagcaatcaggacaacaccacccaaactcaataggagaactacagataagacataaaggcaccacaaaccgctcggaggcagaaaggagagtaggataaaagagaaacagaggaagggaggaagaaggagagatgacagagcgccacgtccccccccc

SEQ ID NO: 173315 - DNA, 531 bp, Arabidopsis thaliana
  unsure (1)..(531): unsure at all n locations
cgactcactatttggaaagctggaccgcctgcaggtaccggtccggaattcccgggtcgtcccacgcgtgcgagaaaagtctgtttttttattgagatttttttgtttctatagattctatcgaaatgccgatgtttcagccgttaaagagagatgggttaataggatttgaaggtggtggtgatgggcaagtcttagatctggatactgcagtgaaagatttttttctcggtggtgttaatggnggnggnatatcatatttaaagaaatttctcccttaccttctgaggtgttagcgccccgtgtttctggatccccctgtttcgaagaaataattcccgattccttcataattactgtctccctttatgtttgtagttttctacctgagttcttctcttcagcccgtgccaaggtgctttataacaagagtctgcttaccttccttggtatggttgttttattattttattaccattcccagccctttcaatataaggtgtgaaaacaggtctacccccccccccccca

SEQ ID NO: 173316 - DNA, 951 bp, Arabidopsis thaliana
  unsure (1)..(951): unsure at all n locations
tgcacgcgtacgtaagctaggatcctctagagcggccggcctaatcttttttttttttaaaaaaagacaaantcggaatagataaataaaacccaaacaaaagaccacgaaaaacatacattcatgtgctcgacgaaacggaaactacagaacgaaccagacaaatctaagaaaatcctctttatacgagggggggcccaccaaacagacaggagaaggtcgacagcacccccaccacacgccggagcagcggtagaaaatcacgaacagaggaggaggaaagagaggcgcacaagcaacccccaaacaaaacataacacaaaccccacaaaccacaacgtaaatccgacacacctacagagaaaaacgcgcgccgcaggcccagcaggaagtagaccagcacgcccagcaagacacaaccgaacaatatataaaatcggcaaaatgatcggccaccagaccaaagaataaacccaccaataaaaacgagaacacccccagcgataacacaccaccaagccgacaacgacgagagaaagaggacggcgtcgagcacgcggagcgcgcgatacaaagcaaacagaagacccagaatgaaaccccgccaaggcagagcaaaaagaccaacacaagcctgcagacaacctcgatcacgcaccggaaacccaccgaaccgagtacgccccatgcgacacaaacgccgggcgcaaacagccgcgagcagcacaccccgtaacgaccagccgtccacgggaacagggcccaggtcgaagaaaagagcgccgacagaccgcggggacgtggcggcagctgaaagccgcggctaatataccccgtggcggggccgataacgccgtcagtacaccgtacccgcacccccgcacacgcagagacagaaggcacacgtaaagacaatgggcgcggggggacaccgagcgaacccgcagaaaa

SEQ ID NO: 173317 - DNA, 486 bp, Arabidopsis thaliana
  unsure (1)..(486): unsure at all n locations
cctgcaggtaccggtccggaattcccgggtcgtcccacgcgtggggggagtccnnnanaanaaannaaaaaaaaaataataaaggaaatttaatgntattaagagaangggtgacccggaagtggggaggggtgttatgattaatagtgtaggagagagaggggggatagatggaaggaacggcagagtttgagagttcccctcaatattggggggttagaaaaaacaacacaattatttatatagtgtataatatgcacatgagtgatggtagttatttcagatactaccagtgaatgatagtggagaatgaatttggaaatataaatgtatgagtgtaaagttatactaatatagttgatggggggaatagtgaggaagagtcaaggatagtataattattgaggtctcgacgatataacgtttgtttaagattgcaagttagttagccgcgagtgcgcggggaagcattatataaattaaatt

SEQ ID NO: 173318 - DNA, 359 bp, Arabidopsis thaliana
  unsure (1)..(359): unsure at all n locations
tatgacgtaccatgcacgcgtacgtaagcttggatcctctagagcagccgccccttttttttttttttacaaaagtttatacatttatttgaaaatgtttattagggtaaaagtntgccacattctaaagacaccaaaccgagcatctactaaagggcggattaaagcaggagagagactaaagcccgaatttttttttggcgggggggggcccaagcaccgcatccacccaaaagtaaagccccgccacagaagggggcagggccgtacccacccgcaggggaaaccaggaagaacagaagagacgaaccacccataggacccgcccactgacaagagagaacgggggaggatcagca

SEQ ID NO: 173319 - DNA, 555 bp, Arabidopsis thaliana
  unsure (1)..(555): unsure at all n locations
ggcacgcctgcaggtaccggtccgngattcccgggtctacccacgcgtgcgcttttaagtgaaatcggtttatagagagaataaatcgtaattactttacatgagagccgcttacccaaaataatcatgtgttttgttattgtatttataaattatataaaagtatgaagtaaagcccgcagaccccaccctgcacctccccttacccaatttttttaaaaaggtgtgtgaacaacagccacacactccatagtcagcaacaatctacccaaaaatctacacaccattgatcttaatgatgccttatccgagctagaaactcccagatctatataacatatttacgacccagtggtagtgcacatcggaaatggtaagagatgcagattaaccaacaacacgttctttatccagtcgtccttaaggcgcatttatgtgttataatagacattatgcncgcgcgtgatgttgatattaaatttttatatatatataactggtctataatccaggtaggagtgatataaacatgagcaaaaccccaccctccccccc

SEQ ID NO: 173320 - DNA, 514 bp, Arabidopsis thaliana
tctctacgactcactatttggaaagctggcacgcctgcaggtaccggtccggaattcccgggtcgacccacgcgtgcgaatctctgccgctctgtcagaactttgcaattactagataaaacactaacctaatactgcctactcgactgcaaaatgaaagcctctgaaaccgaacactccatgaaaacaacagaccaggatcactagagtcgaccgctctccaaacatatcatcagtttggagaggcgttgctcagaggactgtctatgattgttatactactactcgcgattgtcagcagagatctgatacaacagacaacagagggatagacggtgaactgctagacacactgccatggcgtgaatgccttagagaataagactgatcatataatgagcatgagcgcgcccagcgcctcataagaataccactactgctgtgaagaagagaagttgactatactccaccaccgtaaagagactgccctgggtgcaaagatcaacacatgctg

SEQ ID NO: 173321 - DNA, 548 bp, Arabidopsis thaliana
cgactcactattgggaaagctggtccgcctgcaggtaccggtccggaattcccgggtcgtcccacgcgtccggaagattcttgcggaacgagcgacctacagttccagagagaactccatcaatggcttcaagggaactgcttcagctaagagaaagacaaactgtctctggcttaagggaagggttccataacgggagggaaaatattgtccatgaaaattcttttaacactggtaatgataatagcaatacttccacaaatgctcttgcaattgccatcactgctgggaattctgatcctcgtacccaggacgcgtgcccctcatcgaccgcattgcctccctctctccccttcccctctcgtaccccccacaaccttatcaatgtggcgcacccccgcctcccccccccacacccccccccgcccccgccctctatttcacacaccccaccccccacccgaggcccgccgagacttaaacttttgtcgttacgcctctcctccctaatgtggtactgtggcgccgaccccgccccgccccccccc

SEQ ID NO: 173322 - DNA, 885 bp, Arabidopsis thaliana
  unsure (1)..(885): unsure at all n locations
actatagacttactatgacgtaccatgcacgcgtacgtaagcttggatcctctatagcggccgcccttttttctttttttttttttttataccagaatctaacatccatttatttatttgtcggaatagaaaaaaacaaacaaatgatggatcacaattaataaaaaaatattttttgctcatatggggtttgaggcataaacattctttttttatgacatgaagatgggaacataccatgttttagtgtgatgaaaagcccaactaagtgggaaactaatacatttttgacatacccgacccgacagctccaactttccggggagcagaaccacccagaagcactgctggcagttgccggtggcaattccaattcggcaggtgcctggaacaaatttgtggcgattatgaaccggccactgaaggtttcaggtttgtccaatcccggtccaggcaagaaaaaacgggtggggggctaaggaggaggcctcaattggggggatatttattatactggagaatttggcttggctagttctcaagccccaaaaggggcccctctctcttgctggtttgcccaagggaaaggtggaaaaagaatggtggtgacaagggaaaataaagctcccgataaaaaaactcggggcaaaagactttctggtgggtctcgcccatggcacgaggagcacccgcgcccacaaatggctctcggttcgccgccaaaaggttttttgggngcctggtatgggtgcagacaaaaaggacagccgtgagagtttaaaggttcaaggcgtggtggatttataaagtagggagcgcccccccgcgcccccggagcgcgcacaccgtgaccgaaaaaaagaagtactcttaagggggccagag

SEQ ID NO: 173323 - DNA, 456 bp, Arabidopsis thaliana
  unsure (1)..(456): unsure at all n locations
ctatgacgtaccatgcacgcgtacgtaagcttggatcctctatagcagccgccctttttttttttttttttaacaagaaaaagatgagagatttgcagaggcaaaggagggggaaatacatatctgttaaagttcgttgttcagatcatacggtcttttcaaaactatacccagattgaattcttcagcggttttttttttttagcgttgttaaacaaaagacacagtatatatttaagagatgaataacaactaaacctggaataattatgtagttattatactttttctaacatttacccttttatttcccaaaanatattaaggtcattcccttcaattattctcctcattaccctttatatcccgttccgcttatccccattcaatttgtaccctcatcttagtttatatttcttctcttcacaatttctcccctttctctttcatcattat

SEQ ID NO: 173324 - DNA, 654 bp, Arabidopsis thaliana
actatagaatagctatgacgtcagcatgcacgcgtacgtaagcttggatcctctagagcagccgccctttttttttttttttgtactaaaaacgtggtttactttccctctaactaaaagggtaagcttaaatatataaaccaaaagtatacaaacacaaacagacagagggagagagatagacatacatgttaattaactttttttacacttagaaggtctctcataattaggaggtaaagaaggacaattcttggtcatgtttggatatgggaaaatggagaaaaaaaaaaaaataaaattattgataaaatatagatataagtaaaataataagagtatttacaattatacattaaccataatttatacacgtataaataaaattaatttagatcttattttattatcatatattttaataagaattcctttatccaactataaataataatataataaaaaaagaggttatgtataacaagaatttaatttatctttacacccacgttaatacctatatttctttataattaggccacccatcttacttctaccgctagtataaaatatacagaaaataaccactataagaatagctttgttgattaaaaaaacacaaaagtgtaatataataaaatatgcatatacaaa

SEQ ID NO: 173325 - DNA, 521 bp, Arabidopsis thaliana
catgcacgcgtacgtaagcttggatcctctagagcggccgccctttcttttttttttttgaaaattaaaacattcttcctcatccaatgtttctcttcttttaccactacaaagcattaaaacagatctcatggtgtttaaacgcaacaatcccatgcaaatgcataaagagacaattttttgcaaaaggaggcaaaccctacaaaaaccccagaaaaaaattagtgcaccactcaggaggcgtgcatcagtaccttacagattagagagggattcccaatgccgagagaaatggcgagaacatatgcaccatcacacctcgcaccaagagaacagctacgatacaaggtagaagtgcgatacacagccgggcgatgctgccccgcacaaagcatagcatcgggaggctgtgcgatggcggtctccccctacaaacacatttcccccaagatcgacttcacccccccccaatttaataatgtattaccactgtgacacagcagcgcagtcatcgagccgac

SEQ ID NO: 173326 - DNA, 544 bp, Arabidopsis thaliana
  unsure (1)..(544): unsure at all n locations
acgactcactatagggaaagctggcacgcctgcaggtaccggtccggaattcccgggtctgacccacgcgtccgccgtccccaaaaacaaaggaaacaaaaaatcagtcggcgaaacgggaagagatctatcggaaatcttacggcggcggaagtcatggcgaacatagaatcagaagcagtcgatttcgagccagaggaggatgaccttatggacgaagaagtgtacagctattgacggagctgatgtttctccacgcgcgggacatccgaggcttaagtcggctattgccggagctaatggcgaatcagcaaagaagaccaaaggccgngggtttcgcgaggagaaagatcccgaacgtgatatgcccgttttagtctacgccattcaggcgttactctcgttgcagtatttacctgctttccctataatccaaatcnctgccccgctccaaaggggatctttattttttttgttatctggttcacttctactctagtgggttaatattcacgcctgtccgcccctctctccctccccccca

SEQ ID NO: 173327 - DNA, 546 bp, Arabidopsis thaliana
  unsure (1)..(546): unsure at all n locations
actatagnatagctatgacgtcgcatagcacgcgtacgtagcttggatcctctagagcggccgcccctttttttttttttttttttttaaaggnagcaactnnantatganaagaacacaacaccattcagataactcttttaaatcccaaatttggtttatgatgatggatcatctgagctttacttatttattaaacagtttttttatgagtctggctgacactgaaactttgctcaggtttttaatgcttccgctaatgcatcagaacaaaaaacatgctgggttctcctttatcggcgttttttgattctaagaaacgcgattaacccaaaagtgagattgggggttcacttagttctcaaacccctcttaaggaaatttgtgttgcaagaagcctttctagagcatagagaaaataaaaacccaacgaatatataatatcagacaatcacctatatttataaacctactttatgttatttatgcgtgatctcgccccctcgcccagttgctttttcctccccctcttttctgtgagcttac

SEQ ID NO: 173328 - DNA, 930 bp, Arabidopsis thaliana
  unsure (1)..(930): unsure at all n locations
atgacgtacgcatgcacgcgtacgtagcttggatcctctagagcggccgccctttttttttttttttttttttttttttttnnnnnnnnnnnnnnannnnnnnaaagaaannaaacatactcataataataatatcactccgctcatcacaatgatatctttaaaataactggccaaaaaagggagacttttttaagaaacgcgcaaaaaccagcccaaaaaataaccaggagaacaaccgcccactggaccagaccctgtcccctctttacacaactgggcctaacccctccgttctgtcccgaaggtctaaaccaaaacgaagaggggctttcccaggggatggttcactccaacccgcagaaaaagcaaagcactacgttgccttagcgaggtggaacccaaacgaagacagcgaccgcgccgcgtacgggaggaaaagagccggcatgaagaagaggagaggggtaaagaggcgtgtacccccctatatgtatagcgtcgccgccccaatttgtcacgaagaggtcgttaggcgcgcgcacggcgactaccgcgcggcggtgagagagaaaggatcaccccccccagagtgataccaagcgtaaggcggagaagatgcctagcggaagggcggcagaggggaagatagacgcagcagcaatgccatgctgataccaccattgcacaaaacgggaatgcggggaaggcgatttagaaccagcaacatacgggcgccggcatttgtggatgtgaatcagagccagaaatatcccctaatggtgcacacgtcgtgttcccccgcttaatagccgctgtagttgcgagctgtttcgcgttaaggagctgccgagaaggccggcgactaaccgcgcgcccaaagccattgttactgcggcctggcggtacacgccacatgctccctgaggt

SEQ ID NO: 173329 - DNA, 524 bp, Arabidopsis thaliana
  unsure (1)..(524): unsure at all n locations
tgtccgcctgcaggtaccggtccgggatcccgggtcgacccacgcgtccgcccacgcgtccgctctcttcgtcttccctcccgagaaagctcaacggagccctagactggttttatcactctcgccaacaccaaccacgctttttctctctttacctccatttttgcattccccaccccagtagatccataccacagatttttttttctcggggtccccacgcgcccccctcccattcgcttctctttttttttctctcttagtgtttttgttgttatgtttccctgctttcctttattcatacgattcttaattctccagtcctgtccccgtttgttccctctttgtntatattaaacttggttacactccccaccatcttctttctcctcccccctctctatgtctgctattattctcaccctcccgcccccccggggtgtccttttgtttctttgtttatcttcttacatccctcttatattacgagtatgtacatacgtctaccccttctcacccccccc

SEQ ID NO: 173330 - DNA, 716 bp, Arabidopsis thaliana
  unsure (1)..(716): unsure at all n locations
agaagagctatgacgacgcatgcacgcgtacgtaagcntaggatcctctagagcagccgcccttttttttttttttttttttttttttaggnnnnnnnnanannaaacaaaaaaaaaaaacacccccacaaaaacanaaacccaaacagcacccacacaaaacaaccacaccaagccacaaaacacaccaaaacctttttttagcgcaagggggaacacacgaacgcagccngcgcgcaaacgaggagagcgccccgccgccgcgccaggaggcaaaagacacaaacgaaccagacacacaaacagcaaacaaacacacgcaaagagagcacaaacaacaaggacaaagacacaaagaagaaccaaaaagcgaccgaccccgcacaagaaccggcaacagaacaaggggcaacgcccccaaccgccaccacagaaaagaagaagaacaaaccacagcaaaaaaaagaacatagagaaagggaaggcagaagagacgcgccccgcggaagagaagacccccgaacgaagacaacccaacccccccaccaaaggcgaagcagagacacggcgcagacgcacagcgcaggggcgccagcggcacgaaaaaaacagcagaacgacacacaccgaaaataaggaagacggcaaaagagaacaccgcacaaacaaaaaagacacaaccaaaagaaaaaacccagaacagaaaaaagacgcac

SEQ ID NO: 173331 - DNA, 569 bp, Arabidopsis thaliana
  unsure (1)..(569): unsure at all n locations
ctagcgtctactacgactcactattgggaaagctggaccgcctgcaggtaccggtccggaattcccgggtcgatccacgcgtccgcgattaccggatgagtttcttgacgagttaaagaacggtcttaagtctatccttgaagggaatgtagcgcagagtgttgatgagttcatgttcttgcagaaggttgttcagagtagaactgatttgagctctgtaacacttgttagagctcatttggtgcagcttgagatacttgtagcgataaataccgggattcaggcgtttttgcatccgaatattagtactggctcagccgtctcttatccagatttttcgttaccgtcttttttttattctttatttccctctggtgccttcttcctttgcttttttccattgtcgttctctccccccctccgctcctcccctcccctcctgcgttatcacctactatctctcccctcctccgncgtttctgggagagagtttatatttttttttatgattgctcttgcatatgattacaaagttttacccactcggccctcccccttccctccccctc

SEQ ID NO: 173332 - DNA, 714 bp, Arabidopsis thaliana
  unsure (1)..(714): unsure at all n locations
ctatagctgagctgagacgcagcatgcacgcgtacgtaagctaggatcctctagagcagccgccctttttttttttttttattcatatgcatttcctttatcagtttcatttcctttcttgtctacgttcgatacacagacacaagtctcttcagatataatatatagcaacggaacaaaataaacacatctaggaactcctacaaagcaacgggacaacnacacgggcatgccaagaacaaaggactccacagaagaagaaaaaccaaagacaaaacgaggaaacagacaaaagaagcaaaaacccgtaccatatgaatcaaaaaggtaaatgcactagcagcccaagccccatacagccccaaaaaacgaatgccgcgccccaacaacagccatgaggccgagcataaaggaaggccgcgagttgcacacataaacggggccgcgacaacaacccccccggacacaagagacccccgcacgagataatctacacacacccgccgctaatactcgacgccatcacaagagaaggacgcgatacgcagcaacacccgccacgcagaaaaaaaatataagaaacgcacaagacacacaaacaaaccccaccctcacgcccacaaccgccagaaccggaagagggcgcgcccagcggtagccacgccgccacacacaacagccgagagaacccgcagacccaccgcctctacatac

SEQ ID NO: 173333 - DNA, 944 bp, Arabidopsis thaliana
  unsure (1)..(944): unsure at all n locations
actatagctgagctatgacgtcgcatgcacgcgtacagtagcttggatcctctagagcggccgccctttttttttttttttttttacaataatacaatattattatataaaatatcatgtactttacacatacatttatttattcattaattatacatccatcacacaacaattcgtaacaatttcattttggaatatatattttatttanggtaagcaggcatatgttctttttcttcttgaccgagtcggtgatcttgagaaccataaggactaaaagcttgaaggaggaagtgtagggtagccgccgggtggaagggggcgcagcagcggccacggtcacggcgggccaactacacacgacacccagggggaagaggggcggcgcgggggacaaagagagggtagcgcgggagggtgtggggcgggagcggagcataacaggaaaatacacacccaccgactatcatcctccccttctatatattattttccccccccattatagcctcttgctccccccatcaaatccgcgcaaccaagttaatatgtagctataacttaaaaacaaaaacaatctatcaacagacaccccaccacaagaacctcaacccatataacaatgtagcaccacaactagagatcgtaacctataaacaaatgaacgtaacaactgcatgagggcgaaggaggacagcgaccagcaggcgtaggaggacaccgatatcacacacgccggtcaacgtggagccgccggggcatgtgatttagtgcgacgcgacaacacacgacaccgatcacacagccgctcgtccgcccacaccctgcacagatacaccacagtaaaccacccacatagggatcccagcgncaccccgcaggggaacgatgtgggacctcgttttcttatccaagtctattcactatcattcccacccattctt

SEQ ID NO: 173334 - DNA, 385 bp, Arabidopsis thaliana
gcctgcaggtaccgggtccggattcccgggtcgacccacgcgtccgcaaaaccattcctctcctcaaaaccattaatctctcttctctctagcataacctctctcagatggcttctaactatgatgagcttacttgttggagagtaggcatcatagagtgatgggggggagggccgtacgcacgacccctcaaacgagtttttctttttaaggcggtttggggagctatacacacatagacacaatctaactagatctttctgttggagccactcctaatagtctgtttgtgtcagcaccctccgtattcttatgtgtgtgtatatagtgtgccatatgcatagccttctactctttcccaatcttttgactttctattaattta

SEQ ID NO: 173335 - DNA, 616 bp, Arabidopsis thaliana
actatagatgagctatgacgccgcatgcacgcgtacgtaagcttggatcctctagagcggccgccctttttttttttttttttttttttttttttttttttttttttttttttttttttttttttttttttttttttttttttttttaaaaaaaaaaaaacgggggccaaaatcccctgggggggaaaaaaacccatgaatttttaaaacagagaaggcaaaaaaacctttttaggaaaaactagggttcgataagcaaaaccccacagggggggggggggcccttttttagttttacaaaggaaaggctaggggggattttcaaaaacctgaaaaaatggggccctaccccctgaaaatgggggcccaaagttttttttaggaatttcataaagaggggtggggaaaaacaaggggagaaaacccaaacccccttaaaaggttttttatgagttgggccttaggggggcccaaagagtaacctttcataaagacttcttttagcatcacgccccttttaaactggaaaaaaaccccccgccccattttaaaaccctgttttttgatttggggggggggggatacctgatccttttagggcccctggagggggccc

SEQ ID NO: 173336 - DNA, 556 bp, Arabidopsis thaliana
tgatacttcagcgctctacgactcactattgggaaagctggcacgcctgcaggtaccggtccggaattcccgggtcgacccacgcgtccgatcagctttttggagaagaaaccaaagaaaacattcgaaaccctaaaatctccattagaattcgaaaatgacaaagaagagaaagctcgaaggagaagaatctaacgaagctgaagaaccgtcgcagaagctgaagcagacgccggaggaggagcagcagcttgtaattaaaaatcaggataatcaaggagacgttgaagaagttgaatacgaggaagtagaggaagagcaagaagaagaagtagaagatgatgacgatgaagatgatggtgatgagaatgaggatcagacggatgggaatcgtatagaggcggcggcgacgtctggatctggcaatcaagaagatgatgacgatgaaccaattcaggatctgttggaaccattttcaaaggagcaagttttgagtcttcttaaggaagcagcggagaagcatgttgatgtagccaatcgaattagggaagtagct

SEQ ID NO: 173337 - DNA, 522 bp, Arabidopsis thaliana
  unsure (1)..(522): unsure at all n locations
cctgcaggtaccggtccgngattcccgggtctacccacgcgggcgctctctctctctcacaccgtacatggattcctcctatggcagccacaaagttccttctcctgctgttcctcaccacctgcattgtgaccggattacccgataacaaaccagaggccggggcagatagactgagactaaagaggaagaagatcttttttatatggggggtgagagggccagcaaatctcaggctgaaaagatcactccctccaggaagtaagggagtgacactttgcgatgccgagggccgggctcctagtgagataagcgccggagcgggagtccacatgaaggcccgggtattaggcagtaacagaaagcaccagcagcacccaagtaattctcagcgtgtccccgcggaaagtgcagggtgttagtacgacgacccctccgagagggggttggcgccttatattatttataaggtgtgcaccggccggagtgagaagaagaggagagcgcgggcgcggccgcgct

SEQ ID NO: 173338 - DNA, 518 bp, Arabidopsis thaliana
  unsure (1)..(518): unsure at all n locations
tggggagctggcccgcctgcaggtaccggtccgngattcccgggtcgtcccacgcgtgcgcttatgcattcctagcaatgcattggattacgagattctctgctttgttgtgagagcaatgagcgatacacgcgcgacacgcacaagagtgtagatatttatagaaactacagcaaagagcgcacacacccacggccaccccccatgaaaacaggtgtctgattaaagagggggtcgaccgcacaacccaacaaccttcatcacgtaagacctatcctcgctaaagagcgagacaaggagagagctctcaaagtaccccgccccacacccgcggcgaacagtagttattttgatgccgacgacaagccctaggagatcgacccccacttgattataagagaaagatctaagccgccctccccctgccgccgggacgccccgacgcgcaccaagaaagagagaagaatgatggtcgggtgccgcggaggtgggagggggaagattatacttatatcaaa

SEQ ID NO: 173339 - DNA, 799 bp, Arabidopsis thaliana
  unsure (1)..(799): unsure at all n locations
cactatagactactatgacgtaccatgcacgcgtacgtaagcttggatcctctagagcggccgcccttttttttttttttttaggaagaattaatcgaattgataatagaaaacgaagcaccaatctttttcttctgaatcttatatttacanttgttgaatgaacaaaccaaaaaataatatatatatatttctgaatcaatgttttactgaagacgaagaatccctgttacttctggttcttttgaagtatcttctcattactgaatttgacctatcccaaaccctaagattctactttaatggtcaaattcagattattagaagaaggtgatatcgcaactgatgaagaaaaaaaacttaccgttggacctaatcttcttaattacgaacccattgtccgaatcattcttctaaatcttacaccggatgctctacctactccctttctcgtatttgccaatcatcatgcccatggtacacctccaacgtaattacatttccacctatttttttttttatcacccccccctatatattcccggaacttcctagcctcatcttactcatctactccgcccgaatttataattatttaattgaaaccacgccaaataaagatacacagccgtatttcccaagttgctacataccaaattgcttagcagaatataaatttataagcgattatataaaatataatttttttgtattgaactgaatatggagcagcgccgaagctctcgactctgctactctattcagacccctttctcatttatattatctgttctgctct

SEQ ID NO: 173340 - DNA, 455 bp, Arabidopsis thaliana
  unsure (1)..(455): unsure at all n locations
cctgcaggtaccggtccgngattcccgggtcgtcccacgcgtgcggccaaatcgaagcgtcggctactggaattggtagatctggaaaccctccggcgtctaaatcggcgattgagtctttacctagagtcgaaatgttggattgtgaaaaaagttaaaaagtggggggcgcgacgacgaaagaagaaaaaaagttccgtacatttaaggggttgggagcacaccaacgaaagagggtcgtcaattagtgtgttcgatcatggtaataagatagaagtaggatttttaatcctcttttctatctcgtaattacatatattttgttttcatgactaacgtttagagttaaccacgaattttaagaatttagtgtagttaagattacatgctcttagtataatattactcagcgaatcaagtattatttatttaatgtatcatagggcgcaccggga

SEQ ID NO: 173341 - DNA, 880 bp, Arabidopsis thaliana
  unsure (1)..(880): unsure at all n locations
gtacgtaagctaagatctctagagcagccagcgcttttttttttttttaggttttcagttacttataacaaaactgacacgcgcttcttctagtagtgttagaagntaggatctgagagaaccagntaaaacaataactagaacaaacataaaacacaaaaaaaaaaatactataaatgtgagggggcgaccaccaacacaaacgaacagacaaaaaaaacacccacacaaaacaaacaaaaaaaacacaacaaaaaaaaaaaaaaaaacaaggaacaaaccaaaccacacaacaaaaaaaacagaaaaaaaaaccacaaaaaacaccacacaaaaaaaaaaacaaacccaaaacaaacaacacaaacaaaaaacaaaaaacaaaaaaaataacacacaaatcagaaaaccaacaacaacaaagccacaaaaaaacaaacaccccaaaaccaaaccaccacacaacaaaacaacaccccacccaaaataccccaccacccgacaaaaaacccccccccacccatccacaccgcacaccaaccaaaacaaaaaacaaccaaaaacaacccaccaccatactacaaaacattatctaccaaaaatagaacacctaacaaaacacatgccaaccaacaaaaaaaaaaaatcaaaaacacaccaatacaaaaccaaaacaaaccacaaaaacaccacaaaaccaccaaaacacaaaaaaacaaccacaccctcacaaacaaggaaaactacacaaccaccaaacatgatacccgcaccacaaaacacacacaaaaaacaaaagaaccagaacaaaaacataccagaagacgaccacaccaacaccacaccacaaacaacaaataaccccaaaacaaaacaaaca

SEQ ID NO: 173342 - DNA, 551 bp, Arabidopsis thaliana
  unsure (1)..(551): unsure at all n locations
actatagnactagctatgacgtaaccatgcacgcgtacgtaagcttggatcctctagagcggccgccctttttttttttttttttttttttttttttttttttttttttncggacctgactggggacctagccctaatacataagaccactttattagaggactctaaaccatagcacagaatgtggaaaaatccaagacagctttcttttcatagaaacgtaataccgcaattcatctaaaagagcaacaaggatgagtaaccctcggagtccatagtcctccaaagaaacagaaatggccatcgaatggcccacactcccctgatcttagggatcgaccccaatttctaaaaccccaaatgtcgggggacgcatcttaagattggaatgggaagccctacctaacccagagggcccaaggtcaagaaccaacaaaccaacttccttgggaggaggggaaaaccttttgtttttggccaaaaaatccggaaaattcccaaacgggagcccatacatgggattcggaaaccttttggtttaaggcggggca

SEQ ID NO: 173343 - DNA, 529 bp, Arabidopsis thaliana
ctggaccgcctgcaggtaccggtccggaattcccgggtcgatccacgcgtgcgcgcacacctaacaaaaatcctccagccatggcggcagttactgaatttgtgctccaaccttgatcaatacggggaacgataaaggaacggcgtttttaataagataagaaaggaaagatacgggagcggcgcccccacgcggacctacggttcccttctttgggtggtgggaggcacgaaaagcgactccccatcagtacaaacgccacaacacgctcgtagtgaaggtggcgtatctgaacgccggtgcgcggatagcggacattaaaattaggcgaggggccgcggtccctgttcccaccgccgtggatatgaaataggatgcgaggcgcccactcaaccgtagcgggaccgcgactttttagagagtgtcttcaggtctgcccgccgggggggatcaagtatacgaaaataataaagtgagtagcagacatagagaaatatgatattgagaggaaaggctcttcccccccccc

SEQ ID NO: 173344 - DNA, 554 bp, Arabidopsis thaliana
  unsure (1)..(554): unsure at all n locations
agcgctctacgactcactattgggaaagctggtcacgcctgcaggtaccggtccggaattcccgggtcgacccacgcgtccggtgggagtctctatcgtcgtcgtatccaaagctcttcaatggagaccgatctcaagtcaacctttctcaacgtttattctgttctcaagtctgaccttcttcatgacccttccttcgaattcaccaatgaatctcgtctctgggttgatcgtatgctggactacaatgtacgtggagggaaactcaatcggggtctctctgttgttgacagtttcaaacttttgaagcaaggcaatgatttgactgagcaagaggttttcctctcttgggctctcggttggngcattgaaaggctccaagcttatttgcttgtgctggaagatcttatggatgaaccctggcactcatctggtaaaaccttgattgactgacgtgcgcccgccgncggcggggtgcgatatattttaattattgattatgaccttaatttgcgttgctttagacttgggcgtctcccccgccacccccccca

SEQ ID NO: 173345 - DNA, 544 bp, Arabidopsis thaliana
  unsure (1)..(544): unsure at all n locations
cgactcactatagggaagctggcacgcctgcaggtaccggtccgngattcccgggtcgacccacgcgtccgctctacggcacttcccttggaggcttcttagcacaactctttgctcatcaccgtccaaggcgggttaaatcattagttctatcaaatacatatttggatactcgtacttttgctactgcaatgccatgggctccttttgtcagaaggtttttttttttgggggttcaccaaaccccaacaactctacttctctttcactttctccatcacactttctacatcctctcccctcctatacccacccttccctcattttttctcctccttctcacctctacgaattcccactccatctccttttatactctcttccccccccccccgccaccctctccatccacacaccttctactatntatctttatttctccacctcacccccctacccccgcttgagcagttgatatcctattacctcgtactacactattacctctttattacaatagtggctcccaacacccccaccccac

SEQ ID NO: 173346 - DNA, 758 bp, Arabidopsis thaliana
  unsure (1)..(758): unsure at all n locations
gctaggatcctctagagcagccgccctttcttttttttttttttttttnnnnaaatggccaagagaatgaatgatcatcagaattaagacggaaaacaacgggctagatccaatgggaacgccacacacactagcgggaagcaacaaccgccaagagcacccctcttttctcggggggggggggaagaagaaagagggagaggaggaaacggaccacgcgaacggaggagagagggagaccgggggggagaaagaggagaggagaaacgacaggagcgaaaggagggacagaacgggagagggacacgagaagaaggggaagagagagagaaagaaaaaaagagaagggcggagcgcagcagagaacaagggtcaacagcagaatacgcaacgaagacacgaagtcagagaagcggtcacgggcagacaaaaaggccgccagtcggccgcgagggagcgccgccgaacagcggcggcgacggcaaaggagaggcaaagaagaacctccgcgggaggcaggggacagcgacacaagagtcacgccaggagggagcggcggaaaacacaaaacgagagctacggagagagggccacagggaggccaaggagggggcgcgagctaccggggacgcacaacacacgccaagaccagaacaccgcaacacacgataaaaacagaccgagagcaggccaagaagaatgaagaacacacggggacaggttagaacgacacacacacaacatacacgacgaagaca

SEQ ID NO: 173347 - DNA, 480 bp, Arabidopsis thaliana
  unsure (1)..(480): unsure at all n locations
cgcctgcaggtaccggtccgngattcccgggttgacccacgcgtgcgccctcctataaaacaccataccttccttcattcttcttcatccaattccaatttcaaaatcagatccaacaaatcttattattattattcttattagatcataatggacagcaacaaggaacacggaaaaacacaagaaaaaaaaaattttttttttataagggggggggaaccccacaaataccaaaataaaattataaaacacaaacaaacgatatagaataaaaaatatcactaacactacaaatactcacaagtattataagtaactacataatcaaacatactactacacaaaagaaaaataagaatcgcaccctaacaacaaccatacacaacagcatgggaacaacatacataagaaaagtatgatatcccgaagcgccccacgggaggaaagataatataaattgagtaataaattcaggatata

SEQ ID NO: 173348 - DNA, 412 bp, Arabidopsis thaliana
  unsure (1)..(412): unsure at all n locations
tatagnagtactatgacgacgcatgcacgcgtacgtaagcttggatcctctagagcggccgccctttttttttttttttactcagcaaaaccatgtgtagattagaacaccaaaatgtttaacattcggcttcattggcaaacattattatttcccagaaatgaaaaattctcaaacaacagatctcttacaagtaaaaagtttttcaacagcttagggccacagagcgcacgacactgggtgatagcactatcatagtctcttcaagctatccttccgagcaacacccttgtcggtaagtgtctgacccatgttcaaacctccctgacattatttccgacgcagttgcacccctagtcccattcgccaccccaatcccagcgcccgtagctaacgatcctcacacgcccac

SEQ ID NO: 173349 - DNA, 809 bp, Arabidopsis thaliana
cgcgtacgtaagctaggatcctctagagcggccgccctgaacccataatataataaacagaccaacaccgagaagaagcaccgcaggagaacagcaccccgccacgagaggcagacccccgacggcggcgcgaacaaaacaacaccacccacagcgcgggcaacaaaaacccctcctgccgcggggggaggccgagccacaccacccccacaggagacaccaccgccaaaaccacccacagaccgccaaccaaggaaggacgcaggcacacgcaaacacaccacaccagacaagcccagaagcacgaaaaccgccaaaacaagaaccacacacacacgggacaaacaagaaccacaacacgacaaagacgaaccgaaccacgcgcaacccgcagcagaagacccccgcggggccaaagacaacaaaaacaaaaccaaaagagcgccgcaccccaccacagccaacccaccccagacagcaaccagccgcccaccaacacccccacggcaacacacgcagcaacaacaaccgaacacgaagccgcggagccacggagcgagacccccccaacccccaacggacaagagccggcggcgaccccggcgcgcccacccagaagagcccgcggtagagaacaacagcgacaaacgaagacacacacagcccacccacaccaccaggcgacaccgcggccgccacgaggcccccacaaacaaaccccgcgcaacagaagagccccgcgagacaaggcccccgcacgcgcgccacccccccggcgccgccgccgcaaccccacccacaaaccacaa

SEQ ID NO: 173350 - DNA, 532 bp, Arabidopsis thaliana
catgcacgcgtacagtagcttggatcctctagagcggccgcccttcttttttttttttaataaaagaaacatataaaaagagggctttttgatcggcacgcgggaagggtggcagccagaggaaaaacacagatgtcttaaaatagaagaacacgccccagacgacagaagagcaacagacgaggacaggcgcttagaggaaaacccctcccttttttttgggggggagagcaacaagaaagagaatatagtagaataactaagaaaccataatgagggagggagggagaggtccactaatggtaagaaggacagcggggcacaaaaacaactaggaggacaagagaacggaagaatccgcgcgagaccaccatcacatatatttcccgacccccacgtatggaagggtcaccgcacacagcgcggccgacgaacgtaataataagagaaacaccgtaaacagtagcaaccagaaagcacaatccggcgcgtcgatagccagaccgaccccgcaactatatacccgccgcat

SEQ ID NO: 173351 - DNA, 181 bp, Arabidopsis thaliana
  unsure (1)..(181): unsure at all n locations
cctgcaggtaccggtcncggattcccgggtcgtcccacgcgtgcgtcaatcccttcttcagccggcgattaagcttaccaataagacaatctaggaccggcggagcatgagcacccgatnaaaaatcggggggagagttttgtatgagtgagagataaccaagaccagctgggcgcgagtg

SEQ ID NO: 173352 - DNA, 229 bp, Arabidopsis thaliana
actatagttgagctatgacgtacgcatgcacgcgtacgtaagcttggatcctctagagcggccgccctttttttttttttttttgggcgtgtgcacatgattaatgtctacactcagatatagtctcgccaccacatctaaatcaacccctacccatcaccctattattatctcgcacttatcgaaacatatgtgataccaaaaaaaaaaatttttttatatttagaag

SEQ ID NO: 173353 - DNA, 552 bp, Arabidopsis thaliana
  unsure (1)..(552): unsure at all n locations
cgactcactatttgggaagctggaccgcctgcaggtaccggtccgngattcccgggtcgtcccacgcgtccgctctatctccggtcatgcctccattaccgtcctccacggcgccttcgtcttcgagacatcttcgatcgccggaaagtatcgcgaaatttgcagggagagcaatatttcctgctttacaggggaaatcgtgtccgatatgcctcgaaaatcttttctagcgaagatccgccgccgggancacggaggacaagcacgggaactgcctaggaggagaggcgagggaacacaaacacgccccgcagaccccgcggcaggcgcacagaaagaaagccgcaccaggcacgaaaaccccgcacaaagagaagaaagcacacaaacccaccccccgccgcccacccaaccacccacccaccgccacgaaacacacaccaccccgccgccgcccccacggcgcgggagggcgggagacgaataagttgtaatcgtcgtctcgtctgtaatgaaaaggatagggggagcggttccccctctccccccccc

SEQ ID NO: 173354 - DNA, 779 bp, Arabidopsis thaliana
cactatagctgagctatgacgtcagcatgcacgcgtacgtaagcttggatcctctagagcggccgcccttttttttttttttttttttttagagaagattgatatattccaatgacaacataataagataaaccaaactaaaccgagtcaaaagcaagattacatcccattcctgcattgcccataccgaaaccaaatgatggttatatagttccaaaagattattacctctccatgttttcttttcttcctttacttctataatatggctaccaaaaataaagtttcttcttaaaagtgtaaaaagaggagggtggttcaggttcttaacctgcccttgtgcaaatgctgtaagccacagcacctgtagcaacagctaaatctcctgtctggtcccaatagatcttctcgcccgtacatcaatataaacctgcttgactccatacgtggggctactaacaactgaatatgcgcgcaacgtattgtcaacttgccccccccctattttgtctgtgctcagaacctagtgacccgcaccgtgtgaataatcacgcccgggtttgattgtattatctgacgcttgagaccgagagataagacccacgagggttgtacctacgacatagacacaagcggggcgccacggttaagaggaggcagcgttccctggatctgtgttctgtggagaacgggcgaggggcgagcagagaagcccgcagatgtcctgcccgtgttcagacccgcgcgctatcgtagtacgcgcccgcgcgttccgtcac

SEQ ID NO: 173355 - DNA, 534 bp, Arabidopsis thaliana
cctgcaggtaccgggtccggaattcccgggtcgtcccacgcgtgcggtatgcctggacctgaatacttcagtaacattcattacggggcaggtgatgatcgatagaatgaaacaagtaggttaggtaggggggagtatttatttgttattgttgattgtgtacgatagacgcgttttttctcggtcccgacacaactttttcttaaatagggtgtacacacaaacgaatctaaatttgttgagttatgagttcttatttcaatgctatcaatgtagtatattttataatcactcttctccagtatcaatctccatattttaatttatataattacatcactatgtttttgtcccagtatttaatttttcaagtttgtagattacattctatagatgtgtttcgcatccaccccaaccgcttcaaattatctataatcgatcctccgcggagattgtgataatattttttttttatttttcttgattaactgtatagagtggagtaggcctgattatcggctttccttccccccc

SEQ ID NO: 173356 - DNA, 535 bp, Arabidopsis thaliana
  unsure (1)..(535): unsure at all n locations
aggtctctacgactcactattgggaaagctggtcacgcctgcaggtaccggtccggaattcccgggtcgacccacgcgtccgaacggagtcaacaaactcgttagccgtacatctgattcgaacggctcagatggtccgtacagcatggtgctggacaaaaaaggtttaaccatgtacgttaacaaaaccggtacgccgttagtttacggcggatggccggatcacgatttccgcggcaccgtcactttcgccgttacaagagaattcgataatttaacggagccgtcagcttacgagcttctcttagaacccgcaccacaacccgctacgaacccgggtaataaccgccggttactccaagtcagaccaatcggaagcggaggaggaactttaaatctgaacaaaatcaattacaacggaacgatttcgtatctaagactcggatctgacgggagtctcaaggcttactcgtatttcccagcagttacgtatctcaaatgggaagagaggtttttattcttgtncacttacttg

SEQ ID NO: 173357 - DNA, 536 bp, Arabidopsis thaliana
tctactacgactcactatttgggaagctggtccgcctgcaggtaccggtccggaattcccgggtcgatccacgcgtccgattcacttcacaaaccgctcggcgacaaagacgaagaagccgaggaagcaccgatacgacgattgagacttagttttgctcagattcatttaaccaccggcgccaagtgacgacgacgacggagggagcagctgccgatgggggaaagtttgtatttttagagggggtggcgcgccagggccaacctccattatagtatactgcctccatctatttactgccaatctatattataacgattcaccccccgcttgcgcctttctcacggtgtttttattctcccatttcacatcatcatctctcactctttgactttcttgacgtctactggagtgtccatctagtctttacttatctctcttggctgtacacttgttatggtgtgatgccctggtctccccgggcgatggggtgggtgaatttattgtactatgactgtccgtctgtgtgagttgaa

SEQ ID NO: 173358 - DNA, 750 bp, Arabidopsis thaliana
  unsure (1)..(750): unsure at all n locations
actatagnatagctatgacgtcgcatgcacgcgtacgtaagctaggatcctctagagcagccgcccttttttttttttttttttttaaagtggacgattttaatgagaaacatcaccacaagtcaatcttacaattttaaaccccctagggggtgacaaagatagagtctaaaaaaatatgtggcacctaaaacacgaatctttcttgtaatagaggcaaacccccaaaaaaaggccaaagcaaaaaggacccaaccacatgagataacaagagaaggcgcctacagacgaaaccagcatagaaccgaagcgaggaacgcagcaagagaagaaggcacgcacaagagaggcaaaagggcggaggcccgagaagaaccggcccacacgcagaaccagcaccgcaccagccgccacaccaggactcgatcctcccagaacgaaggagaagccgacgacgaagctgtccgcaagagagaaaaagcaccggagcgagctcatccgcgcgccagaagcgaagagcctaccgcgcccgcgggaacacagcgaggagaagggagaagaagaaggggcaacccagcgacggcggggcggggcgcagaggaggagggcgacgagccccgctcataaacggaaccggcagcacaaggctacacacaactagagcggggcggaggccaccgagagagaaagacggcacgagccgagccaccaacagaaagaagcacaaggacacaacaggcagcgacacga

SEQ ID NO: 173359 - DNA, 479 bp, Arabidopsis thaliana
  unsure (1)..(479): unsure at all n locations
actcactatagtgaaagctggtacgcctgcaggtaccggtccggaattcccgggtcgaccctcgcgtccgcggacgcgtggggtttccctgccttgatanagttatcaagtccgcaactgaagctagtgatggattcattatctgggcatttagacatactgagagaaatattgctgaaaccggccttaatcttttcgttggagatgctgaaaaactttcagcatttttaattttgggaacaaacccaacgggccttacctttttgcaaatcgggccagaaatttttcgccgttttgcccgaacccttcccaataagccggggtttaaagtaaaatggtgggggggctcggcaacacctttttttcccccccccaaaaaaacgggttctttacaaaaaaccctttgggggggggccctaacaccccttctttcccccgttttggggaaaaatgtttttttttttttccaaaaaccccca

SEQ ID NO: 173360 - DNA, 553 bp, Arabidopsis thaliana
  unsure (1)..(553): unsure at all n locations
atgaactctagcgctactacgactcactatttggaaagctggaccgcctgcaggtaccggtccggaattcccgggtcgtcccacgcgtccgtgatgccattgttaacagtggtccacgtgaagatgctaccaggattggatctgctggtgtggttaggaggcaggctgttgatatctctcctctaagacgtgtgaaccaagcgatcttcttgcttacaactggtgcacgtgaagctgcctttttttacatcaagacaatcgctgagtgccttgctgatgaactcatcaatgctgcanagggatcttccaacagctatgccatcaagaagaaagatgagattgagagagttgctaaggccaatcgttaggggatctccctttcctctaaagttgcattatatcaaagagtttttgtgttgtttccattagctttggatatggttcagatgatctctctatctttaatgaaattttgacgcttataatcgaaaaaaaaaaaaaaaaaaaaggggcggccgctctaaaaggatccaagcttacgtacgcgggcatg

SEQ ID NO: 173361 - DNA, 544 bp, Arabidopsis thaliana
  unsure (1)..(544): unsure at all n locations
cgactcactattgggaaagctggtccgcctgcaggtaccggtccggaattcccgggtcgacccacgcgtccgcttttctctccagatttcgattcccgaggctcgagagaaaaccgtaaatctcttctccgttcactcaatcaaccaaagatgcgtgagattcttcacatccagggtggtcaatgcggtaaccagatcggagccaagttctgggaagtggtttttttttagcacgggatnganccaaccggaagggacaccgggagactgaaatcctcccgtggaagccatgattttttgctaccctgcgacgcgttcgtgtgttagttgttgttttgtctacccctcctctgctccgcccccccttaataattttttatatgtttactccgatctctcctgcatggggccgattcgcgcgttcaattatgataaaattagttcctctcccccaggagggatgggcggtgtgtttatatatcatgcggcctgcactcacgtgctttatgttgccggggcccgcacaccgccccccccccccccc

SEQ ID NO: 173362 - DNA, 906 bp, Arabidopsis thaliana
  unsure (1)..(906): unsure at all n locations
actatagctgagctatgacgacgcatgcacgcgtacagtagctaggatcctctagagcagccgccctttttttttttttttttaaatcaactcttttttattcatgaaataataaaagtacggaattttctctgttttctgactgaattaaaaatgctgtgagccacactaagctcataggcggcgagccacacaccagctctctcacacaactgccaaacccagggcaaaggctgggcctgcaaatcacatcacaccttacgtgcgaccgccccacaacgaccagggcggagcacgacgcccgcaggagaaccggacagcaaggggcccaccgagccggccccccctagacgccacccccctaaatccgcaacccgcgcagacccgcacccacccctatcgccccgccacccgcgaccccccgcggaatgcgccccacccacacgacacacccatataccaccccactatcgcaccctccccccccccatccgccctactctgcttcgtaacgctctccatccccccacccccgaaccaccgcaccgccaacgtcgccctgtggtaccccaccacggcttcccacccaactcaccgaggaccacaccaacaacaaacacaacatgccccacatggcagtacctccaacccccccgagccgaccccccaaccccccccagcccgcaccattgccctcctccctgggtcgagcgcgaccgcacagacattaacacacatccaacgccacgcctacgatccgccgcccctctccggtccccgtatctcctgtatacccccnccggtcacacgcaggtgtcccagcacgcccccacgcgccccacacgagccactcgtacccccgataataaatttcctccaacctgctcgcccatgcccgcgcagaag

SEQ ID NO: 173363 - DNA, 374 bp, Arabidopsis thaliana
  unsure (1)..(374): unsure at all n locations
aagctggtccgcctgcaggtaccggtccgngatcccgggtctacccacgcgtccggtttgacggtgccacgaagaagaagaagacgaagatggattatcataacaagcttgttcttgctcccacggttcgtgtgaaaacgattattttttttattaatatattattgagacatctttacacctgccaaccacaaaatatttaaactttcctctttttaaaggttttcagaacccccccacatctcctgctattaatacctacatccaaacctttttaatatcatactcaccccctacaccaccttctttaaattttttttttcttctttccatctgcccatatattcaccgcttaatactttaaaaagatttat

SEQ ID NO: 173364 - DNA, 705 bp, Arabidopsis thaliana
  unsure (1)..(705): unsure at all n locations
ctatgacgtcgcatgcacgcgtacgtaagcttggatcctctagagcggccgccctttttttttttttttgtgagaagcacacaaagagttttaaccatcgataaccaaatcatgcagctacaattactactacaaatccatgtttaaggaaactacagcccatgtttaaggaaactacaaggtttttttctttttaaaaacacagaaccaagccatatattttttttgtctgcaaatcattccatggatctgattttatcactgcaaaggtggtgatacgatttaatctatatgcgttttgtcttctgcatctaggggttgaatataagtaattgatatccgtataccatgagcttctgtttttattctctgtatttttgattttttttttttttctttcatcgacgagaaatagtgcgccagcgcgtttttttttaccttctacttatgaacaattgattaacnacacctccgcagaactattaagccaccataatagcaacatccgccccccggtttagtccggtcagggcgctatgtgataggaggacgctgtgtgccccagatggaaatgcgaaacaagtatgtgtaacacattcgcaatgtataatttagactcttttctccgcactcacccgccgcacactttctgctgtcttgtttggtcgattatatcgacgctttttacgagatacatatattatt

SEQ ID NO: 173365 - DNA, 600 bp, Arabidopsis thaliana
acactatagaatagctatgacgacccatgcacgcgtacgtaagcttggatcctctagagcggccgcccttttttttttttttttttttttttttttttttaagagctgacgatgttcttaaatagaaggttgcaaaacaaagggaacaagtcaaggataacgatgtcgaagggtatcaaaagctaatagaaagcaaacaaaaaacttttgtaaaagccaaaggttaggacaaaggtagcaacaaatcaatattcagaattggagatgacatcgtcgatctttaaaatcatcttagcgacttgcggagctaggcaaatttggttgttgttccccgatcaatgttaaaaacctttgtgttccttaaattggttggcccccacggaattggaatttattccaatagaggggaatatttctccttaatttggtgaaaattaaaccgcaaagaaggggctaatggggctgaaatccattgttttctgacagaccctagggaacgaagcccaaagtttttgcaaccgccatattggttactgctccacgccggggttttattaacagctgcatcaaccgaagggaccaagcattttcacctcccca

SEQ ID NO: 173366 - DNA, 560 bp, Arabidopsis thaliana
tgatacttcagctctctacgactcactattgggaaagctggtcacgcctgcaggtaccggtccggaattcccgggtcgacccacgcgtgcgagatgttgaagtcgatgattcgttttatatgagaaagtgtgtggagctagcaaaaagagcaattgggtgtacaagtcctaatcctatggtaggttgtgtcattgtcaaagatggtgacattgttggccaagggtttcatcccaaagctggtcagcctcatgctgaggtgtttgctcttagagatgctggagagttagctgagaatgctactgcttatgttagtttggaaccatgtaatcattacggaagaacaccgccgtgtacagaagcattgattaaggctaaggtgagaagagttgttattgggatggttgatccgaatccaattgttttttcttcgggtattagtcggttgaaagatgctggaatcgatgttactgtgagtgttgaagaagagttatgcaagaagatgaatgagggattcatccatcgaatgttaacagggaagccttttctcgccctcaggtat

SEQ ID NO: 173367 - DNA, 539 bp, Arabidopsis thaliana
  unsure (1)..(539): unsure at all n locations
ctacgactcactattgggaaagctggaccgcctgcaggtaccggtccggaattcccgggtcgacccacgcgtgcgcccacgcgtccgaaaaggctcatctttgcgactgctcccgtgttcttcgtctctctgtcaatggctcgcctcctcagatgtctgagaagaagtttcatatttagttcatcgacttcgattgcgtacagaaaccctagaatatgtgntcagttctatttaaggggggtgttgcacaagcagcccggagtttgctcaggataggggaccgccctggacccacccccgcacccgccccccctttctttgtcgatccggaccgccccgcggccctccccgcggtgtttggtgtgaacggctgcctccgcgcacgcccctccgtggtatggccttccttcgtccaccgccacgtatgtctcctcttatgccgtcccccccgccccgccagagcccgttatgatctatgctatcgtcacacgtaatatacgtgcttgtcgaatggcgggccgcccccgcctccctctccc

SEQ ID NO: 173368 - DNA, 997 bp, Arabidopsis thaliana
cgcaagcacgcgtacgtaagctaggatcctctagagcggccgcccttatctttttttaaaaaaaaaaaaacaacaacagagggaggacaagacaaaacaaagacggaggcagacaaagagaagacgcggacagaagggacggagacaaacgagggcacaccaagagcgcaaaggaccagaaaaccacaactccctcccttcttgaggggggggagccacgcaagaaagaggagagcggggccgagagcaggcccgacccaaagagacaccaacaaccacgaagcgcaaccacgcacacgcaaacaagaaggcgaaagcgacacaccacaacagagagagacgcaagagcaaacaagagaaccgagaacaagcagcacccccaacgaaaacgccccagaggcaggaaacagacgaaagagagaacgcgagaaaagaagagagaaacagagccgcgggcgcgcgacccaacgacaacaacaaaacaaaacgagaacacccaccagacacgacccacgcccaaacaaagaccacacccgcacacgaaaaaggcgcgaagaacaacgagagagaaaacggcggaggcggacggccagcgcgaaacacaagcaagaacgaacacacgacccggaaacagaagaccaacagagaggcgaaacacatgaaaagaggcgagggccacacgaaaaacagagaccaaccacaaaagcgaaacaccgcgcccaccgaagaccaccaaacgacacaccaccaacacacacgaaaaaaggacacccgaaacaagcggcgcccaagaccggacggggcacagaggggacaagaggcgaagagggagagccagccagcaagagcaccgaagcagagaccccaccaaaagacgcaagcaccgccccccacggaccagcaagagacgggccacgccacgaccgcccgcccgaacagcagagaaaccccggacaaaaagaaagacacgcgacaaccacaacaaccccacgaaaag

SEQ ID NO: 173369 - DNA, 476 bp, Arabidopsis thaliana
gctgaccgcctgcaggtaccggtccggaattcccgggtcgtcccacgcgtgggcaaacctaactctttctctatacaagagcgcaagctcgaaggcgctcttgatctttcttcatttactccttaacaatgacgctgatgagggacttgaaaagtgtgtgaaagaagggataggatggcggagtgtccatggggctgcaagaggtttctctttttgagggggtacaagacgcgaacaccgattagttctgggaataagctttgcttagagtaatcgaaaatagagtgggtgagcgtggactacgcaacactgtgcgttttaaatagagtcttagcctactcctctccgctagtcctgctctattatattacgtggcgctatatattccgcacggctctctcttctgcttcgcgcgtcacagtgtctgaactgtaattacaatcgactgtggattactcggggtgtccggaaggtcg

SEQ ID NO: 173370 - DNA, 951 bp, Arabidopsis thaliana
tgagccgacactatagtagactatgacagccgcatgcacgcgtacgtaagcttggatcctctagagcggccgcccttttttttttttttttttttttttttcagaataaggcactaaacttgatccattttcttaacatgtcactcattacaaagacttaactttaacagcttcactatcaccaccatcaccatcaataccatcatcattttcatattaaatactcttccaattgccagcttaaccaaacaatgactcttttccaaaatatgctaaattctaacttttaactttcttaaaacacataagaaacaaaatgatgaagtaaacaagagaatgaaaaaaaaaaaaaaaaagagagagagaaagacagattgagagaattgattgaacagagaagaagaaacaattcttgcttgaagtgtgaacaagattctcaaaacaaaaaaaaccctagaaaattatgaaaaaatggcaaatgcaaaaagacaatcacccaatgaaggatgtgatgcgcgctgatatacgcggtaaccgaaaggtaccggacgcctgtaaactatttgtcaggcccaaaagtgggtttatgcccacctccatgcccggtatgagtagtttgtgcggtgtctgcccgctgggcagatggaagggatgcagataattttttttgctttcgcaagtgcacgcggagatggtaagtcgcttgtatgtctttgatgcaccaccgatttccgccctctcgattacgtactgcgtgaaacgccatgttaagcgcgcaccacatatccacgcgcgaattgtttcgttcagttctatgacgcctatgtagtttactattctcccgattttctcctcttcttgtcccggcgcctgctgccgctccccgcgctttcgcattttatctccggttgttttttgctcgccgtcgttcgcgttacaccagttgatata

SEQ ID NO: 173371 - DNA, 493 bp, Arabidopsis thaliana
actatagaattagctatgacgtacgcatgcacgcgtacgtaagcttagatcctctagagcagccgcccttttttttttttttttatatcaaatttatcatttatctttagtttcagcattttacaagggctccttgtatttcttatagatgggagccacaaggtacaataccttcggtccaaaaaaaaattaaaggaaaaaagactttctcaagaagcagggctcaaggaggcactaaacaaattaatactatctcccccaataatcccataagaaaaccaaccaatcctcactataaccctaaaaaaaaggaaagacaacacagaggaaaaagataagagcaaattaatataacacaaatacagaaacaagtatataatcaatacaacaaaaagaattagaaaacaccgtaacaccattgacatatctctagcacagatgttgtaccccaatataaaacacaaacataaacaagacagcgcgaatcaaatag

SEQ ID NO: 173372 - DNA, 524 bp, Arabidopsis thaliana
  unsure (1)..(524): unsure at all n locations
ctggaccgcctgcaggtaccggtccgngattcccgggtcgtcccacgcgtccgcaagcagtgacttcgatggctggcttacgtggagcctctcaggctgtccttgaaggaagtttacagatcaacggctcaaaccgtttgaacatctcaagagtctcggttgggtctnagagaaccggacttgngatcagggctcagcagattttttttttcgggggtggtgagccccccncagtgatcgcactcatagaatcttcctccgccggggtgttgtgtgcttcccccttacgcgctccctcctggtacgttcttttattgatggtctcgctcctacccctccgtcttcctcctcccttatgtaactgttgtcatcccctctcccccctccttttcccttctcccttctcttccattatcattattctcccctcgctccccccgcgcccagaagactttttatttttttatattttgtcttacgcatacgttgtgaaagatggcgcgacttccccccccccccccccc

SEQ ID NO: 173373 - DNA, 530 bp, Arabidopsis thaliana
catgcacgcgtacgtaagcttggatcctctagagcagccgccctttctttttttttttctttttttcatgcatcacatttgaatttctgatttataaatagtagtccgagttaacatgaaaactgaaatgacagagaggaatgtacaacaaagaatcaatcagatccctccggagtttcctctatttttggggggggcgccgacacggagacaacattttgctaactcccccatacgacgatcacaacacacatcccaacaagaataaatatattgactgatacgatccaccaaccgaatcacttcccactcataccaccacccaacccaaccccccaatattacctccactcatcgtctcattaacaccactcacacaccaccaatcatacaaatataatcaactacacctttccgatccttaacagtagctttacttctatataaaacaccaccccacccagagctgatcacccccgaaagatgcgaataccgctcacccccgcaccctttttaaccacacacccgct

SEQ ID NO: 173374 - DNA, 894 bp, Arabidopsis thaliana
  unsure (1)..(894): unsure at all n locations
gcactatagctgagctatgacgtcgcatgcacgcgtacagtagcttggatcctctagagcggccgccctttttttttttttttttttttttttttttttttttttttttttttttttttttttttttttttttttttttgttttctttttatattggtcaaaatattttttgtttttgtcaagggggaaaaaacaaccaatctttggggtgtgtaaggaaaaaccccaaaaaaaaaacgcatgggaaaatttttttccagggccgggttttgggggaaaagaggcaaggggtaaaattttgaaaaaaaaacaaaggttttttattaccccagggggggccggggggggggtctcaatggggggggggggggcaaaaaaacttgtggttaatacgctcataaggggaaaaaaggggggggggcaaaaaaccccctttttgttggggcttttaaaaattctaaaaaaataaaaaaaaacgtttttacggcgttttaaaaaagacccggtacccggggttgtctgcagaaatgagaagaaaaatataggtngcggtggaggtcccgtcaaaaccccggaaaaagtattaaagtttcttggagaggggggaaatgcggatttttattagcaacgggccccttatgtgggggagttggaaaatgtgggggaaaaaaagggggggggggtggggaaaaaaaaaaaaaggaggggcacagaggtcgtgttgagaaaacaagaggaggaaaacttggccccggggggaaaggaaggggtaaaaggaaaggggggcgccccagaccaagaaaaagggccggcccccaaggggagaaaaaaaggggcccagcgcggccgtattaaaaggggcgggggggcaaaaaaaccgctaaagacccgggg

SEQ ID NO: 173375 - DNA, 788 bp, Arabidopsis thaliana
acagtagcttggatcctctagagcagccgccctttttttttttttttttttttttttaaacaggaaaaatgaaacctctctttctctcatatcacaacagcctgagtacagaacacaaaggacaaaacagaagaagtgaagaacaaaatacaaaacacaagcaatttttgttttgaggatgtggctatatacgaggaatgggcacggacactcgtccctaaaatgagaatgcaagaatgacttgacggaccacctacaagtaacaaaccgaccgctaataccccaaacacctgagctgcagccaccaatccaaccacataaacgagactaacgtaagacatgtgccttctgcccgccctatgcaacatcgtttgcgcctctaatctgaaatagcgaaagataacacaaaatgataacccccccatactttcttatccccaccatttacttatccttccccccgccattattatatatagacttcgctgatcaccagtggtagccatgcccctcccgcttggagcaagaagagactacgtgccgatccggttatcgctcgcgcacatgtttccatgacgacgacaggcgcgtagagttagccggtacttgattatggtcggaacaataaatagaaaacaaagaccacatcatcaaattctaacaccccctacccccttttgcttatacaccaatatcaccccactatttacatcaacacccgcactcgcacgaggtaggcatcggtcctaccacccctcttctgttctcaccatatattctcccccaat

SEQ ID NO: 173376 - DNA, 536 bp, Arabidopsis thaliana columbia
atgatactccaggtctctacgactcactatagggaaagctggcacgcctgcaggtaccggtccggaattcccgggtcgacccacgcgtgcgctggtggtgaattgtttgatagaatcattgctaagggacattacactgagagagctgctgcttctgtttgtagacagattgtgaatgttgtcaagatttgtcatttcatgggtgtgttgcatagagacttgaagcctgagaatttcttgctctctagcagagatgagaaggctttgatcaaggctactgatttcggattgtctgtctttattgaagagggaaaagtatatagagatattgttgggagtgcatactatgttgctccagaagtcttacgtcgcagatatgggaaagaagttgatatctggagtgctggaatcatcttatacattctactcagcggtgtgcccccgttttgggctgagactgagaaaggaatatttgatgctatattggaaggccatatcgactttgagagccaaccatggccgtcaatctccagcag

SEQ ID NO: 173377 - DNA, 277 bp, Arabidopsis thaliana
  unsure (1)..(277): unsure at all n locations
aaatcttccactttgatttntgccgaacccaaaaataatgggccaaaacgtaaatgggctaatacaaagcccaagatcagacgcgacagggtggttggaagcatattttgtacataccccgggggtggcacaaanacagggtaaaccaaatgaatattatcatcaccactaatctatttgttctctaaaaggctccatggggattatcaggattcctggttccactacctttaaacgcaaaataacccgggggtggttttgggggataaataacagg

SEQ ID NO: 173378 - DNA, 508 bp, Arabidopsis thaliana
  unsure (1)..(508): unsure at all n locations
cctcggattcggctcgagattctctttcagctgtacggactcttggtatcctcttcgccaatcttgtcaactatgggaccgcccaagattaaggaggttggcgatggaggttctccntaggctccccccccccccccccccctcctnctccccctcccccccccnnnnnnnnntntnccccnctctcttttttncgnntgtgggcccncccccccggggggcttaataaaaaaaatatcccccnntggtgggcccccgccccccccccctctcccccgcccccccctcttccccgcgcccctttccctcccggcccctcctcccgccctccgccgcgctcctccccctcccgcgccccccctctcctcgcgccccgccctcctgttcgcttttgtgccggggcccctcgtcgcccccccccccccctcccctcccccccccccccctccccctcggctcccggtgtttccctccgcgccccccccgcgccgccccgcttcctccccct

SEQ ID NO: 173379 - DNA, 499 bp, Arabidopsis thaliana
  unsure (1)..(499): unsure at all n locations
ggaagctggtacgcctgcaggtaccggtccggattattcccgggtcgacgagctcactagtcggcggccgcccttttttttttttttttttttttttttttttttttttttttttttttttttttttttttnnnnnttttnnnnnnnnnnaaaaaaaaaaaaccattttttaaaatattttgaaagtttttttatttttatagggaatgaaaaaaaggggtataacctattaaattaaaccatattagaaaggggtaaaaagagagacatgggctcaatagatgagcccaaaaaaacttttattaatattaaattttaaaaaaaaaagtttaattatttggggcaaaaagggaattttacgcactttaaaaaggagccaaaattgcctttgaaattggggttattttcctgggaaacaaagccaatgatcatggccttcttggagctctactgagtctaaaaaatgaaaaaaggggaactttttccattttttacaaat

SEQ ID NO: 173380 - DNA, 567 bp, Arabidopsis thaliana
  unsure (1)..(567): unsure at all n locations
cgactcctattggggaggctggtccgcctgcaggtaccggtccgnngattattcccgggtcgacgagctcactagtcggcggccgccctttttttttttttttttttttttttnnaanannnnnnnnnccaaaaaaagaaaccattatttattactcattacgcaaaaggggataaaaatctcaaaagttaaaaaaacaattacataggggaagattcccgttttttattcgggggggggggggcaccccaagaaagaacacacgctaaatctctcccctgccaggtacttgagaaaatgctcgcacttagcctaaaatgtagggaaatcggggatcgtgtccaccttcccgacgagccaactgcagatgttggtggctaggcgccctacctcccgctggccaccgtcttcctcccgcaatatgtgttgctagatttttctgtcttgcacacgcttcatcgttgcaatgcgcggaccacgcctgctgctggcggtcagtctatccgctacggaggtatgttatatttatggtttatttagcgcgctctcccctcccgcgccccccca

SEQ ID NO: 173381 - DNA, 438 bp, Arabidopsis thaliana
  unsure (1)..(438): unsure at all n locations
atagaagagctttgacgtcgcatgcacgcgtacgtaagctcggaattcggctcgagtctatatcaagattccggtattggatcgtcgtcgtcacctagcaagagatttaacggcggcggcgttggagattgttcgacttctatggcggcgacgccgttaatgcagaaccaaggtgggatttaccaattgcctggtttgaattggtattcttgaaaacaatttacttatgaagaatttttaaaatttgtgtatatatatacggtttgagtgattagggggcattgggggattttatttacggttgattattattgtagtgntatagaactaangagattaaattaaatagattggaggagaggtataagggtaaatatagaaattgtaaaaaaatagggtaaaaattgtgtggtttggtttgtgatggtatttattgag

SEQ ID NO: 173382 - DNA, 340 bp, Arabidopsis thaliana
  unsure (1)..(340): unsure at all n locations
gtcgctagcangcgtacgtaagctcggaattcggctcgagaaaataaacccttgagaacatgtccttattctttcttcttcatctacaacaantggctggagttngcctttggttcctnttgaatgatccattcaaantttgtncttccgtctttatttcacgctcggcgcgggcgtatgataccacaaaaaccaagagggaaaaaagaacattaaaaaaatatcncgtttantttgggagttgggggaacacccacaaggggtnacaatactaaaaaaaaaatnccccccacatanccgggggggcacagagaaacccgctaatgtagagaaccaaccc

SEQ ID NO: 173383 - DNA, 462 bp, Arabidopsis thaliana
  unsure (1)..(462): unsure at all n locations
cctgcaggtaccggtccggaattaattcccggttcgacgagctcactagtcggcggccgccctttttttttttttaagggcggacnnntatatgagagaagagagggggggagcacagagaaatgagcaagctaagattttagtgattgaacttttgagtgagtatacatttaccgtcaagagggaccattacggcacttttgtcattttcgggggtttgggcgcgccgccagcgcacgggtggaagagattgtaagccacaggaggcctcacaagatcttgcactctcgttccaggcggctaataaaagttagtatcagcgcacagcttcgcggccggcttcctggaccgactgcgcgttttttatgcgacgcgaagctggttcttgcagtttgcgaaacggcggcccccccatcatcaatattatatgtgatactcgttattatgtacatgcacgaagca

SEQ ID NO: 173384 - DNA, 540 bp, Arabidopsis thaliana
gtcgcataccccgcgtacgtagctcggaattcggctcgaggtagtgtatgaagttgtgacgcactttgagagagtttcaaaaagaaactcaaaactgttgatatggagggttgttgtcagattcacgtttaaaaacgagttgatttttatgtctgtaagttatagataaaacgaattttgtttggacagaaaacccatgtaaaccttttttttttcctggggtgggcccaaccccatccccgtccctctcacaaataaagtcccctgagagcgcaccccccccccccgctcctcttcctcctgcctcccaccatcccttcttctctccccactccttcccttctccccctcccccccctcttcccccccctcccccctcccacacgctacgtttttcttcatcttgtatttccctctttctttatattttttttcctctatattcccccccccccctcccctcccccttcctctcaccctccctccacaccccacttcctctttacacccacctactctctctccctccccacttcatcc

SEQ ID NO: 173385 - DNA, 560 bp, Arabidopsis thaliana
  unsure (1)..(560): unsure at all n locations
tcgcatgccccgcgtacgtagctcggnanttcggctcgaggctatgagagccttgggatgatgttgtgnctgnacctcancctgaccgtggccttgnccgtctccgtaagatcaccacccaacccattaatantccgagatatacggagaagggagcagcagtaaggtgtgttattcatctgccccccgcccggagaggatgaagaaattttttttttttggggggggggcaccccctccccgggggaccttctatgaaaaaatttgggccttcacgcggccgagtgaccatctactcctcaccagtccgttcaatatccgccacattccgctcccctctcttacgcttcctctcctctcctaccccatctgtctcgtgatattttctaatctacctctcctcttactttttcttacttgcctcgtttctactttttctcgatgttttaattactctgttgtgccccccccgccctctctcttcgtcttttcttccagcggttccactccctgaaagtatctgtttgcctcccgcaccccgccctcgctacatttctcat

SEQ ID NO: 173386 - DNA, 540 bp, Arabidopsis thaliana
  unsure (1)..(540): unsure at all n locations
atagaagagctttgacgtcgcatgcacgcgtacgtaagctcggaattcggctcgagactggtaccgggatggtagtggagcatgaccatcccgaggaagagaagaaaggattagttgagaagatcaaggagaagcttcctggtcaccacgacgagaaagcagaggattcaccagctgtcacgtccacgccgttggttgtaacggagcatccggtggagcctacgacggagcttccagtggaacatccggaggagaagaaggggattttggaaaagatcaaagagaagcttccaggttatcatgccaagaccactgaagaggaagtgaagaaagaaaaagagtctgatgattaagcanaatggttaaagaatgaataatgatgtgggagtgggacattcgctgngttntgtgatcattatctntctcttttaagttgntattgtggctttcgttgattgcatttgatcctttattttggaatttcattctatcttttatataaagtttgcatatgggttataaaaaaaaaaaaaaagggcg

SEQ ID NO: 173387 - DNA, 570 bp, Arabidopsis thaliana
actagggcgttagagtgccaatagcacgacaacgtacgtttatggtataacttattgattataatacagcatacaaaggtacccttttcagggaccctttcgtatgttgtagctgataatattttctaactttaactctatgactcgcacaaaaatagccatatagacacgccacataactactcaacaccttaataaaacatatacataccaactgaagaaaagcctcaacaatttttctctgtgggggaacacatttatacgggatggcaacaactagaaaccgaacccaatcttccattggtgctatcgcacagaagaataaggcttcctggactgggacacctgctgctggtgatgacctgaacaaacggtgaagagctggtaccacaagcgcgtaacgagacgcctccgctgggccgcccccgggacaagcaacggcgggtagtcgcgatcgcggagggcgccccgcggacgcacgccggcccccccgccaatcgcagactaagcgacaccgcgcccgacgaacgtttattcaccttataacagccacccccccccccccccccc

SEQ ID NO: 173388 - DNA, 530 bp, Arabidopsis thaliana
  unsure (1)..(530): unsure at all n locations
cgtcgcatgcangcgtacgtaagctcggaattcggctcgaggcgaaaatggctggaagattgagcggtgttgcgtcacgaatcatgggtggaaacggcgtcgttgcccgatccgtcggttcttctctccgtcaacgcgccggaatgggtctccccgtcggcggacacatggtccggcgataagcgcggtataggaaaaactacgagctgttgttgttttagggggtggtgcaacccccaaagcagcttgattagatgaaaatagatttccccgaggggggggggcgccgcgtaccaagatctctttgcgtcctatatgcttccatgccttcagcataataacactacaatctactccgcctcgtctcatatttagcccgcactccttcccactactttttatgtattcaatattcactaactttattttatttttctttttctatactatctgttcccgcgtctccacgtcttttctctatatccctgcttcctcgcttttgtaaattacggttctattcggctacatcg

SEQ ID NO: 173389 - DNA, 454 bp, Arabidopsis thaliana
acgggctagccgcgtacgtaagcttggatcctctagagcggccttcctttgggggggaagagcccaaacacaccacgaggtagagggtaaaggtcgagcatcgagcgcaccggcgcgcagggtaggcggtgacaagcaaaatcaactcccacgaaacagagaaaacccattaaataagggccactgcccccacacggaaaaacacaaaagaattttttttttaagggggggaggagcgaacggaagagagagactacgataaaagagacacaatgtagagatgagtggggcctgccagaagccgagaccggtatagagcagctagaatcaggaactcctcatattaccatacatgcctggtgcgccaatgcaacagcgacacagaggcatagcgaacgctacgccgagatctagatcagtgagaaggagaagcagaagcacaacgagagagcat

SEQ ID NO: 173390 - DNA, 523 bp, Arabidopsis thaliana
  unsure (1)..(523): unsure at all n locations
cctgcaggtaccggtccggaattcccgggtcgtcccacgcgtgcggctgcttacattgnctcacaagatcagccacacatcgtcccaatataagacaaatactgaggctactaagagatgaaaacgaagccgggaaatggattatggaagaagaaggaaatgaagattgcttcgatgacgaggtttacccgaatcctagttttagagggggactgcaaccttgcgatgctcggggctagacagtgtgctgcgctaaggcgcgcgggtcctcggcgctcacagcctgtttttatatttttctgctcgctatcccagtcctcccgctcgcgccctagggtaaatattagttccgggcaggtgccgcatctcagctcgtccgcccttcctttttgagtcatagcgtgactacgtgccggggcgtgagcagtgcctccgccgctcccttctttgttcgtttggagcccggtccctgggggaaataattttatgaattttgttctaggggcctcccccccctcccccc

SEQ ID NO: 173391 - DNA, 515 bp, Arabidopsis thaliana
  unsure (1)..(515): unsure at all n locations
cctgcaggtaccggtccgngattcccgggtctacccacgcgtgcgcccacgcgtncgaacctggatcagatctagtcaggggtcagattggagagcccgcaatataatggcagcggcgagacaactacggacggtacgatatacaggcgtattagaagtctgtgtacccacggacagaacctcgttaagaaatttgctcctttggggggggggcccccaccccgcgtgtatctttattaaaagtgcccccccgtctgggcgtgcccgcgctcactctgttcttatactttaattttgcataatcagaactccgtactccctccacgctggatggttattaatcatatgttacacacacttgctttctttatgctcctccccacttatattgttttgctttagagattaaacatttactgaacgggatgatcctaccttactcccgttgatcagcagccaagccgcgctgttgtttttattttttatttttttctccccccccccccccccccccc

SEQ ID NO: 173392 - DNA, 482 bp, Arabidopsis thaliana
  unsure (1)..(482): unsure at all n locations
cctgcaggtaccggtccggnattcccgggtcgtcccacgcgtgcgcccacgcgtccggtcttcctcactcttaacgaaaatggactctttaacactcttcttcaccggtgcactcgtcgccgtcgggatctactgcttcctgtgatttccctggaatgtttattagaaaaacaccgtcgacccatttacgaatttttcnatttgggggggggaaaaccaccgacccatctcaatggtaatatatctctaattgcggtatcacccactctcccttcttccactatattggttgttttactgtaatgcagttctctacttcgccatatttgtttgattctatatcttctccatctagcagtttcctctccccaattttttattatatattacaaaggtctgtgaaagccgctctaacagcatattcgttttaattatcagcctccccggagattttataatttttttgtgggggccgccccccc

SEQ ID NO: 173393 - DNA, 508 bp, Arabidopsis thaliana
  unsure (1)..(508): unsure at all n locations
cgtcgcatactgcgtnacgtagcttggatcctctagagcggccgtcctttttggggtttttttttttttttttttttttttttctctttctttnaaaagggcaaggcagcttcttcttctttttttataacaatttggggttttacatttgattcttcgatctacaaatagaattcaaaagacgtgtctggttgataaattggaaaatttcgataaccgggggcggggcccacccgagggggaatactagcgtaaaatgggcactggctcaacccgctttagaaggccccactacctttggcgtctcccccacccaagcccaccgcggacggcttcgagccaccaccacgcctgcgttagccccaaaccctgcgccttcccttactccctcacccccctgctccacctattgtgtctcaggtctctgttgccccccgccgcggtccccggcacgtctcttcgccccgggtgaggtcgcctccgcgcccccccccgccccccgcccgac

SEQ ID NO: 173394 - DNA, 471 bp, Arabidopsis thaliana
  unsure (1)..(471): unsure at all n locations
gtagcttggatcctctagagcggccgtcctttttttgttttgggtcgcnnnnnnnagcacactgaagatcatcagttattggtccttttttattacagaagacaaatcaaagaagataaaaagatcttccctttagaaaaaaacagaactgtagtaatgaatataaaggaagggngangatcatncctttggttgtaagggtgtgggggacgcncccaacagggccctggagaaaaaaaaaaagcctccagcaaaggggggtggcaggaacccccacaatttcacccaaacacgtcgggcgcgaagagatgcgatcgcaggcctttagctctcgggcggctggatgtagctaagctcggagacactatgggtcgcactagttggatagcgcgcggtgggttgggcatggtagggaggagaattggaggtgggagggcccgcgcccgacccacgctccagcgggcggcgaga

SEQ ID NO: 173395 - DNA, 534 bp, Arabidopsis thaliana
  unsure (1)..(534): unsure at all n locations
ctggaccgcctgcaggtaccggtccggaattcccgggtcgtcccacgcgtgcggagtgccaccaccaccactaccacaatcccaatggcttcaccaactcttactctcctcctcctcctcaccaccgtctccttcttcatctcctcctccgcagatcctgacatgcttcaagatctctgcgtcgctgatcttccctctggaatcaatancatatgggggtgcttgcaaagacgcagctacagtcacatcagccgattccttctcacaaggattagctaaaccaggccttaccaacaacacattgggtgccttaggcacaggagctaacgtcgtgacaacgccaggactcaacacacttggtgtgctcgcttcctagcaacgaccgcccgcccccccgcctcgacctgttgtccctgccccggtccgtccactaccccccctgctacccgcacccccgtccccgcgatacgggtggacggcccccctgtttatcttatttttctttctcttttggggcgcccgcccccccccccc

SEQ ID NO: 173396 - DNA, 564 bp, Arabidopsis thaliana
  unsure (1)..(564): unsure at all n locations
cgtacgtaagcttggatcctctagagcggccgtcctttgttaggaaggggcgaaacaaacaaaaannanannancnannnaggaaaatattttaaaacaacacaagaagaaaggccccggaaaaacggggagaggaggcgaggagacgacgcgccgcccaccatataaagctgaaggcccaacaggggagagaattaaaaaaaatttttttatttggggttgttggggaccaccccccctaggggatacgaggcaagaaaaaaaaaaagccccaagggcgtgggggggggagggcggaccccagctagcgaagcggtcgagatgacgaccacggacagagcgagaaacgagaaaactctggcaccagagaacgaaaaagagagacgcatccgcacgccgcggacaaacgagcgangagaaaacaacagccaacaacagaaagaaaacaaaatgaaagaaagaaaaagagaaaagaggaagagaaacggcaaaacacccagaaaccgttaaagcaagtacgaacacagtcactgtaatagtgaaaaatagcgaagagcaacgcga

SEQ ID NO: 173397 - DNA, 515 bp, Arabidopsis thaliana
  unsure (1)..(515): unsure at all n locations
cctgcaggtaccggtccggaattcccgggtcgtcccacgcgtgcgccaagccaaaaatctcatagatcagagtcgtcgtcgtcaacttcatcatcacaaaaatctcagctttgtctctcttattcctcccttttctgctccttccgattcttcatcgcgccacttgncttcttcttcttcttccgatatggctggggctgattccggggggtgtctccccgctactcttgacaccatcaacccncaggccctcaaatgggagtttgctggcccgcccagaaattgtccacatttgtccagaattggccagaagattcgacggcctacacggacgcttatcccctttctgagattgcctaccgctagccgcgcatcccccaccctgtttgttttttttttgacacgcttctatctgttgtcccccctgtcctcttgcccccgccgccctgttgcccgcagtctccccccggggaagtattttgtgtctttctcccgactccccccctccccccccc

SEQ ID NO: 173398 - DNA, 553 bp, Arabidopsis thaliana
  unsure (1)..(553): unsure at all n locations
gcctgcaggtaccggtccggaattcccgggtcgatccacgcgtgcggagcttcgcaaaattcttctgaatgaataatcggcgattatgtctttgaaaaacgatgcgagtagtagccacgacaggnggaagcaacagataatgcctactccctcataatgaatcttatttaatcgcccggccacagatttaacagccctcctacacttgggggggggggccacccccccaaaaaacaactcttaaacaaaatntccccccactacaattcctaacttacactcccccaatttacttaaaattaattttcttctacaattcaccctcacttacaccctttactctcaaatatttttaatatatttcaatctatcaataccatccttccttaccccccacacccacctctattcattttaaattcattttatctaccatataccaatctcctccccctccctctccatcccacccacacatatattattctttctcaactcctntatatatatttttaatttttcattttttccccaccccccccccctccccccc

SEQ ID NO: 173399 - DNA, 530 bp, Arabidopsis thaliana
  unsure (1)..(530): unsure at all n locations
gactttgacgtcgcatgcaccgcgtacgtagcttggatcctctangagcgccgccctttttttgtttttttttttttttttaatacaaattaactgcatctatagtgcagcacagcaatacaagttggggcttatattcatagaaataatattgtctttgctaaatctaaactcatacagatataaagggaaaaataaaagactcgagatactttagtttatattgaggggagangggnnctacaaccacaagaggttacacttacattaagccaaagtactaaaactcttctgtgcctgaaaatggattccgcaaggtctcgcgcctagcctaataatcctagggaaacccttgcaatgcccaatggcgggccccgggagcgtgggcttcgagtggcatagtgcgtggagccgggcagtgggttggcggggcttggtgtcgcccccccgcgcacgtctgggcgcctcggggcccgtgaggtcgattggaggtgtacagttcgtctcccccgcctcgccgccccgctcta

SEQ ID NO: 173400 - DNA, 488 bp, Arabidopsis thaliana
actatagaagagttatgacgtcgcctgcacgcgtacgtaagcttggatcctctagagcgtccgccctttggtttttttttttttttttttttttttttttttttttttttttttttatttaatttggttctgaacttgcgttagatgaataccacagcttcttctggcaaatcaagagcttctgattggctgaggcagactctgtttgttctttacggtaactccatctcagctctttagcaacagaagcaattgaatctgcgaagtagctcgattcgcgtataatcgcatacccggtaggacgtaagatcctatccatttccagcattacatatttcatatcacacctctggctttcagatgtaaacagcccatctacgtgaagaagatcataagttcttggatacgccgaaaaagcttcacaccagtcatgatatgttccgatcaatccacgatcaaacacaacgggaagtgtgtttgcagcataa

SEQ ID NO: 173401 - DNA, 497 bp, Arabidopsis thaliana
  unsure (1)..(497): unsure at all n locations
actatagnnagattatgacgtcgcctgcacgcgtacgtaagcttggatcctctagagcggccgcccttttttttttttttttttttttttttttttattctctttcttcttttctttatgagttttagtgtgtttttttttaaataaacaaaagcttttgttttttttagcccaaaccccccccgccccgttggactaaaagaaacaaacatgaaaactatatttccggcctaggggtttttgaacaaaaacagatctagccaaaacatcaaaccaaaaaaacatcagaatgacaataaccctctggttattaccggagccaaaggaaaaaaaaacttgttgtatcttaacaaaaccagccacttctagggcattcgacaccctcttgggggcattttgaatacacaatgactctttgcagaggataacaacactatccgcaccaaaagtgacgaaagacacacctgctcgataggtaggactgataaaacccgggg

SEQ ID NO: 173402 - DNA, 490 bp, Arabidopsis thaliana
  unsure (1)..(490): unsure at all n locations
actatagnagagttatgacgtcgcctgcacgcgtacgtaagcttggatcctctagagcggccgccctttttttttttttttttttttttttttttttttttttttttttttttttttttttatttttttttttttttttatttttgtcttttttttgttttttttttaaagaggggaaaattaatttccttttttcccggagaaaaggtcccccagttcttaaaaaccgtggggtttgaggggaattctaaaagggggaaaagaaaaacttgtttgggttacccagaactttaaaatttaaagtgggtaaaagatctctgggggtggggttaaaaatgcccccggggggggggcttttaaaacaaagcgcggggggtttcccctttgggccccccccaaaaaggaaaccgcccccttggattcccaatttcctcggggaaaggtttgggggtcccccgggagttgggggggagtttgtttttcggggaaa

SEQ ID NO: 173403 - DNA, 460 bp, Arabidopsis thaliana
  unsure (1)..(460): unsure at all n locations
ctatagnaagagttatgaggtcgactgcacgcgtacgtaagcttggatcctctagagcggtcgctcgcgatctataacctgtcccgacgcggcggcgcggccaaggcatggatgacaaaactgagccgattcaattccctgaacatatattctagcctggggatcagatcaatatgatcggatcggactgtcaagttgtttctgaactcaacaccaaatttttgtatgtataacacaacgagagcatatcatctaagctcgactggattgttatgaaagcaaagcatgacaaacacgtttcatgatactatggtgagaatagtacgtgacactgatattacgatctttacttcggtatatattgataatctatatgtggattgtgttgaggttattgtattaaaattttacgttgtgattgttttatcttattattgtttctaataaataattaatgatt

SEQ ID NO: 173404 - DNA, 449 bp, Arabidopsis thaliana
acgacaaagttagggaaagcacgcacgcctgcaggtaccggtccggaatacacggtttcgaccgacgcgtacaacctttcattgatgttctttttctaccaaacaaaaagtttatcataaactagaatatatctaaatctcggggcacaaataaaaactgggtgacaaaacaaaacattgtcaaaacaagaaagaaagataagtgaagagagaagagtggttttttatatagctacatgaaacggctggctaaaccaccatccattttactagtcttggctgcagaactctcggggatatttcccttaactagggactgctgatgctttgatgcatacttgaacttgtttgccttgttgtgttggtgggtgctgcggagtctgtcctaagatccacgaagggcagctagtctagcgttgaggaaaactgtcaggcttatttgctccgtg

SEQ ID NO: 173405 - DNA, 464 bp, Arabidopsis thaliana
ctgcacgcgtacgtaagcttggatcctctagagcgtccgcccttttcttttaccttttgtttactttattctttttttttttttatttttttcatccttctgtaaaaaaacacctcacgggggttaattcattaacatcatcaccataaacacaaaccccattacataagaagaaaaaaaagacgagccaccccctttcttgattagcggaggcacaccaacgcccacacatcactgtcgcaaccactcccccagaccccctgctcgaaatcaaccccagaataagaacattcagactattatttaagaaacataaaagaggttcactgcgctgcgcacccccccttactttcaccacagggggcccacgcgacgtgaaatataaatcctcccagaattttgggcttcataaaagaatcacaaacgagaatagtcagagaacaaagagtctcgtacgccaacgc

SEQ ID NO: 173406 - DNA, 495 bp, Arabidopsis thaliana
cacacacttagggaaagaacgccgcctgcaggtaccgggccggaattcccgtttcgcccacgcgttcagccaagtaaatctgacgttttagaaaatgggatcttcttctgggcaaagaggaaacaatcagactttaaagatcttgcagattaggtgatttcggtgcggataaaatcagtttgcttggcaggttaattcgtagctccgtttttttttcttgcgggactatacatgattatatcaggatcaaacaattgacagtctgaggggagaggttggaactcacaaagtgagacacagatggacaggaacagtttagaacagtgtgagatttttattacttggggtgcgtgagggaggaaggggggggagagggggtgagaaagcgtagggcgtatgcgagagatgaagttctgtatcgttatttggtcgagaggaaggagagcgcagagagcatcgaaggcacggcgacatgcggacaggggcaagggaggg

SEQ ID NO: 173407 - DNA, 488 bp, Arabidopsis thaliana
ctatagaagagttatgacgtcgcctgcacgcgtacgtaagcttggatcctctagagcggccgccctttgggttttttttttttttttttttttttttttttttttttttttttttatttaacttgaagctgaacttgcgttagatgaataccaaaggttcttgtggcaaactaagagcttaacattaggctgatgcaaacactgattggtctttacggttattccatataaggtctttagcaacagaagcaatagcatctggaaagcttcttggttcgagaataatcaaatacccgctaggacgcaagatcctatccataggcaccattacatatttcatatcacacctttggctttaagaagaaaacaggccatctacgagaataagaacataaaaggttggatacatggaaaaaacttcacaccactcatgatatgttccgatcaatccacgagcaaacacaacgggaagtgtgtttgcaacataa

SEQ ID NO: 173408 - DNA, 500 bp, Arabidopsis thaliana
  unsure (1)..(500): unsure at all n locations
gctatacacgactccataagggaaagctcgtcacgcctgcaggtaccggtccggaattcccggttcgacccacgcgtccgcccgaccattactctgttgcttcctgactcacaaaagactactgagagggcaacagtcttaaagagacgcgtctcggatcatcaggattatctatcttctcaggagtgcctctagactattacaaggcagcaatcgcgcttggaatctgatgctcagagtctagacgactctaactacatagactctagggggttaactcttctaagatcaaggagagttgctaaaacaatcctngctagatcatgagaagaccacagaaagctgagattgtgtcaatgacttttgcccacaacaaacttgactgatcctcatgcgccgactttcatgctatctagaaggcttgtatcgcgggaacatcatactagctgatagaagctgcagcgagagctgaatcttttttcttagatgacgaggactct

SEQ ID NO: 173409 - DNA, 518 bp, Arabidopsis thaliana
gaatttttttaggtacacactatagaagagtctatgacgtcgcatgcacgcgtacgtaagctcggaattcggctcgagcgaaaggaccacgtgaccggcgcgtgagactctcagctccgacggcgattcaattctacgatgttcaagatagacttggttttgatcgaccaagtaaagctgttgattggcttattactaaagctaaatccgccattgatgatcttgctcagcttcctccttggaaccccgccgatactcttcgtcaacacgccgccgctgctgctaacgctaaacccagaaaaaccaaaactttaatttctccgccaccgccacaaccggaagaaacagagcatcatcgaatcggagaagaagaagataacgaatcgagttttcttccggcgtcaatggattctgattcgatagctgacactataaagtcgttttttccggtagcttcaacgcaacagagctatcatcatcagccaccgtcacgaggcaatacacagaaccaagatctt

SEQ ID NO: 173410 - DNA, 495 bp, Arabidopsis thaliana
atacgactcactttagggaaagctcgcacgcctgcaggtaccggtccggaattaccggctcgacccacgcagctcagctcgtccagtggccgtccttcaattcgtcttcaaaaattcgttagatagagaagaatctaaaggcgcggtcagacataagaatctcttcttctcacgaatgacgcgagactattcaaaatccgaaatcgacgtggggaagctgatctaagaagcagaggacgcttactacaacaactaagctgaaactctctaagagaacgagtcttgcataaacagggaagaagagaaatcacaaccacgacaaacctgagaaggggtcaaggactgtgcccgagacagttttactgacgcttcttaaaggactctcgtgctatcatccacgggtgtatcgtaggatgagcatacttgcagaaaatgatgtccgcaaaactgcaactcatcccttagatgtagatgactctattcaaggcaaaactg

SEQ ID NO: 173411 - DNA, 499 bp, Arabidopsis thaliana
atagaagagttatgacgtcgactgcacgcgtacgtaagctcggatcctgtatagcgtccgacctgagggtttatcaatttttaattggttttgctcttggcgatgagatctgaaagcacatccaccaccgaactccaccacaatgaacccatattataaacctggaggtcctgattccgttgccttaaacacctaccaacctggtttcgagcgggtttttttaaaatggagataacagttaaaccgctggtactgtacacgacccttatggaatggcaagaagctgaactagacgaatactaattgttcaaacaattcaacttagtccctatgcagacgagaacaatgttcgagtccgaactgatgtactgacactcgatcagtgaggggtcatgatacaagaactttagaagctgaggcggatatgacggcggagaattggaattacataggctctgactgaacgggatgaccaggggacctagcacatcatgattct

SEQ ID NO: 173412 - DNA, 495 bp, Arabidopsis thaliana
ttacgactcacgttagggaaagcacgcacgcctgcaggtaccggtccggaattcccggttcgaccgacgcgctcacccatccgtgggcgaccttttttttgttcttatttttgaccaagggctgtcacgatgatcagatgcgccatcagcctttacaaaagagttggatcggttgatagctagactatatatacacaggcaccttgatgagaaagtcttcttttacgatccttacataaccaccgactacagatgcaacgtgttgctctatggctgtggctaccatctgagaaccccaatccactgagggaaggctcaaaagctctctgttacttgaaacactggccactgcggattgtatgaagaaacctgatggcatagcataggctgaggctgaagataacctaagtcgtagaacttactgctgaaaactactggcaaagacaaggactggtggtcactagactgacgtatccttaaaagcacgaatgtatg

SEQ ID NO: 173413 - DNA, 177 bp, Arabidopsis thaliana
taggtagcaactatagaagagttatgacgtcgcctgcacgcgtacgtaagctcggaattcggctcgaggtcgacggcgagcggagatagttctctcagatggaggttcgttggtagatctacaatggggaactatgactctcgacgacggcagcagatctggtggatttcttcgtca

SEQ ID NO: 173414 - DNA, 506 bp, Arabidopsis thaliana
ttaggtgccactatagaagagttatgacgtcgcatgcacgcgtacgtaagctcggaattcggctcgaggcgctatgtcgctctggagagatgctagagcctcatagcagcttctttctttgcagtctacacagcagcgtgagggcatggctaaaagctcgtccgcgccagaacctgacttaaacaagagaatgtctcaggctgcttggactagagcgaaatctcctgataggattgcggtaatgaggaatatagcctgacatagtgatataccaaccatgtacaagaaaaagtacctagtcccggctgatctgactgtggggcagttcgtgtatgtcattcgcaaaagaatcaaattgagtgcagaaaacgctatcttcatattcgtggacaatgttcttcctccagcaggtgcgctcatgtcttctgtgtacgaagagaaaaaggatgatgatgggttcctctatgtcacttacagcggagaaaacacatttggatttggatctc

SEQ ID NO: 173415 - DNA, 506 bp, Arabidopsis thaliana
aggacacactatagaagagtctatgacgtcgcatgcacgcgtacgtaagctcggaattcggctcgagctcatttgggcgaccaagccagacatgcaaagagacacaacgcacccacatcatcacacgttgctggctactactcgatcctctccagggtgtctctgtctctagccaccaccataaggcttaagacgtagacactgctcttccatcgacggcggttaataacagatccgatcatgggacaaacgaaaacacaagactgtacactcctgaccagaactacgaagtgccagtcaacaaatgtgagtgccttaacaagctccactacctaccctgagtacctgttgacggaggaggctataaggcaacgtacagctcggggcgagactctgactctctacaccggagcagctgacgctcggggctccgcagccggagcttctaggggagtcatcactaggagaagaagctgcgaatctggcgacactactaagctcagcag

SEQ ID NO: 173416 - DNA, 499 bp, Arabidopsis thaliana
ttaggtcaactatagaagagttatgacgtcgcatgcacgcgtacgtaagctcggaattcggctcgaggatctttctccacggattggtgtggattttaaggttaagtatctgacaattggagaaaagaaactcaagcttgcgatttgggatacagctgggcaagagagatttaggacgctaacaagttcgtattacagaggagctcagggtataattatggtatatgatgtgacacgaagagacacgttcacaaacctatcagacatatgggctaaggaaatcgacctctattcgactaatcaggattgcattaagatgcttgtcgggaataaagttgataaggagagtgaaagagctgtttctaaaaaagaaggcatagactttgctcgggagtacggatgtttgtttctggagtgtagtgcaaagactcgagtcaacgttgagcaatgttttgaagagcttgttcttaagatattggaaacgccgagtcttactgct

SEQ ID NO: 173417 - DNA, 504 bp, Arabidopsis thaliana
taggtacacactatagaagactatgacgtcgcctgcacgcgtacgtaagctcggaattcggctcgagctgataatgagagatgccctaccgttagatccaagggagttgatctacaagaaccgtgccaccatgggggacacatatctgatgatgaatagcatatgcgaatccaaatgaaccccaatgactctgctgacgcgctcaacgataagacagaaggcacagatcgcagatacgttgccggtgaagaaagctatagagaatggaatgatggatcgagctcggatctacgctgcgaaccatatttgaacacatagctggcagatgatctctctgcgaatctctcttatgatcgacgctctagtgacttgaatagagactcaatctaagatgaccaccataacaagctacatgaccaatatcttgctaaacatagagtcgagaatcgacacaggatatataagtatgatgtctgagacactgtacccattcaagaagcactt

SEQ ID NO: 173418 - DNA, 184 bp, Arabidopsis thaliana
cacgcgtacgtaagcttggatcctctatagcggtcgacctttgtttttatcttttcgtggaacataaccttcattagagtataatggtatgggaaaatgaatacatcgaaagacaaactgaacaacatgggatatgctgtcaaccaactgactaactgagtaatgtgtgtcgagaggaggtgca

SEQ ID NO: 173419 - DNA, 487 bp, Arabidopsis thaliana
actatagaagattatgacgtcgactgcacgcgtacgtaagctcggattctgtatagagttcgacctaaaggttcttcatgaccttcattctctctatcttaaacaaccatagctattgaaactccactcatatgggtgaaaaccaaaccggagaaaactgttcctcttatataaatacgcgaaactgttttgttgcttctcgacaacttgtattgaagagactttttctcctaggggattaacattcttgctggccggtcatcaatacgactgttgacgtatacatcaccattttcatgatccaaacccttaaccttctcctttttctttatcaaatatcttataataagccgatcaaaaatctgccacagctgtttgcgcgaaagatttatataaccaaaatcatcacccacagctttataaccaccgttaaattatttaaagctgggcgtccgtaagcagttaaattacacatctaattgaggaa

SEQ ID NO: 173420 - DNA, 480 bp, Arabidopsis thaliana
tcacgccgtgcagtgtacctggtcacggaattaactggttggaccgacgcgctcactaacccgtggacgccctcgtgtttccacaacaatcaaaactattactctcttctttaatattttgagtttatactacagaaactctttggtgcaaagatcccaacaaatcaatctctgccagaggagaataataaaacaaggaggaatttttttctgtctaatctcgaaaggatccgggacgacaagcgcctctacctttcatcgcctctattaccaagctcctctatcaaatctctactctaaccgctcaccgactaacacatgtgagatacttacccgaaggtaataaagacggcggcgatgatcccggttctgttcagataaaccttccgccgccgccacatatttccgatcggcttattcacagatatttgatacagaataaagaggaagtaaaggctttcgatgatgatattgggaatg

SEQ ID NO: 173421 - DNA, 503 bp, Arabidopsis thaliana
ctacaagagttatgacgtcaaacgcacgcgtacgtaagcttggatcctctatagcggccgaccttggggagcatgctttttttttttattttttttttttttttcattttctggatttaaagcggttatgaacacgcggtagatgaatgccaccagtttttctggctaatgaagagcttctcattggctgatgcggacatttgttagttcttgcacggttttttcctctggcggtatttagcaacagaagcgcttgactcgtgacaagcatcttcaattccagtatacacccatacccgctaggacttaacatcctatccatttccagcattacatatttcctatgacacctgtggctttcaaatgaaaacaggccttttacgcgaagaaaatcataagttgtgggatacgtcaaaaaagcttgacaccagaacatgatatagttccgagcaatctgcggactaacacatcgggacagtgtgtttatcatcaaaaaagaaacc

SEQ ID NO: 173422 - DNA, 504 bp, Arabidopsis thaliana
ttaggtgcactatagaagagctatgacgtcgcatgcacgcgtacgtaagctcggaattcggctcgagcagagttaaatggagtttgtgtctcgtaacttatcctgtgagcgaaaatggtgaaagcaactaaggcagagaagaagatcgcctacgataccaagctatgtcagcttatcgatgagtacacccagatcttggtcgttgcggccgataacgtcggatcaactcagcttcagaacatcagaaagggtcttcgtggagactccgtcgtgcttatggggaagaacactatgatgaagcgttccgttaggattcactctgagaacaccggaaacactgcaatcctgaatctgcttcctctccttcagggaaacgttggtttgatctttaccaaaggtgacctcaaggaagtgagcgaggaggttgctaagtacaaggttggtgcccctgctcgtgtgggtttggtggctccaattgatgtggttgtccaacctggcaacact

SEQ ID NO: 173423 - DNA, 512 bp, Arabidopsis thaliana
attgttttaggtgcactatagaagagctatgacgtcgcatgcacgcgtacgtaagctcggaattcggctcgagggaagatgttggaagctaaagagagagcggatttgctaggtagagcgagtggagaaggagctcacattttgcagatatttgatgaggaagctcaagctatgagctctgtgaagaactcaaagagaatgcttgaagagtcgttttctagtggtgttgctatcctctccaaatatgctgaacaaagggatcgtttgaagagtgcacagcgtaaagctttggatgttctgaacacagtagggctctccaattcggtactgaggctcattgagaggcgcaatcgtgttgatacttggatcaaatatgccggtatgatcgcaacacttgtcatattatatctgttcataagatggacacgctaagccgaagaaaatcaaacggcttagttgcacagatggttgtttatgccctgttacaagacatttttggcatctgatcttag

SEQ ID NO: 173424 - DNA, 460 bp, Arabidopsis thaliana
gcacgcgtacgtaagctcggaattcggctcgagttgactcttgagagaggacgaccaaggaaggacattagtttaagacgatgaaagggtgagacttgtgatatctacgtagaaggaagatggccttatctcaagtgactgcgtctctcgcctttgctcttcccaactctggtgccctaaagctagccacaatttttttccctacgggtacatggcgggttcatgttcctgcaacttgctggaaacccatccaccttcgcttctggggccggcttcttgccattgaggctgagtgtgacccgtataggaggacactgatctcggggattttgccatgacatgttaccaacgtgcatcaatgaccgatgtatatgccatatctagctgcggccgcgatcacgttccttgaatctgtaagtgagggagtgcttgcggaggtccgtatttggaacagacgcct

SEQ ID NO: 173425 - DNA, 501 bp, Arabidopsis thaliana
  unsure (1)..(501): unsure at all n locations
aggtgacactatagaagagttatgacgtcgcatgcacgcgtacgtaagctcgggattcggctcgagctcgtctatggggagagacgggcttatagtaactgtgagganannatnnaanannancgnnnanaggatnagaagaatagaatctgagcagngggatatagattgagttnatgtattagncgttgatgacagtgtagttgattggattgaaatngagagtttgtttgggggggggtantgaaaaggtagggaggtagatagtggatggggtgttgtggaatttttaggggtagataatgagaaagataaggntgaatncgatngattgaangntgatnngatcatnantgggaactgtatggctggaatgactggttatgagcttatcaagatgattaaggaatngtacaattgtagagaatttngggatgtaatcatgtggtgggagaatggatggagcataatggagagatgccttgaggaaggggggtaaga

SEQ ID NO: 173426 - DNA, 497 bp, Arabidopsis thaliana
ctacacacactaggtgagaagctaccacgcctgcaggaaccgggccggaatatatagctgggtcgacgagctcactacgacggcgggcgcccttttttttttttttgttggtcgtagcgaatgctagtgagctgaggtaatacaaacttcaatgatcttgtaacatgagagcaataatttcatatgttgagctttgggttagggcagacgaagctattttatatttactctgtgcaaagctatgaatctcccttttagaccgaaagaagtgtgtctatagtaatgatggatgagattaagccaattccaagactgccttattattcgatgatgcacttaagaaatctcgccttcttggtatgaaaggagaatacgcttgatgacctctgcggttagcgtttgatagtttgtaagtgagtctgttaacgtgtgtagctgcttatgatgcgcgtttaagagagattaaactctttaatatgcttcattagaaagcttca

SEQ ID NO: 173427 - DNA, 497 bp, Arabidopsis thaliana
  unsure (1)..(497): unsure at all n locations
taggagcaactatagnagagttatgacgtcgcacgcacgcgtacgtaagcttggatcctctagagcggccgcccttttttttttttttttttttttttttttttttttttttttttttttttttttttttttttttagaaaaaaagtctaccaaattaccacctaagccccgggtgaacactttgaaaacagccgctctaaaaaaattgttttctaaaaggaccaatttacgaaaaaaaagattttccgggaaaaattgcaaaaccctaataagaggccccgcctggttaaacagctagcgttaagaacaaaagaagaaccccctccaaatggggaaaagctattcattaaagatctaccttccgcgggatccttagggctcattggcaaggaagaaaatggtgcgactggttaaatcttgccctaataagacggcccacgttccttggctcggggggccaaggcaacaaccaccgcctttgggttggccaatatag

SEQ ID NO: 173428 - DNA, 508 bp, Arabidopsis thaliana
attaggagcaactatagaagagttatgacgtcgcacgcacgcgtacgtaagcttggatcctctagagcggccgccctttttttttttttttttttttttttttttttttttttttttttttttttttttttttttttttttttttttttttttttttttttttttttttttttttttttaaaaaaaggggagggggaaaatctccaaaatttttggggagacccccccagtttcccaattttaaaagttaaacgggggtaaaagtcacaaattttgaaaaaaatggggacaaaaaaaagggttgggggagggcccaaaaacacacttttaagtcacaggtttggcaaaaaaggtttaaaaaaagggggccaaaacctcccgggccggggttggccccaaattgggggggttccaaaaagctaaaattttttttaaaaaaaaaaacgctttttttttcttttaaaaaagccgcccaaattgggaaaaaaccggggccaaaaagaacggg

SEQ ID NO: 173429 - DNA, 481 bp, Arabidopsis thaliana
  unsure (1)..(481): unsure at all n locations
gcctgcaggaaccgggccggaatacccgggttgaccggggcgttcgagacttaggtcacctgtagcacagtctctgctcagccctaaaagcttactccttgcaactaaactggaaggccatcgtcgcagcctatcgtcataaatggattggatggtgactaacttggagttagtggagatacagatactagatttttcttccgatcgagngnggagcgcanctcggaaccccgtctattattcacgccgacggaggtgaaccgaatctctgttcttagagtggagataacactgcttgaatgtgggaacaaaatctttcccatcctacctggatttgcaagacagctgtgggagagaccccttcacagaactgttggggccgcgcccttggctacccctttggacagctattggcccactgcaaggattggatggtaccaactggcatttagcacgatcaacggttcggggccagaatgga

SEQ ID NO: 173430 - DNA, 496 bp, Arabidopsis thaliana
actatagaagattatgacgtcgcacgcacgcgtacgtaagcttggatcctctagagcggtcgccctttgtgtttttctttttttttttcttaaactttgaattggtaatactccaccaacactcaccaacacacaccattgaagttcaatgtatttgataacatcacattctttacaaacaaagttgacatttaactttagatttattgcataccttgtacagtagtctcaacggtgagtttgaagaagatgacaatgtagaacgtaagagacaacagtgcaaagatgtgttgccagaatagaagtgccgaggcttctctaacagcgtaacctcttagactcgcgatggctccaagtaaaatggcactcggagtcgaatactgcaaaagaagcacaaacttgaacattggatctgctgaggaaatgagaccaagtttatcagctgacatcacaatccctattcccactaacggaagcaccaagagtcttgcaacat

SEQ ID NO: 173431 - DNA, 494 bp, Arabidopsis thaliana
  unsure (1)..(494): unsure at all n locations
ctatagaagagttatggcgtcgactgcacgcgtacgtaagcttggatcctctagagcgttcgccctttttttttttctttttttagtggaaacgtttatgcattataaaagaagcatataccaatcgtataccaacgtaatcacatggagaaaaaaaggactcttccttctatatttctcccaccaacgctacaaacaacagcaagactcattttcaatgtttccaacacttgaagagtgacttattgcctcaccatctacggcaactactcccataccaaaacgcgaacgctggcacagatgcatccacaacgactacagtcctctgtgtgccatacatacaaaggctgctttatcatgaccacacttgcagattgctcgacaatataagcgctaggaatanactcaacttcaggaactcactgctgactgacaaccgcgagaccaaacccgagtgcttgtgtctccaattcttccaaatcaatagtcacagc

SEQ ID NO: 173432 - DNA, 512 bp, Arabidopsis thaliana
  unsure (1)..(512): unsure at all n locations
atacgactcaatttagggaaggtgggacccctggagggaccgggcccggattaaattccgggtcggcggggttacttgtccgggggcggcccttttttttttttttttggaccttaaacaatttaaatggccggagaagggctattatttattaacctaccaaattaaaaatggtttttttttgaccgacgaccattccaggaaccggggaggaggatttttttgggagtgccggnaattcctggaaaataggtttggagatggagggccggagatttccccggttaccaaaaatttaatttaggagggaggaaccttcttgacaaggtcttcattaagagcagcaatctgagaatccaaggcttaaagggtttcttttttctgactctccaagctcgccaaagtttctttaagctcttcctccaccttcttccttccctccgttggcttttcctcgacttcaacctgagtctccttcttcatctgtgaaagcgcggcggcgatctcagcct

SEQ ID NO: 173433 - DNA, 501 bp, Arabidopsis thaliana
agggaaagatcggccgcctgcaggcaccggcccggaattaattctcgggtcgacgagctaactagtcggaggccgccctttttttttttttttttgtccttgaaacagctaaaatgaccgaacagagctaattatctataaacttacaaaataaaaattgttcttcttggaaccaagaccaacccaagaaacagagaagaacattttttttagagggtgtgggattcctggaaaacaaattttgaaaaacagagacagagaataacacagttaacaaaatcatattttaagaaggaagaaccttcttgacaatgcccttaataaaaacacgaatctgaaaattcaaagctctaaagggttcttctttctggctctacaagctctcaaaaaatccttttaattatacttgcaacttcatttttccctgacgcagggttatatgaaattcaacctgcgttgtcgttatcatcttgaaaaagggcggagagaaagaaagaacat

SEQ ID NO: 173434 - DNA, 467 bp, Arabidopsis thaliana
  unsure (1)..(467): unsure at all n locations
gcacgcacgcgtacgtaagctcggaatgcggctcgagatacaacggcgagcccagtacgccacttagccaatggatatagcatcaaagccaaggtcctgattggatgcaatggtgccaattctatcgtcagtgattatttgcagttaaacccgaataaggcgtttgcttgtcgtgcggtgagagggattactaagtatttttacggacatggattnccacaagaggctctaatgataaagcaaggaaatgtcttaataggaaggctttctttgacggataatcaagtctataaggtttctagtacatatgcaagacaatagtcacaatggtaaagatcaaaattcgattgcgaatctgtgtcaaaaatgggcccgtgacttgtttgaaatcgaaaagaatgggtaaaatatgcaatgcggagtcattaacactcacacacttaatgttccgagcagccatcggaaaa

SEQ ID NO: 173435 - DNA, 500 bp, Arabidopsis thaliana
  unsure (1)..(500): unsure at all n locations
aggtgacactatagaagagttatgacgtcgcatgcacgcgtacgtaagctcggaattcggctcgaggaactacgttgttttcggttgttcacttagccaatggaaatagcatcaaagcccaggtcctgattggatgcgatggtgccaattctatcgtcagtgattatttgcagttaaacccgaaaaaggcgtttgcttgtcgtgcggtgagagggtttactaagtacccatacggccatggtttccacagaggtctaggataacaggaatgctaatagagggtccttgacgatatcaatctttgggtttagtacatatgcagacataatcacatggtaagatcaagatcgattgcgaatctgtgtcgaaaatgggccgatgacttgtctgaagattggaaagaatggtaaaatatgcaatgtggagtcattaacactcacacacttaaagtaccgaccgccantcggaaatcatgttagggaaatttccgtcgtgggaca

SEQ ID NO: 173436 - DNA, 429 bp, Arabidopsis thaliana
gacgtcgatgccgcgtccgtagctcggaattcggctcgaggaatacgttggtttccgttgttcacttaaccaatgggaattgatcaaaggcaagggcccgattggatgccatggggccaattctatcggcagtgattatttgcaggtaaacccgaaaaaagcggttgcttggcgagccgtgagaggggttactaagttttttatccggcatgggtttccacaagagggtcttaggattaagcaagggaatggcttaatagggagggctcccttggccgagaataaaggcttttgggttctaggacatttgccagaccattatccacatgggtaagaacaagaatcggttgcgaattttgggccaaaaatggccgcttacctggccgaaaaatggaaagaaaaggggaaaaatttccatggggaagcaat

SEQ ID NO: 173437 - DNA, 176 bp, Arabidopsis thaliana
  unsure (1)..(176): unsure at all n locations
ctgcaggtaccgggccggaattaattcctgggcnacgagctcactaggcggcggccacccttttttttttttttttttttttgggatcaaggtgggcttttgctcttaagcaatcaaaatttcgaaatcggataccacaaaaggcgtcaaaattcccccaaaattaacaaatttat

SEQ ID NO: 173438 - DNA, 423 bp, Arabidopsis thaliana
  unsure (1)..(423): unsure at all n locations
aaaacatttttcanacccaaaatcctaaattcttttcctttantaaatcaaatttctttacattaatcnttanaaaattagcccatcccatcacacccgttcttcaggaactaaccccccccacccaattctacccttttttcaccagggggggcnattnnttaccccactaaccaacaaaaaaaatggtttccgtaacttaagagttaaaggtcacacccacttttaagggggcaccggtttctttaaaagcgtttttttccgcccttttgtttcttttttccccctaaacattttttattaacccatttggaattggaatggtttttttataacaattttttggaaatggatttaaattttttttcttctcccccccctaatgaaaaaacctcttttttttgattattattcccgaaaaac

SEQ ID NO: 173439 - DNA, 517 bp, Arabidopsis thaliana
taggtgacactatagaagagctatgacgtcgcatgcacgcgtacgtaagctcggaattcggctcgaggaaacattcttggtagatacaaaaaacatttttcagacacaaaatcataaaatctttggctttagtagatcaaaggtctttacattaatcggtagaagatgagccagtacgatcacaaccaggctggaggagctaacccaccggcaccgatgtctacctgtacattaccaccaccggcgattggttacccgactaaccaaccgagtcatgggtcggtagctcaaggtaaaggggaaaccaagtctaagggtgacggattcttcaaagggtggcttgcgggcatgtggtggtggtgtgccctggacatttgcttcttagccatttgggaattgggatgggctatttatgacgaggttatgggaatgggaagggaattattaatattctcttcaaccctaatggataaaatctctattttttggttaataatttcctggaatactttgggag

SEQ ID NO: 173440 - DNA, 479 bp, Arabidopsis thaliana
  unsure (1)..(479): unsure at all n locations
tgcactatagcagagttatgacgtcgcatgcacgcgtacgaagctcggatcggctcgagctgattcattcgagagagagagagaagggatgctatgggattcttaagagattggagtgaaaagcgagcagtgaattgcttggacgacgcgtctatctatgaccataccgcggatccttactctcacttgccgataataccaacgccaccaagaagaagtacgctctcatccctgaccgcttctctttcctcgaccaggtatcaaaagctctaagagaagctggtcttgaatcatgcncaatctcatttcttcgggagtctgattctcacaaaagagcnaacgagtgggacttgggaaaacttctttcgatggaaaatgtctgcacgcgctcggcgaaacttcgaatcatatgaaaaggcgattttgtatcggncaaacgttggctctttttgatgaagacaatctctgcctttgtttcg

SEQ ID NO: 173441 - DNA, 492 bp, Arabidopsis thaliana
actatagaagattatgacgtcgcatgcacgcctacgtaagctcggaattcggctcgaggttttcggtgagatcaccaacaaggctaccattgactaccagaagattgtccgtgacacttgccggtccattggattcatctctgaccatggtggtcttgatgctgacaaatgcaaagtccttggtaacattgaacaacagagcccagaccttggtcaaggtgttcacgggcacttcaccaaacgtccaaaagacattggagctggtgaccaaggacacatggttgggtatgccactgatgaaacccctgagctcatgcctttgagtcatggccttgcaaccaagattggtgctcggctcactgaaggcaagaagaatggaacctggcggtggtttagaccagatggccagaaccaagtcactggtgaggactaccaagaccatggcgctatggttccaggccgggttccaaacggtccgatcttaacccaaca

SEQ ID NO: 173442 - DNA, 153 bp, Arabidopsis thaliana
  unsure (1)..(153): unsure at all n locations
attcnnctccagtttctctctgtgtctggggcattaaannaaattacctcctcatanattctccagaaaacacttccatggggactaaagatatatcgggtactactctatgtatgggcatgtggagaaatgggctgaagaaataaggaaagg

SEQ ID NO: 173443 - DNA, 475 bp, Arabidopsis thaliana
cgcatgcaccccgtcctaagcctggaattcggcttgaggcttttttttttttttaacccaataaaggaatttaacttcctattgattcctgagaagaaccacttccatgggaactaaggattttatcggggacctactttatgaatgggaaggtgaagaaatgggttgagaaattagggaagggagctgcttctgtggaaggggtggaagctaaactatggcaggtcccaaagacgcttcacaaaaaggcactctttaggatgagcgcaccaccaaggagtgaatccccattcataaccccgaatgagctagctgaagctgatgggttggcctttggtttcccaacaggatttggaatgatggctgctaagttcaaagcctttttggatgcaaccggtggactctggagggctcaggcactcgccggtaaaccagttggtatcttctacagcactggctctcaaggtgggggcca

SEQ ID NO: 173444 - DNA, 506 bp, Arabidopsis thaliana
ttaggtgcacttagaagatcttgacgtcgcatgcacgcctacctaagctcggaattcggctcgagccaaaaaatgggatcttcaccaccggagaagaccactctgcaacggtaccttggacaggttcaaccacattctttaagaaccaaggccattaccggtggaggtttggctggtggtagcgaaggtggattacaaaagctttttggccttccaaagaatcaacttaaaaggggtcttcttaaagggaatattggtggtggggttcttggaccaagaaggcatttctttcattccttattaaaataagtttttaaagggaagaaaggttccccaaccggtggcaaggaaggtattcttgaaccattggccatgtgaaccatggacccattggctttcaatgacctataatggagtagccatagaaggacctccttgaaccttggttggagaagggatcaggagaacttatccaccggtccagcttactgcatggacgtttttcc

SEQ ID NO: 173445 - DNA, 508 bp, Arabidopsis thaliana
atccaattaatatggggaaggctggtccgcttgcaggtcccggcccggaattaattccggggtcgacgagctcactagccgggggccgccctttttttttttttttttctttaataccctggtttttaatatgaggttggggaaggtgttgtgaatacctaaaaacatatggttatcctagaagggtatcatcttaatacagattttaattgggttttttagctgttggattggctttaccttacagagtactaagtgatcataatgagtcccaaggcttgagttctctgtcacgatccatgtgtttcctaatcacttagcctttgccaaagctagtgtcattgacctcgctcgcagggttaggaaaattccccaaaagaatgcgaccaggctgtgcaagatgacccggaagtgcagtggcacatacttgtagttaatccatcccaccaccgggaaaaacgtccatgcagtaagctggaccgttggataagtcttcttgatcctttct

SEQ ID NO: 173446 - DNA, 510 bp, Arabidopsis thaliana
aggtaccactatagaagaactatgacgtcgcatgcacgcgtacgtaagctcggaattcggctcgagaaaaaaaaaaacacaaaaaaggttcaatgggccggcttaacaatggcctctcttcttccctgctttcgccggaaaggctgggaacctttcccctgcgggatcagaagtccttggaagcgggcgggtgacaatgaggaagactggtgccaagccaaagggttcattaggcagcccatggtaccgatcccaccgaatcaagtacttgggtccattctttggcgagtcacccagcttccttaccggagagttccctggagactaccgatgggacacaagtggtctattcgctgaccccgaaacattcgcaaggaaccgggagcttaaaggtattcacaggaggtgggccatgcttggaacccttaggtgggtcttccctgagcttttggccaagaaccgaatcaaggttggagaagcaggttggttcaagggttggtcacaaaattt

SEQ ID NO: 173447 - DNA, 520 bp, Arabidopsis thaliana
  unsure (1)..(520): unsure at all n locations
aggtgcactatnagaagactatgacgtcgcatgcacgcgtacgtaagctcggaattcggctcgaggcttatttgagaaccgaggaaaaaaaaaaccatggcaacttaagccggcgggatcttcaacttcggcattacaaccggcgaaccttcggggtcaagaaacttcactttttcttaacaacccaacggtccaaattccttttctttaacaaaaccggaattcgggccgagaaaaccgatttcttcggcggcggtggtggagcccccggcacgaaaggaggttccgggggattcaagccaccggaggttgacccaaacacaacggcttcgatttttggtggaaggaacggggggctttttcggaaagggccaggggaagaagtcttcggttttaacggggacctaacggaaggaccaatttttggaaaggcggccgggaggagcagggttcttgaaagagggtccgattcttctgagcttagcgaggaaggaccagtgttaagcttgggggccaaggc

SEQ ID NO: 173448 - DNA, 499 bp, Arabidopsis thaliana
aggtgcactatagaagatctagacgtcgcatgcaccccgtcctaagctcggaattcggcttgagccaagatggcgaaagcaagccttattctactcggaactctctttctcttcggagccctagcttcaattcaagccaaagaagatcccaaggggggtacccacaagggttacttcgatggaaaaaaccaccgcaaattcccttgtcccggtggtattagaccttttggccaggcaggtccttaaaccggaaaaaacctcaaaaccttgggccccagggaaaaagggggtaggaaaaattggaaaccctttccattccagggaaggcaggttcattcgattctttccaagcttaataaccaaggaaggggacttaacccttggaaccggattgggggaagattaattctatggccaaaagttggctgatgagaccttcaagctgaagcacactgaaccaggtgtactttaattggcaacctcggaagaaaacacaaat

SEQ ID NO: 173449 - DNA, 482 bp, Arabidopsis thaliana
  unsure (1)..(482): unsure at all n locations
atctatgacgtagcatgcacgcgtacgtaagctcggaatgtcggctcgagcagtaacgccggaaactttggactanaagctaggcgtttttgggtgtgtcgtaaatgctagttacatccattaacttagggcagctgatgatcaggtgctccgttgcttcatgcccaccacgttcaagactgtggctctattctctaagaaaaagtcatctgctgcttagagcagggttgactctgagactagcgatgacctcgccaagtggcttggtcctgacagtagaatgttcttgcctgatggtctttggaattgatcagagatcccacagtccttaaacggccaagttgctggagattatgactatgacccatttggtcttagaaaagaagcctgagaactccgcttaaaaccaagctctagaattgatccatccgagaagggctatgttaggagcagctgttttcataatttcctgaagctttaag

SEQ ID NO: 173450 - DNA, 511 bp, Arabidopsis thaliana
aggtgacactataggaagactatgacgtcgcatggcccccgtccttagcccggaattcggctcgagccctaacttggattctttctggtcccatgggttcgggtaatttctttggccccaagggtttcactggattcttaagattggcaagcttctttggttcttttccctttgggaagaaaccttctttccgtgaggtcggttccattggcttctttcaaacctttggaatgggaagccagggtggattccagaaaggggggaccggaggccagcctaaggggggccattaaggaatccggagggaccggaaggaccttcctgaaaggtggccttggccgcagggcctctcctctggttataatggccattaaggccactgtgggctgaaggcaggcttggaattaactaaaatccaactctcctctcggaatcttggaggctgatgccaaaccttctgaagagactgcattctctgtggagggaaggaccatccaggtggtctctaccc

SEQ ID NO: 173451 - DNA, 469 bp, Arabidopsis thaliana
agggaaagatctacgctgcggaccggccggattaatttttggtcgcgagctcactagtcggcggccgcctttttttttttttttttttttttttttttaagaaagaaacatccatgttttactagagtaaatagcacatcattcaaaccaaagcaaggaccaaccatgtgactcacccgaatttttttttgagagaggtttaattaaaaacatattattcctgttgataagaccgaaccgatgagttctcagaaaccaaagagtttattaagcctcctttttccctgtgaggagatccattaccacgcctttgatgcttacactcgagccgaatttcgagcttacgtacccgtggatatcgaccccataatctcttctatagtgttaactaaattaaaattaattggtcggctttttaataccgtctttcttgtggaaaacctttgtgttacccaacttaattgccttt

SEQ ID NO: 173452 - DNA, 512 bp, Arabidopsis thaliana
  unsure (1)..(512): unsure at all n locations
accccatcactttagggaaagctcgtacgcctgcaggtaccgggccggaataattccttggtcaaggagggtagtagtcggcggccacccttttttttttttttttgctacagtcactctcatatgccaaaaagccaaatgtggggaaaataccaccaaaaaaggacagggagagaatggaacttcaactacaaccaaactcccgaggattcaaacagacaataaagagggtggcgctgttttaaacgaggggnaaaaaaaaaaaaaaaaagaccattcctttacagaccttaatgcataaaaggggggataaagcctaccgggccccagcagggaggtttagttactgggtgaaaaccgcattttccactaaccctaaaggctaaaaagaaccctccaaaaatttgattttttaagaaaaaggaaaggggggggacccggtaaaaatggggccttgggggggccaacccaaacctggagaactcttatttgggctccaaccaaaagggccc

SEQ ID NO: 173453 - DNA, 477 bp, Arabidopsis thaliana
  unsure (1)..(477): unsure at all n locations
gaaaattaaaaaaannnaggatttcgggctctaaaccactcactttagggaaagctcgtacgcctgcaggtaccggtccggaataattcctgggtcaacgggctcactagtccccggcccccctttttttttttttttttgcagaaacaagcattgggcttatttattataagggggtacaaaacattgaatgcttggggaattgttttatcatcttctaggatgcccttttgaacataacctttattggacgagagtgaaaggaagtcttttctttccatataaaacaaaccactccaaggttttacagatgactttgcaaaaattggcgaccggaggacaaaacctgggccttgtaatcctttttcaaaatttggcgaacctttaaccaatttattaacccgggtttctgacccgggaattccctttcaacgcccacaaggtgaaatgaacccattggtttccgccccctccggc

SEQ ID NO: 173454 - DNA, 462 bp, Arabidopsis thaliana
gggacacactataaaagcctaaggaggtggctatgcacgcgtcacgtaagctgggatttcggttcgtttttggccgcgttgttcattaaaggtgggagtcccaggtgaaagataacgcgaactatagttcggaggtttaaacgctgattccaaacacgcctgggcttgaacgggtgatatttcttgaggtggaggatttttaacctgaatggagtgttctaggaacttcttctgatggggacactgactttgggcttaaggttaactttgaaaataaggccctggggggccacaatgtgcaagttatggaagataagttcctggctattaacgatctcggctttgttggatccatggctgttccagccacgcaaccatttgttggtactttttgaaatttctttaaatcataggggattctcctatagacaagaactttagctcttttgtttggtttggccc

SEQ ID NO: 173455 - DNA, 484 bp, Arabidopsis thaliana
gacgtcgcacgcacgcctacgtaagctcggaattcggctcgagatttttctcttggtggtctcgattaacgaaaaagacttggcggtctcaattcttatcgatttaagaaccaatcatctaacgaagattaattccgaagatccgaaaccaaccccaactgggaatcggtggttggtaattctctttaaaatcggcagaagaatttttcttcggtttcttccgaagaaaagccagagagttagaatgggatcggaaccaaaccgttgcaccagcttcacgccatcggaaggtttaaaaccaaagctttggggtaaaggaagggggttctttggaacaccactcaacctggatccctggtcttaaaggtaccgaaggatttggggcggagaaggttaaaccagaagtggttaaggcggtggtggaaaatcctttaaggccttctcttcctggaagctcttcaatagaaaaccctccggctgtggt

SEQ ID NO: 173456 - DNA, 509 bp, Arabidopsis thaliana
gactcattttagggaaggctggtccgcctgcaggtaccggtccggaattcccgggtcgacccacgcgtccggaaggattatcaaagttgaggaaatacgtggcttaagggaagctggttggaccccagatcagtgggggcacactcgtttcaaattattcaatggttctgctgatatggtgacaaatcaaaaacagttgaatgcactcatgcgtgctcttttaaagacaatgcaagaccatgctgatgcttggcctttcaaagaaccagtggattctcgcgatgtccctgattactatgacatcattaaggatcccattgatctgaaggtaattgcaaagagggtagagtcggaacagtattacgtgacattggatatgtttgttgcggatgcgagacggatgtttaacaattgtagaacttacaactcccccgataccatttattacaaatgtgcaaccaggttggaaacacacttccatagcaaagtacaagcaggtctccaatctg

SEQ ID NO: 173457 - DNA, 491 bp, Arabidopsis thaliana
atgacgtcgcatgcacgccgtaccgtaagcttggatcctctagagcggccggcctttttttttttttttgtaacaatgctaaaccggaatttctgagggggtctaccttagccttttaatgatccggatggttcaagaacctaattcctcaaaagaaagagagggatttcatggagaccaagcgggctttggacattgggaaggaccccctttgcccatcaccttcctcagatagctttgggatggcttcctcggggtgcctgcccggggttggatccttatattggatccctttggccctcctttggttggcccaagccaccatatggaccagggctgcgcttctggccttggggggccacccaggacccaatcaataaatcccagcctggggaggttcctttcaaaaaaaggtcctttccggggggttaccgggggagaatcttcaactgcatttggagaacgcccttggcttcagccatttcaaaaca

SEQ ID NO: 173458 - DNA, 513 bp, Arabidopsis thaliana
aggggcccttttgaagattctggcggtgcctgccccccttccttagcttggattcttttaagggggccgcccttgtttttttttttttttttttttttttttttttaccccccaggccaggggtttaattggacctttccggggattatggttccaccatggatccaattttccgtccaaaatttttactttttgggccaaaatttttacaaaggacaccgattattttgaccagccaggaacctcatcattgaaaagaatcccaagacctgttagaaggaaaaaaaattccttgaggactcgatcaatctcacaatgaaatcctacaggcgcgggtgatcggttcattgtgatcacagaagtagaagagaggcaaaaaccgtaccgattgcagagagaaaaagatatagagcgactcgggtttgtccgttgggagacttttcacctgttgattgaggtccaggggtggtggttggggctctggctgacactggaggtaatggtggttcagtg

SEQ ID NO: 173459 - DNA, 477 bp, Arabidopsis thaliana
  unsure (1)..(477): unsure at all n locations
ccccccctttaggggaagaacgacncctgcaggtacccggccggaattcccgggtcgacccacgcggctcggtcctgtaacccaacccactcaaacgaaattttttcttaatccctctttcgggcttcttcttcttcttcttctttagaggggggaattccatcgggctctcgatccctttcttctccggtctttctggggcggccccggtttttttttttttggttgttgggaaacatttcccggtctttgccctgaaataccaacgatcagttttctttaaacccctagggtttccacccccgccttctgttttctccaagattatcgccacactctttccgttcctattcttttggagttttcgaaaaagggtttttcgcggaaaattaaggggcttgcctcggcctacttttcccaggcccggaagagatttgtggatgactccctaccgggggaggatttcccccccggttt

SEQ ID NO: 173460 - DNA, 471 bp, Arabidopsis thaliana
tatgacgtggcatgcacgcgtacgtaagcttggatcctctagagcggccgcccttttttttttttttttagtctgatgcaggcatactggaaggttacgcgatttccaaaattatagggactgggtggttttttttattgtacaagacctattatatcttaccttgagttgcagggataagttacccggcataactctcatcattttctgaaacccggggtcaactgtggcttatttacgtggcacagacaaaattttcgaactttggcaactgaactaagatcccatttttattaattcgggtataacaaaaccaagctcttataagcccgtatatacatgggatcacctgaacaccatttaatgattggggggtcactacttatccatgccgatttgtaccagattttctgtcttaaaacaaatgctatggggacaccctcaccatagacttgaaatgcttttcattgt

SEQ ID NO: 173461 - DNA, 540 bp, Arabidopsis thaliana
  unsure (1)..(540): unsure at all n locations
gggaaagcacccacgcctgcaggtaccggnccggaatacccgggtcgacccaggcggccgcccacccgcccgcacgccatactgaccagcaaccggcgatactcgccacacgcgccggagagcagagggcgcaccgccaccgctgacacgagaggacagcccccagcaggagcacccaagacccagaacccacacaaccggtccaaacgctttttcttcccaggaccgagaccacccaaagagccacgcggaaaccaagcacaacgcaccgacccactacgcactgaacggtgggacaacgaccatcaaaagcaccataatagcacaccagcccccaaccctccagcccccaccaaaaattgaacccacgcgagagtgggaacacacacgcacacaaagacctcgcagaaaagacgacacgagaaacaacgcagtacaacacagcataaacacaaacaatcctgcacacagcagaaaacgagccccagcgcgcacccaccccaagccggaatacacgcatagccaccatgaccacaacag

SEQ ID NO: 173462 - DNA, 499 bp, Arabidopsis thaliana
taggtgacctatagaagagtcttgacgtcgcatgcacgccttcgttagcttggattctctagagcgggcggcccttttttttttttttggttaaaccatgccctttcttaatggcttaaatccggcgggaaaggtaccatgggccttaaaggcctaaaaaaaaaaccccttttaaaccaccattcctgcttattcaattttcaacctattggttgaaaggaggggggccccaatggtaaccctggtctttcttttctatggtaaccttggttgaacctccctgattttggttcctatggcaaaaaattccgggttcttttaaagccggaggctaaagttgggggtgggtttcccagcttttgtggtagtagtggaggaatcccgattagagagctgttgggccaagaccagacacacaggcattccatctagggaatggacctcctgggaattagcgatggatccagttgttattatagagcccccgttccgccccgag

SEQ ID NO: 173463 - DNA, 509 bp, Arabidopsis thaliana
cactatagaaggtttatgacgtcgcatgcacgccgtacgtaagcttggatccttttgagcgggcggccttttttttttttttttttttacaaaacaaagcttattattttaaggagtaatggttcaacatacaccagattaccgattcccttgttcacttttaaaccaaacttattttaacaatattttctacttaaaatgcttaaacagatgaagagacttgtattggcaagaaacttaccaacttcctggcccattggtcccaggtggttgccttcgggtcaaggtacggattactggatttttgacccaagggtgggtggagaaggctgatcggcgtttttttttaagattttgactgggttcttccggaacgacctttaaaatcttggcgacgccggggtcggcccgggaatttcggaccggttcctgtgggcgtgcccacttttccttataggaggcggattaaaacttggcgtgattaagggcattggtggtttctgggggga

SEQ ID NO: 173464 - DNA, 315 bp, Arabidopsis thaliana
ccttgccaaccgcgcgcggggggtggaatagccgccactaaccgactcactagagggaagagctggtccgcctgcaggtaccggtccggaattccggggtcgacccacgcgtccgcaaggatctaaaggtcgttgcgggagaagccagccgaaatgctgagagagaacgtcgatcagacttcttcaaccaaccttgggtcgaagatgcagttatacgttccttgaaccggaggccagcagctgggaacgatgggccatttttttggggagtttcttgacgatacatagtctctttcatctcgttatgacgcattt

SEQ ID NO: 173465 - DNA, 494 bp, Arabidopsis thaliana
cactatagaagttctatgacgtggcatgcacgcgtacgtaagcttggatcctctagagcggccgacctatgtttttgttttcttttgttttgatttttttttgtttggttttttatttttttgtttgtgagaaaataggggatttatccattcccttatatgattttatacaataaacaccttctgataagaaaacaaacaagggggacaaaccccctttgaaaatggttggaagcaaatatggatcaaggtttttttgggcctaccaaatgggaaatttaagtttcggggttgaccaagttttttagctttaggctagagaaaccaatttttttttttttttggggggggggttgatggttattatggaccctaaaagggccttcggttaaactgtaaatcccgccaaacgtttttttggatcatttgaagtggaggtttgcccaattttggtgctttttaaggaaacccgaattattttttttttattgggg

SEQ ID NO: 173466 - DNA, 520 bp, Arabidopsis thaliana
  unsure (1)..(520): unsure at all n locations
ggtgacactatagaagggctttggcggtggatggccgcgttccttaggttggattcttttgagggggcggcccttnttttttttttttttttttttttttttttttttttttttttttttttttttttttttggggaaanagggggattattccttacccttaattctttttttccattaaacccgttttgttaagaaaacaaacaggggggacaaacccctttagaggagggttggaggcaaatttggatcaggtttttttggggcctacaaaaggggaaatttaagtttggggtttgaccaagttttttagttttaggttagagaaaccaatttttttttttttttgggggggggtttgatgtttagtttggcccttaaaggggcctacgtttaaactgaagatccagccaaacgtttttttggtgcttttgaagtcgggatttgacccattttggttgactttttggagtaatccggaatttttctttttttaactggggggtaatgcctcagccca

SEQ ID NO: 173467 - DNA, 473 bp, Arabidopsis thaliana
aaacgactcacttagggaaagctcgtacgcctgcaggtaccggtccggaattcccgggtcgacccacgcgttcgctaatttgggggccaacttttcatgcgaggtgatggctctaagttctcacagcgtttgatggtctcactttgccgtttagcggcaaattgaaacgtgatggattggtttttaggacaagacaatggaggatggcctgacgcatgttatttaagggttttattttgtggggtggcgactgggagtaccacgtatagcagccttgacaacacatttgttcaaatggttgtgtctactttaagacatgaaatggcgatctggcgctaagtcattcggtggccgaaagaacgcttcccgcattcacgtaagtctgattgtcccgtctgctttgatgacgttaccactgaattacctcccaacataggcctctcggcctttttgttcatgtgtaactcctccga

SEQ ID NO: 173468 - DNA, 347 bp, Arabidopsis thaliana
actagagaagctctatgagcgaacctgcacgcgtacgtaagcttggatcctctagagcggccgaccttggttttccttttcttataagagatactcttttcgaaaaaggaaggggatattgtacgcattattttatagcaactctagccaacaaagggttacggggacctcgtagaaaaaagatgctcactaaacttggtccttgtgggagcccaactttttttttagagagggggcgaaaaacactttatagaacaaattggggcctaaacttccggatgacgttcgatctaatccccctcgcgattcttttttgtccatttcctccttttgtcttaaaacgactt

SEQ ID NO: 173469 - DNA, 259 bp, Arabidopsis thaliana
ttttttttttaaaaaataaaatactcttgcccatacataaagggcaaaattgattaaagaggattatcatcagaatttttccatattacatatagggggatgggctctttaattcaacaaacccttagcccaaaaaacaaccttccccctaaacttttaaatattttaaaccggggggggggcctttttccctttatttcaaaacaaacccacacacaaaataaacgggggggtgaaaaagccccaagccggggggggt

SEQ ID NO: 173470 - DNA, 545 bp, Arabidopsis thaliana
  unsure (1)..(545): unsure at all n locations
ttaggggaagctacgacgcctgcaggtaccggtccggaattcccgggtcgacccacgcgtccgcgctttttcaaattgtcgtctaaagtctctaaaaccaccatccgaaggtcttgacaggagagaattcgaatgcggacaggagaatttccttccgtgattttttccttggaagccgaaaaacgaagtttancttaccctccctgctgagaagaaggggtgttattgaccctggtgtgggttcggccccgggaagtgagggattttttaaaaaaggctactggaccactgggccccaagggcccaggcggcataaacccccaggaggggtaaccaagggggagggccacttacccaaaaggaggctgaatcccacccaattgaaacccagcgcctggttattttccccaatgccagcccttatttttctgggaccccaacgcccttttcccaaggggggattggacgcctgagaaggatattacactgggataaacttatcggggtccaaaagaaccctttgatcgcgcgcgaggggttttctt

SEQ ID NO: 173471 - DNA, 447 bp, Arabidopsis thaliana
gctactatacgactcacttagggaaagctggtacgcctgcaggtaccggtccggaattcccgggtcgaccacgcgtccggggtggatcaccattgacattgctctctggaagttcgagaccaccaagtactactgcactgtcattgatgcgtctggtcatcgggatttcatcaagaacatgatcactggtacctcccaggctgattgggctgtccttatcattgactccagcgggggggggttttgaggctggtatctccaaggatggtcagacccgtgagcacgctctccttgctttcacccttggtggcaagcagatgatctgctgttgtaacaagatggatgccactacccccagtactccaagggcaggtacgatgaaatcataaggggggtgcttcctacttgaagaagggtgggtaccaccccgaaaaaatcccatttggg

SEQ ID NO: 173472 - DNA, 300 bp, Arabidopsis thaliana
gtacgtaagcttggatcctctagagcggccgccctttttttttttttttatcaccaattcttatctttgtttgatggttagaatcatatatggttctggacaagaaggttatatatatacacacacaagcaaccatttgttgctttttggatacaaaacaaaaagcaattaaaggaccaattgattaagcctaaagggggtgaattgatcttctcatgctaaaaaaagcatacaaggggggggccaatggttccatccaaaaccgatttaagggcaaaatttttaaaccgggttttctat

SEQ ID NO: 173473 - DNA, 410 bp, Arabidopsis thaliana
  unsure (1)..(410): unsure at all n locations
gtcgcacgcacgcgtacgtaagcttggatcctctagagcggccgcccttttttttttttttttttttttatttttnnnnnnnnnnnnnnnnnnnnnnnnnnnnnnnnnnnnnnnggggaaaaaaaaatcacccgcaggcttccctctttggcttgccactttttattccccgcggaggggggccaaattatcacccccaaaggagggggtacccccctgtttttcccctattcaaacctattatgcgctgacccccttttttcttccccaaggggggctcaaataaccccgccctagcccaggggggccccccatcctcttcccctggggccccgggtgtgcttttaaaagccccccccaanaaaaagcccgggggggccccccccctcccctgggccccaaaaaagaaa

SEQ ID NO: 173474 - DNA, 330 bp, Arabidopsis thaliana
  unsure (1)..(330): unsure at all n locations
gacgtcncacgcacgcgtacgtaagcttggatcctctagagcggtcgcccttttttttttgtcttgaattcacttttttcaagtttggatacatgtaagagaataaataatttaaaccggaatctatttttgttggttcggtttgaattggttcatctaaattaaacacatggctttcaaaacataacccaaaacaggaaccacttacatttttgggggggggaacccttacaaaaatttggacgcatattattccaccctttaaaatctttcctcctcccagggggggtaatcctcttttccttgggcatgatttttatggcacttggg

SEQ ID NO: 173475 - DNA, 464 bp, Arabidopsis thaliana
  unsure (1)..(464): unsure at all n locations
ctcactttagggaaagctactacgcctgcaggtaccggtccggaattcccgggtcgacccacgcgtccgcgcacgcgtacgaggacgcgtgggcttgcaaaaaatatanactttgggaagcttgtttttcgaacggttggcttttccggggcagatatccggaatcttgttaacgaagcggctataatgtcggtaaggaagggacgttcttacatatatcaagggggcattgttgatgtgttaaataaacaattgctcgagggtatgggtgtacttcttacagaggaagagcaacagaaatgtgaacaaagtgtatcttacgaaaaagaagagactttctggctgttcatggaggctgggtcatatgagggtgtggctcattttgtttccctcgatttgactgggcatgcattttcgcagctccttcctggtgggaagggaaactgctgtatcggttttctatc

SEQ ID NO: 173476 - DNA, 376 bp, Arabidopsis thaliana
gacgtcgcacgcacgcgtacgtaagcttggatcctctagagcgtgcgcccttttttttttgttttgtttcttcttaataatctttttatgtgcgaaagtttcaatagtcttcataacagaccaaacataacatctaaaacattactgttacaaattctgaaataagctcctaaaaaatatttacaaaacccataattattatgaagttgttaatgggggaaaatcaataccggtgagattctcttgaaactaataaaaaaaaagattacgatattatctcatttctcggaaggggaagggtcactcaccgatcttggtaacaccggcggatctttatctttagaggaattgaaagatcttttgcaggggaaaatgg

SEQ ID NO: 173477 - DNA, 271 bp, Arabidopsis thaliana
gacgtcgcatccacgcggacgtaagcttggatcctctagagcggccgccctttttttttttttttaaggcatgcatataaacattggtattatgtggtttccggtagaaaagtaacccagaatggttttaaaaaatagaaagaggttggctttgccttttgaaaaaaagcccgaaaaacgcccggttttgatcctataacctcactaatatcctccggtctttagggggggggggggtagctttcttggtccctggttcctcttctaaaaa

SEQ ID NO: 173478 - DNA, 418 bp, Arabidopsis thaliana
  unsure (1)..(418): unsure at all n locations
gggaaagctgctacccctgcaggtaccggtccggaattcccgggtccacccacgcgtccagctacatgganagactctcgattcccgccgcttcttggttttccggcggaaccattcctccgacgaaggtgagagtttctccgccgcatcatctcccggggacctcccaacaggaattccccatcgcttgggccgccattaatgccctcttttccgtgctaganagggacctactgggagggaggatttttaacaaaatgttccatgaaagacacaaaaagaaaatggacattttcatatttaaaggtttctgaatcggcctctgggtaaaaggagaatcctccaaaactaattgatgtgaaatcccaaggggggcctttttttttcagctggtgaaacaaaaagataccccgggaaa

SEQ ID NO: 173479 - DNA, 385 bp, Arabidopsis thaliana
caagattatgacgtcacacgcacgcgtacgtaagcttggatcctctagagcggccgcccttttttttttttttttgtttttttcctctttctatcaatttattttcatcgtttctggtgtaaaacgtaaacccagtttcagaacagtcctttgtgctccatcagctcataactccggcttcttctcctaattccctttttttgggggggtcctgattattagggggattcccgtaacagataaaataaaaacatgggctcgatcaatagacacgagctttgggagggaaagtgtcaatctcatcggtcaggtgtccatgtgaacaggcctataatccaatctcactttctcatcttccaatatcccaatgtatgcttcatccatt

SEQ ID NO: 173480 - DNA, 349 bp, Arabidopsis thaliana
  unsure (1)..(349): unsure at all n locations
tttgacgtcacctgcacgcgtacgtaagcttggatcctctagagcggccgcccttttgggaggggttttttttttttttttttttttttttttttttttttttttttttcggaaatccttttttgtaaaaacaatcgtttttttattatgggacaaggtttggggcccaatttttacaagtttcgaaaatttttttgcaaacaaaaaacacctttgtgttgttttgntttttattgggaaaagggggaacccaattttttcttgggtttttttcccaataaaaaaatggttgttgttacagggtttaaaaacaaaaacgttacattttgaaacaaacggttttttttta

SEQ ID NO: 173481 - DNA, 445 bp, Arabidopsis thaliana
atacgactcactttagggaaagctcgtacgcctgcaggtaccggtccggaattcccgggtcgacccacgcgtccgagtgaagacaatgatgggcttgatcgtttcaggctttcgcctgctgagttacgtaaagagttggagaagcgtaatgcggatgcggtgtttgctttccagctgaggaatcctgttcataatggtcatgctcttcttatgactgatactcgggggagacttcttgagatgggttacaaaaaccctattcttttgcttcatccgttaggtgggtttacaaaggctgatgatgttcctttagatgggaggatgaagcaacacgagaaggttctagaggatggtgttctcgatccggagactacaggggtttcgatattccccgcacctatgcattacgctgggccaaccgagtgcagtggcacgcaaaggctaa

SEQ ID NO: 173482 - DNA, 222 bp, Arabidopsis thaliana
  unsure (1)..(222): unsure at all n locations
cccctttttttttttttttattttaattanattttattatattattattgaaatacttatttcatacaacataactttaaactgatggggaaaaaaattcaaatgacacaccaacttttttattagatagatttatcttccgttgtatacaatataaactcggggccttcnatctcgttctcctcataaaaaataattaattaattgactcctacctttccg

SEQ ID NO: 173483 - DNA, 394 bp, Arabidopsis thaliana
  unsure (1)..(394): unsure at all n locations
ccggctactatacgactcacttagggaagctcgtcgcctgcaggtccggtccggattcccgggtgaccccgcgtccggagctcgagtaattattaactatctttttgaggagaacgagatcgaaggttacgagtttctattgttacaacggaagataaatctatctaataaaaaaggtggtgtgttcatttgtaatttttttcccccatcagtttaaaagggtggggggtgaaataagtgtttcaataataatataataaaatctaattaaaataaaaaaaaaaaaagggggcnggccggtctagaggatccaagcttacgtacgcgtgcatggcacttnataacctcttctataggggcaccctaaattcaaattcactggccggcggtttta

SEQ ID NO: 173484 - DNA, 450 bp, Arabidopsis thaliana
  unsure (1)..(450): unsure at all n locations
atacgactcactttagggaaagctgctacgcctgcaggtaccggtccggaattcccgggtcgacccacgcgtccgcggacgcgtggggtcctccgaagcagaagactcaggccgaatctgacgccgctgctgctgctgttgttgctgccaccgtcgtctctacagatccgcctagatctcgtggccgtccaccgaagccgaaagatccatcggagcctccccaggagaaggggattaccggatctggaaggccacgaggacgaccaccgaagagaccgagaacagattcggagacggttgctgcgccggaaccggcanctcaggcgacaggtgagcgtaggggacgtgggagacctccgaaggtgaagccgacggtggttgctccggttgggggctgaattaatcggtcttatgcatttcgggatctttagttactgaaaaatggaatct

SEQ ID NO: 173485 - DNA, 373 bp, Arabidopsis thaliana
aagattatgacgtcgcacgcacgcgtacgtaagcttggatcctctagagcgtccgcccttttttttttttctttctctaaaaataatccatgtgttgatagattctattacagaataggcctaagctgcttcacttgaagaaactaaaatgtgcttgtgaatggtgaaagaccacactgtagacactcattattaacaatctaattgggagaaagaagatgatgcgctagttgactactccttgatgccacgaatcttgttatgagtttcaaagaatctctcccactaaataaaatgtttataataaagaacttgcgcagccattgatcccgctcagctttcatctgcttcagctccttccggatcacatgcc

SEQ ID NO: 173486 - DNA, 344 bp, Arabidopsis thaliana
  unsure (1)..(344): unsure at all n locations
gacgtcgcacgcacgcgtacgtaagcttggatcctctagagcggccgccctttgtttttttccttttttttttttttttttttttttttttttgtttttttttttttgtnnnnnnnnnngttttaaccaaaggaaaagtttgcccataaacaaaacctctttggcttttcccccagaggccccccttctttgggggggtttcatttcccaagacgggggctcttaaaaggtggaagggggaccaaaaaggggtgaggattttaaaccctggaccaccccctttctttttggccctctttagaaccccctgttcccccgggggggccgggggatccccagttttt

SEQ ID NO: 173487 - DNA, 414 bp, Arabidopsis thaliana
atacgactcactttagggaaagctcgtacgcctgcaggtaccggtccggaattcccgggtcgacccacgcgtccgcgcactgcttcctccgagagccgtcgtctcctcctctcttgcgcctctgagaattccgatgatctcatcaatcatctcgtgtcgcatcttgattcctcctattcgatcgatgagcagaagcaagctgctatggagatcaggctcttatccagggggaacctgagaatcggatcaaaatcgccaagggcggtgcgataaagccggggatttctctgatctcttcttcggatcttcagcttcaggagtatgggggcactggaatcttgaatctatctctctgggacgagaacaaagagtcgattgcttctttcggggcaattaagccggttggcagggctt

SEQ ID NO: 173488 - DNA, 471 bp, Arabidopsis thaliana
  unsure (1)..(471): unsure at all n locations
ccgcccccccccacccacccaaaaaaaaaaaaaaacaaaaancccggcagctcgttgnggcctcccccagactantgaggngaacccacgcgtacgtaagcttggatcctctagagcgttcgcccttttgggttaggccctcctctctaaaataacccccctttttgaaaaaaatgggggggtttcctctatacaaaaggggtaaaaaggggttcttaccatgttaaacccccagggggagaagaaaaagaaccgatctaccaaaccccaccctccccaaaaatttttttcagggggggggacaacctttggaacctttctccttaaaaccttcaccacaccccaacttgggccaatgaacaaccaagtcttttaaaaccccccctaaatctccaaccccttgtttcaagttcaaaacccataaccctctttttcaaacccctcccaatgaacgaaaaacaaaattttttt

SEQ ID NO: 173489 - DNA, 454 bp, Arabidopsis thaliana
  unsure (1)..(454): unsure at all n locations
agctacaatacgactcactttagggaaagctgctacgcctgcaggtaccggtccggaattcccgggtcgacccacgcgtccgctttgatcttgttgggaacaacactccggtgttcttcatccgtgatgggattcagttcccggatgttgtccacgcgttgaaacctaacccgaaaacaaacatccaagagtactggaggattctggactacatgtcccacttgcctgaaagtttggtgacatggtgctggatgtttgatgatgttggtattccacaagattacaggcacatggagggtttcggtgtccacacctacactcttattgccaaatctggaaaagttctctttgtgaagttccacttggaaaccaacttgntgggatcaagaatctgactgatgaaaaggccaaggttgttggaggagccaatcacagccacgccactaaggatctc

SEQ ID NO: 173490 - DNA, 512 bp, Arabidopsis thaliana
  unsure (1)..(512): unsure at all n locations
aactatagattagcttgacgtcgcatgcacgcgtacgtaagcttggatcctctagagcggccgccctttttttttttttttaaataattttagttcttttattttagtttttacattctttagagccccaaataacaattctcaacaaagaaacattaatataagaagaatagaagaaaccattgaaagcctaagtcctctgaagctaaagactttatcagctttctttgtaggaagtaaaggcattttttgacaatntattcttattttcaatcccaagaatttattccactttcttcttttcctcataaaatcttgaattggcccaaaagaaaaacttcatttctgtgatcatccatcaatacgggacttcctgttcgcattctccagcaggcacccattatttgacaggctttcatcaggagataaactttttccccagaaacccaatggtgcccttccacacttctggttcatctctttcggattgggcaccatttcttttggtctca

SEQ ID NO: 173491 - DNA, 289 bp, Arabidopsis thaliana
  unsure (1)..(289): unsure at all n locations
taaaaaatctactggcttaacctccttttcaaaaaccttcaatttaaatcagtccgtatctcatacaactcaaaaacaaaagggataataaaaaagccaccatttggggctatttagaggttgcaggcaaaaaaaagattttttcttaataaaaacctgggcgttttaaatattcatcccaccccagaacctgtatatgcctttaattaaatctaccggggaaatatnccatcctaaaaccccaaactcttgaatttttgaacctttataaagggtggtaaaaaaaaaa

SEQ ID NO: 173492 - DNA, 498 bp, Arabidopsis thaliana
cctgcaggtaccggtccggaattcccgggtttacccacgcgttcgcttcgttccttaacttctttttcagatccaaactcttaccatactttctcaccacacacacactattcgattcgatccccacttttaaaatcccaaagatctcttttaatttgaaaatccattcttccccaaatcaacctgagaatccttctaccagggtgggtcaagaatttgacttcctgaaggacttactgattcacacccttcccttatgggaaggtccattacccattgtaaccgcacgaacctaaattttggtcggaccttttcagctttttaaacctttcccttacccgtaaccaacatcatctcccaatccagtaatcaaaggctttttctcattcttaaaaaatcaccccgaagttactttcgcgtgttatagttcccaagcctcctgggctggctgtgagtcctcaccgacacttgaacactccccctaacttcccccctttg

SEQ ID NO: 173493 - DNA, 413 bp, Arabidopsis thaliana
atgcacgcgtacgtaagcttggatcctctagagcggccagcctaatccttttttattaaagatttattgagaaaatctaggggaaagggtgatccccgactctaatagaattcgggtaaccagagctaaaccggaccaaagctgtctaataattataaccgtataagcaaagccaatttttttcaaaaggagtggcgtggacgcaccttacaaaaaggttgaaacactaaaaaaaattcattttgaagaatacaaaaacaagctgcggaggttcttgtctaaaatgaggcacttgaaatcagaagaccgtgaaaaaggttgagcaggatcttcaaacttattaaaccttttgccgagtcgctagcatcgtgggtaaaagctaatgccaaggctggttttctaccataccgagt

SEQ ID NO: 173494 - DNA, 472 bp, Arabidopsis thaliana
  unsure (1)..(472): unsure at all n locations
acactatanagtagcttgacgtcgcatgcacgcgtacgtaagcttggatcctctagagcggccgccctttttttttttttttttttttttttttagaaaatctatggtttatgttgatccccgactctaatagaattcgggtaaccagagctaaaccggaccaaagctctctaataataataaccgtataagcaagctcataagtatacaaaaggattacattgacgttaccttacaaaaaggttgttacactaaaagaattcattttgaagaatacaaaaacaagcttcgtaggttcttgtctaaaatcagtcattgaaaatcagaagacgatgaagatgttagatcaggatcttcaaacttattaaaccttttccgagtcgctgcatcgttgctaatgctaatcccatgctgctttctaccatacgagtcttcgtttatgtaatcttcatcctcatcatcaacaacattg

SEQ ID NO: 173495 - DNA, 369 bp, Arabidopsis thaliana
ctatgacgtaccatgcacgcgtacgtaagcttggatcctctagagcggccgccctttttttttttttttaaactttttttttaaccatccacaggatgtatcacaaataagcaccgatccaactgcgtctacataatgaacaatcgccaccatctcctgtatatacagggcactcacgacgaagcaccgttttttcaaaaaggaggtgaaagccacttcccatactaaacacgtagtgcctgttcaagatttaactcctcgagatttaccatctaatgctagcattctttattgatgacagcaaagcttgaacatcgcctaggctggtgattatgaatctgatgatttactccagctgaattttacctt

SEQ ID NO: 173496 - DNA, 448 bp, Arabidopsis thaliana
ttagatgagcttgacgtcgcatgcacgcgtacgtaagcttggatcctctagagcggccgccctttcttttctttttttcttgttccaatgatgttggtgctgcatgtttttttttgtagcgatcctcattttgctgggggcaaaaaaaaaaagccgttcgcttttttttttttcaaccgaaccaaaatcccccccccttttttaaaaatgttatgcttttaaccttccatcaaagaacctttttttcctttgcatccaaaaaaagaacaacccccctttttgggggtggggataaaacctgggcccacactttttcttggagaggtgaactctccaatttgaacccagacccttgaaatttccccaaaaacatctgggggatttggtttcccattggaggggaattttaactgttggaatccccatcttcccttttacggaaaaaact

SEQ ID NO: 173497 - DNA, 461 bp, Arabidopsis thaliana
  unsure (1)..(461): unsure at all n locations
aggtgcactataaaagagctagacgtcgcatgcacgcgtacgtaagcttggatcctctagaggccgcgcgcctngttttttttttttttcgttttanaaacacacnaccnnttnaaaaagcaaccccgggaaaccacgaggcaaacagaactcccaggtgcgccgggaccccatttgttcccggccaattactttaaggatctttccccccccctccggagcggggcgagtcaaaaaacattttttctcgggggggggggggttaaactttttggcgttccgcgccaaaaaaaaaaggcgttgtttttgtgggcaggaacgagactcttcctcccgcgcactgggcatttcgggccatcgcccgcgctccccctctctaagccccagcccgtcgatgacatgctcggggtgtcggtcgtgctcgggtcgttaggcgccttcggtgttccccggggggcgcc

SEQ ID NO: 173498 - DNA, 439 bp, Arabidopsis thaliana
ctatgacgtcgcatgcacgcgtacgtaagctaggatcctctagagcggccgcccttttttttttttttttttttttttttttttttttttttttttttttttttttttttttttttttttttttttttttttttgtttatctgataccatggcaacccccgggaaaaatgtttaaaacgcaattcaaagaattttttgggaacaaagaggaaggcccaataaaaaaacttggaccccacaggagaaggaggctaaaaaaaagtgggtgggggaaaaaataaaaaacttgaaacaaagccctgtttggaggggttatttagcgaaggactactttttttctggacaaatatgaagggggaaataaagtaggcccctacgaaaaaggaaactggaaggaattgccggcaaccccataaagaaaaccccccagggcacaacg

SEQ ID NO: 173499 - DNA, 514 bp, Arabidopsis thaliana
atacgactcaccattagggaaagctgctacgcctgcaggtaccggtccggaattaccgggtcgacccacgcgttcgctagaacaatagccgacgcttcgacttatcaacacattagacgctccaaccgaatgccattgctgattagactgctccataaccccatgaagcaaacagaaggtgtcatattccctgcagcacatcaataccttttcctaatatgatttttcttgagtgcattggtacctagcaatcgatctacacacaagaattgtctactaaattcttcaattggaaatcctattatcgccttcagtgctactggagtctcttcttgcattatagcggtgcgcattactggagtatggaaatctgccttgccagtatacgctgggcccaggactcactatgcgacccagacaaaattgccgatagacaaagttacagcttctgatgataggactgcaacgcaatatgtgaaaaccttgtcaagccttagactgtataaactatgaa

SEQ ID NO: 173500 - DNA, 472 bp, Arabidopsis thaliana
  unsure (1)..(472): unsure at all n locations
ttaggacgcactatagcaatagctatgacgtcgcatgcacgcgtacgtaagcttggatcctctagagcggccgcccttcgctttcgtactgttccaattgagtttaacgcgtattgtcgtctttctttatcataagcgatcaattttcgntacaaaaaaaacactggaatttttgggggtccctgtgtttacaggtcccccgccaagtaataatttttaatcccaaccggggggggtgcttttacttttttgaacaaaacacttttttgggacccccccccgcgttggtcaaaccccccctgggcccattggggccaaattagggttttaatttccgttttttttcccatttttttgaaacccaaaccctttaaaaaaaaattgggccacttggttccccaaaaaaaaaatagggcggaaacctttttaaccctttgacaaaggaaaacccgccccaattttttttaaattg

SEQ ID NO: 173501 - DNA, 156 bp, Arabidopsis thaliana
aacaaacctaacgagcaaaaatcaaatcttctctctgttaaaatctcccgactaagaaagcgttgttttccatttatttacggggggggtaacaatacttttgggactaaattggggggggcggaatcatggccggcccaaaaagtttagggggaa

SEQ ID NO: 173502 - DNA, 457 bp, Arabidopsis thaliana
  unsure (1)..(457): unsure at all n locations
gcactatagaatagctatgacgtcgcatgcacgcgtacgtaagcttggatcctctagagcagccagccttngttttttttttattttttttttttttttttttttattttttttttttttttttggggcccaagtcaacacctttattctagaagagagtaaacaccaaggttaacaccaacatttgggaatccaacggggcgttctaaaaccagaacacatcctaaattggcaaaattcttgcaaatagcatcccgcttcaagatggggtgcatcaacggtgaacaaatgatacttcgagaaaagagtttggaattgaggagggttgataccatcggaccgtttttcttgggtttaagatcagtaatcagacctccggtaactagggttcttaaaaaaaaaggtttaaaacggttaccggcttggatactgaaacacaagctcttctgaaacacct

SEQ ID NO: 173503 - DNA, 297 bp, Arabidopsis thaliana
  unsure (1)..(297): unsure at all n locations
aactatagattactatgacgtaccatgcacgcgtacgtaagcttggatcctctagagcggccgccctttttttttttttttaacatgggaaatcttttgatttgaacatttttactggatgtaaaatccttcagttcttctgtaaactgtagtgacaggtcttttagtatgatgaattaatgaagaatttgagtagaagatgttagaaatacaacatagttgggagcaatgaaagacataagagactntcagagaaacaccanatgggcttttacctggaagggctttcaatatatt

SEQ ID NO: 173504 - DNA, 258 bp, Arabidopsis thaliana
  unsure (1)..(258): unsure at all n locations
acactatagtattactatgacgtcgcatgcacgcgtacgtaagcttggatcctctagagcggccgccctttttttttttttttttttcaattaatgggttccttttaaaactttactcaagaatcccaaacacaaacatttttcatttctaaaaccaatttggagccaatacacttaaacatttgaaaggaaagagtataggtaaggtagatatttttggaanaatggaagatcattttctttttttccaagcttttt

SEQ ID NO: 173505 - DNA, 449 bp, Arabidopsis thaliana
  unsure (1)..(449): unsure at all n locations
ttaggcaccttaatactatgacgccatgccgcgtcgtagctggatctctagagcgccgccttnttttttttttacatttgtaacaaactcctttgttgtcctggatnatataaagtgacaatacataaactggttatacattctttacataagaaaaacagagagatcgccatgtatgattttggctttctcatttctattattaacgagggctgttattaaaattaaattaaagctttgatatataataaatcaggcagggcctttcttgattccctgacaagctttttagaaattgttctgtaagctttctcggatggatgaacgaagtcgtagaagacgtatttatctgggttggggcatggtattatagccgtaatcatacaacaacacccatttttctcattagaaaatccgtatcttctataatttttaataacatccataag

SEQ ID NO: 173506 - DNA, 342 bp, Arabidopsis thaliana
  unsure (1)..(342): unsure at all n locations
tatgacgtcgcatgcacgcgtacgtgagctaggatcctctagagcagccagccttncttttctgtttattaattttttttgttaatgaagtgttgttgaagatattgttgagttaatttacaattgtgacctatttggagaatggggcggggacaaggaaaggagggcaggaatgtgggaacgataattttttcaaatctttgcaaagaataagaaattaaagggcttttttgggtggaatgaaaccgggaaagactgcatgaaaaacatttccaaacagctctccaaaataacttcttgggggggaggggcccttttataaaagaatgagagaaaaaaccc

SEQ ID NO: 173507 - DNA, 450 bp, Arabidopsis thaliana
atgcacgcgtacgtaagcttggatcctctagagcagggcgccctactccctttttttttttttgactctgatcttcatgggtcaattgcaaattgtacgttgcttgctctgagaaatattgttagactatgaaagatttaagcatcgtaaaaaatattgccgtatgtttagctccatggctctatttaaagcatgggggagccctttctcgatcctgcaaggtagaaaactgatctgttcagacattaaaggtttgcgagccgataatgcccttgaaatggtaacacccaggtcccaaaagcaaagaatcatgaccccacctcggttttcttccttcattcatggtcccctcactttcttggctgtggctccaacatataccctccagcgcattaaacaattgaattagctcctcgcatacgcccatagcccatgagaacctccttctgc

SEQ ID NO: 173508 - DNA, 216 bp, Arabidopsis thaliana
tcactatagggaagactgacacgcctgcaggtaccggtccggaattcccggctctgacccacgcgtgcggtaacatgcataatcacataaattatcgtctttctatggatacttactggggcacaaggccatgaactgctaaacgagcactaccctcctatgatgtatcccaagctgaaaacagtaactatcaccgctaatatcgacataagagcc

SEQ ID NO: 173509 - DNA, 389 bp, Arabidopsis thaliana
ctatgacgtcgcatgcacgcgtacgtaagcttggatcctctagagcggccgacctatcttttcttttttatctttatgattaacggctctccaactcatattcataaagaacgcagcaccgattcacacttgcttgtgaagagataccatcttggtcctggcaaatactgagtagtgacagctaacattatttttttcaagaacggggagcatcactaccgcctcaacgtggcctttgagagtgaaaacttcgctaaatctagcaacccctgcacggactttatgctgtgcaattagctcatgatatcttcacactggaaggcaggtctaggagattcaaattcattagcaagacgtcaagaagtgtaatacaaaaaagatcccaatga

SEQ ID NO: 173510 - DNA, 353 bp, Arabidopsis thaliana
ggaagctggcacgcctgcaggtaccggtccggaattcccgggtcgacccacgcgttcggatttgcgaaagggccttaccgggttttggcctctgccgggtaggcttaaatttgtattaggaaggtttatggtaagaattttattgttcccgttcgacattttatgcatctgggatggattcgcgaaccttcttgacctggcattggtggtattcctagtgattggcctaactatgctgcctgtcccaaggactctggaacctctaaggtggattcaaaacgtggcaaaatcaaaatgattgaccttgatcggagaaaaagcttgtgacggctacactgtgcaggcttaaaaga

SEQ ID NO: 173511 - DNA, 497 bp, Arabidopsis thaliana
tccgactcacttttagggaaagctgctacgcctgccaggtaccggtccggaattactggcttggtcgacgcgttcgctacttcgtagaggccctttaatattttttaatgtttgaagtactgaaaggagaatcccaaaacagaaaatgtctactggtgtgaacagggcatgatgactttattccaaatcatgctccaatgctacagtcgtcaccggaattcttttttccatagtgtgaaaaatagaaggagcaaagactgcgtaaacatgaaacaaagtttgatgaaatcacttccagttgttgagcccaatgtcaggcaatgaatagctttttgtgagtaacccacttcatttgcataccctggagctcccttaaccctatcatctcccgtaaccctaccgcgtgaaggaatcatggtcggtgaaaaattcgtgcttttaaagtcagggaaacttgtgcgtctttccagacattgggtatacctttaagctttttt

SEQ ID NO: 173512 - DNA, 469 bp, Arabidopsis thaliana
  unsure (1)..(469): unsure at all n locations
cactatagnatagctatgacgtcgcatgcacgcgtacgtaagcttggatcctctagagcggccagccttnnttttttttttttttattttttgtgtttattttttttttttttttgtaaaatttgagaactttgtattattttggaaaaacngggggcacctttatacaaatcgaatatcctaagaccgttttttcccaaaccaatttcaggggacgggaatttttttaattaaaaacccccaaaaatagggggggtttgttttttcccttcgaaaaaccccctttgttgggtcaattttttagccccttcccttgttaaaacccctggaaaacttttttgggtgcacaaattgggttagttttccatgggggaaaggctaggggcgggccaaccactcggggaagcgcaaaagcgcatacacttccccttggttcccggggggggggaaaaatctccagttattttta

SEQ ID NO: 173513 - DNA, 284 bp, Arabidopsis thaliana
actggtccttaacggcgctttggttggttttttaatatttaaaaaagtttttcaaagaaccaaagataattggcttaactacaatgaaaacataaaatttacttaaacgggcagtcacaataaaattaagacatcgcccgtgatttttattttttcggggtgcgcgggttacaaagggggggggatccatttaagagaagaaccttgaaagattggccgttgataatggagggttctgagccctccaatgggggcaagggtcggcaaaaaactcctactttgat

SEQ ID NO: 173514 - DNA, 471 bp, Arabidopsis thaliana
atttaggtcgaccctatagaatactatgacgtcgcatgcacgccgtcgtaagcttggatcctctagagcgggcggccctttttttttttttttttttaattatttggaaaagaggttattatcaaaagaaacccaagattattggcctaacctccatggaaaccttaaatttaccttaaccggccggtcccttaaatttagccttgccgggtttttttttttgggtggcgcggttccaaaaaaaagggacccttctaagagaagacctggtaggtctgggcgtggttaaggatggttctgagtcctccattgggggcagggatcgtcaaaagaactcctactttgatgcaaaaccagttagctgtccaagatagaccaaacctctttggtttcttgagaccgagccacataatgcatggaaggtagtaagttgttggggcaaaggcgaatcctccaaagaggccgagtagt

SEQ ID NO: 173515 - DNA, 359 bp, Arabidopsis thaliana
cccctctttatcttttatcctcctaaaatcttctaatgtggtctaatctctttctcaaaaaccaaacacttatctctcgattatatcacaagggagatatgttttatcaggggggggggacccagtggagggggcccggccgccaaaacaagaagaacggtccaccgattgggttccccgaccacattctttccagaaacggctaaggggggggtccctctgctttttcaccaatggtcccccccctggggttggggccggtgtttcttagggttgcccctacccctttggcccatcttcgggtggggggcccttggagggaccattttgggggatggcatgggtcattaacggtgtcc

SEQ ID NO: 173516 - DNA, 366 bp, Arabidopsis thaliana
  unsure (1)..(366): unsure at all n locations
tcccactcatttagggaaagctcgtacccctgcaggtaccggtccggattcccgggtcaacccacgcggtccggggacgcgtggacanaacgcgtgggggcttttcccggaaaattatttgctgagttttcttccttccatcgccactttcctggaaaaaaaaactaaatttcctctctttctttaagctaaaggagctttctgtgatcaattttttctatatttctgtgatgggcgttcttatttcacgcgctttgggattaattattttaacccactatggcttaggatctggatattatcactttatgaattctcctttttttggataaggttgttaagttcttaaatgagggaatttttagg

SEQ ID NO: 173517 - DNA, 416 bp, Arabidopsis thaliana
ctatacaagagtcttgacgtcgcatgcacgcgtacgtaagcttggatcctctagagcggccgccctttttttttttttttgccagcgaaaaaacaaacaaatctataatcccctaagctccgatgatttctggtggctcctcaaccattgtctcatcaggtggcctgtctaccttcacaccaacatcctctggtgtgtaatctccatgcacctccatgagctttccaaggggaaacttgggagcctttaggatcttcactttacggatgaacacattctgcaacgggtagatgccctgtgttgccttctcaatctctcttccaggggcctctgggatgaacttggccactagctccttgaggtcacaagatgaagcctccttcaccataatctcactcatctttctgcggatctga

SEQ ID NO: 173518 - DNA, 428 bp, Arabidopsis thaliana
gcacgcgtacgtaagcttggatcctctagagcggccggcctatgctttttattattacatttttgtttttcaaatgtggatattttctgtttgtttgatgaaactaaaaagctcattttaacttttttttacatcaagaggttgcgtcttttgacctctaggaactattcgggagcaaaattttttctcctatcaaaagaggtgggttctatgcggagagagcgcaaaatttaaaaataaaaagaattagccccctttggaaccccccgaaaagaagaagggggctttttacctttaactattggataccccagcaagcgggaatagaacctcttacccaggctgatatcaaccccgaacctattagaacaaattattgggttgtactcaactttcaattctctgaccccttttggaggggaaaactt

SEQ ID NO: 173519 - DNA, 545 bp, Arabidopsis thaliana
  unsure (1)..(545): unsure at all n locations
tacgactcaaatagggagagctggccacgcctgcaggtaccggtccggaattcccgggtcgacccacgcgttcgagctgagagaaacgcctttctcatatttcaatccttcactttaccttttctttttttcttgttatcggatcataacaaaattttgggaaattccagggttccctggattgttggattccattattggggaaactcgatctgggggtttttttttggggttgaacggactcaacgttcgatttttttcttgaaaaaagtgaaagttttcggtcgtctnatccacagtacaccgcacccttttacctcgatccaattcacccccctgaatactgaagccaaatttgaggttaattggtactggagccttaaggattatgaatgaacacaggggaatctcggatttgccctggactcaggggaccccagagatttctcctatcctctcccaactggttaacccttggggtttattctccctcaatactgacaaattgctcttggaaccggttccgcgaaaaggcttaaaaacct

SEQ ID NO: 173520 - DNA, 336 bp, Arabidopsis thaliana
actatagatgagctatgacgtcgcatgcacgcgtacgtaagcttggatcctctagagcggccagcctttcttttttttttttttcaaaaaatgtttatcctttgcagaaaatagaatctaaatacattgaatcaggttgcgtgaataattgttagaagccggtaatagggattaggggttacataatagatgatccccatagcctcatttttattacagccaacgaacagtacattaaagtgttattaataatacaaaaagaaatacttgtcattcatcaaaaggacaatagaacatagagtcctggacaataaaactattagctttctagcgatc

SEQ ID NO: 173521 - DNA, 301 bp, Arabidopsis thaliana
acgactcactattaggaaagctggcacgccttgcaggaccggtccggaattcccgggtcgacccacgcgttcgggcgaattcctcaatctagtcttcaatgtgttgaagcttaaacgccggcatatattggaacttcttggttactggaaccagtttggtcaaagggtacttggggttgaatactggcctaatggatcacttcaagaagccctacatttggatttgaaggtgcaccagaagctcacttggaatggacctattaataatggattaagaacttcaaaaggcttggaagttctt

SEQ ID NO: 173522 - DNA, 486 bp, Arabidopsis thaliana
  unsure (1)..(486): unsure at all n locations
tttaggcgacactatagtatnactatgacgtcgcatgcacgcgtacgtaagcttggatcctctagagcgggcagcctttttttttttttttttacgtaaccaattcttggcattaaattaaattcataacaaagaaacaataaactttgggttgggcggtgattattgaacaccatcatcataacatattccaacatttatttttaattctttcgcccaggattaaaccaaattaaccaagccttaagggggagttccacaaaagaccaattgttgtgaagccaaagcgagatgggtcaaaaggtcttgaaggagacccgccactttggggattttttcccgcagagattggttggcgctccacgttgaaaatgctcgaggtggtagtttaagccagtggctggtaggtatctttcccgtagattatggttctaggctcagattccaacgaaaactatgccttctagccgaaccttaaaccttgac

SEQ ID NO: 173523 - DNA, 486 bp, Arabidopsis thaliana
  unsure (1)..(486): unsure at all n locations
acgaaccatgcacgcgtacgtaagcttggatcctctagagcggccggcctagactctctttttcgtgatggattatatagggggaggctatacgttggcagatttcttgtataaagaaaatgatctaagtctacgagctaccaattaagaaaacagagagcgataacaggacctcaaaggcgaatccctccattcctgggggagcganacctacgaaccatgggcttagaatttgaggaagcttcccgacgcaagaaaactatttaaacgggaaattgaggggcttgttcccggacaaaagactggtacctcaaacgaccgtgcggccttatttgaaatgcaacttcctttacttcttgggctttaaaaggtgggaaaccaaagcccgggtcctttcacccgagctaatggcccaaatccaaagccctgggacccgatcctcgggccacgggccacaaaattccaaaatcggacgggccacactaa

SEQ ID NO: 173524 - DNA, 510 bp, Arabidopsis thaliana
  unsure (1)..(510): unsure at all n locations
tcgactactatgggagagctggtcgcctgcagtaccgtccggaattccgggtcgaccacgcgtcggaaaacatacacaatagcaaacatggctacaagctctttctcgtctgcgcactctcgccctctggtttctcctcaccaacgctttcatctaccgcacccgttgtcgaatttcgaaagaagatgacgccagcaacccccgtaggtcccatgactgagatggccagaaggagtttccagcaatcacaacacctaaggagcttngccagagatggggatgagcaagcaattgagggcaaggacggtggtggtgggtcctttccctcgacgatgagtttcgatttccaaggccccccagcagggataccagctactncagcagtgctgcaacgagcttcgccaggaagagccagtttgcgtttgccccacctggaaccaagctggccgggccagtagccttccaggacagcacggacatttccattccagaaaaatttaccagtcagtt

SEQ ID NO: 173525 - DNA, 278 bp, Arabidopsis thaliana
aaaaacataaaaggtttataagttttgttattcactgttattcaacctgaaacagcttttaatctagatgctgaagttgcatatattacagataaacaaacacataggtattacaacgttaccacttacaatggggccttcatggatacgtaaaggctttcttatcattcgcttgtacctcccttgagatttagcctggagaccatattccggacgcgtgggtcgacccggaaattccggaccggtacctgcaggcgtaccagctttccctataggga

SEQ ID NO: 173526 - DNA, 402 bp, Arabidopsis thaliana
  unsure (1)..(402): unsure at all n locations
caagattatgacgtcgaacgcacgcgtacgtaagcttggatcctctagagcgggcgccctttggttttgggttttttttttaaatttttttttttttttngggagggaaaaaaaataacaaataagttggaactaagcatagaacaaaataagcttacactagatttaatttgggaacagtaccaaattagcaattaagggggttttcttttctgaggacttgggggtacagaaccttctctatggaatcacaggaacaaaaataaacctcctgcaatctcataatcccaatttcctacacagaacagtcccaccgggaatcaatgggacaagagtggaagatgagaagacattttttgtttgttggcccttcaactaaaatctggatagggggctgttttg

SEQ ID NO: 173527 - DNA, 512 bp, Arabidopsis thaliana
tacgactcaccttagggaaagctggtacgcctgcaggtaccggtccggaattcccgggtcgacccacgcgtgcggttaagcctgctcaagtgcagattggcactggtgcacagattggtgctaacacgcgtacggcacagcatatctgagtgggttcagcaatgtggaatcctatgtggtttgttccagatctaggggttcctgtaccgatcacgacagtgttgatgttgtgttcaaccaaactgatgtgtgctctacttacacaccctctcacccggctatctggagctgttgtttctactggagacaagttccaagactgaaacaagaaatgtgcgtaatctatcacgggaaagaagaacttcgggactttgtagtaccgttgttacccttcccaggtccggacggttaaggcatgccggccgccttaaactcaagaagtcccttaccgtatggagaaattcctgttcgaagacctggttgaaccgcgcagaaccggagcgactgcccca

SEQ ID NO: 173528 - DNA, 208 bp, Arabidopsis thaliana
cacgcacttttagggagcagacacgcccgcaggtaccggtccggaatacccgggtcgacccacgcgtgcggtggcctcgaaaaactcatgtcattgcatcacagcgaggcgaccggtgagaagactcagatgccagaagcaaacacccgcaactctacatagagcctcgacatgagcaacataccatgatgaacgtaacctaccacca

SEQ ID NO: 173529 - DNA, 541 bp, Arabidopsis thaliana
acgactcaccatagggagagctgctacgcctgcaggtaccggtccggaattaccgggtctgacccacgcgtgcggttatgggtgaggcagataaacggacgatttctaccatcggcttgatcgctgcgttgctaagggaagcgcagcctatgatcagcacattacgcctcgccgtagaagttgatactcacgcgtccaaatgaggagaatgggactatgtttatttgaaagggtgaggactaggacatcaacatcagtgtgcgctggaacagaatcagcttcatgggtgtggggaatggcagcgccagctcaggcttctgcgtgagacttaagcattccttccatcgtagcaaccaaacttaatctctacagcggtgccccgacgcggcgttgaatgccagggaagcggtgcatgcatcggctatgtttgtgctgctggctgctgttgctgcccatgacagaccattacctggccctgaagcttgtataccttggagtcccgaacgcggaaccccacccccaccttgcaccggaggcaggg

SEQ ID NO: 173530 - DNA, 542 bp, Arabidopsis thaliana
  unsure (1)..(542): unsure at all n locations
tacgactcancatanggggagctggcacgcctgcaggtaccggtccggaattcccgggtcgacccacgcgtgcgctgctaacggcgcctcatcggtcgacaagccttaccttctcatcccagactttgatggcaatggctagcggcttctgcatctctgattgttatatggtccggcttcattctgcacaatattcttacgagctacatctatctccggagctgtctgttttgggggtaggaaaacccctcagaagaaaatgtactgcctgttatcccacatcctgacgatgaatcgaagttcttttctccacagtaaactacttagctaccaatgctagcaatcttcacaccgtatgcttgatcacctgcaacgatcatggtatgggcaaggcttacgaacaataagctgtatcggtcatgggcggtgctcatggcttcgcatcaacagctacagactctgaaccatcctaatctcgcaggaagctcttggacaatcaatggctcccgaattggctaacagagattatcgaagaacgaagc

SEQ ID NO: 173531 - DNA, 462 bp, Arabidopsis thaliana
gcttaggacgtcgccttgcccgcttccggtaacctgggttcctttaaagcggccgcccttttttttttttttttttctggaaataaaaggtcctatatggccaatggagatctgctatctggcaaatagaaaatttccagcttaagttgtaaagccttaatgaaagcttggaatttccaaattgatacatcaaatttaggaacggctaatttttcattccacccaaggaaagacaaaggagtaacacagagtggtcaccaattgtattggccactcggaatcatatgaatggaaatagtgagaagtactagagcgagccagtgaacccacctcaatatactcataattatctgctttcgaacctattgggaaacctgtttaccatcttcggcttgagcttgtttttacaactttggcatcaccagaacaacattcctccttcatgggggatgatgatgaacc

SEQ ID NO: 173532 - DNA, 531 bp, Arabidopsis thaliana
gggaaaggtggtacccctggcggtaccggtcccgaattcccgggtcgacccaagccttcggaaaacttcattttcctttatttaagggaggttgattggttggttacttgcttcacttaagaaggggggtgtggggagaggaaggttggggaaaaaaatggggaggcaaaggggtaataatggggccaatccttggctttgggcccttttttgcaccatcggaagcagaaccaaaggctgagccaggttggataatgaccttctacaaggacacttgtcctaaggccgaaaacatcgtccgtgaccaggtaaaactcttctacaaacgccacaggaccaccgttttctctgggttccgtaacatcttccatgactgcgccgttgagtcatgtgatgcgtctcttttgctgaattcgacaggaagagagctaggagagaaaaacccgacaggagcttcggacttagaaactttaggtacatcgaggagatcaaggaagctctcgagagggagtgtcctggtgttgtctcatg

SEQ ID NO: 173533 - DNA, 306 bp, Arabidopsis thaliana
gacgtcgaacgcacgcgtacgtaagcttggatcctctagagcggctcgccctttttttttttttttttttaaacacacaagcgggttttatctaattcatttatacacaaggcttgatccgttaaacagagcaagaaaacacatcgacaggggacacacctcgatcattccaacaaaaaacacggcattcttattccaaggggggtcggcaattggcttattccatgagtgggaggaggccctttttttggcccctttttttctagaaaacaaagagctggggaaaacagggagaaaacggaaccc

SEQ ID NO: 173534 - DNA, 540 bp, Arabidopsis thaliana columbia
atgatactccagctctctacgactcactatagggaaagctggcacgcctgcaggtaccggtccggaattcccgggtcgacccacgcgtgcgcggacgcgtgggcggacgcgtgggttcgcattgttaattaaggtcgccggacttttggccactgtcaccgttggagccaacgtagtttcctactctcgtttccgtcgccagaatctcgcgaagtttcgctctccaatcgacgaatctaaagaagttctcgcgtgggttcaattccattgaacacgaggaaggaaaattcttctttgggttagctactgcacctgctcatgcggaggatgatttagatgatgcttggctccagtttgctaaagaaacaccatgttcagcagaagaagcagaggctgctgataagaaagctaggaggaagaaggttaagcttgctgtgggagctataaccaaaggcttggccaagaacactcatgggaaagaagataagaatgcagctgataagcccccctctaaaaagtgtgccgggtggcataacgctc

SEQ ID NO: 173535 - DNA, 518 bp, Arabidopsis thaliana
caggtctctacgactcactatagggaaagctggcacgcctgcaggtaccggtccggaattcccgggtctacccacgcgtgcgcacgtggtaaatctattgattttagattttgatatgtgtaaaacaaaattttcatttttatatagaaaaaaataattgtaagtaattataaatatcaaaaagttagttactaactttcaaaaccgtactttatataataagatatgaattttcactaaaggggggatacaactttaggcatatagagcttatatatactaaaacccctaaaatatcctaaaacaaacctaaaccagcaagactcatgttgcatgtgtgggattgccctgggacgcagggcgggggggggccgggggatgtgggggcgcgggcgaggaagacgggggggcctcgtggtgagcgtgcgggggtggcggggccgcgagctcgcgcgcgcgccccgcccctcgaatggggcgtgtcgggtgtgtgagggggccacgaggggggcccccgc

SEQ ID NO: 173536 - DNA, 511 bp, Arabidopsis thaliana
ctatagaagagttatgacgtcgcctgcacgcgtacgtaagcttggatcctctagagcggccgcccttttttttttttttttttttttttttttttttttttttttttttttttttttttttttttttttttttttttttttttttttttttttcaaccaaaaattttggaaacggaattaaaacccagggtttttgaaaaaaaaaactttgatccataaaaaattctggggggggggaaactttttctaacttttttcccaaaaaggggcctgttaaaaaaaacgaaaccaggggaaaaatcaaccttgttcaaaaattagcgggaactttgggcaaatttttcccttacagaaaaccctcaatcacaggggggattaacccttaaaattggggctgggattatgggggggggaaacacgggtatcattatcccccaaaatgtcaagttaaacagctcggccctgtttaacataaggggggttggggagtccctgaaaagggttcatatgt

SEQ ID NO: 173537 - DNA, 526 bp, Arabidopsis thaliana
tctacgactcactattagggaagctggcacgcctgcaggtaccggtccgggattcccgggtctacccacgcgtgcgcccacgcgtccggagcttcccagctctacactttcgctgatcttgatatcggtctgccgaaaacagtagaaaacatggagaagaaggttgaagcactgattgagccaccaccaccaccagaagctatggatatatctgctattcacaatctgtttccggcgggggtggcagccccttcaggacggaaaccaaaaaagcccgccccattgcctagagattgacgctgccccccgggtaaaggataatcttataaggtggtgattaaatgggctagctggagacacggggccgcactcgatatttacaggatgggtctggagggatcggtactaaaggtgcgaggtgtaggacggggagggggagtcgtctcactcacaaacacacatgctcagtcatttcttgcagacgtggtcctatcaacgtcggctcactaactgcaatcaattcccc

SEQ ID NO: 173538 - DNA, 473 bp, Arabidopsis thaliana
  unsure (1)..(473): unsure at all n locations
aagctgacacgcctgcaggtaccggtccggaattcccgggttgacccacgcgtgcgggagctcctcttgaggatattgttagaggtgttgaggaaannttannanntnananantnttgngggtttagaatttaaaatatatattgaacagggacattgtgttatattaatttaagttttttgcaacccgccccccacattctctttaacagggggggggaccccccagcccactcacccataaatataaactctataaatttttgagtaacctcaaaccccccccctcttaattccatctctctaaatctctcgcgctttacaacctcctccacccccccctccctctctcgtgtttattcgatatttttcgttaacacctttcccatttcaagatataaaattctaattaacaacacttccaccctattaacacatttacccgactaccaatcatcctctttaagtcgccc

SEQ ID NO: 173539 - DNA, 400 bp, Arabidopsis thaliana
tgatactccagctctcatacgactcactttggggagagctggtacgcctgcaggtaccggtccggaattcccgggtcgacccacgcgggcgggggggggtcatgagtaaaccactaatgtcttgactggagctggggattatgatcacattgccagccttaggatcagtatatccccaacgggatttgttgagggtactacctgcaccggtagagaagttatactcaattgctctagactggcctaacgtggggggggaccctttctctggggtgtatggtaaaaaactgaaacaattggtcttacactcttacatgagattaacatgggtaactggcatagaagttaatgcttaggctgtaacatatgccaaagggaatgaaacaatcgatgggataag

SEQ ID NO: 173540 - DNA, 534 bp, Arabidopsis thaliana
  unsure (1)..(534): unsure at all n locations
ctacgactcacaattagggaagctggcacgcctgcaggtaccggtccggaattcccgggtctacccacgcgtgcgcgcagcaccgtcgttgattgaagaacattccgatcatcagccatcatctgaggggatgaagaacgaagaatgttttctgattgatcacctccaattaggattgactgctcttcagaacttgcttacaaagtatccagatccggctttaggttttttgggggggggggggnncaaccccccccttccccgccacaaaattcccccccaattaggtgagccgtcggcgcacccccgcccttctacgacctttatttcttcctctctgacgcgggcggtgtctctctcacttaactgccacccttgctcgcgctgtggtttttggtgttcagttcggtcggcctacattaatgcgttaagcatgtacccccgactctcgccccgccgctccccgcatgcctgtatgttgtacccccttcatagctgtgctgatctctttccccgctcctggctgctactccc

SEQ ID NO: 173541 - DNA, 481 bp, Arabidopsis thaliana
tctacgactcactatagggaaagctggcacgcctgcaggtaccggtccggaattcccgggtctgacccacgcgtgcgcccacgcgtccgttttttttttgagaaggaaccaatgattttcttattaatttagaaaccacattacacttaatagtatcctgctgcatgtaagttcaagtaatcgccgaggaagtaaaagctcaaacaagctaaacaaaagacaagttgttgtagtagactagtggtacatgaacgaacaagacaagaggagaaaacaggtgatgagcttttttgggtgtttctaaaagcgtggtttgattggcgtgtgggatggggggagggagcggcggggggagggggtggacgcgcgggccggcgctcccttcggccggtggtagggtgaggatggtatgtatagattgatggtgagggttggagtagtggagggggtctgaccgccctccgccgggtgcgtgcggaag

SEQ ID NO: 173542 - DNA, 536 bp, Arabidopsis thaliana
  unsure (1)..(536): unsure at all n locations
tccagctccctacgactcactatagggaaagctggcacgcctgcaggtaccggtccggaattcccgggtcgacccacgcgtccgctggttattctcagaatcttggatctggctatcctggaagttcagtgagtggtggcgcagaaggaggctctcagatttctttgagttctcgccatccatcaattacaggtgctcctcaagagactgacattggtggtggatacagatctcatttatctacaggtgctagncattacggaacacaatatggctctgtgtatggatcaacttctcttagcagctctcacgctttaagcaccaatggtttaggttcatcaggtttggataaccgctcgggatatcgccctactttacctgattgaccaaagttggcgtgtggcaaggtatgtgtgggcccctcgtcccatgggtatcgggccagacactcgccgactgcatatcgccagtgccctgtgctaggggcctttccggttctagccgctgatgcggctcagaccggcccggcgttcccg

SEQ ID NO: 173543 - DNA, 523 bp, Arabidopsis thaliana
  unsure (1)..(523): unsure at all n locations
ctctctacgactcactatagggaagctggtacgcctgcaggtaccggtccggaattcccgggtcgacccacgcgtgcgacggaatcgctcttatggccgccatggctaggaacgtagctcaagctgatgcgtctgttaaggctggagagtggaagaggaacaagtatgtaggtgtttcacttgtgggaaagacccttgcagtgttgggattcgggaaagtttttatttttgtagagggggggggttaagntcttggggagcctttcaaaaataatttccctatggcccaggatgctgttcaccgccttttgtttacgtttaaggggtttttgtggaggtgttgtctggcgatggtgtggctttgttgtatgtgttttttgtggtggggggacgggtgtggtgtgcgtggggtgtggttttcgtctcacggggtgngtcgcgcgtgtagcgaggtttgtgcgtagctcgttgtttggttgtttgttgtgttgattggggtgtgtttagtgtgggttcttccgct

SEQ ID NO: 173544 - DNA, 538 bp, Arabidopsis thaliana
  unsure (1)..(538): unsure at all n locations
tccagctctctacgactcactatagggaaagctggcacgcctgcaggtaccggtccggaattcccgggctctctttcatcttcgtggtttgccatagctcttcttgaatcaaggtcgtcttcttgaaatcagatctcttcgtgacttctcctgtaaccaacaaagaaccatggagctcctctctagagctcttttcttctttcttctactctcagntctttcttctttctcttcttcaagttgcatgtgagatggggtcttcgaatctcagagtttggatcttggcagaaacttgcttcagaccaagaaaacatgccctgtgaactttgagtttatgaactacaggaggataacgcagcaatgcaaaggccccaacaccccacgaaatgaatgttcccgggccgcgactgactcgcgcgtgtgttagcgctcggccccatgagtgcgctgcgccccccttgcgcggtacgtgccactatgtcaagatgcggcgacggctaacggagagtgttttcacgtgtgcggtagaatgcgccga

SEQ ID NO: 173545 - DNA, 402 bp, Arabidopsis thaliana
  unsure (1)..(402): unsure at all n locations
acgactcanatagggaaagctggcacgcctgcaggtaccggtccgggattcccgggtcgacccacgcgtgcgctntgatcataccagagagccgtcagggagagcataacatagattcggagaagaatgaagacgattctttcttccgaaacgatggacatcctcgacagtggtgcccatggggggtgacgctaaagtgtattcgaggggggcggcccgaggcggttttttctttaaggggggggatggggcgaagcacctgcccccacggaatatagtggagactacataaggaggtggtgctctggtcgagcgcgccgcacgtcccatagaacgtgaagagtgtgtgtgtgcgcgtgggtgtgtgggatgtcgccggcagcgcggcggcacgttcgctca

SEQ ID NO: 173546 - DNA, 292 bp, Arabidopsis thaliana
gcacgcgtacgtaagcttggatcctctagagcgtccgccctttgggttgggctttttttatttatttttttttctttccaaagggagggtttttttttcaaaccaaagggaacaacactttttgtttatctgtgtgagaccccgcgaacaacaataaacgaatgactttgcacgttttgagggtccccgggctcttttttttgggggagtggtgtcccaaggcatcacctgccatgccaattaattatagcgggcttttttaaaaaggtgcttccagcatttttttgaaggg

SEQ ID NO: 173547 - DNA, 411 bp, Arabidopsis thaliana
  unsure (1)..(411): unsure at all n locations
tacgactcacatanggggagctgacacgcctgcaggtaccggtccggaattcccgggtctgacccacgcgtggcgggagttgatcgatgctgctttccctcttcttaaaggtgttgttgctacaactgatgccgttgagggatgtactggagtcaatgttgctgttatggttgggggntnncngagganagaaggtattgaaaagatgggtgggggggggttttttttttagggggggggganaannattatataaatttattaaaaaaaaatatactttatatttgtattataagtaaataaaagaatgaataaaataatataaatatattttttttgtgagaaatggtgagaaaaggagctattataaagagtttagggggatagggtggggaggttgttgtgagatga

SEQ ID NO: 173548 - DNA, 500 bp, Arabidopsis thaliana
  unsure (1)..(500): unsure at all n locations
cgcctgcaggtaccggtccgngantcccgggtctgacccacgcgtccgcccacgcgtccgaaagttctaccaagtactccttctgattggcaaaacgaggatgcaaattccatgggaaggagttctatgaatgatgagaattcaacgcagcaagatggcacaaccatgagagaaacccagagcatgctattggattttttttctagggagggggggccncccaagnccgataccgataataaacaaacccccgccttcatttagaacatcgccaccccccttccaaacatttatattgtaatgtgtctactcacccattagccgccacccccacccccacccccccaactctctcactctctttggtagttaactaagcaacaagtcctatgatctacattctcctacacccaacataccggccccccgccctccccaccacacacaattctagcagaccatacacacgacacccattttttcccccatcccacctatcc

SEQ ID NO: 173549 - DNA, 542 bp, Arabidopsis thaliana
  unsure (1)..(542): unsure at all n locations
cgcctgcagtaccngtccgngaatcccggttgacccacgcgtgcgcggacgcgtgggtttttagaccaagctcaggctatcatctctccgttaattagggtttcntaacgtatactaaataaacaatatatataattttcacacgcccaacagatgtttatatataattaataattttatccaccaagaaccacacaaacttccctactatttaagggggggggaaggaanannnannnnanancacaaaaaaaaataaaacacctaaatattactataaataacacccccccctgcctatacataattaaattattagttcatataataatcgcgattttaaattgatcaagcaaatagtcactaaattttcaaactaaaattatataacatttttaaaagatatataatatgaaatatgtgtatatctttaaaaagaaacaattatcacaatcacaaataaacatatatattattgttagtaaaataaaaatagtaatattataatagaaataacactttatacacatcttaacaacccc

SEQ ID NO: 173550 - DNA, 533 bp, Arabidopsis thaliana
  unsure (1)..(533): unsure at all n locations
actacgactcacnataggggaggctgatccgcctgcaggtaccggtccgngattcccgggtctacccacgcgtccgctcatcgggatcaaactggggagaaagcggatactttaagctcgaacgtaacatcaaagagtcatcagggaaatgcggtgtggcgatgatttcttcttaccctaccaaatcatcatgctcaaactcaccaaaaccggcagcgccgttttcgtgattttggggggggggccgccccccccccccccccccgccataaaaaccccccccccggagggtgggtgtggccgcgccccgtctctcctttttttttgttgcttttctccttcgcctctgctttgattcgacgacgatctttctctcttcctgttttggcttttggtttttttcggtcgctctcttcattctctttcgtgtttcttgttcttcctgcttctctctctccgccgccttccccttctttgtcactgtttttgtttcttcgttttttatgtctgtgtctcttttctgttctcgttcc

SEQ ID NO: 173551 - DNA, 530 bp, Arabidopsis thaliana
actatagaagagttatgacgtcgcacgcacgcgtacgtaagcttggatcctctagagcggccgccctttttttttttttttgtaaaaaaaaaagagaacatcttttatgtattttgtctatgtccaagctaaaactagacttagacaaacatctccaaactctaaaattccaaaactttccaacattcttgtataagcaaaggttgatgtcagttagccagagagctccaattcagatttgatcgttggatcaaaactatgattcatcgacttcacacaggtggcatggcaaaggttccaactactgacctgtgaatagtctctgagtccagagttgttagcatatgtggaatcgacataccacccgagatgacgatttctatgccttcccggactgagagattaggtcttatgatgtcctttgagctaatgaggaaaatgtctccaaggtaaagatggttggtgggaacatagacacaacatagttcttctccaccagcacggcctcgaagaatcacagtcgatgtaat

SEQ ID NO: 173552 - DNA, 510 bp, Arabidopsis thaliana
ccagctctctacgactcactatagggaaagctggcacgcctgcaggtaccggtccggaattcccgggtcgacccacgcgtgcgctcccgcactatctacttcttgctcctccgtcatggctttctcaacatcaaacgcgcttcgttaccatcatcctcaaatttctctcaggaactctcttcgcgctcccaaatcgccttcttttgtcaggcttcccctcggaaaggtgttacagagcaggatggtgatacgtgctgcttcgtctgcggctggtaatccacagtctgatgctgactttaatccgtatgaggctcttggtgttaaccctatagagggatttgacaggatcaagccaacttatggaaggaaacttaaagatgctcagaggagcggcgatgaaggcactggtgcgctagggagcggcgaggccgacgttctcctgcgcgcaccggcgggccgctgtcgggggctcggggggcggtgggggtgcctggtgggcgcgggggggcg

SEQ ID NO: 173553 - DNA, 513 bp, Arabidopsis thaliana
ctctcgaagactatgacgtcgaacgcacgcgtacgtaagcttggatcctctagagcggccgcccttttttttttttttttttttttttttttttttttttttttttttttttttttttttttttttttttttttttttcgggacgaaaaaaaccctttgggaggatccctaaatcccatttgtttgttttacaagaggaggagagggcccaaacttttttttttccccaggggaaccctttattttaattctcagtgctttattgtgagggtttctttcttttttttggggaaccttttgtggaaaagaatccagttggggttctaaaccaaaatcatttttttttggggggacccccctcgccatatttaccttttttttttaaaaccttttctttttccccggggtaaaaactttcgcccctttccataagcgtattgtgtcccaccccctttttgcctaaaagaagtttctttggggggggattgattttcctttttttttttgggaaaa

SEQ ID NO: 173554 - DNA, 497 bp, Arabidopsis thaliana
  unsure (1)..(497): unsure at all n locations
tacgactccaataggggagctggccgcctgcggtaccggtccgngnatcccggtctgccccgcgtgcgcggacgcgtgggcggacgcgtgggcggacgcgtgggcggacgcgtgggtggaaacacaccagtttcggaaaatgggcgaagctcgtttgggaaaaagagcactagttattcttactcggacactgcaagcatatccattgatgatctatctgtttgagagggggggggagcacgncacctcctcctaataaaaataaaaacccattttttgtgggattcatctcccccaccctccacatatgatagtagtgttcttattcctgctttatatgtgcatatccccctcctgcgccccccttctttcttgtgacttcgtctttgaaatgtatagttttttttcacatttttatatcctctcctcattcttagttccctacttcacactcagtgcttattttagtttatgtattgatctctcattctttaatt

SEQ ID NO: 173555 - DNA, 463 bp, Arabidopsis thaliana
  unsure (1)..(463): unsure at all n locations
tccagctctctacgactcactatagggaaagctggcacgcctgcaggtaccggtccgngattcccgggtcgacccacgcgtggcgcttcttcacccaaaaacccctaaaagccttatcccttcttcttcccatggctgcttcagcttcgtctctcgctctctcttccttcaaccctaaatctcttcctttcggggtctccagacctgcctccgtttccctcttatctccttccctctcctttaaacggagttccgactccgtttccttctccatcgccgacaaatggaactctcccgcttctcgcttcgcccgtaacgttgcgattacctcagagttcgaggtggaagaagaggggatggagggtgccctcccgccgacctcgcgccataaggtcagtaagtagagtgcgcgccacagagcacaggagcatgtgggagcgcggcatccgcaccgcccccaccg

SEQ ID NO: 173556 - DNA, 500 bp, Arabidopsis thaliana
  unsure (1)..(500): unsure at all n locations
atgatactccagctctctacgactcactatagggaaagctggcacgcctgcaggtaccggtccggaattcccgggtcgacccacgcgtgcgtgattatcaaaaactgttggttagtaacagaaattgttgcaaatgtaacatattatataagctttctttcactttggtgcattctctctaaataatggcctctattgatgcagtatctgattcttagttttgaaatggtttttgcataaattattgttctaaggcatttttgntttatctccagcatttccaagatcattgatcgttatgaaatacaacatgctgatgaacttagagccttagtaagtaattagctaagaacgtcattctaatattcttctggatgcggcttttggtgttatgaaagatagaacgcgctgtgacgcccgagaaccgctgatgcggccggcccgtgcagcccaaccgcggagctgcacgtcatgggttgtggggccggggtaaagggcgc

SEQ ID NO: 173557 - DNA, 328 bp, Arabidopsis thaliana
gcacgcgtacgtaagcttggatcctctagagcggccgccctttgggtttggtttttggggaactcaaagggagaatgtggcccgcttacttatcgtgcttctccttgagcaagctcttacggtagaactacacctccttgcccttcaaaacggaaccatggggctaggccatccctgtcctttccaggcagatgatatctgccgatagccggggacactggaccggccaagctgaaccaggatacccccctacaaacagaaaccctttatgtttgcggctaaatgtggttcgttgcgaaggtggttccttgccactacaggagactga

SEQ ID NO: 173558 - DNA, 426 bp, Arabidopsis thaliana
  unsure (1)..(426): unsure at all n locations
ctaaaattaccatatgctttagggagctaaagacgacctttaatctaaagattccccgaggggggcaaccttattactttaacattacaatggaaatgggatcccaaataatgtttataacttggggggggtggacattttaccggggggaggaaaaacgacnaaaaaccccattttcttttttagggggcgagctcacccggaatcagccctaaacctttagtgggggtgtgggggtttattttaagtctcctggaaagaagtgcagcactcttctgaaaacaaaatacagaggggtgttttaaatcccgtctttgtctatacaaaagaatttttccttttcccccgccacccaacacccccgggaactttcgtttgaattcatgcgcgaccttcgtctcaggttaaccccccccacaccaccgc

SEQ ID NO: 173559 - DNA, 536 bp, Arabidopsis thaliana
atgacgtaaactgcacgcgtacgtaagcttggatcctctagagcgttcgccctttggttttgtctttgaaatgtgtcaaactcttggaggtaactggtggtctcacacgggttggggtatccaatcaatgaattggaaaataaccgccattgaattgcgggtgaggggagtgttattggagggaggggaaacccccacgtaatttttagcgtggggggggcctcccgttgcgggaactttaaacacaaagattgcccccatttactttttgtgggggggggaaaatttgaaacatccaacaccgggtttgggccaacaaacctttcgaaggggatatgcgcacaacccccgtgtcgggcaaaaattttgggttgtgggggggaaattaaaggggctggagcaagcgaattccaccaattttcacccaaccgcggaggacttgtgttggccgccccatcggaaatctatcatactttcctccctcacttcacaaagggggaggagctgtctctctcccaaaagggaagcagggttat

SEQ ID NO: 173560 - DNA, 451 bp, Arabidopsis thaliana
taggtcacactatagaaagattatgacgtcgcatgcacgcgtacgtaagcttggatcctctagagcggtcgccctttttttttttttttttttttttttttttttttttttttttttttttttttttttttttttttttttttggaaactaaatttattctccggctttgttattaaaggttttaaagttttacatcaaaagttaaaatattttacacagtaagtaatccctcaaaaggtcataaacaaaggagggggactagccttggggttgctccgcggggttgaaataaaaaacaccttcatggttcttgggaacttccaccttgaacttttcctttttttctccccttttcaacttgagaaacatgttgaattttggaacctcgccggttacctagttttagcatgcccaacctccaaaagtttataagggaacaaggggttaaac

SEQ ID NO: 173561 - DNA, 491 bp, Arabidopsis thaliana
ccgcgtacgtaagcttggatcctctagagcggtcgcctggtgtgaaaccccctttctatgtctgtttgcttttggttttttgttttaaagggcagatgggctttcaggaaggaccagctcccttcgcgggaaaatttccttagaaagaaaacccccggaaagtgatcgaactcttatttttttaaaggggggggaaacaaagttatcagggcggtgcgggacacagaagagaaaacccaggaagattgggctgtctcgcgtgattagaaaacctagagtttttgtgtaataagggaaaaaatgagagagttattttttaaatactgaactcacgtggggggtgtaacccgagaaagaacacaaagaggggggcttgaacgcttcgcgagaccggtggcgccctctaaaaagcgccaaataaaaacgcggtgtttgtctatgccccctcccctactgaaacgcgtggagcggatgcgccgcgcgcggggaaa

SEQ ID NO: 173562 - DNA, 485 bp, Arabidopsis thaliana
gacacaactagggagagctacgcacgcctgcaggtaccggtccgcaataccacgggtcgacccacgcgtccgaccacgccgtacgcataaatcttggctgatttagcgtacagatgtgctatactcctcttttccaactccctcatcgcgaccgagatcgcttcgataccttctccaccgccagaattacagccttgtcaatagaacggaacagctcttgcatctattattctaacggggggagcgtccaacactttgccctactgtctggtattcacagatcccgattctatatatccatcaaatctgatgcctacttcatcggatcgcatggaggacacattaggtttttctgttatcgtaccctggaaaagggacgagctcctaaggaaatccctaactttcacacccttccctcttgtaaccttcccaagggctcccagaaagattgttaattgcgcttccgcttgaaaatactctcaaag

SEQ ID NO: 173563 - DNA, 505 bp, Arabidopsis thaliana
ttaggtccactatagaagactatgacgtcgcacgcacgcgtacgtaagcttggatcctctagagcggccgcccttttttttttttttttttttttttttttttttttttttttgctccacaaattaatatatatctcatttcaaagtacttcccaaaacatgtaaaaacaatcaaagattctttccatcattcactacacagaaggtaaccaaattctcacaccataatgtacagggtaaacctccaaaagaacataatctctcagtggcccttgcttcgaggatcttcagagtgcatagcgttgtagtcttttgtgtaaacccggagcctcctttctctcgcatatataacccaaaacaccaaagatgacattacagaagcagacaccaccacaagacccacatagatccattgtgtgtatctcttaagtcccggacaatgatccctctctatatcagtgaatgtagacctcacgaagtcacacccttgtaggtctgccaagaa

SEQ ID NO: 173564 - DNA, 513 bp, Arabidopsis thaliana
taggtgcacactatagtaagactatgacgtcgcatgcacgcgtacgtaagcttggatcctctagagcggccgaccttttttttttttttttacataagaagatcacgaacatcaaataaaacagactgctacagtcactctcatatgccaaaaagccaaattgtgtcaaaataccaacaaaaaagacaagaagaaaatgcaacttcaactacaaccaatctcgcaggattcgaacagacaagaaacatgggttctctgctttaatctaattgttatctttctcaaaaaaagaccattccttaacgaccttcatgcatcaaaggcggataaagcctagcgtgcaccagcagtgagttttagttactgtctgaaaccgccattttccactaaccctatatgcttcaaagaaccctccagaatttgcattttttgagaatatgaaagaggtgtgaccgctcaaaattggcctataggtggcctagcctcagcctctgagactcttatttgtcttaa

SEQ ID NO: 173565 - DNA, 435 bp, Arabidopsis thaliana
tacgactcaccttagggaaagctggtacgcctgcaggtaccggtccggaattcccgggtcgacccacgcgtccgcccacgcgtgacgagactcattgggcagactcgaggacatgactgttcacatgatgcctattatgagtattacatccagagatatcgtctatagccttgggatttagattggcaactactggcagcacacgaagatgatatgtgtcaacacatctttgaacgaatggaaacgaagcactgagttgattacacgtggcaatctatacagacgcgtcgatcagactgcaaggacttcacaactgtgaatgctccgacggtgacttaatagagcgggtatgcaggtggttgctcaatgcacatatcgtttcagactagtggcctaaaagtgacatattgtgactagaggatagggtgcttcatg

SEQ ID NO: 173566 - DNA, 472 bp, Arabidopsis thaliana
gcacgcgtacgtaagcttggatcctctagagcgttcgcccttttttttttttctttttgagaaaagttgttgacttttaaactgaacaaatagtatcaggttcggaaaaccgaaaacattgaaccgggtttggttactgaaaaatatttaatcgtaatataaggaacattcaccaccatcttctacatgaagtttattgtttcctgatggccaagatttaccgtccgattttggatcggcttgaaagtatttgagttcacttctgtcatgttgcacccttcctgtgatcattagacacaaatttgttttggtttttctatgttgctctttctatggtggtgagggctgtattgccttctttctcggattaggccctggagtctaacgaagacttgggaacggagttctgtgcatgtcaggagttctggtttttatttcttgttcaacattttttaagttataaggttggtcc

SEQ ID NO: 173567 - DNA, 507 bp, Arabidopsis thaliana
gaatgtatttaggacaactatagaagagttatgacgtcgcatgcacgcgtacgtaagcttggatcctctagagcggtcgccctttttttttttttttttttgagctctaaaagcaaataattatacataaatcacaaatccatgcagatgcacttaatcgaaactaataaacttaaatcaagtattaaacaatattcagcaacaatcacataaaataaaataaacagccaacggaaaaaaaaaatagttgaaagatttcttcttcttttgtagaacgaaagcagatttataagatagaaacttaatggatcaatgatttaaattagccaaggatgacttcccttcattatctcatccaccacttgccggagctctctcacatgaggactgagacatggtggtttgatggataacctgagaacctgaattgtgggttttgctggaacatgtcgttgttgttcccggttatgtccgagcaagatgttgtcgagacactagacacaaccc

SEQ ID NO: 173568 - DNA, 494 bp, Arabidopsis thaliana
cagctctaatactactcacattagggaaagctcgcacgcctgcaggtaccggtccggaattcccgggtcgacccacgcgtccggctgcgttgggcaaaatcccagacgaagatcagtgattagtcttttgataactcgagccatggcaactggtaaaactgtgaaagacgtctcgcctcatgacttcgtcaaggcttatgcttctcatctcaagcgatctggcaagatcgagcttcccacatggacagacattgcgaagaccgcaaagttgaaggagcttgcaccatatgatcctgattggtactacatcagagctgcatctatggcaaggaacgtttacctgaggggaggacttggtgttggtgctatccgtacaatctatggtggaagcaagaggaacggcagtcgcccacctcactattgcaaaagcagatgtggtattgccagtcacattctccaacagctggagacagtgaacattgctgagctcgaca

SEQ ID NO: 173569 - DNA, 477 bp, Arabidopsis thaliana
cacgcgtacgtaagcttggatcctctagagcgtttgccctttttttttatatcttttttgagctctaaaagcaaataattatacataaatcacaaatccatgcagatgcacttaatcgaaactaataaacttaaatcaagtattaaacaatattcagcatcaatcacataaaataaaataaacagccaacggattttttaaacgggtgaaagattacttcttcttttgtagaacgaaagcaatttataagatggaaactctatggatcaatgatttaaaatagccaaggatgacttcccttaattatctcattcaacatttgccggaactctctcacatgaggactgaaacttgggggtttaatggaaaaccctgaaacctgaatggggggtttcgcttgaacaatgtgtttgttgtaccccgttatgtcccaacaaggaggtggtaagaaaataaaacaagccgcccccttgaatg

SEQ ID NO: 173570 - DNA, 489 bp, Arabidopsis thaliana
atactctacacacattaggggaagcacgcacgcctgcaggtaaccgggcacgcaatacacgggttcgacccacgcgttcgatcttttgggaaatttggacgctatatttgactactagctctatgctctgacaagaacatttaaccattatctgggagctaggatactgaataaacatatcttgactctcgatggctctactatggactggagattaacgcgttttttgaactggtgaatgagacattgcaagagtgccataggagcacagattcattggctagacctgcaactgatcgggatactatgtcttcacagactcaaatgcccaaagatcatcatccctcgaccgatcacaacactttaagctgagcaattggaaatgaaacaaactggggtttcacactgcaaaccttataattgctgctttacttaaaacctttggaagaaaaatcatcttatagaagctgctcacataatgtggaccct

SEQ ID NO: 173571 - DNA, 476 bp, Arabidopsis thaliana
cacgcgtacgtaagcttggatcctctagagcggtcgcccgcaaggcgcaaggcttcacagcagggcggggacgaagaccggcgacaggcgctatggcatggcggcaggccgcaggcgcaagagatggccgggtgttcctgaaacgaaacacctggtgaccttcgatcagccagccactccgaaggcacccaagcagttttttcctgtggatgattacaacacagcctctggccagcgctgacagaagcacacttcagaagcccagtccaaggagggccattactatagcaggaggtccaattaggacccttgctgtagactagacctcagaagggccccctctgtatggaggcatacacttcttaggtcacctctgcgcggggacatggtggagcgcatagagtatcggggtcaaattctgcccgtgagcctgccacagcccccaacttttggtgcgttatccgcggtaacataca

SEQ ID NO: 173572 - DNA, 452 bp, Arabidopsis thaliana
tggagagcaacgtcacgcctgcagtgtaccggtccggtattcacgggtcgacccacgcgtccgatgcttgtacgcaagctgaatgtatacgggcgtcttgcgcacacgacggatgggatgcggtgcaccatggaatcttggaccgcttagatatgaaagctgtggaggtacttacgtatacatcaggtgcggcccttacgaatattttcagcgggctgatgctaactggttagcgcgatgagctgagactgaacgtgcagaccctacacgcgggtcgggtatagatcaaagtggggctccacaggttagcacgggctcactgtactgccaggatgtgacagaggaccacctggttgcggtcttatctttaagctctcacggccggtgatgatgaatcatttatagcagctgtgaagaaccatatactatgcctgcgccagtatctcaatgtg

SEQ ID NO: 173573 - DNA, 520 bp, Arabidopsis thaliana
  unsure (1)..(520): unsure at all n locations
aggtgcacactatagagagctatgacgtcgcacgcacgcgtacgtaagcttggatcctctagagcggtcgccctttttttttttttcttttacacatacaaaatgcataagagcatcagtggaacacatccatcacagatccaagctgctgtgtcaacacatatgccgcaaataagcgagagggtgccagccactgggagcgctanggggccccccacgccacaccacctaaatagcattgcgccatcgcaggccacactacacctgtggccagccaggcctaaccacctcaacaagaggatctgggccctgaccatcaatagaaccaagggccccatgaggcccctcgccatgccggactcatgcagcacccgatgcttttcatgatgccatagaactactggcacatcttcgtgctgcaccatgggaggcacatactattcttgctaaggtcaagccctgaaggtgccacaccatcagcatggcttctttaccgggcaggattcacgactcacgtaac

SEQ ID NO: 173574 - DNA, 537 bp, Arabidopsis thaliana
  unsure (1)..(537): unsure at all n locations
tgaggtcgactgcacgcgtacgtaagcttggatcctctagagcctccgccctttggtttattcctttttttttttttttttttttttttttttttttttttggcaaacccatgcttgaaaggggctcctcttaagggttaaaggagaaaaaaaaaaaccccgggtttttaaaaggtcttttattttaagataatataataaaaattttttgtaccgggggggganattctttattggggggaaaaaaatattcaggggaccttgggggagaacccttataatcccaaacggggttttgaacttttcttaaaatttggccaataccccaagttttgggggatttttgaggaggtttttttcaatctggaaaaaaaaagtgaggggggggaaaatgatgggcaaccctccaatttcatgctgtttccccccccggatggtagggccacatgaatggtgtgtttttatttatggaatatagaggaaatcatctttattttttttgagtgtgnaacatcttttttaatttgatagatcgtt

SEQ ID NO: 173575 - DNA, 560 bp, Arabidopsis thaliana
  unsure (1)..(560): unsure at all n locations
atacgactcactanagaagaaagcacgtacgcctgcaggtaccggtccggaattccccgttcgacggacagcgtgaggcgccggcgcctctcccgggcgctgaaagagttccgggtgcgcggcgtgacgaccaacatccccttcatcctcaacgtcctcaacgacgaggcgttccgcaacggcgtcgtcggcaccgcgttcatcgacaagaaccccgttttttttgggcgtgggcggaanagccacaagcgaaggcaagttgctcttggcccctgggggaacatgggccctaaacagggccggagaacccccgttggccacaaaacctggcagtggtcccccacggggggcccccaaaacccggagggccgggccccccgcgccccgggtataaaagcgggtgataagaccgcaaggaggccaagagcccttaccacagaggaaggcgaccacccaagaaggaggccaggggagtagacaccacttctcggagggaagtaccaagcgggagtgggagccacgagagagcgcgggggggagaacgagggggggagggcgaa

SEQ ID NO: 173576 - DNA, 540 bp, Arabidopsis thaliana columbia
cgattctattaggtgcactatagaagactatgacgtcgcatcgcacgcgtacgtaagcttggatcctctagagcggtcgccctttgggtttttttttttttttttttttttttttttttttttttgaaccagttaaaaaattttattagtcacacaatctttaaacacacaaacacaaatgaatgaagagatactgaaaacaggaacagagcgctcaaacattgagcttcataagaaaaaacctaagcaaaaggggggtttcttttgtttctcacgctttaatcaaagacgcggtaagactttcgcgtaaaacagagtaaaccgatctccatcctttttttgtagggggaagtccatcccaaaagaaagcagttttaggattatcacatacaatatactttttcactcccttgtcatccacacttccacagttatactcgggggtcacacctacgcaacacggttttaatggactctcaaaccttgtactccctggattaaatcctttggtcttgaacacagtcaagaaagcattggaaa

SEQ ID NO: 173577 - DNA, 531 bp, Arabidopsis thaliana columbia
cgattctattaggtgcactatagaagactatgacgtcgcctgcacgcgtacgtaagcttggatcctctagagcggtcgccctttgggttttttttttcaataagtagatatataaatatcatatgcatcaaataacacatacattgcttgtacgttacaaattgttacacacaaacctcccccacaaagccacaaataagacacagtaaatgtcactcaccgaccatcttaaataatattcgttttttcttttatatgattagggtcccttttttttttccttcctcccttcctggcccaaagaattcttcacctcttcgctagttcgaaataacaaatttaagcatggagctcatgaagctggctcctgactgacccataggccttcattgcaccagctctcaacacaaactgatggtaaaatgctgcaatggctgcacccacaaatggaccgacccagaaaatccactgatcatcccaagccttttgattgttgtagatgacgggagctccaaaactcctagccgggtt

SEQ ID NO: 173578 - DNA, 501 bp, Arabidopsis thaliana
taggtgcaactatagaagactatgacgtcgcacgcacgcgtacgtaagcttggatcctctagagcggtcgccctttttttttttttttccatattaaaaattcacttaccaaaagcttctggactctgtcgtctgtccaacgcaacaatttgagttgaaatcccccgttttcttcacgtcaatagcctagaggacgttcacacagtggactttaagcttaacctgcttgtgctataaaagcaccaatgaaaccaaatacacaacaagaataacataaagaaatcatgactttgcataacacacatgccttatctgtgacttctggaaagattctgacctagctctgtcttccgacttctccatcccgctcaccaaagagtttgactaagacaagacaagattacgagcaacaacataagttagttttattccttacaaaacttaatcaaagagagaaaagtctaattcaataagtttcaagcggagttgctttgcagtgca

SEQ ID NO: 173579 - DNA, 529 bp, Arabidopsis thaliana
ccagctccaatacgactcacattagggaaagctgctacgcctgcaggtaccggtccggaattcccgggtcgacccacgcgtccgcccacgcgtccgtaagagcgaggctgctgctgcttttgggaatgatggatgttatctggagaagttcgtacaaaaccctagacatattgagttccaggtgctggcagataaatttggaaatgttgttcactttggtgagcgtgactgcagcatccagaggcgtaaccaaaagcttctggaagaagcaccttctccagcattgaccgctgaattgcgaaaagccatgggtgatgcagcagtcgcagcagcagcatccattgggtacattggtgttggtactgtggagtttcttttagatgagagaggtttcttctacttcatggaaatgaacactaggatccaggtggagcatcctgtgacagagatgatttactctgttgatttgatagaagagcagattcgtgttgcaatgggagagaaacttcgttacaaacaggaagatatt

SEQ ID NO: 173580 - DNA, 498 bp, Arabidopsis thaliana
agggaaagtacgcacgcctagcggtaccggtccggaattcccgggtcgacccacgcgtccggcggatcaccgtataacagatgcacatcacacgggcctgttcaataactcgctctctaagctgtcagactggcattcatggatactgatatcctctccacgacaccatttgtgcatttgggccagactagttattctctggtggattacttgtcacgccggaaaaatgcaatcactggtggataagaatcatactcctccttgaaagccctcgactcttcagcagaagccaaaacctctagagggagctctacttcacgtggacgtgttccggtgtatgaaactactagctatgtttggtccaatcacgataatgattggtactcacaagtctaattcgaagcaccgaagggatctcttaagccagcgtcaacaaaggattgtgaaaagtgacgactatagacctgacgacaaaatattttagatagtgaaacaaat

SEQ ID NO: 173581 - DNA, 533 bp, Arabidopsis thaliana columbia
cgattctattaggtgcactatagaagactatgacgtcgcacgcacgcgtacgtaagcttggatcctctagagcggtcgccctttggttttttttttgccgaaaacaagtttcccctttttttttggtttctcatttgtttgaagagtacaacgctaaacagaacacacaaaataaaatcaagagggaaactaaaccaaaaactaatttaagtttcatgaaaaatggagaaaacaagcacaaccttcaaaagccaataacccttattaatactgatatttggtcaacttcatcagaagaccaatatctcaaactgttccactctcccaccacaacccaacacaaaaccacaagtagatccgaacctgaaccgctttgtcgactctctctctctctcagtacctgtagtgaggaggcttgtatggtccctcaattggaatgctgacgtagtcagattggtcctttgacagctttgtaagcctggctccaagcttgcccaagtgaagtaatgcaaccttctcatccaaatgcttgg

SEQ ID NO: 173582 - DNA, 516 bp, Arabidopsis thaliana
  unsure (1)..(516): unsure at all n locations
ctatagnagagctatgacgtcgcacgcacgcgtacgtaagcttggatcctctagagcggtcgcccttgtgttttttccttttttttttttttttttttttttttttttttttttttacgtttttttttttttttttttttttttttttttttttttttaggaaaagccgaaaaaagggtccccaattataaaaaacaaaaaaaaaggacctccttcaaaatttttttaatttgggaaaggggaaaccccccaagggtttttctttttttttttttggaggctgggaaaattgggcaaaaaaaaaccccaaccaatctttccccataatcctacgcaatattaccgcaacaatgggggggggggttttcattcgcgtggaccccccccccacaatgtcttttttagggtaatccaactatttgccttttctcccgggaaaaacccctttgggtgcgccctctgattcacacgtggtatgttgtaacaaaacgccaacagctttccaccggctcttcg

SEQ ID NO: 173583 - DNA, 529 bp, Arabidopsis thaliana columbia
cgattctattaggtacactatagaagactatgacgtcgcacgcacgcgtacgtaagcttggatcctctagagcggtcgccctttttttttttttttgtaaaatttaaatggatttcaattatgattattgctctaaacataaatcatcaatctactataagaatcttagctatatacataacggaaaagaacacttgattaacaaccttaaaatgacaacacattacatgtttggttacttgtcttctctatatgcagccggtgagaatctccctcaaatattctagctgttcatgactgccttcatgttcttcccactcttgaagagacagagataccactttccatccagcagcagcaacatatcgccgcttcagcattgtatgccctaatggtagtccagagtttcttgaaaaatgagttggcccgtcgatttctaaagcaactttcttctcgaccagagcaacatccacggtgtagccatccacatcatgttctttagcccaatcaagccctgtacttataagaa

SEQ ID NO: 173584 - DNA, 499 bp, Arabidopsis thaliana
  unsure (1)..(499): unsure at all n locations
ctatagnagagttatgacgtcgcctgcacgcgtacgtaagctaggatcctctagagcggccgccctttgtttttttttttttttttttttttttttttttttttttttttttttttttttttttttttattttttttttgggggaaaaattgtgatttttccaaagggtttaaaaaaaccgccaaattctaaacaagggggaaaaactggaaaaggcttttttaacaaaccccaagcccggaaaaaggggaaaaaaccaaaaaattttaaaaaaccctttttttttttttgggggaaggtattaaaaataaacaaggggccctcaccgggggttgggggttaccaaacccctttccaagggaaggccctttataaagggacaaattgggtttgttttttaaaaaaaaatatccccaaaaacacactgaaaaaaaaaaccttgactttggggacaaaacccaaaaaagggggggtgcccaagttcaaaggggagcccggg

SEQ ID NO: 173585 - DNA, 560 bp, Arabidopsis thaliana
tagtgcactatagaaactatgacgtcgaacgcacgcgtacgtaagcttggatcctctagagcggtcgcccttaagttttttccttttttttttttttttttttttttttttggaaaacaaaattcctgcgaattaattaatcaaaaaaaaaaaaaaaaaaggggggggcgccctttttttgtttgttttttcttttttttttttttaaaaaaataaaaaaaattttttttttttgggggggttaaaccctttgcaggtgtgttatgaaaatggaaaaaaatcttcgttttggttaataacaagaaaacgatatgctaattcttcaggaggtgtgatcgttgtgaggggtcctttttttttaaacaccatttgtctgcgaaaatgtcgaaggtccctcttcatgttagaataggctcgggcttgaagaccaaaaccgatatacaggttgggatgtcgtttcttgttgaatcaagcttggagacaaacacccctctgtttagtttgctagcacccagatgttcggtccattcgtttgtttctaaattaaattttttttattg

SEQ ID NO: 173586 - DNA, 498 bp, Arabidopsis thaliana
acgcctgcaggtgccggtccgcaatacaccgtttcgacccacgcggttcagcaccaggatctccttcaaacgctcggaagtttgcgctttggattcctgtcaccggcgatttcgtgggatgataacgacgccgagctatatttcgtgactgaagcaaagtgatgattcttcgattgaaagaccaaacgctcatctttttcaatggagcgtggttcgacttatcttccttagttttccgactagattctcactcgcaggctcggacaaaacccgatcacgaccgccggagaagaggatacgatagggttgtgagaattcgggacactaaggaacacgatggattgtttgtgtgcaagagcaagggcctacacctttttaccaacactagagtcctggtcttcattgtgttaagctgcaatgttatgccgaattatgccattcttgaaaatcgggacctgtaactgaaaatgggacgtatatacatgttggatcctgtct

SEQ ID NO: 173587 - DNA, 520 bp, Arabidopsis thaliana
agaagactatgaggtcgaacgcacgcgtacgtaagcttggatcctctagagcgttcgcccttgggggtttttcctgatgaaaagatttgattgatacaaaaatcaaagacaaacaacaaagccgaatattaaaatagggaagaaataaatactccatatgacttaaacttaaaaatggtcaataagagagagatctgctcgtagctgggagagatatgatagaacatcaactaaaaaaattgaagaaatgtaaatcggtgatagacgacgggtgaaaatcagatgaaagagggccttgcaaaaacaagataacctttcttgtgcggggatactagaacgggagagcatacgcagcaagagaaccgatttttcttctaccttaacaagagaacgagcaagttagaaaggaagtatttaaaatagactttggagaattcgtgaatatgaaacaggattcttttttatgaacgtgtcactatattgatgggaactctgtttttttcgaacctttctaattttt

SEQ ID NO: 173588 - DNA, 516 bp, Arabidopsis thaliana
ttctactcaccttatggagaagctaccacgcctgcaggtaccggtccggaattcccgggtctgacccacgcgtgcggacccttctaaagggtatttatgcttatggttctgagaagccttctgctattcagcatagaggaatcgtccccttctgtacgggtcttgatgtgattcaacaggctcagtctggtactgagaaaacagcaactttttgctctgttgtcttagagcagctggacttctcccttatccagtggtaggctttggttctagctccaactagagagcttgctcagcgaattgagaaggccatgaaggctcttggtgactaccttggtgtcaaggttcacgcctgcgttggtggaaccagcgtccgtgatgatcaccgaatcctacaagctggagtccattgaattggtggaccccagggcgtgacattcacctgtagaagacgcaacctcttcgtgctgacgacatcaaaaaggttagacccaatgaaggtaggcaaacgcctcc

SEQ ID NO: 173589 - DNA, 527 bp, Arabidopsis thaliana
cagcgtcaatacgactcactttagggaaagctcgtacgcctgcaggtaccggtccggaattcccgggtcgacccacgcgtccgcccacgcgtccgcttctttatatgagcgaagaagatgcattctggttattagttgcattactcaaaggagctgtccactccccaatagaaggattgtatcaggcagggcttcctcttgtacagcaatatctgttacagtttgatcagttggtaagagagctaatgcccaaactaggagaacatttcactcaagaaatgatcaatccgagtatgtatgcaagtcaatggttcataaccgtcttttcgtattcacttcctttccattcagcgctacgaatttgggatgtgtttctagctgagggtgttaaaatcgtgttcaaagtcggtttagcattattgaagcattgccatgatgatttgttgaaattgccatttgaggaactcatgcatgctctgaggaatttccctgaagatgccatggatcctgatactttgcttacattg

SEQ ID NO: 173590 - DNA, 398 bp, Arabidopsis thaliana
actatagaactcatgaggtcaactgcacgcgtacgtaagcttggatcctctagagctgccgcgctttgggtaaaccttttttaatcaaaagcattgaacatcttattttccaggccggaaatcaattagtaatgtagtagtggttaaatatgaagtccttgggatactagaggacgatgagagtgctgtcaccgaaatatcgaacacatcgctttttttttaaagaagggatctaatcatttgctgtacgaaatagggaatagacgcagaacattgctggataatggtgatgttgtcatgtgatgaggaacggcggtggagcagacgaatgtaataatgggcatgtcacagtattgtgttggggagagccaaggctagttgttgaagagagtgtggag

SEQ ID NO: 173591 - DNA, 529 bp, Arabidopsis thaliana
cagctactatacgactcaccttagggaaagctagcgtacgcctgcaggtaccggtccggaattcccgggtcgacccacgcgtccgctcggtttcaagaagaggatcttacaagcctcaggcataggcgacgagacatacgtcccaagatccatctcttcatcagaaaacataacatcgatgaaagaaggtcgtgaagaagcctctacagagatctttggagcactagacgaactcttcgagaagacacgtgtaaaacctaaagacgttggtgtccttgtggttaactgtagcattttcaacccgacaccgtcgttgtccgcaatggtgataaaccattacaagatgagagggaacatacttagttacaaccttggagggatgggatgttcggctggaatcatagctattgatcttgctcgtgacatgcttcagtctaaccctaatagttatgctgttgttgtgagtactgagatggttgggtataattggtacgtgggaagtgacatgtcaatggttatacctaattgt

SEQ ID NO: 173592 - DNA, 498 bp, Arabidopsis thaliana
  unsure (1)..(498): unsure at all n locations
actatagaagcttatgacgtcgactgcacgcgtacgtaagcttggatcctctagagtggccagccttggttaatcccttttttttttttttttnttttnttttaagaaaagaagacataatttcttaaagtacaacaagagaactacttgtacaaagtgcaaatttacaaagataaaagaaccaaaaaaacaaaacataaaaacaactggcttcttatatgaagcgagcatgttatttatcttagttaaaataataatcataaaaaagtgggaaaacggtcaagggaattccgaaacaaatttgcaaaaccaaaattttttttttatttgaaagaaaaaaaagaaaaaccttcccgaaggggaaaactttcctgaagaaaaactggagcacttttgggggcggggggaacaagatatggttttgactttttctttctatttggaccaaaaagttttttttttttcttaaattttgggcttcgaaaaacaaaaaaaaaa

SEQ ID NO: 173593 - DNA, 518 bp, Arabidopsis thaliana
ccagctccatacgactcacattagggaaagctcgtacgcctgcaggtaccggtccggaattcccgggtcgacccacgcgtccgcccacacgtacagatgacgctggtgtgttctacaccatataatctctctttctctctcgctgtactctatctcctgatcatatattatctcattcaagtgaaaaaagggccatggtgaagatatccacacactcgtctgagacaatgtaactggaatggagaaggctgactatcttgggaatgatgccgccagagcagacggcccaaatttaggaccatgtgctaggcacactgttggtacagggaaaccagatactatagatgatcacgttaaggatgaagctcaatctaagaaatgagtcctcactcagaaatatccaattcaccatgaaaacgttattcactgcgaagacaagcttaagatacggcattacaatgtctaaacgagctatgtgttgcccctgatgaacactctaatctactctcagaggcacc

SEQ ID NO: 173594 - DNA, 491 bp, Arabidopsis thaliana
tcccactcacttagggagagcacgcacgcctgcaggtaccgggccgcaatacccgggtcgacccacgcggccgccctaccaatgaagaactgggtagtgaggggtttcgtgagttcatatctcttgttgatcttaagaaaaatggtttccttatccggagattgttgcatgttaggtgtcaagttccatgggattctacctgctaaaccccgaacatttttttgttggaggttaatagagaagcctgtcaatcacagagacactttggatgatgaccatgttctcggccttcaaccctggaaacggtcatcactctaatgaatttgtccttggaacccggcaatggagaatctaaagttcatccaacagggtctatgggtgaaaaagacaacatcattttctgtggatctatcggccctcgggctcagcgcatcctgctccgaccactaaagctggacgcaggctcacactcgcgtggattggatcaagtt

SEQ ID NO: 173595 - DNA, 335 bp, Arabidopsis thaliana
  unsure (1)..(335): unsure at all n locations
cgcgtacgtaagcttggatcctctagagcggtcgccgtggggtatattctttttttttttttttttttttttttttttgggtttggagagaaaaacgagttttttgattaatgaaaaaaatacaaaaggcttgcaaattttacatntaaacaagctctttttctccttttacactcacaaaagaaaagactttttttaaaacggggtaaaactgggttcattttccgggaaaaaattggggggcaaggcccttggcttggtgttaacggggtgggcaaaaggggcacaaagggttttttttggggcccttttacaagaaaaaggggttggacaaa

SEQ ID NO: 173596 - DNA, 467 bp, Arabidopsis thaliana
  unsure (1)..(467): unsure at all n locations
cgcgnacgnaagctgggatcctctagagcggtcgccctttggggtattcctttttttttttaaaagatcgaacgatcataaaccccttgatgattcgaacttacacaaacggaaatcaaaaagacattaaaattcaaattcaaagccgaataaaattccacacagacagaaaatgagagattaatgccgttttttggttgtgggggaggtgcaccggagtggcggtcgtaaagaaaactcccgccacgagtgccaggggattgcaccgtccacgggaggtgctgcccttggcgaccaaatggcgggaccatggccagatgaccatctatggtcgtgaggcgtcgatcggattggttgggtcccacataagatcgtgcttcaactaggaggtaagatccacacaagaaatatgacgattaggagacgttagggtaacaagcgcgaacggacagagagagagagacaga

SEQ ID NO: 173597 - DNA, 505 bp, Arabidopsis thaliana columbia
atgatactgccaggtactaatacgactcacgttaggggaagcacgtacgcctgcaggtaccggtccggaattcccgggtcgacccacgcgtccgtgaagtccttggaagcggccgtgtgacaatgaggaagactgttgccaagccaaagggcccatcaggcagcccatggtacggatctgaccgtgtcaagtacttgggtccattctctggcgaatcaccgagctaccttaccggagagttccccggagactacggatgggacaccgccggactttcagctgaccccgagacattcgcaaggaaccgtgaactagaagttatccacagcaggtgggccatgctcggagccctaggctgcgtcttccctgagcttttggctagaaacggagtcaagttcggagaggcggtttggttcaaggccggttcacagatcttcagcgatggagggctcgattacttgggaaaccctagcttggttcacgctcagagcattttggccatttg

SEQ ID NO: 173598 - DNA, 450 bp, Arabidopsis thaliana
cgcgtacgtaagcttggatcctctagagcggtcgccctgttttttaattcttttgttttttttatatatacgcccgtttttggttgatctttttttccgacaatacgtcacctggcagagatatcgttgctggtttctatgggacagcaaccacggcgagcgtgtcaagaggagaaacagaccccatgggggccacatttggtgctttgcgggggtgccaccccacaagagccagcttccttttacaggagggggccccccaaaagagggggataaagcggaacaccgctctcgtacacagacaaaaaagagaacgcagataacaaattgagaagacagggcagagaatgacgagagacctcgtatcttgaggcggagacggaactacgaaaaaggaaagcaatactaatgaagacgaggggcatgctcaggtgacccgaagacgaagaa

SEQ ID NO: 173599 - DNA, 480 bp, Arabidopsis thaliana
acgactcacgtgaggagaagcacgtacgcctgcaggtaccggtccggaattcccgggtcgacccacgcgtccgtctcattcttggaactggtaccgctcaatctattgttaagatttgggatgtaaaaagtcaggcaaatgtggcaaagtttggtggacacaatggagaaatcacctctatatcattctctgaaaacggttatttccttgcgactgtttttctggatggtgttaggttgtgggacttgcgcaagttaaagaccttccgaacctttgactttgcagatgcaaactcaggtggagtttgaccataccggatcttatcttgacattgctgcctcagatataagagtatcccaagcagctagtgtcaaagcagaatgggacccaatcaagactctggcccatcctgcgcggaccaggaaaggaccaagtgatactgtgcactccgcctccaatacatggcacgggagaaaaagt

SEQ ID NO: 173600 - DNA, 458 bp, Arabidopsis thaliana
  unsure (1)..(458): unsure at all n locations
ccggnccggaattcccggttcgacccacacgtgaaaactttttgtttatctaatacacaacccaaatcggcatactatctcgtgcgagacccatttcttaacactattttgtctgagtgcgctacttacagccgtgattctcacggaatgaactactcctgtcatcatcgcgccaaaatttttttttctgtgttttgatctcgcacacaatagtcattttgggacaggatcccccatttgttgtcgtcaggtacgtctcgagggacatttggatattagccataacaagctatgtgggcgcattccaacgggttttactttttgatcaccttgaagccacgtcgcttagtgacaaccaatgtatttgcggcggccctttgacgacgtaatgttaataacaaggatatgggtttctggtctactgaaccgggttattatttatgctgctgatcttgttt

SEQ ID NO: 173601 - DNA, 484 bp, Arabidopsis thaliana
atgacgtcgcatgcacgccgtacgtagcttggatcctctagagcggccgcccttttggtttttttttttttttttttttttttttttttttttttttgtttttgtttttttttggtgaaaaaaaaaaaagattgtaagagtcggggcttggggatttagaataatttaggcttttgcgaaagaacgaaaaaggaaggacgccacccctttttggcacggggggaggaggaaggggggacgtaaaacaaacaacgaagccaaccccgagccccggggaaggaaaaaaaaggggggggggaaggggagaacagagacggggggaccataacagcataacccccaaggaaacccgaagacaggggggggggtaccgggcaccccgaacgcgggggaaaacaggcggacaggggaaatagggcgaggtggggcgccggactgtgcggggcaatacaaaagccctcccccagagagccagcacaaggac

SEQ ID NO: 173602 - DNA, 490 bp, Arabidopsis thaliana
  unsure (1)..(490): unsure at all n locations
tgacgtcgcacgcacgcgtacgtaagcttggatcctctagagcggccgccctttttttttttttttttttttttttttttttttttttttttttacaaaggaataataaaaattttttgtttttaaactctaacaaacacacgacttccacagacttaacgtatataaacaacaacactcgagcgaatgcctcgtacaacaaaaaattttcttcaaaatacataccactcccacagcttattcacacacacccactttgttacaaaactaaatcgaacccgggatcatattcttatccctgttaaaacctaactagacctcatcatgtatgcatctcctttgtttttgcaatcattccttgaatcatcggnagaatgacagcaagagcctttctacatgcatacttgattttaatcccgacaactcgatagccctcccagttcctgcaacaacaaagattctcacccctgaacttatagatacaacctat

SEQ ID NO: 173603 - DNA, 463 bp, Arabidopsis thaliana
cacgcctgcaggtaccggtccggattcccggttcgaccgacgcgtcaggcttaacagttactttgttgatcacaatactgggaaatccatcgctgatcaaaatgttctttctttccaacctcagatcgatcctgagtgtgatttgttcaagggacattgcgttccagacaaaataggatctttatacactttttctagctgtgctacgacccccgactcgaagaactgcctaaaacacggcacacccgacatagatttcttgccctggagatggaaacccgctggttgcgatcttccaacgtttaatccataggcgtttctcaatatggtccgaaggaagaagatgaattctataggagattctggggctaggaaccatatggaatctattatttacttgctgtcaatgcaagagactactaaggacatctacgaggatggagaagatagggaacggaatgag

SEQ ID NO: 173604 - DNA, 482 bp, Arabidopsis thaliana
atagaagagttatgacgtcgcacgcacgcgtacgtaagcttggatcctctagagcggccgcccttttttttttttttttttttttttttttttttttttttttttttttttttttttttttttttttttttttaaagaagagattggtccctaattcacattttttaggcgaaattgcaagggccccttttgaaaccaacggacaagggttcatttaaaaaatcgaacgatcataaaccccttggtgattcgaaattccccaaacggaaattaaaaagaccttaaaattcaaattcaaaggcgaataaaattcccccagaaaaaaaaagagagatttattcaattgtctgggggtgggagctgctcggggggggggttgaaaaaaaaaacttcgtaaatgagtccagcgattccccccccgacaaaagggccggcccaaaaaacccagggggtgggccatgtccagctcaccaccggtgggc

SEQ ID NO: 173605 - DNA, 439 bp, Arabidopsis thaliana
cgcgtacgtaagcttggatcctctagagcggtcgccctttttttttttctttttttttttttttttttttttttttaagagaacaaagagaaaatttcttttagtaaaacccagagaccttccttttcttagcacgattttacagaattcaaagatcctttgaagcagactttattactgctggttttttttttttagcgcagggttttaacacaaaaaatagacttatcattaaaggtttgaagcataccaggtttttcggtacaaactactttaaccggaatatttatatatttggaggaaataaataaaaaactttcggactgccatatttcctcaaggaacccttaaagaaatctttgtgagatgtaaatttacaggggctaatgttaccactatttttgccctaaaggagaacgtgttttccccttttcctcgt

SEQ ID NO: 173606 - DNA, 483 bp, Arabidopsis thaliana
cgactcacagttagggaatagctcgcacgcctgcaggtaccggtccggaattcccgggtcgacccacgcgtccgcccagatttgagtaagctgttcagtttacagatggccaataccctattatcttgcgtgtaatcaggaacatggggtttgaacatttttacaccagcgcaggtaaacagcttacagagaaaactggtattgttcattaaatcatttttgttgcaaaggaattacggtttgaataggtttcttaccttgttgttccaatcataagagaagggtccaacttcaaatgtgaaggagggaaagatggttctatgtactgaaccatagttgatgaatttgtcagagttgactctgtagagatcactcctacaataggcttttattaggggagcgataacgtatgacggtagactaaaaagttgacagaaatgactgctacccatctaccataagggtttacagttgtacacacgg

SEQ ID NO: 173607 - DNA, 505 bp, Arabidopsis thaliana
  unsure (1)..(505): unsure at all n locations
ccagctctatacgactcactataggagaagctggtacgcctgcaggtaccggtccggtatcccgggtcgacccacgcgtccgcggacgcgtgggcgacccactcnatcagccacgcaattcgtctatgaagactgcgccttttacctaagcagaaacaggtgtgtgcttaaagcttctatggctgcatttcctaaactaaaatctgccgctcgcattgaacaaagacgtctagtttatgctgactccatactacattactggataccgcgccactgaggatgatatgaccatatttgtagatctggtaaacaccgcaactttacagtatgataacgctactagatactacagtcacatcgatggcgtatagaggatgtatgttgtttatactataacgaactgggacatggtttgatggatcaccataataaacctgacgtggctgtggatcctacagctgcctcagacttattgatgctgcgtcataataccacgatgatgatt

SEQ ID NO: 173608 - DNA, 493 bp, Arabidopsis thaliana
gactcacgttagggaagcacgtacgcctgcaggtaccggtccggaattcccgggtcgacccacgcgtccggccccggcgcctctcccgggcgctgaaggagttccgggtgcgcggcgtgacgaccaacatccccttcatcctcaacgtcctcaacgactaggcgttccgcaacggcgtcgtcggcaccgcgttcatcgacaggaaccccgccctcttcttccttgaccgcagcgccaacaacgcaggcgagttgctctcgtaccttgggacagtggccgtgaacgggcgcgagaccccggtgcccaccgacctgcagtgctgccacggggagcccgcgagagcgggggccggcccccgcgccgggggggggatgggagtggctggccggggaggtggcgaggcgctgaggaagggcgtgctgaggcacgagggggtggctggtggttgaacaccgcgctggggggggggtcaccgggggggtgctgacccccc

SEQ ID NO: 173609 - DNA, 492 bp, Arabidopsis thaliana
aatacgactcacgttagggaaagctcgtacgcctgcaggtaccggtccggaattcccgggtcgacccacgcgtccgcccacgcgtccgtttttttcggagcaaaatgattcgtgctgctgctctggtggtcttggtaggtctccactccacagctgaagcaagaggtcctgaaactcgaccatccccagaaactcgaccgaacccgaaggtttcggatattccaccacgtggagaagtatccgtggagccccgaccatttccacatcgagaagtatccgtggagccccgaccattgcctccacgcttttccaaggtgcccgactttgggcggagtcgtggtctgcacgatggtcaccggccgacagacttccctaggaaggatggccccggtgcaccaccctcagacctggttcattctgacaaacctccactgcccccgtctgggttcccccaaggacctgcaggcgaactgctcccactgccctcagacc

SEQ ID NO: 173610 - DNA, 453 bp, Arabidopsis thaliana
cacgcgtacgtaagcttggatcctctagagcggtcgccctttttttttatcctttttttttgagccaaaaatggacacactgtggggcagggtgcttgcttgcttgcgcgatgcatatggtttgggccgggggtggccagagggggacgctgcgttgccgccacacaaggtgtgtgcgtacagcgacccgttttttttgtcgtgagtgagagcgaagcgatgcgcacgcccacgaccggtattgcgacgggtcaacccacacaccctcccaacggccgggggcggagggctgcatggatgggacggaggcggcgggctggggggccggctagggcggcggtcaggcgcaactgctcgtgcatgcgccaccgtggcgctgagcttcatgggcttgacggggagacggactgctgtgacaactggtactccgagaacaggtcccgctgcttgtag

SEQ ID NO: 173611 - DNA, 490 bp, Arabidopsis thaliana
  unsure (1)..(490): unsure at all n locations
acgacgcacttaggggaagcacgacgcctgcaggtaccggtccggaattcccgggtcgacccacgcgtccagaacaaggaggaccaccacttggccgggggcgaggccgcggcccccccgcccgccagcccgactgcctacccggccaaagccaaagccgacgcccgcgaatccccggtcaaagccaaagctgatgcccccgtgtacccacccaattttttttgcggtggggacgcncggaggaggtgacggccgcacagctggaggtacgagggggaggggcgagacggcaggacaggggatggcggggcgcagtgaggagtgacgtggcaagagcgaagaacggagggaggcggatgggagagcgcgcggtcggagggaaggcggacggaggagggcgcgggggggggaaaggggaggggtaagaggagagggagggaagagtatgagagaggaagcgaaagaggaggcgcacccgaagcggagcgcc

SEQ ID NO: 173612 - DNA, 478 bp, Arabidopsis thaliana
acgtcgaaccaacgcgtacgtaagcttggatcctctagagcggtcgccctttggtttttttcttttttttttttttttttgaacttttgtttggagcggcacatatgtgaccccgtccacagtcgtccagagacaaaaaaagagtgcggagccactctttggggacaccactcatagggacctttagttgctgaactcacagtttttacagtggggcgcgcaagacggtccttaacacattttttgagaacacgtgctaagtggaccatacctgcccaacccttggctgtgaaccaatggactgcttgggttgcgggagcataacccttcccgggggaagacagcactggtggtgataattgcactgcctgtgtgcaccagggggattggataaaaaggtcaaatggtgccctagggctagaggccctaaaagatattcggatgaaaacagaaccgcctgggcaaccccaatcggtga

SEQ ID NO: 173613 - DNA, 493 bp, Arabidopsis thaliana
accactcaactagggagagctaccacgcctgcaggtaccggtccggaattcccgggttcgacccacgcgtgtcgctctcgcgtccgtccacgcgtacgattttttttagcgaaggcacatcatgcaacgaagtggatagcggatggcgagcagactaagcgctcccatatggaaagttggcgatgttgttctgcaccgtgcagcggcagacgacaatgttttatctcgggttgtgggctccaaggataccaatgacttctttgttagactgaaccggcaatttgcataccaagtctttgagctggcaaagcaccgaaagggccttcacgaaaacattcgtcggactttgcccttaggacaggaggaacttcctaccctggctggtgcaatcgataccaactggaaagtcgccccatccgtgatgtgttgataaatagaccggtggaaataactgggtccgggaacgatgccaaaatgccatcaacatgttgac

SEQ ID NO: 173614 - DNA, 480 bp, Arabidopsis thaliana
gggaagcacccacgcctgcaggtaccggtccggaattcccgggtcgacccacgcgtgcgatccgatgtgacctttgacattgatgccaacggactgctgaatgtcagcgctgaggacaagaccactggaaagaagaaccagattaccatcaccaatgacaagagtcgtttgaccaaggaggaaattgatcggatggtgaactatgtctataaatatgaggaggacgataagaagcagcgtgaccgcatcgacgccaagaatggcttggagaactatgcatattccatcaagaatgccttgagcgacgagaaggtggcgggtaagatcgacggtggtgacaagcaaaaagccctcgacgctgtgaactaagctgtgcaggggtgggagcacatccatggaggcaccaaggactattacgagagccgccagaaggacttgggagggttgtgaatgcccatgatggccaagctgggccatggc

SEQ ID NO: 173615 - DNA, 462 bp, Arabidopsis thaliana
cacgcgtacgtaagcttggatcctctagagcgttcgcccttttgtgttttctttttttttttttttttttttttttttttttttttttttttttttgcccagcaattgtcactggcaacaaaatgtcagtcagggattcattttgatgacaatgttgagtaatattgaaaaataggtctgcaagctcggggttatgtaccgggggggggcccctgagctgcaacaagaaactggggccatgctctttaagaggagcaccctccccattgtttttggggtgggggaaaacgttggggctaaccttgaactaatggggcgtgagggaccaaggcccaaggatgtgaggcccccggcctggccccaatttagactgggcgcggagtcatgcgctgcagcttgatttagcggggaaatacctatcaggggtcaagggggaggataccgggcaactgggatcccttc

SEQ ID NO: 173616 - DNA, 488 bp, Arabidopsis thaliana
ttacgactcacttagggagaagcacgcacgcctgcaggtaccggtccggaattcccggttcgacccacgcgtccgatctttttttcggtggaagaacaaaatggacgttctccaaggtgttcgcgccgaatttaatggacgttgcagtggtgttgaaccattgaagctggttgcgggttccgttgtcactgcgttcttgttgcatcgcttcttgaagtttttcttcagtgggacggctcttgaggactccagggcgacattcttccgattggtcaccaagctcccgatggtgcataaaaagctccgggaggagcaacaagccttcagtgagcaaaccctggcaatgtttgccccagcgagcaaggttggcaacacatacgctgccctgcctcccacatctgtgtctgttgaggatatctgcaacgaggtcgatgcacttgtcgcactgaaccagccctacgaccaagggcaacagtcaggcgcagtgt

SEQ ID NO: 173617 - DNA, 499 bp, Arabidopsis thaliana
cttctccctacgactcactatagggaaagctgcgtacgcctgcaggtaccggtccggaattcccgggtcgacccacgcgtccgctctgcctcctttcggattcaaatctcagatctagctcaaccatggcgttgctcgtcgagaagacctcaagtggccgtgaatacaaggtcaaagacatgtctcaagccgatttcggtcgtctcgaactcgagctcgccgaagttgagatgcctggactcatggcttgtcgtaccgaattcggaccttctcagccattcaaaggcgctagaatcaccggatctcttcacatgaccatccaaaccgccgtactcatcgaaaccctaactgctctcggtgctgaagtcagatggtgttcctgcaacatcttttccactcaagaccacgccgccgcagccatcgctcgtgactccgccgctgttttcgcctggaaaggtgagactcttcaggagtactggtggtgtaccgagcgtgctct

SEQ ID NO: 173618 - DNA, 516 bp, Arabidopsis thaliana columbia; identical to SEQ ID NO: 125618

SEQ ID NO: 173619 - DNA, 495 bp, Arabidopsis thaliana
atacgactcactttagggaaagctgctacgcctgcaggtaccggtccggaattcccgggtcgacccacgcgtgcgttgacatagtcgggaggagaaaaccatgggtatctagtgtttccaagactgataagttacctcctcttggagaggcaagggagatactgacgtttgccaaggcacagacactcaagcgtgcccccaatatgaaacaccctttaatgtgccttgacgctattgaagtaggtattgtttctggtccaagggctggtttagaaaaggaagctgaagtcgcctcacaagtggtaaaactggataccaccaaaggcttgatccacgtcttcttttctcagcgaggaactgctaaggttcctggagttactgatcgtgggttggtgccaaggaagattaagaaggtagccataattggaggcgggttgatgggatctggaatagctactgcgttgatcctaagtaactatccagtgattctcaagg

SEQ ID NO: 173620 - DNA, 493 bp, Arabidopsis thaliana
tacgactcactttagggaaagctcgtacgcctgcaggtaccggtccggaattcccgggtcgacccacgcgtgcgattcaaactaactctgcaaaaaaaaaaaaaactcagagcagaggagatcgagagagacaaagagagagagagagagagagagagatcttaacaaaaaaatgtctatatccatggcgttattctctccgccgatctcttcctcacttcagaaccctaatctcatccccaagatctcaacctctcttctctccaccaagcgtttctctctaatctccgtccctagagcttcctccgacaatggtacgacttcccccgtcgtggagattccgaagcctgcttctgtggctgtagaggaagttccagttaaatctccagccgaaagctcctccgcttctgaaaacggcgccgttggaggtgaagcgactgattcgagtactgagacggtaatcaaatatcagaatgcgaagtgggttaatgga

SEQ ID NO: 173621 - DNA, 495 bp, Arabidopsis thaliana
ctatagaagagttatgacgtcgaacgcacgcgtacgtaagcttggatcctctagagcggtcgccctttttttttttttttacgctaatttgttcgttttatcattaaacccacataccatacaaattacatatctgatcaaatttcctacgaactttgtgtgtctccttccttccactgcttgtttgatccaatctcaacctcgggattcggtaccgttttttcggggttacccttaggcttactcttggaatctctccacctgaaaccactgaaaagctcatccatatcctcaagcatcctcccttgcgtctccggcaagaaagtgtaaaagaaaacccaagccacagtcgcaatccctccaaacaagtaaaacgctccaccagtagtcatcgctttcgacattggaagaaacgatatcgagatcacaccactagtcactctgttcaccaccacacccatactcgagccctgtgatctcaacctcaacgggaat

SEQ ID NO: 173622 - DNA, 493 bp, Arabidopsis thaliana
atacgactcacgttagggaaagctcgtacgcctgcaggtaccggtccggaattcccgggtcgacccacgcgtccgctgaaagtcaacgaatgccgaatcttgatcctcttgcttacactgttcctatgattgggattagatttggtttgaagaagcttaacatttccggttcggttttcagacccgatgcaggcgggtcgggtcaaacaatggttgatttgggatccgagtttactcatttagtagacgcagcttacgataaagtaagagcagagataatgacacgtgtaggacgaagattaaagaagggttacgtctacggtggaacagctgacatgtgtttcgatggaaacgtggcgatgatcccacggttgataggagatcttgtgtttgtgttcactagaggagttgagatacttgttccgaaagagagggttttggttaacgtaggaggtgggattcattgcgttggaatcggacggtcgagtatgct

SEQ ID NO: 173623 - DNA, 526 bp, Arabidopsis thaliana columbia
cgatttctattaggtacaactatagaagagctatgacgtcgcacgcacgcgtacgtaagcttggatcctctagagcggtcgccctttttttttttttttgaaaaaaaaagatgtggatgatccattcaaaagttttgaaactcttctatacacatacattctccggatgtggttgttactaacttcaaaatataaaaatttaacaaaacaattgttatcatcatttcctacgagtcattaaacccaatcccactcgccgtcgccggaaaacacctcggaaaatcagccaccgaaaacgatctccaggcacaaaaacccaacgacgactgagacgaagtcaaattaccaaaagacccttgactcctaggatacaacggaggaagcttcttcatctgatgttgatgatgatgtagctgcctcggaggagatccagaagtcgtcggacttgatcccggcgacgagtcacctccggaagaagatccttctccggtcatcacaccagccgcaacagccatagctagcgtca

SEQ ID NO: 173624 - DNA, 508 bp, Arabidopsis thaliana
taggtagcactatagaagagttatgacgtcgcacgcacgcgtacgtaagcttggatcctctagagcggtcgcccttttttttttttttttatcaaaatttccttcgcatttttgaaagatacatggtcaagaagacagagcaatatagatacaacgaaccttcttcatcacaattacagaaaaaatgattatgtagatatcatgtttagagcctaaacggctaaacagttccatcattaatgtcttaaacaagcttttatgaacagacaatggaaccttcactgcgcaactggagcgtataaaagccagataacgtgcacgaatcacctcttggatagcttctgtatcttctagattctttcaaagcatcaaggatgaatgaagcaagcaatgtgtgttgtcactttccctcttcgtttgtcagtccagaacacaacaagttatttcactaagtagccttgatcttatcatctccaacaacagaaagtatgggcaaactattcaagat

SEQ ID NO: 173625 - DNA, 479 bp, Arabidopsis thaliana
acgtcgcacgcacgcgtacgtaagcttggatcctctagagcggtcgcccttttgtttttttcttttttttttttttttttttttttttttttttttttttttttttttaaatttttttaaggggtttattggaaaaaaaaaaaaaagaagaagaaaaaatttagaaaaaaaaaaataaaaaaaataaaaaattgaaagttaaaattttttacggggggggacaacaggagaaaccagggaaatagacaattgagccgcccggtttggaaatagcgtcgtcggaaatacaatgagaggtcatgggttgaaaaaaaaaaagttagataccagtgacaaacgtacaggaaaaaaaacctagagacacggagttaaaagatgagcgaaagatgcagaggaaccaaaattaggactgatgaaaatggcgaaatgacaacttcaaaaaacccggctggggggacaaaataaaagaacaaagcttg

SEQ ID NO: 173626 - DNA, 511 bp, Arabidopsis thaliana columbia
  unsure (1)..(511): unsure at all n locations
atgatactgccagctacaatacgactcactttagggaaagctcgtacgcctgcaggtaccggtccggaattccacgggtcgacccacncgggncgcttcgtcagattcatatagctcaagttccgactcagattcagattcggaatcagaagcatattcatcttcctcctatgagtctagttcttccagtgatgggaagcataggaagaggaagtcaacaacaagacacaaaggccgactctgggaaagaaagagtaaaggacgaagcgggaaaaagaaagctcggccagatagaaaaccaagcacgaatagttcaagtgacacggagagtagcagcagttctgatgatgagaaagtgggccacaaagccataaagtcagtgaaagttgataacgctgatcaacacgccaacttggatgactcagtgaaatcaaagagcaggagcccaattcgtaggagaaaccaaaacagcaggagcaaaagtcctagtaggagccctgtgagagttctt

SEQ ID NO: 173627 - DNA, 476 bp, Arabidopsis thaliana
tgacgtcgcactgcacgcgtacgtagcttggatcctctagagcggccgcccttttgttttttttttttttttttttttttttttttttttttttttttttttttttttgataacaaaaacaaactttttggttttaataaaaaaaacaaagttttcgggtaaattcgctggccaaggaagcacaaaaaaaaaggcaaaccacggttttttttaggggggggaaaacaacaaacccacccaaaacatcaaagacagcccctacaccctgaaccgcgaggcctggaaaattccccctggccgggacggtttacacatcagggaacacacgacctaacgacccaccagggaactttttttttttaaagatacaaaatcaagcaacctccctgaaaatacgcactcagggacgggaagaccctctatatgctaaagaaccaccggccggacaataccctctgtgggcgccaacccaatca

SEQ ID NO: 173628 - DNA, 483 bp, Arabidopsis thaliana
gtcgaacgcacgcgtacgtaagcttggatcctctagagcggtcgccctttgggttttttctttttttttttttttttttttttttttttttggaatcaagtttaacatatattgagaaacactttcaggttcaaagatcactgtagtacaagaacaaaaggtaaacaggataaacgtcaaaaacgtgtgtagtagaaacatgctaatgggcattcattgcaaagcgcttcaacggaagtaaccgtagagctccaagtagcaaatgcaaaagttccacggagttgatgtatctgcagttggaccggtcagaaccagcctgaaaaacctaaaggggagtaatgcatttgctgcggtgattggccatgatgcaaactgaccggccttgcacattgtttgggcatcctcatggactctcaagtctgtccatgttttcccatccatcgatccctgaaacttccagaatcttgggaatgctcttgatcc

SEQ ID NO: 173629 - DNA, 490 bp, Arabidopsis thaliana
atagaagagctatgacgtcgcacgcacgcgtacgtaagcttggatcctctagagcggtcgccctttggtttttttttttttttttttttttttttttttttttttttttttttttcggaaaaccccgacctttcactgcaaactttttagtacaacggattagtaaataagcaaaaaccaatctctcgtacttttactcaagtctcgaacaaactgatttttttttgaccagggactagtcttaaccataactaaaacgggggaggggaatcatcaatctatactggaatctttccaggtgggtcttgagaattggagacacagggatcagcgtcgtcaagctttctcacgacctctttcatactcggtctgagattcgggagcttcgtagggcaaaaaaaacccatcttcaaaactctaatcatgctttcttctatataaggggacaaaacttgcttggccaaaacattttgaaggttcctcggatctt

SEQ ID NO: 173630 - DNA, 493 bp, Arabidopsis thaliana
tacgactcactttagggaaagcacgtacgcctgcaggtaccggtccggaattcccgggtcgacccacgcgtccgagattggactttcaacagaactgagtcagctcattttacagaacaacagattttccggcaagattcctcgtgagctcggaagattgactaatatagagaggatttatctgagcaacaacaatctttccggcgaaattccgatggatagttggagatttgaaagagttatcatctctgcatcttgaaaacaattcattaacaggatttatccctaaggaattgaagaattgtgtcaaacttgttgatctgaatctcgctaagaacttcttgaccggagaaatccctaacagtttatctcagattgcttctttaaactcgttggatttctcagggaataggctaacaggtgaaatcccggcgagtcttgtgaagttgaagctgagtttcattgacttgtctggaaatcaactttcaggaag

SEQ ID NO: 173631 - DNA, 498 bp, Arabidopsis thaliana
taggtacaactatagaagagttatgacgtcgcacgcacgcgtacgtaagcttggatcctctagagcggccgccctttttttttttttttataataaagttaactcgtataactaaacccatatttatgccaactcaaagattgtgttactaagggtaatgagacatataatcatatagaaatgttagaagcggcaaaatgtttttcttttttgggggagaggtttcaatttaatcaccagagacaaaatttcgactattcaacattgatcctggactgacttgattattaggctgatgggtttcctttgttattcgtaccccactcttcctcaccctcacttccattaacaagtacagcaccgtccgtagagtctgcatccacaactccctcttcttcattcacttcttcttcctgttgttcctcttcatctccttcattctctacatgaccgttttcttctgctacctcgtgatcgatgtttccattttcaagtgat

SEQ ID NO: 173632 - DNA, 483 bp, Arabidopsis thaliana
atgacgtcgcacgcacgcgtacgtaagcttggatcctctagagcggtcgccctttggtgtttttcttttttttttttttttttttttttttttttttttttttttttttttttttttttttttttttttttttttttttgttgaaaggaaaagggaagccccaaattaagttaaacgggcccccccaagggctttttgttcccaaaattacccaaactggggggggggggaaaaaacatttaaaggggctttttaacccccccaacaattgaagaaaaaacaaaagaggggtggggtttttttaaaattacccgggggaaaaaccccaaaaaaaaaggggggttaaaggggccgttgaaaaaccggtttactttaaatcttcctggaaaaaaaaggtgggtttttttttcggccccccccgggacccaaattttccaggggggacttaaaaataaaactcggtttaaagcttaagaccctaaa

SEQ ID NO: 173633 - DNA, 503 bp, Arabidopsis thaliana
agctccaatacgactcacttagggaaagctgcgtacgcctgcaggtaccggtccggaattcccgggtcgacccacgcgtccgccaacagcttgaagaagaagagatcacgtgcgctctacaatcagatctcgttaagcatgtgttcaccttcaacaatctcaagggaggagataagagcagattctccaccgtattcaccgagaacgatgcggatcagtactctctcgtcttcgctaattgtctccaacaggtcaaaatcagtatggatgttagatccgctatgtataaccttgaaggtaaaaagggaggtcgtgattatctctctgctggaagaactgttcttcctaaggtctatttcttattctctgttatctatttctctctcgccgccacgtggatctacgttctctataagaaacgtctcactgttttcgcaatccatttcttcatgttgggagttgttgtcttgaaagctttgaaccttctttgtgaggctgaggat

SEQ ID NO: 173634 - DNA, 492 bp, Arabidopsis thaliana
actacgactcacgttagggaaagctcgtacgcctgcaggtaccggtccggaattcccgggtcgacccacgcgtccgaccgaatatgcgaatttcactttccacgaatatggacacaaagtgaaacattggatcacatttaacgagccatgggtgtttagtcgtgccggttacgacaacggaaagaaagctccgggacgttgttcgccgtacatccccggttatggacagcattgtcaggatgggcggtctggatacgaagcttatcaagtcagtcacaacttactcttgtcgcatgcttacgctgttgacgcattcagaaactgcaaacagtgtgctggaggtaaaattggaattgcacacagtccagcttggttcgaaccacaagaccttgagcatgttggaggttccattgaacgtgtgcttgatttcatcctaggatggcatttggctccaacaacttatggagattatccacaatcgatgaaggatcg

SEQ ID NO: 173635 - DNA, 493 bp, Arabidopsis thaliana
atagaagagttatgacgtcgaacgcacgcgtacgtaagcttggatcctctagagcggtcgcccgcgagctagaactagtgcccttttttttttttttttaaatagaaagattaaataaatataataaatctccatcgaataaaaaaagaagaagaaccaaaaaaagaaatatacaaagggttggtggccgaaacttttgtgaggaggaggacatgatttggtggtggtggtggtggtggttgcaagcaagcaaggtggtagtagcagatatagttacaaggggattcaaatgagccattgttgttgtgttttctttttcttacggtgcagttccccaagttgttgttggtgttttactactccactctgttgttgctctcaccacttccgctgcatcctggagtccgagcaaatgctgacattccacatgccccggtgttgccaggttaccgatatcgcaaccccgaacttgaatgagggactgaagcacact

SEQ ID NO: 173636 - DNA, 493 bp, Arabidopsis thaliana
acgactcactttagggaaagcacgtacgcctgcaggtaccggtccggaattcccggttcgacccacgcgtccgccgacgcgtggggttgaagtagacacctgggtcagtcagtctggaaagaatggtatgcgtcgtgattggctagttcgggactgtaatactggagaaaccttaacacgagcatcaagtgtgtgggtgatgatgaataaactgacttttgagattgtcaaagattcctgaagaggttcctggggaaatagagccttattttgtgaattctgatcctgtccttgccgaggacagcagaaagttaacaaaaattgatgacaagactgctgactatgttcgatctggtctcactcctcgatggagtgacctagatgttaaccagcatgtgaataatgtaaagtacattgggtggatcctggagagtgctccagtgggaataatggagaggcagaagctgaaaagcatgactctggagtatcggag

SEQ ID NO: 173637 - DNA, 511 bp, Arabidopsis thaliana columbia; identical to SEQ ID NO: 125697

SEQ ID NO: 173638 - DNA, 495 bp, Arabidopsis thaliana
atagaagactatgacgtcgcacgcacgcgtacgtaagcttggatcctctagagcggtcgccctttttgttttttcttgaaagttaatgaggtctccgtgaaataacaactccaagaccacaaatcatatctctctctctctctctctctctgtcacatgaaaatgatgcattttttctctgttcgtgtgttttcatatatccgagataacacttgaatttctggcccaaaagacggggaaaagaaaaaagctagcacgctaccggaggtaactcgaagcgacccaaagcaaaacatagcttaggagcgaagacatgacttcaaaacctcttggtcctttgatgaacggtgggatcacagataccatcaagaaagtcccaaccagccacgagaagatgaaagctcccgctccgtaaaggaaagtccagagcttcttctggagcctttggtggatgaagtaaaaggtagctattagtgatagcaaaacctgcaaggt

SEQ ID NO: 173639 - DNA, 513 bp, Arabidopsis thaliana columbia; identical to SEQ ID NO: 129072

SEQ ID NO: 173640 - DNA, 513 bp, Arabidopsis thaliana columbia
cgatttaattatggtgcactatagaagactatgacgtcgcacgcacgcgtacgtaagcttggatcctctagagcggtcgcccttttgtttttttcttttttttttttttttttttagctgaaagaaagaaggaaagaacaactcatatgaaaaaaggtcaaagagtaaaatgataaagactataaaggagtctcctctcctccaaaggaaaatatttaaatgacctcaatcaaaaatgactcacctaaaccccctcaaagaatattacagacgaaagctggtttattatccacacaaacctataaaacaaaacaaaacaaggaaacattccgacagaattccgcggtcacagtcttctagtaagcgaataccaccatggcagattgcgctactatgagatttcaattacttatatggatacttgttttcccaaaggtcttagtagccgcccatcggtggcattccatatggaggcattggaggcattcctgacattcctggcattccacccat

SEQ ID NO: 173641 - DNA, 495 bp, Arabidopsis thaliana
ttaggtgcactatagaagactatgacgtcgcacgcacgcgtacgtaagcttggatcctctagagcggtcgcccttttgtttttttttttaggacaacggtttttatcacattttatgtaacaaataacaaagaatgcaacaaacaagtaaagagagagaacaagagtgaaagatataagtagtcttagatcttgtcgtgaagattgacgactaagtcatgagcatcgtctagaagtttccaaacatcaagatgaccagccatgctgttacattccttcattatctcatccatcccactgtatttctctattatcgtcttcctcctctgcagcacgcttgcagctatcgcgtaaagcaacaaatcttctgtcggtggtgctcgtaaccggattctcccccatgtcgccttcgcaatcccagttcgtattgcagcttgatccgcccacattacttcccagagacacaacgtctgctcaaaggttagttctcgtctga

SEQ ID NO: 173642 - DNA, 491 bp, Arabidopsis thaliana
  unsure (1)..(491): unsure at all n locations
atagaaagtatgacgtcgaacgcacgcgtacgtaagcttggatcctctagagcggtcgcccttttgtttttttcttttttttttttttttttttttttttttttttttttttttttttttttttttggaaaacaaaatttgttcaaactacaattcaatacaactcccgtttcatgtctcctgaatcaattatgtcccatgagtgggcccaatgtttttaattggggagttatttcaacattgatttttttcatgaagggggggggacccaaaacaggaaatgaatcccatccaagaagatctggaatttgttcaaactacaatttaatacaactacagtttcatgtttcctgaatcaattatgttccatgagttggcccaaggttaaaaattgatgactcantctcctccacttttaaaccccctttagcgatcagattccccgggacggagaacaaaagaatttgcgaatttgtaaaaagagaacaacg

SEQ ID NO: 173643 - DNA, 512 bp, Arabidopsis thaliana columbia
atgattctgccagctaccatacgactcactttagggaaagctcgtacgcctgcaggtaccggtccggaattcccgggtcgacccacgcgtccggaaaaaggagatctctttatgtaaaagtctctgagaattttggtttaaagagaggattttccggagatgggtttgttggaatcggtgaaatcaatcaactgggaacatgaatcatctccggtttatcaggattttcgagttcttcctctcttcgctgtgttcttcccttcgattcgatttctcctcgatagattcgtcttcgagaaattggcaaaatatttgatctatggaaaacatagacaggatatgggagatgacacaaccgagagaaagaagaagatcaggaaattcaaagaatcggcctggaagtgtgtttactatctatcagctgagattcttgctttatctgtgacttacaatgagccttggtttatgaacactaaatacttttgggtagggcctggagatcagacttggcc

SEQ ID NO: 173644 - DNA, 497 bp, Arabidopsis thaliana
  unsure (1)..(497): unsure at all n locations
ttaggtacactatagaagactatgacgtcgcacgcacgcgtacgtaagcttggatcctctagagcgtccgccctttttttttttctttttttttttaatatgtatgcgatacgaacgttatttattaaacatgttgcaacttttacatagttacatatagacaaataacgcacggcatttcccttccttcgtattttggcgaaaacaaacacattatattaataaagatgaactcatggcttccttcctctgttgngaaaaaatggataaaattatgcttctgtcgaagcaaaatgtttaacatgtgccctgttcagtgacctgaatccatcatctccggcgactttcatctttcccgcggcatcgtattgagctttacctncaaatccaacattgaagaaatttttaaataaaggagcttgagcatatagttcccttcgaattccttttcttccgtgagctntggcgtccaaagaagcatgaatagcaattttttt

SEQ ID NO: 173645 - DNA, 526 bp, Arabidopsis thaliana columbia
  unsure (1)..(526): unsure at all n locations
atgatacgctagctctatacgactcactatanggaaagctgcgccgcctgcaggtaccggtccggaattcccgggttgacccacgcgtccgtcgctttctctctctctcaagcaacaatgggatgaaggaagagaaggagagatagagaagaagaagaagaaagatgaacaaggagaagtgaaggaaggagtagcatcaatagctttgttaccatgtgggactatctctggtcatttcattcagatgcctagctctatctgttatggcctccatggcactgaactagcttgtgagactgagtgtagccgcggtgaggattatcggttgatcaaactcactatcatagactacaatagaaagatggaacaaacagttgtagtggagtgcaaaggccatgatgctgctccaattatgatgtccagcatgctcaccggtgggaggaagatgtgataggattattccaagaaaacaccgggaagaagacagtatcggtttcgttcgagtgtgagacattgaaggcagatg

SEQ ID NO: 173646 - DNA, 513 bp, Arabidopsis thaliana
  unsure (1)..(513): unsure at all n locations
tgacactatagnnagactttgacgtcgcatgcacgcgtacgtaagcttggatcctctagagcggccgccctttnggttttttttttttttttttttttttttttttttttttttttttttttttttttttttaagccccaaaatttttttggtcctaatttttggggcggaaggaaaaaaatctcgaggggcccaatttttgggccccctggggggaaaaccccaaatttttcaagtgttgcccccccctggggccaagaaaaaaaaattcaggtgggccgtttggggcaaaatccctttaaaaaaagccttggggggggggctttaaatttcccttaaaaaagagacctatttgggggggttaattatccccgccaaaaaaaacgaggtgtggggggggggaaaataaaaagggggccccaaaaagggggtgtgccaattataaaaattttgggcccaaaaaccagcgtttgccaaccttttggaaatttggtgtccaagccccaagattac

SEQ ID NO: 173647 - DNA, 933 bp, Arabidopsis thaliana
ctatagaagatttatgacgtcgcctgcacgcgtacgtaagcttggatcctctagagcggccgccctttttttttttttttatcagttctttagtttcatctcataatagttttaaagttgcaaactttatattgattcattcttctttgcttagtgtttacaatataaacaaaaacaaactcatttcttgggtgcgtatctcagtttgatcttcttaacctgtttgtgtttgagctggaatgacttggccagaatgtcatcgggaagagctccaaagagagaggcgacaagtgattgtgttccgggcaattggctatcgaaggctgcgagtacagatgctggactgttggcaatgttcttctggaaatggatgagtcccttggggaaggtgaaaacgtctcccttgttaaggttcttggcgatgagttttccagcggttgttacaaagccaacatagagctgaccttcaaggacgaaaatgatctcggaggcacgtgggtggacatggggtggggttaggccgtttggggcgtagtccatgcgggacatggagagggccaaagtgttgagtcccggtagcttttctacgttggctcccggcacgactgacccgtagaagtgtttgtggcagcatagtggctaagccttgaagagaagcttctggtgtatttgtgttgagtcttgaagtgatccgtgaccttacccttagacaaatatcaccaaacatttgaagcttccgggaagccttggtacaacaactatgaacacccaacacaagggttcgaagacgcctattgtaggggggtattttttatgaacggacctggtcaaccggaattccgaccgccctgaagcgcccactttcttatgggtgcataaacctgccgatactgcatacagctccgcggaaatgttcctcacaatccacactac

SEQ ID NO: 173648 - DNA, 416 bp, Arabidopsis thaliana
  unsure (1)..(416): unsure at all n locations
tacgactcaccttagggaaagctactacgcctgcaggtaccggtccggaattcccgggtcgacccacgcgtccgctcacctattaagccacccactttacaagaccaaccaaccagacatttgttcgatggacattctacattctgaggatgtcattgctactcgatgagttgatgcaactgctgctctctttgatcgaccttctggacaaatntttttttcttctgactggtcactcgaatagagtacaagcgtaaaatttgcaggcgactatgatcttggttagactgcatctgtctgacaagacaatccgcatctggacgaatcctgcggataggaattatgcttgtgggtttacatgcaatgatcattctgcagaggtgcgagctgaactgggcttccacaaatatatactt

SEQ ID NO: 173649 - DNA, 545 bp, Arabidopsis thaliana
  unsure (1)..(545): unsure at all n locations
atgatatgccagctactaatacgactcatttagggaaagctggtacgcctgcaggtaccggtccggaattcccgggtcgacccacgcgtccgacgaatcacattgttgtcgtcactggtgacataatagtcaaaatctctttaacacacatatcttgatagccaacatcacacaaacatacgagtttccaataattaaatattactagagcatacatctctttgaggaaaaattccaatgttatgacagagaggaggataatcttcaccggctatgatgtcagcagaaggattctggaacatgaagaagataactaagagcacccacaacaggaacatctagagaaggtttatcgacgagcggaccaagtcantggagaggataggtcgagtacgatacaaggttgagagccagggataacgctcagctagctaggatacataagctagccgtctagggacgcggctatactgaaactgaaacaagaagagcttgttagacatccaggcggctctagactgactacaccattctgagacacaggt

SEQ ID NO: 173650 - DNA, 281 bp, Arabidopsis thaliana
  unsure (1)..(281): unsure at all n locations
acttagaagagtctatgacgtcgcctgcacgcgtacgtaagcttggatcctctagagcggccgcccttttttttttttttttttattctaaaaatcatatttgcttctttttgttcgttttcgcccaccaaatccatcataaatcatatcacactgtatggtgtaatgtacgcagacaaaacttaacaacccatatncaatcgccgggaaatatgaacactttatcttcattgacgtgaatgtatcatacatattcgtagaaagggaggatagtgtctgct

SEQ ID NO: 173651 - DNA, 336 bp, Arabidopsis thaliana
  unsure (1)..(336): unsure at all n locations
atacgactcactttagggaaagcacgtacgcctgcaggtaccggtccggaatcccgggtcgacccacgcgtcggctgatgtacgggattagtgactaggctgagtagaaatacatcgatcgatcaaggaacgtggaacttcgatgctggacggcgatagagctggtgctcagaaagcaatggattgtctagtcggagctgactctgttatcattcctgactgcgagaaagacaaatctgtcaaaagaaatgcacatcatgactacaagcacatgactgcagagatgcacgcatttnagctggttgtcacgaggttagtcctggagctagcatggat

SEQ ID NO: 173652 - DNA, 832 bp, Arabidopsis thaliana
  unsure (1)..(832): unsure at all n locations
attaggtacaactatagnagagttatgacgtcgcctgcacgcgtacgtaagcttggatcctctagagcggccgccctttgttttttttttttttttttttttttttttttttttttttttttttttttttttaaaaaggggggcaaattccattttaaaacaaaggattttggcaaacagacccccccaaactttttgggggggaaaagagagaaaaacaaaccccatttttcttttttgggggcaggttttaaactaaaaaaccctcaaacaaaaaagggggtttttgttcctaaaaagctaaggggttaaccttgaaccggaaaataagctttttttggggcgaaggggggttttaaacagttagaaaaatcctgccaacttctccaacttggaaggttggaaacaccaccagtttttttttggaaagaattttccccggttttggaaggatcactggatacccttttttgttttcgggaaaaaactcggttccataaaaaacctcccatcccattatttttttttcccaacaagtggaaatttctgggaaaaaaaattcgaagggtgggtttagagtggggtaaacagaaattcggggggggattttttgggggggaaaaccggatcaccctggaatttccccctttggccccctttttgaacgggaactggtggggggattgtcttgggagggtgttggcaatttggagggccgggaaaactatgtgggtttggacttggggaaaagagggctataatcttttgaacggcgggccccccgggaattggtaattttttgtaagacaacaagggattgcttaaaaaaaaa

SEQ ID NO: 173653 - DNA, 550 bp, Arabidopsis thaliana
cacgcctgcaggtaccggtccggaattccacgtgtcgacccacgcgtacgcccacgcgtgcggttaaactgagtgctgaattgcttgtgagacggtgctagatctatcttacgtaagatgagagcaaaagagaaataggacagaggcatttatactactttctctggggtgggggtactatgaggcgacgttccttctttacaaggtgaaggcagcaaagatgaggctcttagagacaatgatctggcagaggggcagaagaaaaagaccgagtcggctgctggggggaagctaggaatgggggctcagagaatggatcacagcctggagaacatatctcggtgtgatgatggagtggagatgtcagctgtgctgcaaccgacaatgcatcggagaactagaatgaatctgggatgtactgcctgaaggcagaagcaaacggaaatagagatatacatcagaaaaaagaacaggatgagttgggcgacctctccaccctgacaagaattgcaacccggtggctcagcttaatggtaattggagaggcaag

SEQ ID NO: 173654 - DNA, 940 bp, Arabidopsis thaliana
actatagaagatctatgacgtcgcctgcacgcgtacgtaagcttggatcctctagagcggccgcccttttttttttttttttctgagataaagaatcatcactggtacctcatgagccgaagtagcctcatgggtatcaacacttcgtcatctcgtcaactatcagatgaacaaacaaataaacgcttatacatatatcactcgatcagtaagaagaactgtcttttttagctgacttatcatcacatacgatgtcgcatcttttatatttactatcctcatatccgggaatggcagaagagaacactaacgcttgcgtggcgtacttccccgggatagagagcaccactcttccaaccgaaggctttagccacttgctgtaaatggcccatacttgaccgtgaatcccttatgaaaacatgtcctccggggcctaacatacggtccatctacagcataatgaaagctgagtttgaccatcttttctcacaggaaatagaaatgcctcatgtttcagaccatatggttttaggttgggcgtacttggttgacaccagccgggcatagtgccttggagaccatcgcgcgtgataaccttggaggggcttattgccttcactgaacaagggtatgaccagcagggagcccaagatttttgatgctgtgggaacctccaaaacagttctcttgtgcgaacaatataagtctgactctttcaaagtaaactctacaaacattttcctatacaagctaaactaacccggcctcgtaaaaccttacggagtggtccctcctttaaagagctgtaacatggtgggacatgagcacgccagcaatagggatacttccccaatcgatatggggggtgggacccggaaatcagccggacgggggaaaattttcttgcgcgctatagattgtgatagaaaaaacctcctgg

SEQ ID NO: 173655 - DNA, 421 bp, Arabidopsis thaliana
  unsure (1)..(421): unsure at all n locations
agggaaagacggcacgcctgcaggtaccggtccggaattcccttgtcgacccacgcgtaccccgatcttttttgggatgaggattgcactaagagtaaaactgcctagttagggattgtacttttagaagatgctgttagtttgttactaagagatgcttccctccccctatgtctgttatgacatgggcagcggagaactgttctcattactacgactangggtgaagaccacgagctgttagtattggctaaccatgccaaggagctagtggtgaatgagaagagcagtgtggggagaggacgcggcgggtcggctgtgaatcgtatcgaaaagtaaactgagagggacatgacatagaccatcaactaacctatattttaagactcagatttttagcgaataactttactaaactacc

SEQ ID NO: 173656 - DNA, 342 bp, Arabidopsis thaliana
  unsure (1)..(342): unsure at all n locations
actcgactcctanaggggaagacggcacgcctgcaggtaccggtccggaattcccgggtcgacccacgcgtacgcgcgacacaccaacaccaatgtctgcgtcttctgtatttaatctcccattgattcagctcagatctctcgctctttcgtgttctttttgttctttccgattggcccatcgggctctgtcatcgatgtcaccgaggaaagttaccttattttggggctgtctgtggcgccggtatgacagatgctaaagatgctcgcatggatgctggggacaggctgctgatgctggggggatgaatgcgtgggtgtggatgaagcgtgtagggaggg

SEQ ID NO: 173657 - DNA, 369 bp, Arabidopsis thaliana
  unsure (1)..(369): unsure at all n locations
ttaggtacaactatangagagtctatgacgtcgcatgcacgcgtacgtaagcttggatcctctagagcggccgccctttttttttttttttttgtatgcttctaaaacatggtgggtgtatgatatgcagaaaccttataatacaatggagatcagctaagatgcttacagagatatgtcacatatgttatctgaaacacgtgacatgagacatgtattttttctggaagtggaaatatcagagagctcctctagggaggatggtatcgcactgaagagaaagtggtccccggaagtttgggatgaaagcttctggccaattggtcgacataatgaatcttaagcttgctctctaaatgacgactacca

SEQ ID NO: 173658 - DNA, 466 bp, Arabidopsis thaliana
actatagaagagtctatgacgtcgcctgcacgcgtacgtaagcttggatcctctagagcggccgccctttgtttttttttttttttttttttttttttttttttttttttttccccaaattaattaattatccctcagttaaaattcggaaatctgaatctacaattggaaaatacccaagaaaaatttaaataaaaatctctcgcccagaatcaaatatttttaaattaaaaagtgagggctcctctctccaaaaaaactatctccttcatcaaaacttcatcattctgggacgacgacactggcaacaaccaaaaacaatatcaaaccctaattttgccatctccttcccaaaacaaggtcaaaatcattaaaaatttagccccgaatttaaataaaaccttcaaaattaaacctctacccaagttcaatcccttccgttggcaaattattaccaacatttttt

SEQ ID NO: 173659 - DNA, 537 bp, Arabidopsis thaliana
cacgcctgcaggtaccggtccggaattcccttgtcgacccacgcgtacgcccactcattcgtacacacttacggaaatatatagatacaataaagacccgagacgagctatgcatagaacatatatttctgtgtatgtggaagagatggcagcagctcttgatctgcctcgaggaacagagggagcgcctttttttttgagagtgcctaaaaaagggagcagagaggcggctaggatcaccccacacaggagtgaagggggaaaagacacgattagaaggggcgagcaccgtgcagacgggcgcgagcagagggaagagaagcgtgacgcagatagtacacatggctgatatgccacgagaggaaaccgctcgggagaggacgagcgagaaagacgcagttaaacgtagacggaagatagaaacaagagagtgtagacggagacgcggcgagagcacttcgcaacggagagatacatcggtaaactgagctcgacccccaccatatgaacaaccagtactacactagaaacgatcaa

SEQ ID NO: 173660 - DNA, 368 bp, Arabidopsis thaliana
  unsure (1)..(368): unsure at all n locations
acgcctgcaggtaccggtccggaatacccggttcgacccacgcgtacaaccactcttagagnccgagcgaaaccgaaatagaagatacagataacgcggcaagaccccaccaccaagcggaggcgaggacggacagcaagggcggacggagactagaggggagacaggagcagggcgcgacaggcgaagggaggagggactcttttcctttcaggagggctcaagaagcagagcgagcgaggagcaccccagcggagagaaggcgaccacgcagagcggggcgaaagaggaagcaacccacccagaagcccagcacgaagcacggcaggagacacgacaagaaacaagagcacagcacgcgcgcgacc

SEQ ID NO: 173661 - DNA, 599 bp, Arabidopsis thaliana
  unsure (1)..(599): unsure at all n locations
taggtcccactatagnagatctatgacgtcgcatgcacgcgctacgtagcttggatcctctagagcggccgccctttgtttttcttttttttttttttttttttttttttctttttttttttttttttttttttttacccggcgcgcgggggaacaccccggggcaaaacacggaatctttaaacacatttttaaaagaggtaccaagataacaacacccaaaaaattttttttacgggggggggaggcgccccctttacaccccaaaaccccagaataaaagaaccttgtctgggagaagggaagaaaaaagacggggggaaaaaaggaaaaaaaacccccccggcccccggaacggggggggaaaaaaattttttttttttttttgagacccgccccccgtggatgatagggggtgggggagggagggtgtcccctggggcccgctctgtggggacccccctttttacaaccactttagtgggggggagggtgtggcccccttcgggggaccccttttatatgaaccccccgtgataaaacaacggagtgggcacacacgagaagcaagaaaaccccccacagaggggcggggcaaa

SEQ ID NO: 173662 - DNA, 644 bp, Arabidopsis thaliana
ctatagaagatttatgagcgaacatgcacgcgtacgtaagcttggatcctctagagctggcgcccttgggaaccctttttttacattattttgcgccttaaacagtacccattgtggttccggggccggaaaacagttcatactcgggccgaaatcttccacacatgaactcgtcaaaaaaaggaaggagacctaaatcacaacaatatctttctcctagaaaaggggaggcgcctcttccttggccttcaccagaggaaaccccaccagaaccacacgcgggagggccacaaaaaggcctccgatacttccaaaaaaaccggaggaaaccagaaaccgttggacgcaagccaccacaggttccctccaagggcacaaagaaaaaaagacccggccacctgacaaagagaccgggcacatgccccggcccatagcacggggaagggagagtacccccccccagggggtctcggggtgcgccgccctgcttctaaaacagagacaccccgggaaaggcgcgaggaaaaaccccccatgccctcaagagttacaggaccgaaaagcaccctcccacccttttgggtctgaacgcaagccccgggcaaaactcaacgacgcgagagaaagagaaactaccaaccctg

SEQ ID NO: 173663 - DNA, 299 bp, Arabidopsis thaliana
  unsure (1)..(299): unsure at all n locations
acgcgtacgtaagcttggatcctctagagcggtcgccctttggggtaatccctttttctctctcttccttttctttgacttctattcttttccctcgggcccgagaaaaatgccatattcaacctgcaaaatccacaataataaatccaccaaaaaaaagaagagaatccaaatcccaaccaaacctttctctctcataaggaggggggccnctccctcgcccttaccactcgaaaccctatccacaaaaaaaccctgagggtacaaaaaaaccgctttaactttcttaaaaaaaccag

SEQ ID NO: 173664 - DNA, 669 bp, Arabidopsis thaliana
tatgacgtcgcctgcacgcgtacgtaagcttggatcctctagagcggccgccctttttttttttttttctgtactgacaacaatttggtgttgaattccgcggcgtgtaaatgtcaagctaccaaatctcgttttctcattggtgtgcgttattttttaatctaaggtttcttaaaaaaaaaaaaaaaagggcggccgcccttttttttttttttggtttttttttttttttttttttttttttttaaaccatgaagtttgttgacattaacgtttgaaaaattaaaagaattggaattccaatccaaatgaatcttttttgggacaaatgtctttttaaagattaagaaaaaaaaaacttaagaacgaacttcatttttttttttgggacaaatgtcttcccaaagatttattcaaaatcattctctaacggggtcagattcaaatccaaactcaaaatccttttactactaccgcatggtttaaaaaccggcgtggatggaatcatcggaaaaatgaacgaaggctcaaccgttatgcttgacctttgccctcttatgtgaccacctaaagcctgtccgggcccaaaactttgactggtaatgggaacactgggaaaatgatttcctttataatcggcgctaaaatgttcccatctttttgctaacg

SEQ ID NO: 173665 - DNA, 548 bp, Arabidopsis thaliana
  unsure (1)..(548): unsure at all n locations
aatacgactctcttagggaaagctggtacgcctgcaggtaccggtccggaatttccgggtcgacccacgcgtccggagtctcttgaagccaaagcacagagagctctagattgttcttgtatagcatatctgcgtaatggctcttgcgggtctcagttatacgaggcattgctttgctttgtcaaaagcactgctgaacaaatgggatcagattgcgtgaatccatttgtagcatagccaagctgatcaatgccatcccgatgcatctctaaatcagtacagggggacgaaaagaacccgtgaaaaagaagaccgccctctgtgcagaccatataatcatccttctttctgggcaaagacctgctgcgatagcgattccagctttgattntaaccacctggattcacataaaagctagctttcctctttgaatctttctctagacagcttttaaaaggtagaaagatgntagaccctgtcggggtggcgaagcaacatggtcttcattttaaccaaaaacctaatatttgtaaaaaaaaaaaaagggg

SEQ ID NO: 173666 - DNA, 542 bp, Arabidopsis thaliana
agaagagctttgacgtcgcatgcacgcgtacgtaagcttggatcctctagagcggccgccctttttttgtttttttttttttttttttttttttttttttttttttttccaaaaaaaaataaaactccccattaaaaggccaaatttttggatcttctgggctttcttttaaaaaaaaagctatttttgaaattgttcatatcgccaaaaaaaatttttaaaaaaagtgccgcgggatggtgcaaaaaaaaatacaattttcaacaaaaaatttgccaggttgagggacctcttttctgggttgctccaatttcatgaatcaaccccctttgtgtctttttttttccaaaaccaaggggaccttgatttaaaaaatttccatggaccaacaattgttttttttaaaacctacaattttaacctaggttcaatcaatggactttccgataaaagcaccgcccacggatagttctttaatacaacaaagccccccttatatgcaagggtggtctttgaaagacctcatgactccccctgccttt

SEQ ID NO: 173667 - DNA, 709 bp, Arabidopsis thaliana
taatacgactctactatagggaagctggtacgcctgcaggtaccggtccggaatttccgggtcgacccacgcgtccgcttcataacgcattttcgtgagatgcactctccagctctatctcgaactctctctctgccgtctcgatcgatctcccaaatctcatacactgaatccgattattttctgtgataaacaaagcaaacaaaatccataacttttggctcggacctcttcgattgtcaccgacacaaacccacattttgacttttctctttatttctaatcatctttatctacaacagcgcatcagtcaaaaaacttcagcttgaatttgctcatgctgtcttccatcattccctttgtaacaacccttttatcggctgttacagatgattccaatttcttttattgcgcccaagttttaacagtacctttggcctttggcttcctgtcagaccgactggcaatatactttttaaaaatgggccaagcctctctccaacaatagcccgacctcggggttttattaaaaaaagctacttttttaaacaaatgctccttaaaacaagctctccggagggtacagagaacttagaactggaagaactttttttggtcaaaaacggaaacccctcgagggtcctgcttctgactttaggaaaatctaccttggaccgacacttttaatggaaaaaaggtgtgcaaactg

SEQ ID NO: 173668 - DNA, 502 bp, Arabidopsis thaliana
gcgtacgtaagcttggatcctctagagcggccgttcttttgttgttgtagggccttttaattcattttttcctcaattacacgttgaacccttcttcatttcttccccgaaacagccggaattggtttcccggtcaaattttatgccggataagataaaaagaaaaggaaataccctttcggacaaaacaacacttattgctaaattgagggggggggacacgcccccgacacaaatggtgtaaacctgcctctcggccattttttctcaggacaagcccacccgcaaacgacccctaatcgcagaaagccgagccacccatgggcgaacccccctagcgggtacaatcgccctccatgcggcggcggcacagagccggcgaggttataatcggtggggggcctcttgagcgcgcgtctgtcataatacgcgggagagcggagacgcgggggccatccgcgcccgcctgttcggtccggccgccgcacgtcccccgcattag

SEQ ID NO: 173669 - DNA, 493 bp, Arabidopsis thaliana
gacggcgcaaccacgcgtacgtaagcttggatcctctagagcggcctgccctttttttgttttggttgaatctgacaataattacttttaatgaaattcttggataattattaacatcataacctaaaacttaaccaaagaacaaggagaatagtctattgaccctattttatgaagagtccaagcacaagttgatgttattccgattttttttcaaggtggggagggttatgaacataaaaagcaaacgcgaataaacttgcgttttcgttggcttgaggacaaacgttgattatcaccatccaaaccatataagtgagctcgcataattgagatagatatgcacctggtcgggggcagacgttaatttttggatactaccaaggtgtgggggaagctaagcgataacgcgtggcctagacgctatttgggtttcaccattgcgtaagcgctgacggatggggcaggcacgatacgggacgcgcattgactg

SEQ ID NO: 173670 - DNA, 623 bp, Arabidopsis thaliana
  unsure (1)..(623): unsure at all n locations
agacctaatacgacttacttagggaaagctggtacgcctgcaggtaccggtccggaattcccgggtcgacccacgcgtccggagaatttgattttgcaaacaggtggtttgaaatcgttaatcgggtgtttacatggagttgcttcaatggagaaagataacaaaaccaagaatggtttacatgtaggagaagaatcagatagagagaaaggaatgaatttgcacattcatattcctgatggtttaccaaaatctgaaccagagttggaggaagaagaagaaatcgaaatgccggattcagctttcactagattgctttagaagtaaaggaactatcnctggttgggttctctcacgcttctgaccacgaaaccgactgaaaagcggattacggattacggaccctttagaaaggttgttattttatcaaagttatatgtaattatagttcttggttttgctttagttactgaagtctatcttttgttaaaatgtgatactattgccatagaaatgtggttgtattaacttgatgtcggccaatgtgagattggtaatgctgggcgcttttatatactacgcggtttgggtaaaaaaaaaaannaaannnaaaaaaanaaaaa

SEQ ID NO: 173671 - DNA, 291 bp, Arabidopsis thaliana
  unsure (1)..(291): unsure at all n locations
cggggcntacctgcgtacgtaagcttggatcctctagagcggccgtccttttgttggtggatttccatgaaaaacactatcaccagagaagtgcatgtctcttaacaaggcatcgcgtatctccctgaggggaaacgcgagatacatcctcgtattgtcgaacttggagggtatgtttgaataattgtaaaaaatagccgatatctatgaataaatttaatcgatttacgggggtggagggcgccaaaacgaacctctatcctgtaagaataggcactgctagggcgctct

SEQ ID NO: 173672 - DNA, 437 bp, Arabidopsis thaliana
gcacgcctgcaggtaccgggccggacctcccgggtgcgcccacgcccccggtgaagagatggtgagaacaaagacgacaaatgggcgaaagagcgaagaagaaacccgcgttctctctcggaaaggacgaagaggaagaaggaagccacagatgtcgatagctccgagagaaaaattctgtgaaggagggggcctcccgctatggagaaggaagacgaaagtcccccgctgccaaatcggcaaaaccaccaaaccaactcctacggctcccggcaacgaggggtcggccacgatcaaaacagaagccgccgaaaaggccgaacccggtcggggacccgcgacgagcagcgccgaagcgcagaaaacgcgaaccctgaccctagaggcccgggccgaaccccacaaagggggaaggaaaatgcgaccgcacaaacccc

SEQ ID NO: 173673 - DNA, 521 bp, Arabidopsis thaliana
atagaagactttgacgtcgcatgcacgcgtacgtaagcttggatcctctagagcggccgccctttttttttttttttggcaaaaaaaagtaaaaaaattaactgttaaatgaaacataaagagaaaataaacactagctaattgttacaagaaagataaacaaattatggcaaaaagaagaagaagacgagaagatacaaaagttaggtttggttgggtcaaactctaagcaaagcctaaagcttttgtacctaatgaaaaacataccaaacataaaaaagctaatccaaaacactatccatttccttctttttgtgattatgactttctatcgtacaaaggatgataaagatcatcatgactactctcatacaagggttttatgattgagaagaggttgtttctcaaagagaccaagtctataatcaccaagcttagacttgtaagcagaagatttgtattgagaccaagtgaattctttgtaaagccaatcatcttgctcagggacaaggcatggcaat

SEQ ID NO: 173674 - DNA, 547 bp, Arabidopsis thaliana
aggtgacttatagaagagcttgacgtcgcatgcacgcgtacgtaagcttggatcctctagagcggccgcccttttttggtgttttttttttttttttttttttttttttttttaaaaaaatattttttttaaactacttaaataatctaagaagaaaatatctgatttcttcaaacagagccttatttttttcctacatatttattttagttctcactaagatgtgaatactcattccaacccaaaaaccggtgtgtgcaaaacagagagatttgattttgcagtttggtaagaacttgaaatgttgttattaatccagtttatgtttccaccatacccttcgttaccgttactcattgtagttgtcgaggacagcggaattgctgagaccgggttcgatgcagcggaatgattgttatacccatcagacccaacaaaactaccaccaaagttgttttcaccttcctggattaccggcattatagcatacccaggagaagggttatgaagatccgacccaaagtttgctaatggtcgcatttttgct

SEQ ID NO: 173675 - DNA, 655 bp, Arabidopsis thaliana
gccggccctaatacgactctcttagggaaacctggtacgcctgcaggtaccggtccggaattcccgggtcgacccacgcgtccgcccacgcgtccgccagagatctttctctctctctcatccaaagacttcacgagtccccaaagaaaaaaaaaaacctattcccaaagatgaagaacaataacaacaaatcttcttcttcttctagctatgattcttctttgtctccttcttcttcatcctcctcccaccagaactggctctctttctttctctccacaatacaacaacttcaattcttcctcaaaccctaatctcacttcctccacatcagatcattatcatcctcacccttcttacctctctctctgtcaagctgtctccccttctccagtcgaccgggcaagatggggtcaccgggaggttacccaaccgtggcaccgggggttctttccgattcccccggcggtcctaacctggaaaccttcctcggcgggggagcctcaacgacgacaccaggaccatggcaccaggtgcaatctctgggcggcgttgttttcttttccgacctacagccaccggttattcttcgtccggcgccgaaatctacaactctgagctcaagtaatagccgctagcttcctaggaaactact

SEQ ID NO: 173676 - DNA, 496 bp, Arabidopsis thaliana
tatacagagcttgacgtcgcaactacgcgtacgtaagcttggatcctctagagcggccgcccttttgtgttttttttttttttttttttttttttttttttttttttttttttttttttttttttgcaaaactaaagaccgaaccaaatttaaaaacaaagtacataaacattttccagataagggaaatccaagcttaaaaataaacctgcaacgggtttttgtggtggggggttttttttaaaaaaaaaaggtgccaaacaactaaattgtttttttcaagggggttttataactaaattactctaaggactttttttctgggggggattaacctttttactaatcttggaagaaacctttttaataagcgggggcatctgggaattggctgggactttaaaaaaaaatggtaaaagtggctttctgtttggggaaactaaatgtggggaattccctcaactgtgcacacaatgaagaaagcctcgcttgctgg

SEQ ID NO: 173677 - DNA, 402 bp, Arabidopsis thaliana
catacgacttatatggggagcgctggcacgcctgcaggtaccggtccggaattcccgggtcgacccacacctccgctcatcccattccctcgtcttcacttcttcatggttggttttgctcccctcacctcaagaagtccacagtactaccgctccctcacagtgcctgagctcacccagcaaatgtgggactccacgatttttatgtgagctgcgcacccaaaggcacagcgcttccttcacagcctctgccatgttgccggggcaagaagaccacatagggaagttaacgtatcatattgttgaatgtttagcacaagaacctcggtcctcctgttgtggaagtggatcccccaacagcggggagattaatcaagtcatgtgaatatacccaccttacct

SEQ ID NO: 173678 - DNA, 522 bp, Arabidopsis thaliana
  unsure (1)..(522): unsure at all n locations
gcgtacgtaagcttggatcctctagagcggccttcctttttttgttttttttttagtggaacaggatgatattgatatcttattacaggtaaaacaagcagcaacaagtggtaggtagataatacatgatcgttagagcagngagaaacactaactgttcatgatttgttcaaattcttgaagtacacttaaaaatttctttttttgtgtgatggggcggaagctgagctgatttaggccgactctttgactgcgacaggctgttttgattggaacagcctacttggcctcggagggttcggtgctttttgtcgttgggagggtgctgttttgaaggttgctccttggcggacacgtgggtccacccctgaattccggactcggtccctggggggagaccaggtttgcttatagtggggcgcgattagaggttttggaagtgatgggctgggtggatgctgggggaaaacggtctcggcttcgaatggctaacaaccgtcccacgctgattgtttaattgta

SEQ ID NO: 173679 - DNA, 615 bp, Arabidopsis thaliana
taatacgacttatatagggaaagctggtacgcctgcaggtaccggtccggaattcccgggtcgacccacgcgtccgcccacgcgtccgcccacgcgtccgcccacgcgtccgcccacgcgtccgcccacgcgtccgcggacgcgtgggctcagccgcacccaaatccaggagctattccggtgccgttgtactgctgaatcaccaaaaccgatgcttttgtcgaagattccggcgaaatcaacaagcttcctacaggtccaagctccggacattcactattctccctaatcgccaatgcaatttctccacctggcattctaccaaccaaaaacaaattggctccgccgcactttcctaatcgccgatctaacatccacggcggaggttttcatctgtttctccacgaacttaaccgattcgtcaaccgaaatatctttcctaatctagacattatctcctcattcgatttaaaattcttacactctgattctcgttgtaatggtaactaacttcaacattaccaatctctccgactctctccgggaataccacaattgggaaaacagtcaaaacatttccgggatgctccgccttacgtaatccataagccaacg

SEQ ID NO: 173680 - DNA, 569 bp, Arabidopsis thaliana
cgcgtacgtaagcttggatcctctagagcggcctccctttgtttgtttaaggcctttaaaaaaaaatattactttcctcatcaagaacacacttaaattcattcaacgaacgagggcgtacagactggaagggaaggggggatatagagggttgggaataattatgagtgaacaaactggataaaaagacgggttgggggaatttgtaattttgggggggggtggcccaccccaaagacgaggggcttagcagaagaaatagccgccgacatgagggggtgtttgtgtaggacgccgtcatagagagtgtacgagacaaatgagtggagagagagtgcagggaagcgagttgagtgcggagaaggctgagagggggtgggatcggtggggtgtgggaaaggtgaaaagtggaggaggggagagggggcagaaggggtgctgggggacgtggcgggagagaggggaaaggtgtgctgggaggggtagggggaggaggtgagggggggttgggggaggaggggaaggagggtgagcggcaagagtgggggggaggagatggagagcggggg

SEQ ID NO: 173681 - DNA, 506 bp, Arabidopsis thaliana
ctatacgactcactatagggccagctggtacgcctgcaggtaccggtccggatacccgggtcgaccccgcgtccggggacttaaggtcgagtcaccgtggagtgcaacctgcacatttttttcggttaatatgaaaaaggaggaataactttcagtgcatggatcgtacacaaacgttaacttgtcccacaaatcgtaaattttttaggagaggaggggcacaccagagtgcatagatcaagcagatttgatgacgataccaactggaggagcgaaaattgtacaccgttttaaaaggggggggacaaaaaaacgatggtgggaaaatatggggaaaaaacgccccggacagaaggcccaaactttgggaacgttttcttttaccgggaaaaaatttaatgccccgggatatgtgtaaacccaccaaattattttactttggaggaaaaaataaccctcagggggacttaatctttaaaccccatttttgtactgcataaaaggga

SEQ ID NO: 173682 - DNA, 470 bp, Arabidopsis thaliana
  unsure (1)..(470): unsure at all n locations
atagnnagactttgacgtcgcatgcacgcgtacgtaagcttggatcctctagagcggccgcccttttttggtggttttttttttttgtttttagtttcaaaagtataggatatagatcatttctagaaaggaaataaacagtgaatgaaattttttcggattacagtgttttagaattcagcagagagagaatggggnaaatctcccaagacaagacatgactccccgatgattaactctgttcccaaatcattccctccgcttagctgcttgcagggatcgattacaaacactgtttccatcttttcattggaacgaacttgagcacgatcattaaccaatcagcttgcttctccgaaacaccagataaaaaccggtggcattttcgaaaacagcatcacaacatgactcccgtcaatatcttcgggattgctcacatgaacccgaacgttaaaccccggtgattcgca

SEQ ID NO: 173683 - DNA, 489 bp, Arabidopsis thaliana
acgtggcatgaccgcgtacgtaagcttggatcctctagagcggccgtcctttttttgtttttttaacgataactttttgaaatccttaacaagttgcaaaaggaaagaacataacataaaattttctttgggccgtgcctctgggacttaatgatcaaacattgaacataatgaaaataatggtaatatacaaaaccttgatcaccccttctttgttttatggggggtgacatacctaccaataatactgcacaaagaaggagaactccaacactgggcagtgtaacaagagaactcactcacacaagcttcgaattctcacatgtatgccacacacgcgggattcattccttcaattgacgaacctgcctttaagcatcaaaatgttttcaacaatggaaaagggggtatgaaaattactgttttctcacttagcagaatctatcagcagagatcatcaactttttccaagggaggctggaagtttag

SEQ ID NO: 173684 - DNA, 847 bp, Arabidopsis thaliana
taatacgacctactataggggacgctggtacgcctgcaggtaccgggccggactacccggggcgacccacacgtccgcccacacgtacagccgcgcgatcggctccgctatcgtccacgggtgcggataggcttgcatatacgctggggataaaagaaaaccggaacatggtctgttgcgatcccaccgaactggggaatgtttttaaacgctggtggaggacaagataacggctaattcgaaattccacacccaggatcaggtgtcggcactggactataagcccgaaatccctccggctgataatccaactggcattctaccctccaaatacaaactgttgcaccaacactggctcttcccccatataacctgcacggggaccgtcgcgaccaagggaatcacaaacgtaacgagtgattcaccgaaaaccatctccttaccaaagacataaacgctaataccatcgcagaaactaaatactccgaagcctcgagaactcgaccttactcaacatcaacatggctccaatcttccgggcaccctaggactgaaaaccggaaaacaaaccaggttgtatcggcaacagaactccaaggaaaccttggcgaccatggggaccccgaagaacagaatagccccaaggatagaatctattggcctgaaaatgactagagcctcccttcgccggtgaacagttaccccccgaccaggaccccacagaaacacccgtgcctacccacccaaaagtatggttaaacgcgtgccagcacccggcttggtatgtctgtaaacccagaagaaatggaggcctcgcgacacgaaagcgccaggaacagcctgatac

SEQ ID NO: 173685 - DNA, 524 bp, Arabidopsis thaliana
ttgacgtcgcatgcacgcgtacgtaagcttggatcctctagagcggccgccctttttttttttttttttttttttttttttttttttttttttttttttttttttttttctggcgatggaaatttttaatgccaggggtgaaaataaaaaaagggtttgaaaaggctcaaaaaaaaaaaaaggggtcaaaacccaaatcgcgaaacaaaccccaaaaagctgagctgtttaaataaacctccaaagattttttttttccacaaaaaatttacaatttttttgcccccccaaaaaattttggattctcttgccacctttgtttttttaggcggaaattgcggacccgccgttttttccggaccctttcgcctagaccgaaatttttaccagttgtcagtaagatgagaattttgtgttattgtgggaaaatgggtaccctgtgaaaattggggaaaaattcgaacccggagaaaaaatgctaaccgctggcattgctaaaaaagtttggagcccctaatgagtgc

SEQ ID NO: 173686 - DNA, 505 bp, Arabidopsis thaliana
gacgtcgcatgcacgcgtacgtaagcttggatcctctagagcggccgccctttttttttttttttttgtactgacaacattttggtgttttttttacggcgggaggagatgtcaatgtaccaattcgccagattcatgatgtagagctggaacatggattttactgttacgctaagagcaatggctaaggggttaggccctgaggatttttttttttgataaacgggacaacccccaaagaacactttaaacaaagcatatgtaacattacctgtcatcaatagctcatacagatttgagggtaatcctcccaacaaagcagaaacaattatgtttataagtggtgaaccaagtcaagattttgacacttcctttgttgaaaggtcgagcagggaaaattcaacaaaattgtagatagacaattgtgtatacttagaagatggagattttaatttgagagaaatggcttcatccactgcatgccaaaaggttttaccataaacat

SEQ ID NO: 173687 - DNA, 366 bp, Arabidopsis thaliana
gattgaggcagcactatagattcactatgacgccgcatgcacgcgtacgtaagcttggatcctcttgagcggccggcgcttgttttttttttttttttttcaggtgtctaacacattattgactgatcatcacaagtatcttttacattctactattcctttctaagcaaaaaaaaaacacatgtgcacaaagaaataacaatacctatgtacaatccaaaacaagggagggtaataaaaaggacaaaaagcgaaactaattcaaatatcaaaagtcttaaagagaataaaaaacgcaccaaaagctgtataataaaacggggaaagtggttgagacgtaagagatcattccaaaggcgtacgcgt

SEQ ID NO: 173688 - DNA, 466 bp, Arabidopsis thaliana
  unsure (1)..(466): unsure at all n locations
atgctacgcgagctctatacgacttacttagggaaagctggtacgcctgcaggtaccggtccggaattcccgggtcgacccacgcgtccgggcgaggttcggactttactacatcgatttccagaacaacttgacccgtcaccaaaaagtttcgggcaaatggtattccgaattcctcaaaccacagtttccaacctccaagctgagggaagaactctagatgatcaagaatccctatcgggacaaaatatttgagtccaagaatcttgaagatgttgttgaggataatatccagtttgtgtgttctatgggatcgttttcatctaccgggtccttcctatgttanaaaggactttgtgagtttgtccgagntttaaataataaccaataaaatgtctttctctttttaataaaatgtngaagtaaataaattaaattctgtttattggaaaaaaaaaaaaaaaaa

SEQ ID NO: 173689 - DNA, 313 bp, Arabidopsis thaliana
atttgggcgacactatagatagctatgacgtacgcatgcacgcgtacgtaagcttggatcctctatagcggccggcctttgttttttttttttaaaaattgaaagtgtgatatgtcatgggttagcgaaaaaaaaaaaagaccttgcttgaaagaaagaaagaatggagaattgaggagatctgctatacaatgtgaagatgccgctaatggaacttacctacttgaggtctttgctagaaggagcttggtacttgttgcataagctcggaactgataacaaaaagttccttactgagggtttagaactattt

SEQ ID NO: 173690 - DNA, 374 bp, Arabidopsis thaliana columbia
cgactgattgaggcgaactatagatgactatgacgtcgcatgcacgcgtacgtaagcttggatcctctagagcggccgcccttttttttttttttttttttttttttgatgtatcaaaatcgggttagattagaattgttgttacaaacagtcaaacactgtacaagctaagtctaaagctagaacaaaaagaatcgagcattagaacgggacagtataaggtaaagaataaatcccaacttcagacaaaaattgagctctaggccaagatgaatctcccggtctcatcatcgtgtcatcatcaaccttgactgctgctttgggcttaagcacctcttgcgtcttgttcccaaatagccaataatcaccattgt

SEQ ID NO: 173691 - DNA, 352 bp, Arabidopsis thaliana
  unsure (1)..(352): unsure at all n locations
cactatagctgagctgtgacgacccatgcacgcgtgcgtgagctgggatcctctagagcggccgacctatgctgttcgtttttatttcaaaggccacaaggaaaactatttnacagtgcatcaagatgtgtcgctagcctactacgtacatgttaaagtccaaagcaaaccttgcctgtcctgagcataacaatgtgcactttttgtagatgggggaggataagaaatcttccaaactagagggattgcagatcatcttctatcgagttagggccattgctggatattcatgcaccatgaacgccatgtacatcatgccgtaggttcagtgcgggcccgagtcttcctatgg

SEQ ID NO: 173692 - DNA, 363 bp, Arabidopsis thaliana columbia
cgattgaattgaggcgaactatagattactatgacgtcgcatgcacgcgtacgtaagcttggatcctctagagcggccgcccttttttttttttttttttttttttttttttttttttttttttttttataaaaagacccataaaccgaaaccgatttcaagtaacatcacatcacaagacaaaatatttttgacaagccaaagtaaggagtttttaaagacacagagacgcactactagagaaatgcaaaacccataaagcgttgcacaaagttttggtcggccactttttcacataagtttcattttggagatacctccacagacctggacctggatcctgatggcgaccttgaaactgct

SEQ ID NO: 173693 - DNA, 203 bp, Arabidopsis thaliana
atttaggacgacctatagaagtactatgacgtcgcatgcacgcgtacgtaagcttggatcctctatagcggccgccctcgatctatcggacgctgtgggcggacgcgtgggcggacgtcgtggggaacaatgcaccgatcatctccgccgaaacatagttggctgctacacttgatgctatcattcggtgacattgaaaccat

SEQ ID NO: 173694 - DNA, 390 bp, Arabidopsis thaliana columbia
cgatctatttaggcgaactatagaatactatgacgtcccatgcacgcgtacgtaagcttggatcctctatagcggccgccctttttttttttttttaccttttactaatatttgaatacccgagagagagatatctaccaattctgtctgtcttgctaccatcttctttccaccattccaaaaatcaattatccgccacaagagaacccaaatccgctctagtacgagttgatgctggcgacgtattcattgcctctacggttaaaagaccttcctcctcctccaggacctcgacctccccttctgtaatcatagccatatccataacttcctcttcctctcattcccactcccacattcctatttccgtatcccacgtttccatttcct

SEQ ID NO: 173695 - DNA, 347 bp, Arabidopsis thaliana
  unsure (1)..(347): unsure at all n locations
cactatagcctagctaggacgaaccatgcacgcgtacgtgagctgggatcctcctgagcgagccgacctatgatctactgaccaatacatagatgggctgctagctggtagatcatcattcatgcaaatttagtctctaaacttactacttatgtacaaagcatgacgagtacttactacttaaaaacagaatgacatacacgaactgagatttttcgtgtttctagacacataatccatacagacaataccatacaatgtcagctgaaaatactggaaaattctcgctcaaaaacgaagacgtntggcgggacccaaatatctctatatcccgaggcctcgggttc

SEQ ID NO: 173696 - DNA, 352 bp, Arabidopsis thaliana
  unsure (1)..(352): unsure at all n locations
aactatagattactatgacgtcccatgcacgcgtacgtaagcttggatcctcttgagcggccggcctttttttttttttttttacagaatacgagaaaccctaataggcaaaccgnnnngaaaatcaacaaaaggaaaagcaaatggtttatcatcttctgctaattcccaattgaatttaagaactagatgatgaataaacactgccatttctaacttggctagctctgaaccagcacatagccttggccctcctccaaacggcatgtaattgtttccccacgtcgaaaaactaccacttcctgaggattacgctccgtagttttggtggtgccattctccaaggattaag

SEQ ID NO: 173697 - DNA, 355 bp, Arabidopsis thaliana
cgactgattgaggcgaactatagaatagcttgacgtcgcatgcacgcgtacgtaagcttggatcctctagagcggccgccctttgttttttttttttttttttcttttttttttaatggaagattcgattgtgattaaaccatttcttacttgaaacaaagacaaactttaccaatacctaaaaaatgtctggtccaaagacctctgaattggctctttacaacatagacgtggaccaaacaaacattttcttggtcggagcaagtggtttccttctctacataagtcctttttacataaagacacgacgggaacttagaacctgaaaccaggatttaaaattaaatcctttcgc

SEQ ID NO: 173698 - DNA, 673 bp, Arabidopsis thaliana
  unsure (1)..(673): unsure at all n locations
tgctacgccggctctatacgacttacttagggaaagctggtacgcctgcaggtaccggtccggaattcccgggtcgacccacgcgtccggttcgagcccattcacgatgatgaagagcttggtagctccaatttccccgtcgtcctcgtacaaatccccatgttcaacgaacgagaggtttataagctatcaataggagcggcgtgtggactttcctggccgtccgatcgtctcgtgattcaagtgttagatgactctacagatcctactgttaagcanatggtggaagtggagtgtcaaagatgggcaagtaaaggaatcaatattaggtatcaaataagagagaatagagttggttacaaagccggtgctttaaaggaaggactcaaacgtagttatggcaagcattgcgagtttgtggcatcttcgacgccgatttaagcccaacctgatttttttcgccgtagcattcctttcttatgcacattcccacattgccttggttaggctcgatggcggttcgaaattctgatgagggctattgacgagaatgcanganatgtcattggattaccatttcactgttgagcaagaagtgggttcatcaacacatgcttttttcggcttaacggaaccgccggatatggagatagcggcataaatgaactggggg

SEQ ID NO: 173699 - DNA, 569 bp, Arabidopsis thaliana
ctatacgacttacttagggaacgctggtacgcctgcaggtaccggtccggaattcccgggtcgacccacgcgtccgcgagaggtttttggaactttgtgacggcgaggaagaaggagttggagaatctccggtcaaagattccggcggcgttggttgattgtgtagatccggcgatgttagtgcttgaagcgatatctgaggtttttccggtggatacaagaggagataaagttagcaatgattatggatgggcttgtgttgtgattcttgagagtttaacacctggtattgttgatccagtgattgggaaatcgagggtgcttgttactccgagtgttaaggagaaagctaaggaattgctgagacgtggaagaagatttggaagagagaagaaggatagagattggaagactcctgatgttattcgtttttgagcatcttgttacatttggatggtaaaagggaagatcttgtttgtataaaaggctggtggtggatctggcgtgggaaaacaaatgcttaacctggcggttcttgtgggttgggttgaccaatggctggcctgatg

SEQ ID NO: 173700 - DNA, 394 bp, Arabidopsis thaliana columbia
cgatttatttaggacgacactatagaattactatgacgtcccatgcacgcgtacgtaagcttggatcctctagagcggccgcccttttttttttttttttaacagtaacaataaattccaattatgtctcgaagaagacaaccaatttaggaaatataagcagcagaaagtaacggctaaaacaagtctcgaccgaatacttggtggatttctaaattctaaacagaacaaaaagaaaacagaaagacagagagtgagagaaagaaacatcatttggttggttctttaaatgagcctcatcaacaaaaaagggtttttaaccacctacggtaaacgaaaataagaatggtaaaaaagaaagtttagaatcgatcgccatcatcattcttcttct

SEQ ID NO: 173701 - DNA, 382 bp, Arabidopsis thaliana
aattaggcgcactatagaatactatgacgtcgcatgcacgcgtacgtaagcttggatcctctagagcggccgccctttttttttttttttaaaacgaaaactttattattgcctgaggtgcttggaagttttgtaagtgtctcacatatcccaaattattatcatcgaaaagataaaaatgatgaagagaaagttgattgatttaaaaactttaaaaaaagatgttcagagtttgtggatggttttcatgtctatagcttcaaccaaagttcctttctcaacatgatcccaccacttcatcaagaaaattgtccaccaccaaatctgacccatggtgacagtttcaaaccttcctcacctgcatctgctttcttcaccagct

SEQ ID NO: 173702 - DNA, 350 bp, Arabidopsis thaliana
ggcgaactatagattactatgacgtcgcatgcacgcgtacgtaagcttggatcctctagagcggccgccctttttttttttttttttattcatattcaattatcacattacaatcattaaccactccaaacgctcgggcataacaacgagggaccagaagaacaaaccttgttccctacctgaagtatcatactttggcctcaaaaacatattgttaattatcttaactacaactctcttgactctcaagattatcatagcaatactcttcacaaggatctgagtcaccagctctcttctagtccgtgatatgactcgccgccgaactctgctagtgcacctccgaccaa

SEQ ID NO: 173703 - DNA, 354 bp, Arabidopsis thaliana
attgaggcgaactatagattactatgacgtcgcatgcacgcgtacgtaagcttggatcctctagagcggccgcccttttttttttttttttttaaattaagatttttatttaattaggaagtctattgagtacataaaaaacactaatgctacataacaaaagcaattgactttctagcatatttttttctccttttttacaaaaaaatgtaacaagaatattcattcacacacacgaacacatgactactacaagtctacaacataacttatacaactcagaaattccaaacgcaatccaattcttctgtaccggacgaatcacgaccgtcgaaaggtttgccggagaattga

SEQ ID NO: 173704 - DNA, 361 bp, Arabidopsis thaliana
aattgaggcgcactatagattagcttgacgtcgcatgcacgcgtacgtaagcttggatcctctagagcggccgccctttttttttttttttttttttttttttttttttttttttggcaggttaataagttaattatattgaaaaagaaaaaaaaaatcttccgatcaattagactcggatccttatatacataaaatcttttctttctgtttttagataatgcacacacaaatctccccacttaatcgaaatcttccaaggctagcttcagcttaaagagccatctcagcttgtaaggcagcgagttcatcttcctcagcagtaggttgcttctgagctggagcacgagcaggcttgttt

SEQ ID NO: 173705 - DNA, 377 bp, Arabidopsis thaliana
atttaggcaacactatagattactatgacgtcccatgcacgcgtacgtaagcttggatcctctttagcggccgagctttttttttttttttatataaatttggagacttggaattcagtctctgtaagatgtattacataccgtttctaaaggctaacgccacactaatgttaaaatgactacaaaatcacttttcaaaagtacacaataaacacagtacattaaatggggatcatatgaccaaaccaatagctaagttacgtaaaccttggacgtgttattcggtccccgtggcgtgtcttcaacgttattcaccgccgtgaagcaacaacaagccagacttcggctgcacagtctttgtaagtggattctaatgg

SEQ ID NO: 173706 - DNA, 394 bp, Arabidopsis thaliana columbia
  unsure (1)..(394): unsure at all n locations
cgatttatttaggcgaactatagaattactatgacgtcgcatgcacgcgtacgtaagcttggatcctctagagcggccggccttttttttttttttttttttttttttttttttttnttttttttttttttccaaactaaagaccgaaccaaatttaaaaacaaagtacataaccttcatccagataggtcaaattccagcttagaaataaccctgcacttggtagtgaagggtctcatttttttttttaaaaaaaaaaggtccaaacgacttattgtgttttttaaaacgggttttataactaaaatacctttaagacttttctttcctggggggattacaccctttttcctatcctcggaagcaccttttttataaaccggtggattttggg

SEQ ID NO: 173707 - DNA, 659 bp, Arabidopsis thaliana
  unsure (1)..(659): unsure at all n locations
tggtacgcctgcaggtaccggtccggaatttccgggtcgagccacagcgtccgatcttttagggtgatagggtttctaatcctaaggaacaaacatccaatcaggtgagagtccgcagtgcccagatgtgtgcagcaattggaaatatcaatgacgcgtccatttgcaaaggctgaaacctcggaatttctcgtttttagggggggcgggccctggagattcgtggaactaggaggggaaaatgagccgcttccgggttgggaggagggcgtggacggcggggaatggttctgcggggacacctgtgtctggtcgtttggtgcacaaagggacactggagcgtgagcgtgttggtccgcttccggaggggattagtgtgtggtggaaagatgggggatgagagaggggaaatgtgaaaggcagagtttggcggatctgagcggtctggtctgtgagaagaaatattgggatccgctgtttcgccacaaagtaacgagatatcacgagggaggtgatcgcggagaggtggaaggcggaggcacgtccgctggtcgacagactgagaacaaagagagatgagatatcagggttgcgtggggcactgcggttaaggaggttacggagtccancaccctaaatgattaaacgcccctattatc

SEQ ID NO: 173708 - DNA, 374 bp, Arabidopsis thaliana
ggcgaactatagaatactatgacgtcgcatgcacgcgtacgtaagcttggatcctctagagcggccgcccttttttttttttttttttttttttttttttcccatatataaaacacattcaccacttaaacatacaacaacatgaacaaaattattcgtatagtgaataatcaagtttctaagacattatataaagactatatatatatatatatatatattgatgaaccagttacatatcattcacgcaggggccaatggtccaacattgttggccacagttgtctccatagctttcatggcttcaaaccttggttccttggcctgaaacttgacagcagagtagagtttcatgtaatcttcaaacacaaatc

SEQ ID NO: 173709 - DNA, 344 bp, Arabidopsis thaliana
acactatagttagagcttgacgccgcatgcacgcgtacgtaagcttggatcctctagagcggccgcgcctttttttttttttttttttttttttttttttttttttttttttgttttttaaacacaaaactgactttttttcctgaaaaaaagttttttttcttaactgaccaaaattaagctcaagtttttgaggtttgatttttggaacccttggggcaaaaaccttaggaggcgttgccttttacaaacataccggggttgggtttaaaaaaccaaccttctgaagtgtttttccaaagccaatccagggatttggctttggctccggccaaaataatgtc

SEQ ID NO: 173710 - DNA, 265 bp, Arabidopsis thaliana
ctatgacgtcccatgcacgcgtacgtaagcttggatcctctatagcggccgccctttttctttttttttttttttttttttttgtttcaagcgctgaaaaaaaagactcacaaaaagattcagaatactgattgggactcttttttttccgagcttaaacaaaagagccacaatcagaatgtctgaatctttttctggacccatggggtgagatcccgggaatgactggactcgtgttcctgaaggcgttccagtatttctccta

SEQ ID NO: 173711 - DNA, 330 bp, Arabidopsis thaliana
gctggtacgcctgcaggtaccgggccggaatacccggggcggcccacgcgtccgatcaaactttcagtccaagacgcgttctgttttttgcttgaacctagcttgagcgggggccactgtcatgccgagctagaagagaatacttgcgaggatgatgttccacccacatgtggggcaaactttctcttttcatcggaggggaagccccacacgcgagtatattttcgggtgtccgaaacttaggggtggccagtatccaagagcgacaatactgcatagggctatacggttggggaatgactgccgctgaggggatcccgcaagacagag

SEQ ID NO: 173712 - DNA, 530 bp, Arabidopsis thaliana
aggtagacctatagaagagctttgacgtcgcatgcacgcgtacgtaagcttggatcctctagagcggcctccctttttttgtttgggcggctaaaccaaaattctctttcaaaaacttctgatccatcattttcaagtttgtaagaatttatcatgcgaaacaataagttaactaagtttaaaggataaactagaggaaaacatgaagtatttaggcaacaacaacacctttatgaataaggggggtattacatatagaattgacagacaaggtcacgactatacgaggggactacagaattatttcctattttcgtatctttgattctctttgaaggggaaatttcccctaagagcattttaaagttacaagagagccgataaaccctattaaatgagattggatgcatgttaagaaagaaagaaaagagtgatggatcataaggagaatggacttaatagagactcgtcaagctctttagaacctgcttatacaccatccctcttgatcggtggcagagctagtctcc

SEQ ID NO: 173713 - DNA, 514 bp, Arabidopsis thaliana
  unsure (1)..(514): unsure at all n locations
aggtgacctatagnaagactttgacgtcgcatgcacgcgtacgtaagcttggatcctctagagcggccgccctttnttgtttttttcttttttttttttttttatttggcaactccgaaacaagagggaattaagaaatgcctcataaaatctacaagcaaaactcaaaatcaaattcaaacatatcaacatagacatgcataatgttcatcatcatgatcatgatcatgaattcatgatcaatgacccataggnatactcggctcatcatccaactcaatccccaccttagctagtcttttttccttgtaaacttaccacttggagaaaactaggaaaatgaggaagttcaaggcaacaagtacggccacagccattacaaattgaaacaccgcccttgttaagaccatcggaaatcctggatgagctttcccgggaatttctaacaattggcacaaaaccgactgaaaaaaagctaatgccatggtgttaacataaaccctcctatccttta

SEQ ID NO: 173714 - DNA, 503 bp, Arabidopsis thaliana
acgtcgcatgcacgcgtacgtaagcttggatcctctagagcggctgcccttttttggttttttcttttttttttttttttttttttttttttttttttttttttgaaccaacattttttttttgattcttatactaaaaaaaaacaaaattcctaaaaacaatggcaagaaatatcacaaacccctagatctaaacataggaattacttttaagagtaaacacaacttataaagctaaaaccaagatcacatacccccaaacggaaaattgatttataataaaccccccctaaaactttcttgaaaaccgaaacccttctcattccagaaaggaggcggggtttttttttccttgtaacaacaaggtttgtttataagcaccccgggacttgaaaagaagagaaaaaaaagccttagtgtcaaccaaaaaaatgtttttttccgaacccgggggccaacccgtggattttcgaaccggcccctgtatgccaaccaattttccc

SEQ ID NO: 173715 - DNA, 531 bp, Arabidopsis thaliana
  unsure (1)..(531): unsure at all n locations
aggtgaccctatagnnagagcttgacgtcgcatgcacgcgtacgtaagcttggatcctctagagcggccgcccttnnttggtttttctttttttttttttgttttttttttnaaaaaattgagaagaaagtctttgtttagcatttgttcaagtaatcaagttataactaaaaaatgaaaccgaaaagtcttctgttgttaataaaagtcttctgttgttgttctttgtctaatagctgctccacttaagtaaatctatcatcaagtcacaagtattgctgttgtatacgcgctctgttttgttcccaccataacctcgcatgtgtttccccaaacttgtctcggctgaatcgaactcgcctaagctcgcgatttccatctggtaaagctctgatagtaatatagataccaggctcatcttgttctacccattcactttccatgtcacttgcgttactcactgagacctcctcggatcgatctaccgagctacttctagcagaaccatcgatagatgatgtttcagtcttg

SEQ ID NO: 173716 - DNA, 530 bp, Arabidopsis thaliana
  unsure (1)..(530): unsure at all n locations
atagnaagagcttgacgtcgcatgaccgcgtacgtaagcttggatcctctagagcggccgtcctttttgggggttaaatcttttttttttatttttttttttttttttttttaaacaaaagattcggacatgtttacttatcattacatcgggcatacatgatacccaacaccatccatcatatcatacatcctttccattatcattatatcacccccaccacaattttttaaatcaggggggagccaacatttagattaaataactaaaagccactaacatattatttaaagcattagggctgaacacacaaaaaaaggaggggggcactaccatgatgtattcataatccccctttttttgattaaactaaaaagatttttttattaatttgggttcggcccaagcagagaactcaacacaccgaaccccttgtgtttctaattttttccaacttaaatgggttttgggtggaaaattacattgtttcctgactccccttaaaagccagcaaggggggtgttttcgga

SEQ ID NO: 173717 - DNA, 396 bp, Arabidopsis thaliana
  unsure (1)..(396): unsure at all n locations
atagaagagctttgacgtcgcatgcacgcgtacgtaagcttggatcctctagagcggcctcccttttttggtttttttcttgaaagagctaaggcatcatatttattagactcaatgcatcattacttctacttattcaagctctctgcgaggctctaacgactatccccgttagccacacgcagcgacggacaagtgatcaacagagtctcccctctcataatcttttgcggctgccattccagtgcctatgcacattgagagtactacaaagcgggagactttacctatccgctgcatctagtgcaacaatgtcgcaacacatcgagctcctgtagcacccaggggatggcaatagcaatggtnctacattacattgaccttaacctgtccagc

SEQ ID NO: 173718 - DNA, 298 bp, Arabidopsis thaliana
acgactcacttttgggaaagctggcacgcctgcaggtaccggtccggaattcccgggtcgacccacgcggccgagatgatcttcttgcttctgctgttaacgctgtagtggaaagaccatctttggatccatgtgaagagggtgatatccgcgttcgtaccgagatcgcgcctggttctcagagagcactggagtgtatagatgcagcttatcttgctgattttactgagtgcgtgctattcagcactgacaatagacaatgctcattatgactaccatcagtagctgatgtagctgc

SEQ ID NO: 173719 - DNA, 399 bp, Arabidopsis thaliana
aggtgacttatagaagagcttgacgtcgcatccacgcgtacgtaagcttggatcctctagagcggctgcccttttgtggtggtggcggactttaaaccaaaatttttctttcaaaaactttctgatacatcatattccaacgttggtgagaatttatcatgcgagatacacataagttccctaaaccttaaaggaaaaactaacatgaatacacgtattgatttaggccaacacacaacccctttttctcaataagggggcgagtaatccatcatatgaatttggcaatacacaggaacacgcacttataagaaggtgagtctacaggaattgatgggttttactctttcacgaaattaatggaatgtgtgtgttacaaaaggggagaatttatcccaa

SEQ ID NO: 173720 - DNA, 460 bp, Arabidopsis thaliana
  unsure (1)..(460): unsure at all n locations
acgactcactatangggaagctggcacgcctgcaggtaccggtccggaattcccgggtcgacccacgcgggcggggtggctaaagatcaaaacataaacttcttattacatatatgggacggccactaccctgagaataacgggagacgacctaaattaaaaatttatccgggtcgacactgccagtctcagcgacgggctagggggacacactgagggaggatctttctgtgggggggggggtcatcttttgaggatctgggagaccttcacttaaaaactaagaccaggggcaaactggtacctatgtggttccaattttaatccctcgggttagctggggggcgaatctgcccataacgggccggggctgggcaggggagcttaacaaaaagtaccaactgggcattgcagaaaataaaggggccttggttggggtgcctgaccttaaaatggaaaa

SEQ ID NO: 173721 - DNA, 550 bp, Arabidopsis thaliana columbia
  unsure (1)..(550): unsure at all n locations
cgattaattttaggtgacctatagnaagactttgacgtcgcatgcacgcgtacgtaagcttggatcctctagagcggcctgccttnntgggtttttctttttttttttttttttttttttttttttttttttaattagagaaactgatttaagcctaaattgataaaaatgttggaaggccatacaattgggaatagaaacccaatcaaatgggaatagttgaaacattaatcatcctaaaattcttaaataatgcttgaaacaagcgctgaccgccttttttcaaaattttcttttgggagggaataaaaagagcctaataaagaggacttggctggcgaattttctaaggaaggatgctccataccttttttttttgaaaataatttttctggctcaaactccagcattttttataagaaataaagcccaccctaaacaaagtttggcacattttaaaaaagactcatcggctcccattacaggtattcatgccattgcttgagttagcttactacaagccaaatttttttattttaaatccccaaca

SEQ ID NO: 173722 - DNA, 532 bp, Arabidopsis thaliana
gctccctacgactcactatagggaaagctggcacgcctgcaggtaccggtccggaattcccgggtcgacccacgcgggcgacaacatgtgagattctagagtgacgaacacgagatgttttgagagatggatggacatggcaacaatggtggtatcccgctgattctgccttggtagacttggacaagcttgagaagtgggcgaagggacttatggaaaagcttacaaagcaagagagaaggctactgggatgatcagagatttgaataatactcctcttcctgaggatgaacaaggtgttgctccactactcttatgaagatttctatcttgcgtctgctcgctcgtgatactcgcatacataggtagttggatgcttatcaaggagtaagctgagagtgaataactgctctttaccatgtgttcgagtttgttgatactgatctcatgaatctattagatgcttgagttatgctggtcagaacattccacaaaatactgtcaagtgcttgatgtaccagttatgcaaagg

SEQ ID NO: 173723 - DNA, 510 bp, Arabidopsis thaliana
  unsure (1)..(510): unsure at all n locations
ttgacgtcgcatgcacgcgtacgtaagcttggatcctctagagcggccgccctttnttgggtttttttttttttaagccattgttttcggttgaaaagtgacaagacagactttgtttatcttttggtcaagtaatcatgttatacctaaaggccggacccggaaagtcttttgttgttaataaaagccttctggggacgggctttgtcttatatctgctgcccttacgtaaatctttcttaaagccacaaggattgctgctagttaccccccctgttggggtcccaccataacctcgaatgagtctccccatgcttggttggggtgaatccaactcttctaagctggagatttcatcttggcaaatctttgattgtcttatacataccaggctcatccctggttaccaataaacgtttccatgcgactcgacgttactcactgagacttcctggaagggatccaccgagctacttgtagcagaaccctctatttaggatgtttccggtt

SEQ ID NO: 173724 - DNA, 484 bp, Arabidopsis thaliana
  unsure (1)..(484): unsure at all n locations
atagnaagactttgacgtcgcatacacgcgtacgtaagcttggatcctctagagcggcctccctttttttgtttttttctttctgaaacataatttaatgaaaggaatttgggggcacaagtttacaattttgtacaatgggatcgtgcgcctccatcaaaactcccaaagggcgcggaatactactaggattgcangcaacatcatactcacaacacaaccttttgtacacctggcaacactctctctaaattggcagacgaggtcacagactattcgtaccatataacatagctacggcttattttcgtgcacgcgctttgactatagatgacccttttcgcagatatagctcctccataactaaagactgccttctgaacctctatcctctggggatggatccggagacacacacactacaatcactggtcagattgttacatcatattccgttaaggggccactctttacagtctttata

SEQ ID NO: 173725 - DNA, 210 bp, Arabidopsis thaliana
acgactcactatttggaaagctggtccgcctgcaggtaccggtccggaattcccgggtcgacccacgcgtcggatgacgcttaagcgcacacatagagcttctatattgtgttgttcacagtcctacccttcatatcaattgagatgatacctgttaacagcatttacacgaggatattctaagtgatctttacggagtgagtaaagtga

SEQ ID NO: 173726 - DNA, 531 bp, Arabidopsis thaliana
  unsure (1)..(531): unsure at all n locations
gactttgacgtcgcatgcacgcgtacgtaagcttggatcctctagagcggccgccctnnnttggggnnnncnntttttttttttttttttttttttttttttttttttttttttttttttttttttttttttttttnaaaaggaaggcccatttttccttgcgtttttcgaaaatttgaagttttaaataaaactttttttttaaaatttaaaaaattttgggtggggtggcaaaatgtaaaaggggggtttttttttaacaacaaagggatttttccttttggggggggggaacgggggaacctttttttttttcctttggccgggtggaataacttgtttttttggcccaaagttttttcccaacagttttattgtaggggcgttttttttttgtgggggccgccttttgaatttgtggggaagaaaatttgcccccttgaaataattttggacccgggggtgcccccgggatttccggaccggttcttgggggggtaccattttttcttataggggggttttttaaag

SEQ ID NO: 173727 - DNA, 550 bp, Arabidopsis thaliana
  unsure (1)..(550): unsure at all n locations
cgactcactatgggaagctggccgcctgcggtaccggtccggattccgggtcgaccacgcgtgcgttatttgttctgtcaaagacttatagacgccctttatgtctaattttcccttaatgaaatacgtagaagagtaaactatancacgcaagcactgtaacttcattaggcattaaaaacataagcaagatctgtcagacgcacaataatagtgtggatactagatagagaggactcttacagaggggagtatatataaccaactcctactagagaggtaaacaagacattcgctttaagaactttgggatttccaagaccctggcgtcgggaacaagtgggaatctggatgtggctgaacttgggaatccgaattcccaagatcgtgatgccggtgagctggggttttaacggaggtgggggcatatttttcaagggaggacgaaatagcattaaatggtgagaggagagacacccgtctttatccgtgccctgaatgagattggaacagccttttgtgttattatcaaagaaaagattgccttgtt

SEQ ID NO: 173728 - DNA, 551 bp, Arabidopsis thaliana
  unsure (1)..(551): unsure at all n locations
gatcttcaggtctctacgactcactattnggaaagctggcacgcctgcaggtaccggtccggaattcccgggtcgacccacgcgtgcgcccacgcgtncgcacacatcgataccatcaccagtttacagattcggatagggacccacatagtcctaacgaaggattttggttcagtcacctcctatggctatttgataccggttatcttgtagaaaagtgtggaagaaggacaaatgtggaggacttaaagaggcagtggtactataaattcctccaaagaacagtcctttaccacattctaacatttggtttcctcctctattactttggtggtttgtcttttcttacttggggaatggtaatattttatattctttcccttttatttttaaaaaatttcttacaaaaacataaaaatagttacaaataataaatgaaaaaatgaaagaattctaatttttctatgagtgtagggtattggggtagcaatggagcatcatgtgacttgcctcataaactctctttgccatgtttggggaagccgaacttg

SEQ ID NO: 173729 - DNA, 530 bp, Arabidopsis thaliana
  unsure (1)..(530): unsure at all n locations
aggtgnacctatagnnagactttgacgtcgcatgcacgcgtacgtaagcttggatcctctagagcggccgccctttttttttttttttttgttttaaccatgattttctttcagaatcttcagaaccatcatgtttcaagtttgtacgaatttatgatgcatttacactaaggcaactaaaagccaacgctaaactataggaaaacatgaagaaagtagccgacaacaaccccttgatgaataacgggcgtcatacagatataatagacagacagggccccgactatatgacggatctacaaaattattttctcttctggggggggggattctccctgaaggggaaaattgccctggtagctctgaacgttacaagaacgcccctaaaccctattaagtgaaattggatgcatctcccgacacaaagaaaggcgtcatggatctgaaccgagatgtactaacagagactcctcaagcacttgagaacctgctatacaccatcactcttgttttgtggcagagcagtctgt

SEQ ID NO: 173730 - DNA, 383 bp, Arabidopsis thaliana
  unsure (1)..(383): unsure at all n locations
acggggcaaacgcgcgtacgtaagcttggatcctctagagcggccttccttnggttgtttaagtccacgcgagtgagatttatgatcatcgaggacgcttgttcaccagacacagatagacttggggtcaagagagtctcagaactgaccaggagactccacagacgttgttgatcttgacaaacattaattttcaaagcagcatcagtgttaatctctctacgagtcctatcgtctaagattcaagctatatgactctcaagaagaaacaacgaacgaggctaggatatgtctcttgagagggagcccatgaggtgtgactggacttatggactgcccaggcgcccgtacaggtctttccaaagatctgattacctagactg

SEQ ID NO: 173731 - DNA, 542 bp, Arabidopsis thaliana
acgactcactatttggaaagctggtccgcctgcaggtaccggtccggaattcccgggtcgacccacgcgtcgtcactctgctctcaagatcacagcttacttgataagcacaaacgccaatgacgagatctcaaatctgattaggatgtgcgttactcactctgctactggttacatccggatctcactatgtgggtgtgttcactgaccatcctttcgaattcgtacttcgtcaagaatctccagctctcatcgacatgcactctctctggctccgtcactgcatgagacttgctccatattctgaatacctacgggcattctccaagactgctaaggctgtggcgattgctactgccgattgcgatgaccataatagtgtctgtgctcaatatgatgctcttggatactcaaccattcaatgatctgctaaagcatctcttgatcctcaagagtcttagggtacactcgatgctatacctttgacttactaccttaacaatgaaggacgctccatctcagattatgtcacactccacaaa

SEQ ID NO: 173732 - DNA, 468 bp, Arabidopsis thaliana
  unsure (1)..(468): unsure at all n locations
atagnagagctttgacgtcgcatgcacgcgtacgtaagcttggatcctctagagcggccgcccttttttgtttttttttttttttttttttttttttttttttttttttttttttttttttttttnnaaaaactaaggaccggcccaattttaaaaacaaggtccttaaactttttccagataggtaaaatccaggcttaaaaataaacctgcaacggggagttgggggtctcattttttttttaaagaaaaaaggtggcaaacgattaattgggttttttcaggggggttttataactaaataactttaaggactttttttcggggggggtttaacttttttcctaatcctgggggaaccttttttataaagcgggggttttggggttggggggaccttagaccaaaaacgggtaaggggggtttctggtttggggaactcaatttggggattttcctaaccggggg

SEQ ID NO: 173733 - DNA, 509 bp, Arabidopsis thaliana
  unsure (1)..(509): unsure at all n locations
atagnnagactttgacgtcgcatgcacgcgtacgtaagcttggatcctctagagcggcctccctttttttgtttttttcctttttactttttgtttgtgagataacatgtgagagttttttgagaacctttgggaaaaaaagggaaggatgatttttaacaattaatatgccaccactgttgggagtacgaaacaaaatagtaaataaccggactgaggacaatatcttgaatgggtgaaagcacgtctttttttaaggctaataaagagacggttttgaaggcctaggataaaaaaccctttttggtgggagaagcttaattttaatccttgtcgatggggggctaaaaccgaccactaaatccaacctcctggatatcaacaaacagcatcgcctttttacttccgttaatgcgaaagaggccacctggctttaaactgaccgttgaaaagagcaagaactgcaacacccacttctttggtttgagaacatgcaacataaactttcc

SEQ ID NO: 173734 - DNA, 520 bp, Arabidopsis thaliana
  unsure (1)..(520): unsure at all n locations
atagnnagactttgacgtcgcatgcacgcgtacgtaagcttggatcctctagagcggccgccctttttttttttttttcacttttaaccacgattctctttcagtatcttcagatgctttctcattcaagctcagtcacgaagtgagncgtgctgatccactacagtcgactaacaagccaacgcacagcttgaggaaaacatgaaggatttagccgacaacatcctctagatgaataggtgactcttacatatataatggacagacaaggtcccctatatatgaccgaactacaaaattattttctattttgggggcgggattctctccgaaggtgaacttagcccttgagctttcaaagttacaagaatgccgctaaatggtattaaatgaacttggatgcatctctgtaactaagaaaggagtgatggatctgaacgagaatggtttaaagagagactcgtccagaactattgaacctgcgtatacaccatgcgacttgtatggtggcagagcgagt

SEQ ID NO: 173735 - DNA, 362 bp, Arabidopsis thaliana
cagctctctacgactcactattgggaaagctggtcacgcctgcaggtaccggtccggaattcccgggtcgacccacgcggtggcaggacgcttagtctgtactcttaagttgctgtctttctaagaagaagattctgtcttttggagatgcctgctgatgcatctgattgacatgagcacacaatgaggatattatctccaccacactcaggggggaacatggtgagccaatacagacaattatctacatggtcggacagatcaggcgttacaagctctttcagcatcatcattcacgctggatgttcggatactggagaactcgtggccattgacatagctcaggctgacagactatctgg

SEQ ID NO: 173736 - DNA, 497 bp, Arabidopsis thaliana
  unsure (1)..(497): unsure at all n locations
gctctctacgactcactatanggaaagctggcacgcctgcaggtaccggtccggaattcccgggtcgacccacgcgtgcgaagagacgaacctgccttagagatacctggctaggagaagatcactacatcacccacagcctttgtttgctcacacattctcagaggctagctcttataatgcggctgcctactcagttctcattcaatctataaacccatagccctaaggtttctgtgtactgcatgattcagaacaaatctttgagacagattgctaatcactggtctctctatcacgcatcatcgacctaccactggagagtcgctccatatcattgctatgaatataactatcatcactgctcacttggaggccaagaactctgtggtcggccgtctaaactatacagctttacgtgctcatgcatgatacatagtagctattctataagctgccctaggaacaggacactgtccatctttgcacatcaagat

SEQ ID NO: 173737 - DNA, 514 bp, Arabidopsis thaliana
  unsure (1)..(514): unsure at all n locations
agcgctacacgactcactatttggaaagctggcacgcctgcaggtaccggtccggaattcccgggtcgacccacgcgtgcggaagaatcagagaacagaaaatggcgaattcactatgcttcttctgttctcctcctacctttagcttccaatctccaagcaaaaaccctaaaccttctcacttcttctcaactaatgataacacctcttccttggtacacaagagagaactgcttcagacttcaagatccaacagttctgaaggtaaggacgcaaacaataatgctcagggcactaaaccaaacagtttancttgtgcagattgtgaatgggaaggttgtctggcatgctctcaacgcanaggaggtggtgcgaatatgagtgatcatttcaatggtcagtgtaaagctggcgcactctgtaggctatgcagatgtaaaaaggaggcgtagcgtggggactgcaatgcagctggcttcattgtagggttctcgagccccttcgatgagtagta

SEQ ID NO: 173738 - DNA, 539 bp, Arabidopsis thaliana
tatagaaagacatggacgtcgcatgcacgcgtacgtaagcttggatcctctagagcggccgcccttttttgttttttttttaactttgaaatctactattgataacgcgttcaacagttcagtctcctcgataaacaagattatagaagaaaaagtattacaaataaaacaaaatcgtctagtactgtaaaaagacagccggttgaggaagaatccatcggtaccataccggaaaatataccggcttaggaagaataataacaaattactctttacatatcctttaaacgactcttctctccatgtagtaaacagaatcaaccaacgaaaaattgctcaagagagaaacgtagcctaaaccttttaccttttaccttgcacgctatcattccaagcctcagctaccacccttttgtttgagggtgattttgtctccaagacttagagcaatcccttgcgtcttgctccttatccttatgtaaccactcaatgttccatccgtttgcttctcaatactcaaattcacaagagcatcctca

SEQ ID NO: 173739 - DNA, 530 bp, Arabidopsis thaliana
  unsure (1)..(530): unsure at all n locations
acgtcgcatacacgcgtacgtaagcttggatcctctagagcggccgtccttnnggggggaaacccnnnnnnnnnnnnnnnnnnnnnnnnnnngggagagaatatcaaaacttgtgaaaaagaagtttcctgtaagattccaggacaaaagtattgggttttttggtttgtttatcaatggaaaatctcatttctgtttcactcttcctctttttccgactgttgagaactcgactctttcttctgtttcacactccctttggccttcttcgaccctcttttttaatccatattttttttgttatcctcattttcattggactcattttcgaaatcatcatcggaaatccttcctcctaatgctaattttcctcctccatcccttttttttgaattggcccctttttttgaaacccaccccggtgtccttgccttggtctttttcaggacttttacctttaggggttgggttttggcacccccccatcccttttttccacaggcaaaaccaggtcaggttgtttgttcctt

SEQ ID NO: 173740 - DNA, 440 bp, Arabidopsis thaliana
  unsure (1)..(440): unsure at all n locations
acgactcactatatggaaagctggtccgcctgcaggtaccggtccggaattcccgggtcgacccacgcgtgcgatatagattgagaatacatgcttgcgactcttcacacaaagcgctaatgagcaagagaacgtgcgcgattatcaatcttaccgagccttgctaattctctatgctgntcaacttcgtcttggactttttgatggtgatccgcgaccagtctgtacggccaggttgaccacacgacacttgcaactcagaccacataatataggcgctgctagcaacaagacagggtctggcgctcctcgacaatgagcacaggaagacgcctttgaacaccaactatgtcgcttcattagcacatccccgtttcaatggctagtaatataaccaatatggcccgaccttatcccctacccaccagtcacccaaacac

SEQ ID NO: 173741 - DNA, 478 bp, Arabidopsis thaliana
tttgacgtcgcatgcacgcgtacgtaagcttggatcctctagagcggccgcccttttttgttttttttttttttttttttagtttcaaacggtatctttagaaccttctaaaaggaaataaacagaattgaaagtgcttttgcttacaggcgtctaaaattcaacgaaaacataatggagaaaatgttccaagacccggacatgactcccttgaggaataactcgcttaccgaaatcattctttacagtcatgggctagaatgtgataaggaccaacacagttatcctcattttagtgggacgagcgtgactccgatcgtgaccaatccgctgctagccccgaacagcagatataaccgcggtaattttctaaaacagcatatgaacataactaccgacagattgcaacgagttaggtgacatgaccacgaacggttaaaccagagactccccaagagtgacaatcctgttatacacc

SEQ ID NO: 173742 - DNA, 446 bp, Arabidopsis thaliana
caggtctctacgactcactatagggaagctggcacgcctgcaggtaccggtccggaattcccgggtcgacccacgcgtgcgatctacatcgaggatctacatgcggctctattacgatggtgcaaggaacaccatacagagatcgataaacgatctggctgagcccatttcatctaggatgatgtcaatgactgcaaggactttttcattgatacacatgagaccactattacgcgtactgtatggatcaacttttcatgaggtgtgaaccatacagtatagactgatggagattctcgacccggtactctggtactgagactgactgcacggaatagctttgctgcaaataacacaaatgccaataatcgatcaagtgcccattgtcaaaagatcaatgcagctagtgccgtacttggacggtgtggaactgtttcctatgctct

SEQ ID NO: 173743 - DNA, 529 bp, Arabidopsis thaliana
  unsure (1)..(529): unsure at all n locations
aggtgacctatagnagagctttgacgtcgcatgcaccgcgtacgtagcttggatcctctagagcggccgccctttttttgtttttttacctcttaaccacgatttccttccagtatcttcagatccttctgaaacaagttcgcacgaattgaggatgcagtttcttacaatcaactaaacgccaacgataacatggtggaatacatgagggattgacccgacaccatcacctagatgactaactggctccatacagatttactggacagacattgccccgactatattacggacctacacaataattctctcttttgggggggggcatctccctgaaggggaactatgccctggagcaccgaacagttacaagaacgccgctaaaccttattaactgaatttggatgctactaccgaaaaaaagaaagaggttaggtatctgaagccgattgttctaacgagagactcctcaaggacttggaaccctgctatacaccagccgacttgtactttggttagctagtctgct

SEQ ID NO: 173744 - DNA, 529 bp, Arabidopsis thaliana
  unsure (1)..(529): unsure at all n locations
taggtgaacctatagagagctttgacgtcgcatgcacgcgtacgtaagcttggatcctctagagcggcctgccctttttttttttttttaggagatatatatatacttattcatgtttatctatttcttattcaaattaggaaaaacatattctaaattgcatatatatacattgtatcaatgctattgagatcaacaagacataagaaagagttttcccccaaactcttctctagtttctacatcttatgagtcaagaatatctgagaattaactttgtaggttaactccttctggtcaggtcgaaatcctctaatacgtagctgttggtctccatcgggttctttggaaatctgctgatttgtaactttaatatcatcttcatctgaaaagatttttgaaccaattccacttctccgtgattccttgatgagttaagttnttggaataagttgatttgtagcttaaattcttcgggttgggctggtatgcttcttgaaaggcacatatgtatttggtatgcttaggt

SEQ ID NO: 173745 - DNA, 546 bp, Arabidopsis thaliana columbia
  unsure (1)..(546): unsure at all n locations
atgattctccagctctctacgactcactatatggaaagctggcacgcctgcaggtaccggtccggaattcccgggtcgacccacgcgtgcgcttttagatagccatcatgtaaagaaaaaaccctagccgcctaaagaggcaacgacttctctgatccattgttgaagatcgatgaagcagaatccaaagacgaaaatggaggaaatgaagatctcattgtactcgcacatggacgagactatcgaatccgattcagttgttagatctagaccataggcgaggagataaagcgaaggctagatctgcttttgtaccagcacatatacggggaagaaaggaatctatttcaggctagacaatatcanagtttcgatcaaatgtcagatatacgtgtctcaaactaatttacttttattgatttagttgttagaccaagcaagcatacanaaacttgacagaacctctgcatggattacactgtcgatcgatatgcgtagatctgtgatgaaagtggacagataatacgagctttgtcgggaaaaggt

SEQ ID NO: 173746 - DNA, 373 bp, Arabidopsis thaliana
  unsure (1)..(373): unsure at all n locations
actatagggaacgctggtacgcctgcaggtaccggtccggaattcccgggtcgacccacgcgtccggcttcttaagcccaaatctctctctctttctctctttctcttcctctctcaatctactcgccggagatcggctcgattccttcgtcaccaccggatccggccggagatttccttcccgtttctttacttcacaacggggaggttcnaattctccctcgcagtgattgatcaaagatgggaagtcagaaaaatgtgaacccccttgaggaatgcactgtttccaaagcatgggggaacttgggtttcctaattccctaggccccattggtggcgatcccgggaggcttcaaccccaggcttttaggcc

SEQ ID NO: 173747 - DNA, 225 bp, Arabidopsis thaliana
atacgacttttttagggaaacctggtacgcctgcaggtaccggtccggaatttccgggtcgacccacgcgtccgcttactttcttcttcgcaatctgaaaatacagaattttctgcgacccggatcagacacctgcaacatcgtcatgggtttattcctcaccacaagaatcgagccagaatctcattactacacacataatcttcttgctgaggtgcaaactac

SEQ ID NO: 173748 - DNA, 669 bp, Arabidopsis thaliana
ccgggggggaacccccacgacagcaccaccagcacgagagacaaaccaagacacccaaacaaccacgccgaaccaaacaccacgcgccaaaccaacacacagaagagacacccctcacacggggggaaacagacaaacacagcaaaaaaaaacccaaaaagcggggccgcacccccaaaagaagcaaccacgaacccagccaagagacacccgacccacaccaaaaaaaagagcagcgagaaaacccagaaaagagcaaaaagaaaggaaccggaacgacaaacaaaacaagcccggcagcacagaaggacggccaaccaagacggaggcgacaaggaggggagacgagccagaaagccagcagacgaggagagaaaaaagaaaacggccgagaacacagacagagaagagacacaaagcagacaagaaaaacacaacgaggcccacccaacagaaagcaaacgccacacgcagacccaaagaggagacaaagacaaaaccaaggcgcaaaaacaaacaacccccgcccacaacaacaccgcacgggaaaaccgagagaaccagagccaggacgcgaacagcggaagcaccgcgcggcgcggagagccacaggaaagaggaagacaggacaaaggggcaagaaaacaaaggcaagagcagcagcaaaga

SEQ ID NO: 173749 - DNA, 466 bp, Arabidopsis thaliana
atgacgtaaactgcacgcgtacgtaagcttggatcctctagattcgccgccctggggtaagcttttttatatttttttttgggggttaacagaagtagtaatatgagttcaaagcttccactaaagcgctgttcggtggggttgacaatacttttattttatctttgaaatgaaagaaaaacctaacatgtctctaagttttaaaacacgggggggcccggtttaaaaaaatgaaacccttttacaacccggttattggggttgcgccttgttcttcccttccagggggcatctcccaggttcttcttctttctttcccccccccttttccccttttttgggggggaatcatagggggataggagggggcgcacggggacttttataggacaaacctgtgggaattttttggggcccccccccgggtttgggcctcccccatccagggggaaatcgagggggttcg

SEQ ID NO: 173750 - DNA, 506 bp, Arabidopsis thaliana
taggagcaactatacaagatttatgacgtcccatgcacgcgtacgtaagcttggatcctctagagccggcgcccttgtttttttttttttttttttttttttagggtgcatattaggacttgctttttgctataaaaagaggtctctacaatgacaggaagtggataaaggtcttacctgaaaaatgagaaagcctggcaggtgaagtccccaaattacctacccatttttttaggagtggaaaaaaaccgaagaagcttggagcaaagaaaaaaaacaacgcctccttaaaacccctccacccccctcaaaacaactatggcggaccctcttgagcccccccacatccgcaggaacctgggcaggcgtccgcaagcactccccccgtcccgttctccgccccaacaccccctctcccgccgcgccgccccccccccgggcggccctcgccctcttgccccgcggcatggccgcgccgtgcgtccgggccacccgccccccggccc

SEQ ID NO: 173751 - DNA, 466 bp, Arabidopsis thaliana
ctatgacgtcgcatgcacgcgtacgtaagcttggatcctctagagcggccgccctttttttttttttttttttttttttttaaaaaaccaaggtttaattaattcctctttaataaacaacccataccaacagggcccaacaaaaactttttaaaaccataaactttttaaccccaaaccgggggagccaaaaaccctacacacatgggttgtggggggggggcccccccccaaaaaaaaattcccacaaggaaaggggggggggtaacccaattttccccccccccattggacccccagattttggggggaacaaccccaatctcttttttaaggaccaaacccccccaggacctgccccaggttggcccccaaaaattcccccctggttttaaccccccggggggattccccccggggtttggggttcctcccggctgccctgggcaccacgcggaaaaccacg

SEQ ID NO: 173752 - DNA, 393 bp, Arabidopsis thaliana
acgactttcttagggaaagctggtacgcctgcaggtaccggtccggaattcccgggtcgacccacgcgtccgatcttcgatcttatccgtatctgcttgccttgatctatgtctcttctaactaatctcttgtcttcgctcaaaatcaaacgtaatcataaataaagatcttcttgttcaattgctcttgatcctcgcaacatcacagattctgagaattctcttctcttgggctgaaactcgagagctctcgagttctgaaaagacagtgcgcagagttctgatgcgacaaatctcaacccattcctttgttatcattctatatcacctgagattcttcattgggtttacggtatcctcttgaccaaaaagacatggcaaacgcaaaaaaga

SEQ ID NO: 173753 - DNA, 533 bp, Arabidopsis thaliana
  unsure (1)..(533): unsure at all n locations
gtcgcagcccgcgtacgtaagcttggatcctctatagcggccgcccctgggtttgcgttttttatacaactaaaaaaaaaanattctttattatcctccaccttccacaagggataaaaaaacacaagggtttgatataccataacaacaacaatgacggcggaaccccaataaaaaaaaaaatttgatgggaaaaaatccaaaaaaaaccaatgggtttcataacatcggggaacgccggagacaaaaccccggggggccgccgtacccaagaaaatacctcccctctataaacgaggggttgggggagacccccccccagccaggggcaccttaaggccaccggctttctccgcgcccttttcagaaggggcgcggcgccccaaaaagttcttcatttgtaccaccgagcgcccccgagagggggaggccccaatttcccacaccgcacccctataaggaggcggccgcaaaccccccggccggcttctcttgggcggcgtcccgccacgcgccagaacaacacaccccgc

SEQ ID NO: 173754 - DNA, 532 bp, Arabidopsis thaliana
ctatacgacttacttagggaaagctggtacgcctgcaggtaccggtccggaattcccgggtcgacccacgcgtccgaataaagatagatcatctttcgctttctatgatagaatatctctatgaacatcgtggactgtagctcataccgttatacttggcgaactactaaccagactttgggttgtcttattaaaagcataactatctctatgatacttcattgattaattttgtacagcggtgatttattctctacgaccttatttcttagagaccgaattcgtcctagcggactctgattttaacgtgggataatgacccggaacaatgtcccacggacatccgtcatgaacagctgttaagcagatacgacgtacggaaaaccgatgtgtcctcacgacttttgaaactgtgaccgcggcaagatcccaatttcgagcttaagcggaaatgtctgagaggagaacaaaccacgtctgggtaaaggagcactccttgggaggtgtcacagacatatttatatcatgctcg

SEQ ID NO: 173755 - DNA, 920 bp, Arabidopsis thaliana
aaaaaaagaaggggcctgtttggggcccccctacgacccactatagggaacgctggtacgcctgcaggtaccggtccggtttttccgggtcgacccacccgttcggttcagtagagggacctgttctaccctcaaaagaggcttatgttgggaaagaactctatgacaagggctgcttagaaatttctctgggggaccaaaaaggaaacggcccctcccgggtcggggttccatccctaggaggcgagttggcctttttccccccggaacaaactacctttcccccttccttgagacccttgggcccccttctccacaacattttggcccccccccccctggggaatttggtatagcccccccttccttggcgggaataagcgggccccccttattcaaaaaggagttaaaagaaatggcccccccaaaatagcgttttccttttaaaccgtttttcgccccacccccatggagacttggtaatattttttgcgggggaaattccctcacaaacctttcgcccctccactgtgtcaaagggcgcccccccccctccgcgggataaccgcgcctcgcctaaatatatagttttcttcccccccccccgaggctgctttttttctcataaaaaaaaggccccccccacacatgtccccttttttctccccaaaaaaatatttttaaaaaacctctttttttttttttttccaaatgttcttttgtaagacaaccggccccccaaaaaaaaaaaagaggcgccctctaaaaaaccactctctcccgggcgcggtgttctttttttttttgcaccaaagaattacgggcgcctgttccaaagggagacgacaccccccccccccctatgcggggagaaccccttccgggggaaaaagagaaccgtctcttctctttattcccct

SEQ ID NO: 173756 - DNA, 619 bp, Arabidopsis thaliana
  unsure (1)..(619): unsure at all n locations
atacgactttattagggaaagctggtacgcctgcaggtaccggtccggaattcccgggtcgacccacgcgtccggccccaccaaatgcttcaatcctcttccactacacaaagaaacaacttaatccctttatacccttttagccaaaaccctcgctaaaagccaatcccctcatatgaaatacaaagtagaattgatctggctatatataaggaggttgagacgaattaagatctataccacaagaaagatagtaaacttaaaagtctgggaagggcaccgcgctgtgagaaagctcacacanacaaaggagcatggacgaaaagaagaggacgagaggctcgtcgcctacattaaagcccattggnaagggctggggagatctctcccaaaggcggcggacttcttcgctggggaaaagctgcccgctccggggatacactttttccggcctgaccttaggggggaaaccttcccggggaaaaaaacaacttatcttagagctccatagcccttttgggaaaaaagggccccttatggccggaaaattccgggaaaaacagataccgggataaaaacttttgggaacccccttatcccaaaaaggttataacaaggg

SEQ ID NO: 173757 - DNA, 867 bp, Arabidopsis thaliana
atagggaaacctggtccgcctgcaggtaccggtccggaatttccggggcgacccacgcctccggaaaataagcagcctcaaaggaccatgtttaggtgcagggtgagatattagagggtcttgttgctccgatcgtgagcagccagagctcaagaaattatggaaatgtcttgagagatctcccccaccttcctgtgaagggagctatcttgatctgggcactcactctaaaaaagatatgtgcttccccttgatcttaccaaaaacatcaaatgaaaccccttttaaaggatggtgggcccaagcttttcccccaagaacggggaatggttccgaaaataaacccactccaaaagggcggaccaattttttttaacaaaatcctgccatctccacctggaaatttttccacttttaaattcgagaaatggcccccttgaaaaagaaaaaccgctttccaccccattcaaagtttacctttttttcataaagcggggagattacacccggcaccctttttaataaagaggtgggcctggcccccagattaaggttgtacggttcccccaaaagagaggcccccccctggttgggccccttttagagagttctttgggtagtaaatgggccaccaaccaagggggggtcttttgtttaaaaccttttcgcccccgaaaatgggggcgggaaaaagggggggggttctttgccgcctttgaggcaaaaaacttctcccccaggaagaaaccttttgccgctgggccctttttcttttatagaggggggtagtacataacctctctttctaaaaaatagtcggccccatagaaagacaaaactctcggatcgggaggggcctcctcaaaa

SEQ ID NO: 173758 - DNA, 444 bp, Arabidopsis thaliana
tttatgacgtcaacgcacgcgtacgtaagcttggatcctctagagctgccgcccttggttaatccttttttttttctcatatccaacttttttggtgccctttatcaaatgttaaattattttcttttaataccgaaaacacaatttctgggggcccttatagcaaatggttaatttttgccgcgagaaaaactaaacgtgtttcttacccaaaggtggggttaaaggggttcattgatggcgctaaaaacaggggggggttctaaaaaccttttttttcctcggggagttataataaggtttaaaaatttatttttggggggaaaattttatatttttttatccccccccccctcccgaaaaaaaataaattttttttcgcgccagggaaccaaaaaaaactccttttatctctcactaaggttagaggatttttttgaaaaa

SEQ ID NO: 173759 - DNA, 711 bp, Arabidopsis thaliana
  unsure (1)..(711): unsure at all n locations
agggaaagctggtacgcctgcaggtaccggtccggaattcccgggtggcgttggaaaagaaagcaaatgcagaaaaagtcctggcggatctggagaatagagagagtcctcaactttctgatattgacaaggagggtattactaatgatgaaaagacatgctccggaaaattggcttgaaaatgaagcctttccttttactaggtagaagaggcgtctttgatggaacaatagagaacatgcatcttcactggaagtattagggaactttgtgaaagatcatttggaatgaatattagcattgaagctgctcacanagtagcagaaatcttggaagcagaaagtggtggcatactagttgctgtggagatggttagtaagggctatgcaatcattgtgtatcgtggaaagaattatgagcggcctcaatgtctacgacctcaaacacttctcagtaagagagaggcgctgaagcggtctgtggaggcacaacgtcgaaagtcattgaagctacatgtgctgaaactttccaacaatatcgaagaattgaaccgtcaattggtcgaggacagcgcaaccaatgaaacttggtcagatggggattcaagaacatgatggtcgaagaaaaacagaaaatcagcatactgaacctgagaaagcaagaganaaaattgaacttggctattcatctgacttatcagtccttcctctg

SEQ ID NO: 173760 - DNA, 564 bp, Arabidopsis thaliana
gcgagctctatacgacttacttagggaaagctggtacgcctgcaggtaccggtccggaattcccgggtcgacccacgcgtccggacaaagatccgggtacagtttctcttccgctctctgttaaggcgagctctcaagccagctctgaatcatagatggtagcacctagtggttgacctaagagctgtgattactgccttcattatctgtggagagatcagtggccagggcagttccccattatgggagatgttccaaacagtgtgtcacgccgccttatcctgcacatcattgacgataagactgtcactaatcctgggaccacccgtggagacaccctggaactgggcctggagatgctcatgatcttgctgaactacttcgctaactcctacgctttcacatgattcgggtatgattaagagcgctataaaatgctgcaagaccggatggcacaacggcaggcaagcttagcatctggcctgggcatctgcaggagtaattgcacataaaccttattctaggtgcttttcctgcagatttactgaagaacttggtcaaaaa

SEQ ID NO: 173761 - DNA, 193 bp, Arabidopsis thaliana
ctactctctatagggaaagctggtacgcctgcaggtaccggtccggaattcccgggtcgacccacgcgtccggctcctctgtaagagaacaggtgtctctttagctgccttatctctgggtcagagagaatttgactcccctgagagtcatacatgcctacaggaacacgctcttgagtttaaaaaccatcac

SEQ ID NO: 173762 - DNA, 960 bp, Arabidopsis thaliana
gactttattagggaaacctggtacgcctgcaggtaccggtccgcaattcccgggtcgacccacgcgtccggtctctttctacgtcgccaccgttcctaaagacgactctccgtctctcctactaaaagagcgatccaatgcgtaagctctccatccatgaatgcagaccaaaacacccggcctttaccatccttaccagaactaccatttcccgatcaaaggggagggtctatacaagcgttccactctttcggaattttatttcacggagattttctcccgccgcggcgtcatggggggaaattctcatttttcaccaagggacgggttattagccgggtcttgacccggggcttaacctaaaaacctttctggcttcagaagctccgaaaatggagaccccaagatcgttgataatccaaagggatttaaaattccccctggcgaaggcgggggctactttgggggtaataaggctggggttttgtggggtgatccaccccggggtttaaaaagggggtggaggccctacttgtattagaccattttgtggaccctgttttccgctctcttgaaacagaagaggccttagggcacccccaggagaagaaccggcgttaggcccggctccttaggagaaaaggaggtgtttcacccttggcggggaacaccgattaaacgcgcgcacacaaaaagaaaacggggggtgtctttgcccccctttttgggaaaccaccaaccaaccctgtggggtttaaagaaaaatttgttttattttgcgggggcaccagaccccttctataaaaaacaaaatcagagggcggcgcttataaaaaaaaaagggggggctttatgaacccccttccgccggcctccccacatcttttattgagataaaaatgcgccgccttcgcggatggggaaatcaccgctccacacaactcgactcctctcgaggga

SEQ ID NO: 173763 - DNA, 896 bp, Arabidopsis thaliana
agggaaacctggtacgcctgcaggtaccggtccggaattccgggtcggccacgcctccgagaactcttatgtttggaagggaaagcaggatcagtctctgagatatcacgattaactgggaacaagccgtacaatattctacctaggggaagaaatccccccggtgggccttctatacaaagaggttgttttttcagaatacgcagagagaccaggagcttgtcggggaagccctaaataaattaaccttttcttatgggagggttcttctcccccaaggggacctcttctaaaaagggaacaccccccacttttttcatattccaaaaattgggcccttttgaaaaggggttccagggacttatgggggtttcctttaataaaaacacaacattaaattttgggggagggcccttcttctgtcaaatctaacccttgaaaaagtttacccaatctctccccccaattataaggagaggcttccgatccattcgaaaagggcggggaaaaaacaacccccgggagataggtttctctccacaaacaaaaaaaatatggggggactcctttttttaactaaaacccctttgagagaggaataaaacacaagggggggttgttccctatatctgtgttacacaaaacaaaaaaacaccctctcccccactgaggcgtgggcgggcgggggtccctgtccgccctcttttcagaacaacacccagaaaacacccccctttctcgtttttattttctcgcggccccccctgacaaacgaacaaacgtctcagtgttcttgagatctctccttatgcaccaaaaaaaggtgcgcgcgtcttttgccaaatttcttcggcgctactatgagaattataatccgtcaagcgtggttatttctt

SEQ ID NO: 173764 - DNA, 463 bp, Arabidopsis thaliana
  unsure (1)..(463): unsure at all n locations
cggcacccctgcagggaccgggcccgaattcccgggtttgcccacgcgtgcggccacccgttccgtgagaagttgagttgaagaaccaaggtcgtggtccatgccattgacccaccagaccactacttaatgtgtcgcttttaagggtaaaaccacccattcttgcaaattctggggtcggcccaaccctggggttttttttgccgggggttgccgcaaaggtaccgggaccatgccaggcccgaaagaagcgccacttggttttccatgccaagaccagttccttggtcaaactggtggtggcctttaagggacctccttccaagaaggccccgnctggaatggtcaaccaaaggaggtcgtgtaaagggattgaggattcaaaccggcaagtgggtacctttccggtaatccctcctaacctgccccggaaggtcttaaaaaagggacttttcttagggtt

SEQ ID NO: 173765 - DNA, 522 bp, Arabidopsis thaliana
  unsure (1)..(522): unsure at all n locations
ctaaacttggatcctctagagcgttcgcccttttggtttttttttttaataaaaaacatatannncatcatcattatccatatcccaccacatttggaacattaaattctctctattattcacaagagattatccacagcaaacaaaaccccacgctctcattttattccttcttaataaagagaaaattctttctttggtggtgggacacctatatccaggaggttttttaaaaaaaaaaaacccccccccccccccggtttatttttccccccccccgtttaacccataccaacctattttttagggtcaacaaaaaccccctcctatttttcttctccaaacaccccccccccaatctaccccccaaagatctttctcctagccccccttctaaaaacaaaacccaagcacgtgcccccgcccacaacactcctctacaccccttcctctcctcgttttacgcgctaataatacacaaacccaacttctccactttctcccctccctcctttccctaca

SEQ ID NO: 173766 - DNA, 452 bp, Arabidopsis thaliana
tgacgtcgactgcacgcgtacgtaagcttggatcctctagagcggtcgccctttggtttttttttttttttttttttatattaaaggggtctttatattaatatcatccgggcagtttgattagtaaatcaaagatacaacatttttctgaaccctttaaacataaaaaactgggatgatacaaaaacaaatggaaaacatgaggaattttttccggggggtgtactaaccccccgcggtggtttaaaaaataaagcgcgcctcttaatgagggttaacccccccatgggcctaggcctcaggggcaggggcctctttggggggcgaggggttaacaggggcaaaaccttttctcgtacccttttactttccaggagccaaaaaagggggggtttaaaaaaccccccttcgccatatctacaaaccgccggggccgggtcttacgggggagg

SEQ ID NO: 173767 - DNA, 501 bp, Arabidopsis thaliana
  unsure (1)..(501): unsure at all n locations
atgacgtcgaacgcacgcgtacgtaagcttggatcctctagagcggtcgcccttttgtttttttctttttttttcataaagaaccaaacttttcataaaaagaggagaactttggagatgtttttaacaacaaaagaggcggaccatcaaagcttttcaaaaaacaaattaaaattccgggggagagacacccggggaaaaaccccatttttttaggaagangggaagagcctccccaaacccatctaaaaatttccggcgtcccaaaaacttatttttccccccgcgggggcgggagagacgcggtatctcttcccgggccttttttcttgaggttgcgcgcgcgcggcccccccccccaaaaggcggggccgggcccccttccttatagccggcgtccgcccccctcgcgcacaaaccccgaaggggccccggcttgcgcaacacgccgaaacaaccattccgccctcggccaacaagcccccccctccccttctcccc

SEQ ID NO: 173768 - DNA, 484 bp, Arabidopsis thaliana
  unsure (1)..(484): unsure at all n locations
cgattatattaggaacaacttagaagactatgacgtcgcacgcacgcgtacgtaagcttggatcctctagagcggtcgcccttttttttttttttttttttttttttttaaaaaaaggagtccagaaatgttttaatctcccctcgtctatgtttatgggtccccccttattgaaaattaaattttgatttaagaaaactttntttgaaagaggggaataaaaaaaaacccccaaagggaaggggggggggtcccctccctgngtaaaaacgggatgggaaattccccccccccggggtgggggagggccccccatttgttttttaataaaaattccccccccccaaaattttttttaaaaaaaaaagcgttttttataacccactttacgggggggaaaaaacgcgggggctcatacaaaaaaaaaaccggggtgcgtatcgccccaaacacaaatcttcttggccctgttaagaaaaaaaaa

SEQ ID NO: 173769 - DNA, 352 bp, Arabidopsis thaliana
  unsure (1)..(352): unsure at all n locations
ttcttcttcaagtgaaaaatggcccgtggtgaggatatccagccactttgtttgngacattttttctgnggtgttgaaggccgccccngctggcgatgatgccccgagagcagagcccccaaggtttggtggccgacctatgcacactggacgcatcggacggcctggcccacaaagatgctccccgaccgccaccaagagcacctccagagaggcacccccacaccgcagctccgcacccccgatgccacgcccacgcaaccagcaccgaccgcccaccagcaacacacggccaccgaactacacggcgccacgtacgccccacagaacccgacgcgacacctcccccaaa

SEQ ID NO: 173770 - DNA, 508 bp, Arabidopsis thaliana
actatagaagagttatgacgtcgcctgcacgcgtacgtaagcttggatcctctagagcggtcgccctttgggttttgtcttttttttttttttttttttttttttttttttttttttttttttttttttaacccaaaaaaaaattatgggcccattcctcatttttttaaattttttttttggcccttgaaaacatgttaacatacagtttatagcacatctttttttggggggggtttgaaaaaaattttcccctttaaacacaggttaagctcacatttggtttttttttttttccaaaaaaaaaaaatttgttttttggtggggggggggttccaaactaacggggggtggggttgttgttccaatagcaggaccccaacggggcctttggttttacattggacgaagggggcccggggggtggcccccccctgcggttccttggggggtttccaaaaaaaaattcccctggggggggagaagatttggggcctttttttgtttt

SEQ ID NO: 173771 - DNA, 487 bp, Arabidopsis thaliana
atgacgtcgcctgcacgcgtacgtaagcttggatcctctagagcggtcgccctttgggttttttctttataaacaacaccacataaaatcatatggggaggtgaaggcagtacaatatctaccaaacttacaatcttttgtattatataaaagacagactctaaccaaatccaaacctaaaaagctctcactaaagatatactatttttttatgggggggtgggaaacaacaggggaatataacaaaaaaatcaccctagttagctctccactaattagaccccaccccctcttccaaagggatattttgctcaggaaacttcccctcaccaagcaaaaaaattccggcaggaggcgcggccgggaccaccaccaccgggaaggggttttgacttttctcccctttccccccacggcaaaaaaatcccacgtttattgggcccagccggtaatttccctggggcccaaatgccccggaaaaaccccc

SEQ ID NO: 173772 - DNA, 500 bp, Arabidopsis thaliana
  unsure (1)..(500): unsure at all n locations
aggtgcaactatagnnagactatgacgtcgcctgcacgcgtacgctagcttggatcctctagagcggccgccctttttttttttttttttttttttttttnaaaacagaaaacgcactttggagggattaaaaaaaactgccaaaaacatattcaactctcgttattcttgtggcttttcacaagaaagagggttcatatcaaaagggctctcatttacaagagaagttttttcaggggggggacccctcaaagtacgtcttttaagatttttcacagatcctctggaccgttgatgccccccgccccgcggaagcgtgggcccacccgcgaaatccggcccgggaccttcaggcgtaccatctttccttataggggcccgcactaagcctggccggcctcacggcactaccgtggccccccccgaaccaccccatcccccccccctcccaccccatgagccccgccgcacgcgccacccgctgctgcgtccggcgcccc

SEQ ID NO: 173773 - DNA, 503 bp, Arabidopsis thaliana
tatagaagatttatgacgtcgcacgcacgcgtacgtaagcttggatcctctagagcgttcgcccttttttttttttcttttttttttttttttaaaaaaaaaacttattttaacaatttgggaagggttgccccctccattatcatcattacatatatttaaaaagaaataataacttaagaaggtgcgttacatttcacatgggagccccatcaaatttatttttgggggggggggattgaacattcccctttgaaaaaaatataacaccgcacaaaggaagagcgggacggaaaaaacttttaaaaactctcccacccccctcgaaaaaaaaagggaatttttgataaaaagggggtgaaaaaaaaccgcctgcctgatacgagaatcgtgcgggtgtttcttattttttttttttgggggggggcccgcgtttccccctctgttttcctgcgaaaaaactcccccaaaacaacgtgggagcccctctcgtttacaactcc

SEQ ID NO: 173774 - DNA, 491 bp, Arabidopsis thaliana
actatagaagagttatgacgtcgcctgcacgcgtacgtaagcttggatcctctagagcggtcgccctttggttttttttttttttttttggtcgaacatccatgactcaagagcgggcggacatgctttacataaaagaaatcgaccatgttttaacagaaagagacaaaccgggacgaaacatgttttggattaccggaaggaccctctttggaaaaaccctttggggcggggaaatttaccacctagaaaggcccctaaaatactcccacaacattggcgggcggaacaataaggttcttggggggttaaacattttgaaaataaaccttttttggcgttttcttctccaccaggggggcacggttcattccaagggggggggccgggtttccaaagaatttaagccgggagggcccccgccttttttggttcccggccccccaaaaaaagagtttgccctctccgagaacacccccttaggggggttg

SEQ ID NO: 173775 - DNA, 456 bp, Arabidopsis thaliana
ggaacacactatagaagattatgacgtcgaacgcacgcgtacgtaagcttggatcctctagagcggtcgcccttttgttttttttttttttaaagaaatggacaattatatatgaataaaagttgatacaaggcctttctttagctacattccgatcaagggcaaaacaaaaaactacatactgtatatagagaaacgtggaagataggactttgccttgacaactaattaattgggggtgagagctgtgacaattcgatttctcagagagaaacactttaaggtagactgagaagtgcaatcagtttactcaccttcccaacctgattgccgagctctcttctcccacaaagaaataattttcctctccttgataacaaagcttcagctctctctctagctgataacaaatctgaggggcgggattgcacttctcagcctcttttggaactgaaa

SEQ ID NO: 173776 - DNA, 451 bp, Arabidopsis thaliana
cttagaagattatgacgtcgcctgcacgcgtacgtaagcttggatcctctagagcggtcgccctttttttttttttttgacctaaacgtttttgtatagttttattcagaacaatttagaagaaagaattaatcaagaaaaatattagcgagaggaagaaggagcttctcaagaacttgaccctcaattccagaattacacaaattcatcatcatcatcatcttcatgggtggggattcttggtttattctggaaccttatatgcatcatgtgtcacttcagacaaaacaaccctggaaacaaactatggggttttttctgaacagttttggaccgtttcttgggccgacgccgggcctcggaaccaccatcccaatgaaatcttctcccatctccttttcgagagctaataaaagaacaaggacgctttttttccgtttgaaccactccg

SEQ ID NO: 173777 - DNA, 487 bp, Arabidopsis thaliana
tgacgtcaactgcacgcgtacgtaagcttggatcctctagagggttgccctttttttttttttcttaatatatatatatatatatggagagaaagaagttgtttcaatacaattttacaaaagtaacaaattatatgaatcactcaatctgaccggaccaaaccccttggatcttaacattttttgggaccttaacacccaagttttttttcggggggtgaagactctcgaacactccgatcacttaaactgtctcccggttggtctttgggatcttcaaagggatttctccgacggaagcccgccgggttttttaacgttttcccttggaaaagttcttccttgccttctctggctgggggagggaaggccccttgttttttcccacccagggggatcacacccccaccttttggggcccaaaagggaaccccccacggccccaatgagaaacaaaaaactctgcccgtgaatcttttgggttttc

SEQ ID NO: 173778 - DNA, 458 bp, Arabidopsis thaliana
  unsure (1)..(458): unsure at all n locations
tatgacgtcgcctgcacgcgtacgtaagcttggatcctctagagcggtcgcccttggggtttgtgcttttttttttttttttttntaaaaaagataatcaaaccttggtaatagaaacagaagtttctaacaagagctcttcatggcaatagcagctaaaagtaaaaggcgttacatatgtgtttgaagatcgttcccatcaaaacatttttgattaggcggctgggctcctactttcggtggccctttatctccgggcccctctggatatgatctaatatcaaaagcctgggccctggggggatgttcccatcttttcagcgccctataagggaacaagggcagtggggaaccaaaaaaaacccctcttttggagtttttttggttttccccaaccccacctaaatagcgtggccttcccttgaaaaagagggtcctcccccccgcgtaaaaaaatc

SEQ ID NO: 173779 - DNA, 502 bp, Arabidopsis thaliana
actatcagaagattatgacgtcgcctgcacgcgtacgtaagcttggatcctctagagcgtccgccctttggttttttcttttttttttttgggcctcttccagttcttttcccttttgcttgataatcttatcgctttcatttgccctatcttctctctgttttacaatcatttgagatttagcaactctttcttctccttcttgcaactttctttcccattctacgcaaggcctccctctgctttgacaaagttgcctcgtctgcttctcgttcagcaatgtaggaaaaccgctccctttgaagagaactttcccgagcttccacttcctttgccttcctctccacatctgaactctttctactaacttcagcaagttttgcatcaacagcacgcagctttgcctcaacttcaagagatttttcttcaacacttctaaccaatgcatttgcctcagtcaactttgaatcggctgaaatttgatctctgcattttcagcgcg

SEQ ID NO: 173780 - DNA, 489 bp, Arabidopsis thaliana
ttctatacgactcatattgggaaagctggtacgcctgcaggtaccggtccggaattcccgggtcgacccacgcgtccgcccacgcgtagggacatgctttaccctcaaaagtggcttatgttctctaactatctctatgacatggcctgctttgaaatctctctgggtgatacaattggaatcggcactccaggacatgaggttgcaatgctcgtaaccccgatgacaggtgtgccggcgaacaagatgcctgttcactaccatgatacctatggcctagctcttgcaaacatattggtgtatctccagatggtaatacgcatagagaactcatcacttgtcggattaggcggctgcacatatgcagaaggagcttcaagaaacgaatcctcagatgatgaggtaaacctgtagaacggtttaggcttgcatactaatgccgacttgggaaaccttaaggctgctggaaattttattagcaaccatctc

SEQ ID NO: 173781 - DNA, 498 bp, Arabidopsis thaliana
cactatagaagagttatgacgtcgcctgcacgcgtacgtaagcttggatcctctagagcggtcgccctttggtttttttctttttttttttttttttttttttttttttttttttttttttttgaaaactactgaaacatgttttttttatagtactccagtcttatggggggatcacatatttgggggaaacaaaaacctgaaaaatggcatcccccattttcttaacatacgtgggaacaaattccgagagcttaggatctgaaaagttttttatcacatatactttttttaaacaagctttttgagttgttcaattttggcgaagagctcaggatgcataagggcttttgcttccttaactaaactcccttttgtggggaaaggatacccttccaacaccgttttaataaaacctctgaaaatgctcaggggtcgggtttaagtaatctacataagccctttggagcttcgccccgggggtaaaagccttttgga

SEQ ID NO: 173782 - DNA, 456 bp, Arabidopsis thaliana
ctaatacgactcactatttggaaagctgggacgcctgcaggtaccggtccggaattcccgggtcgacccacgcgttcggcgaaagctctatcttcttcaaagaaaatagggttcagtggtattccaatctctatggtcctgtgcactttctagctttcgctctgtgaaattcggagcccgcttagactctctctctgtgtttcgcccgcgatcatgtgcatgtgcacttcccggaggcttcccatccgagaaggagaggtatatgaacctctcagagagagaagacacctcgagatattggtatctcacactgtgtgtgggaggagataaagagtgtgtgtactctaagagagagagaggaagatatgtgtctctgagagagtgtgtgtgtgtatatcacacagaaaagagactcagagttgtgagaagaccttatgaggtgttttatagggtgag

SEQ ID NO: 173783 - DNA, 464 bp, Arabidopsis thaliana
gacgtcgactgcacgcgtacgtaagcttggatcctctagagcggtcgcccttttgtttttttctttttggttgaagaagatggcattattaacaaaagtttaaatatccaaaataggagtcacccaaaaacaagataatctccgatgagtaatggaagcctacaaaagaagaagaagaatctcataacaagggggaggctttgtttttctcaggggggacccatgtccttaagagcattgatctgttcctctcccataggtgaattccactcacccctacattttttccataaaaaaaccattttttgttggggggacaaaagggtcttttttggggggctaaaggtctttctttgcccctcccgttaaaaccaaaaaaagggacttttcctttttaaaaaatggccaatccgcgttataacacaggccgggggggagggaaggaaaacatataatggggggaa

SEQ ID NO: 173784 - DNA, 466 bp, Arabidopsis thaliana
actactagaagattatgacgtcgactgcacgcgtacgtaagcttggatcctctagagcggtcgccctttgttttttttttttttttttttttttttttttttttttttttttccccccacttaaagcaaggaaaatggattgatataacctttcatataaaacaaaaatcttcttttttttctttccggtataaaagcccaataagagtcacacacataagctttcacacggttcccctgaaacactaaaaaataccccgataaatttaccctatggagggatttacaaagtaaaacttgttgttttacttataaaacttcatcacacctccaacttgggggggaaacacagggcaggtagggacaccaagggcggggatcattgccgttttctcctaaaaatagcataaacggggccaccacaaaccgggaaatcaataaaaccaaagatgggacccacattggg

SEQ ID NO: 173785 - DNA, 494 bp, Arabidopsis thaliana
tataccactcactattggaaagctgggacccctgcaggtaccggtcccgaattcccgggtcgaccccagccttccgaattccgaccgggaagagagagatccattttggtggccgaaattaagatctggaaaacaaaatggtcgccaaagataccaaggattcgaagccaaagccgggattcgaattcaattcgaccacccgcttttgccggaagccttgtcttctcttcctgaattggccaatacccctttgctcctccggtgacacttcggctttgttccatatgttcgttgtggttaccgttgcggttttcgtcgtggcaatgttcgttaataactgtccaaatcatttcgagtctcaccgtctcagaggtcactgtgtcgccaagtttctcggtaaactctcctttgagcctctccgaactaatcctctctttgggccatcttctcacactttggagaatttaggagcacttgagtggaccaaatttgtg

SEQ ID NO: 173786 - DNA, 350 bp, Arabidopsis thaliana
ctctagaagagttatgacgtcgactgcacgcgtacgtaagcttggatcctctagagcggtcgccctttggtttaaattttttttttttttttttttttttttttttttttctccaaaaaccctaataccattttataaccaaaaatacatttttatataattcgaccgaccaaacaaaacgacagattcaaggggttactcattgacaagtttaacccatcctcatcgggggggggagacaaataacaaacaaataaaccttccaactaaagtaattaagggtttttaacaatccctcattatataatctcccacgcctccggggacgggggggtcaacccggaaattcc

SEQ ID NO: 173787 - DNA, 511 bp, Arabidopsis thaliana
  unsure (1)..(511): unsure at all n locations
ttaggtacacactantagaaagttatgacgtcgcctgcacgcgtacgtaagcttggatcctctagagcggccgcccttttttttttttttttttttttttttttttttttttttttttttttttttttttttttttttttttttttttttttttaaaagggaaacctgattttttttccaattttttttttaaaaaaaccccaaaaaaatttttttttttttaaaaaaaaaattttccgggggggaaccacaaaataaaaaacaagggtcccccccaacttaattccaaatttttgaaacatttttaaaaatcactggctttttgggtttaaaaaaaaaaactttggcccctggcttttttttttttcccaaaaaaacccccacccctcccgggacccgtgggtcaaccccgaaattcccgacccgtccctgggggggtaccaatttttcttatagggagtcgaattaaagcttggggaaaacaggggaatagctttttcctggggaaaaa

SEQ ID NO: 173788 - DNA, 498 bp, Arabidopsis thaliana
  unsure (1)..(498): unsure at all n locations
gaagagctttgacgtcgcatgcacgcgtacgtaagcttggatcctctagagcggccgcctctacggccacgtccagccttagccatgagcttcctgtcagcacctgaaacccatgttgggattccggtctcgtcaatgtcttcaagaagacgacgagcaggaccatctgggtcggccacgggagattcatcaacaacaggaggggctccgggagtggggattccgcctgtcatgttcttcaagtcgtcaaccttgttgttaatcttggccatggcgctaacgacagtgtggaagatgtcaatagcgttggtagtgagaatcttggagtttgcaatgccctcaccaatcgcctttcttaaatcatcttcttcgatatcgncaagacaatcagtttggtaattgtaaacaccgattaaccattgtttgagctggtcgattttgctcccgatctggctaagatcttcacccatttcttcaataatggtagcgagatcctca

SEQ ID NO: 173789 - DNA, 444 bp, Arabidopsis thaliana
atgataccctatctctaatacgactcactatttggaaagctggtacccctgcaggtacccgtcccgaattcccgggtcgacccaagcctgccgccacgccttcgaaagaaaagggtatcaagattgccaagaaagattgggagaagctgcatctgcacattggttctcataaccacctccctactggtggtggcttaacatcttctgctggtgggtttgcttgcttaagttttgctcttgcccaggtgatgaatgtgaatgaagatcccagcccactttctgctcttgcaaggcgagggtcaagaagtgcttgcccgtaattatttgggggatttgtccagtggaatattggaaaccaagaagattgaagtgacactgttgcaattcaactggtagataaatagccctgggaagaactctggatcaatattgcgcggggtaggt

SEQ ID NO: 173790 - DNA, 507 bp, Arabidopsis thaliana
ggaaccactatagaagagttatgacgtcgcctgcacgcgtacgtaagcttggatcctctagagcggtcgccctttggttttttttttgttttttttaataagtatgtttttaataatattaaaacaacctaccaaatactggtcgaaacataaaaaccaaaaaaacatgagtgattttttttttttgagagaaaagcgaaagccacggggtctcaaacggtatgtcgttactttgggggggacatgtacaattgtgtaggggatgccttctatttccttcgcttgttctcgcacggatgctttattcttttttttagccattaccaaactagtctaatccaatataacctggttttttaatcgataaatcattggtaacaaactatgtggagtctatttaatctaaaggaacatttaaattctatttcttattaaggaaaaaatatttttttttttgagcgtttttacaaaggaaaaatttttacttgaggtgttataaaaatatgg

SEQ ID NO: 173791 - DNA, 459 bp, Arabidopsis thaliana
gaagagttatgacgtcgaacgcacgcgtacgtaagcttggatcctctagagcggtcgcccttttttttttttcttgttttggtttgtgaaacaaatattacaaaatgtgtggatttgtatgaacagtttacaacgagaagttgttgtgtaaattgggctcttttcttcagaattcttgccacccaaggaatcgttagtcacttttttgccgccggttttgtgagggatcaaatatgtataaaaacatacaaaaacgctactactcgtgaatcttctgcaatgctatttcttggcctttttaagatacttcttgtgaagtttcattgcaccagtacaggcttttttagcatccaagtttccggttatgtcgtttaagatctttacaacgtcatcaagtcctcgagctttggacattaacctagaactcttggttttcaaaaccctaccccttaaaaaaac

SEQ ID NO: 173792 - DNA, 456 bp, Arabidopsis thaliana
gaaggcgggaccccctgcaggaaccggcccggaattcccgggtcgacccacgcgtccgttctgctgttataacacatgaattattatgggatgaaacgggtataaaaatgagcaattctttaggtaactaaatgtgcccacgttgggtctttgaaggagggaaaagttcataggacgcacctgcttacggagctgatgttattcttttttgggttggtactgtagattacacaggggatgtactaataggccctcagattcttactcatatgtctactatatataggaagtctaggtgaacgttacagatacctattgagagatcttcatgcatcggagagtagataatgtctgctcataccacgatttacctatcatggatcagcatgctctcttatctgttgagattgttgtgaagaattacatgactgttacaagaactaccgagtctttaaa

SEQ ID NO: 173793 - DNA, 504 bp, Arabidopsis thaliana
cttttttttattcaactcatattgggaaggctggaccgcctgcaggtaccggtccggaattcccgggtcgacccacgcgtccggttgaagagaaagagataagctttcacatcaatttttgaaggcgcgaaatggggaatacttcatcgatgctgactcagtacgacatcgaagaagttcagagtcattgtcatgatctatttgagcagcaggagattttatctctgtatcaacggttttgccagttagatcgaaacgcaaaaggatttatatctgctgatgagtttctctctgtgcctgagtttgcgatgaatccactctctcagaggctgcttaagatggttgatggtttgaactttaaggattttgttgctttcttgtctgcgtttagtgccaaggctagtctaagacagaaagttcaattgatctttaaagtctatgattcggactgcaacgggaaggtctcttttaaagatatcatggaagtgttgcgtgacttatcgg

SEQ ID NO: 173794 - DNA, 375 bp, Arabidopsis thaliana
  unsure (1)..(375): unsure at all n locations
gatacgcctagcttttattcgactcacttatttggaaagctgggacccctgccggtaccggtcccgaattcccgggttgaaccaagcgttcggccaagccttcgttaacatttttttttttctttggcttctctttggcctaacgagaatttgacttacccgaatggcctcctttccgaccgggaacccattttgggtttgaaaaccattactggctctgngcttaacccttccttggtctttaattcctcttcccaattactttaactttccttggcgaaagcttttgaaacttcttggagcaagccaccaaaaccacttaattggtgcttccaagaataccttttttaaccaatcccttgctgaatttttccc

SEQ ID NO: 173795 - DNA, 513 bp, Arabidopsis thaliana
ttaggtacacactatagaagagttatgacgtcgcctgcacgcgtacgtaagcttggatcctctagagcggtcgcccttggggttttttttttttttttttttttttttttttttttttttataaaaagaaacatcacaggccataacaagattaagaacaaaagtcccgaaacatcaaccagatttgtcaaatacaagcagagaaaaaaactacaactgggaggtgaggggtttcttttagggaaaagaaaagtcgcaaacgactaaattgtttttgtttttaaagcagttataactaaattattctcaggactcttcctcctggggatattcaccttcttcctcatcctgggaggcacctttttcatccgcaggtgcatcttggtattggtgggactctgacacaagatcggtcatgttgctctcccgttctgggaattccatttcgcccattccaattttgggacgcggggggcacccgggaattccggaccgggacctggaggggtacca

SEQ ID NO: 173796 - DNA, 493 bp, Arabidopsis thaliana
tgacgtcgcctgcacgcgtacgtaagcttggatcctctagagcggtcgccctttttttttttttttatcaaaaggaaaaacctttattatgtggattattatatctataaagaaaggttcgcaggttaacatacgctaaaatgtaaaccagaattctaccctagaaacccgaaaaagctttgatttttatgattttcccataaagtttttttctagggaggcctcccgcttttcattatgcaccaaaaaaatttgaccaccctgtttccccgccaaagcccccccccgctcatttcccccaaaagcacccgccacgcccgccatatctcatccctggggcggccccaaagcacggctcccacccccaaccggccccccccgttcgtccaacgtcgctctccatcctgcggccccgccaccccgcccgttttgggcgaaaccccgtatccccgcggcgccttccggctggagcgcgccccttacggacaccccc

SEQ ID NO: 173797 - DNA, 489 bp, Arabidopsis thaliana
  unsure (1)..(489): unsure at all n locations
gcgggcccgcctgcaggtaccggnccggaattcccgggtcgacccacgcgtccggtctctttttccgccaccaccgttcctaatacgtgtgcggttttcttataatggcgagcaatcgaagctccaatcatgaatccatctataacaccgcgtctttacacatgcttaccagaactaccaggccccgatcaactctcagtctctatactagctgtcgactcctccggaatatgtgattggcggacgagtgtctcaagcagagtgaatcatggggagaaaatgtcacttggtacacagggcccggttatttagccggctctgaacacggtgcttcagctgggatcttctgtgagttcaagagttgcgaaaatggagacaccacgaagctgaaaatcaaccggattgtgaattcctctggacaggcaggtcgaacttggggccatagggatgagattggtggtttgctctacgctggtatcgataggggcg

SEQ ID NO: 173798 - DNA, 504 bp, Arabidopsis thaliana
  unsure (1)..(504): unsure at all n locations
atttaggaccacactatagaagatctatgacgtcgcctgcacgcgtacgtaagcttggatcctctagagcgtccgcccttttggtttttttttttaacataaaanaaacatcacattaatatttctaaaatgttacttaacactttgggttataatatctaggtgcgttttatagcctcctcaccgaatatgcacataaaacctagctagataaggggtgccctcctaagggacacaaaggtgtggggacagcattccataaaggtgggaaggattttttttcagacagaagggaatatttggtcggggtgaacggaaaccatacaactcttttgttctcggggcgttcttgaaagacaataatctccccaccagggttacctgggtttttcctgaacaaacatttttcttgggaggggggtgtccaacaagaagcccaccctcctcccaccaaggccttggaaagaaagggcccatttcccctcggcctaaaaccattttccc

SEQ ID NO: 173799 - DNA, 500 bp, Arabidopsis thaliana
  unsure (1)..(500): unsure at all n locations
ctatagaagattatgacgtcgcctgcacgcgtacgtaagcttggatcctctagagcggtcgccctttttttttttttttaatccttaaatgtctgatttcaacattcccagagagaaatctacaataacatatgtacagcaatcacattttgtatgctgctgcttcaaagactaatagtgtatatcatccacgagtcaaatcaaaatcagtgagtgggtttctgcaaatgtgaagtgatctgccagagcctgagcctgaaccgggccacccccttattccctgagaagagaagttctgtggcgtctgctgacccgcagatgctgctggttcagctgcactacccggngtggnctccatttcactattggtgccctcttcatttggttccttttcttgtctgaagggcttgttattggtattatgagtctttgcccttgctccgtatacaaaactacatgccaccacctgaacaaggttggctgcgataagcatgtcaact

SEQ ID NO: 173800 - DNA, 375 bp, Arabidopsis thaliana
tatacgactcactataggaaagctggtacccctgcaggtaccggtccggaattcccgggtcgacccacgcgttcggtgggaaccaagaaaaccaaattattattaaaaacccttatttcccggttcaatttttttttttacgctttttttgggattttagtatgggagccacgggggaaggattaagtagtacttttggtaccaccaagggtgatgaaacctatgaattcttaacgccttcatgggttgaattccgtaatggaaaaaatggagaagaatcttggccaaccaaacctttggttcaattcggcctaaacttggcttctttttccttgggttcttaaattaaagccagggaaatcgtccaaggaaaag

SEQ ID NO: 173801 - DNA, 485 bp, Arabidopsis thaliana
  unsure (1)..(485): unsure at all n locations
cgacaccgccggcaggaaccggnccggaattcccgggtcgacccacgcgtccgcccacgcgtccgaggacaccgactctgaggaagagctcaaggaagcattccgggttttcgacaaggaccagaacggtttcatctcagcagctgagctccgccatgtgatgacaaaccttggtgagaagcttactgatgaagaagtctatgagatgatcaaggaagctgatgttgatggtgatggtcagattaactacgaagagtttgttaaggtcatgatggctaagtgatgctgttttagaaccaaacaatggctctataaacttggtttgcatctcttacatataaattcttatgttatgttctataatttttattcatgggactcgaggtatgttttctgcttgttaagacgcgaatgttttatccctttatgctctattttgcgtctgaacattttcaaaagtcttttttttttgttggcttgctcct

SEQ ID NO: 173802 - DNA, 551 bp, Arabidopsis thaliana
  unsure (1)..(551): unsure at all n locations
ttttaggtcacaccttacnaagattatgacgtcgccatgcacgcgtacgtaagcttggatcctctagagcggccgcccttggggttttgtttttttaaaaaaaanaannccccccccaaaaagggaggttccccctttttaaaggattattaaaatcaccggcccccccttggggttctttaaagtgcaagagggcctttggtttcccaaaaaaagtattttgagagccctcctattttgggggtgtagcgccccccctttttttttttttaaaaaaaaacacacttcttncccctctatcccccccccccccataaaaaaaaatttttcttataaaacacaaacaaaacctctcaaaccctctctcccctacccccttcttttccccctcaccctccacccccaactcccccacaccttttttttctttcccatccctacccccccctcacacccccccccccctttatttcccctctcccccccctatccacccccaccacaactctttcccctctccctctcccccccccttttcttatacccccccc

SEQ ID NO: 173803 - DNA, 245 bp, Arabidopsis thaliana
  unsure (1)..(245): unsure at all n locations
ctatacgactcatatatggaaagctggacgcctgcagtaccggtccggaattccgggtcgaccacgcgtncgctgacttctgtctattaaccggcgatggactcgccgcctatgactgccgtggtgatatcatcttcagggtagagttttatggacctgacacatgagataacgatgagattgtccttattgactcgaaccgctaagtgtccacttacccgttaacgaaagagaccaactctaca

SEQ ID NO: 173804 - DNA, 875 bp, Arabidopsis thaliana
gatttttcaagccaatttttttcagtgtcttccctgtgttatatttacaaagtgtgaaaatataataaaatctcccttggtaatcacaaatcccgtagactaaataaaaaagacctccgttttttatttcctgcggtagagtaattaaaataattttcctgctaagaccaaagccattttttttttttcttttttaattaacgaaatatctaaattttttatattgccccattaggccaattgcctgattcaccctaaatcttaattttatatatttctaaaaataaccttttatttttttccttccaaaaaaaacaccgcgtggccggttttattaacagaaaaatacttttttccccccaaaacttgtttttcctatccccccttcccttttttttaacccaccagtcgaagaaacaaaaccccccaacccactctaaccctgtttttacaaatcttgcaaaaagggaaatattcccccccaaaattaaccaattctcggaaccctcccccctcccccaaaaaaaactttaaacccaaaaaacctccctttaaaaaacccctttctgggccataaatacaatcccaccaagagactctctcccccccctttataaaattgttcgcgagaaacaaaaaaaaaacccccccaaacctttgcttttaaaatggtaccaatctctaaaagagaaccctctaaagaaacctttttttccaaaagattacacttaaaaaaacgcgtccctataaaaaacttttttcccaggggcccttttcaacaatttgtcggtttcttcctcccccaaaaaaaaacgctactggctcccctccttcagtctttgaagcacctagaaaggacggtggttttcctcaaa

SEQ ID NO: 173805 - DNA, 506 bp, Arabidopsis thaliana
gacactatagaagttctatgacgtcgcatgcaccgcgttccttagcctggattcttttgagcgggccgccctttgttttttttttttttttttttttttttttttttttttaaaaacccaacccgaaaaatggttgcccttttaggggtttgtttccaaaattggtttaattccaaaggtggccccccaaggttaaaaccttaaaaaaccattttgtccccccggggaggccaaggaagttttcctttataagaaaatggatgggcaaatttcgccagtttaaacctgccgaaaacccttatccttgaccagattgggaaaatcccccagtcttaggctgatttaagttttttttgggttctggtggactagcggaaaaggcggggaactgattttttaggcccttttctttcaggctttattctccgataaaactccctgatttaacagggtctgataggccctgattttttcctttccgccataacaactggagctgtttcaac

SEQ ID NO: 173806 - DNA, 873 bp, Arabidopsis thaliana
  unsure (1)..(873): unsure at all n locations
cttactatagggaaagctggtacgcctgcaggtaccggtccggaattcccgggtcgacccacggcgtgcgctttgcttataaaccccaatcttcttcttcgagagagagagtgaaagagaagaaaacgacaatgggacacgccacgagtctctctcacttcctcatcctcttttnctccaggttctctcggctggggtctctcactagggggggtctccaaacccacctgtctctcaggatatttttcttccatttcgggcaccggaaaagggttccgatgctgttggctccgtcccacagaagaacctttctcttctgtaaagaacgggtggtctctggtgtccacctacgggtcagttacttaggcactttgtgggggttataaaaactggggcgtcttaaagatcatataaacacttttttcatggaaaccatccgcgataccctttctatgaaccacgaactagggagggcacaagggtccggagcttttttttagatgggaaatggtccagtacaaaaaatcccccggggggggtagaaatgctgggcgtttgttactatcccggagggggcggggattccctttgttanctattttgccctggggggggcccaaaccccattaacttgccggaattcgccgggggaatttttttggggaaaaaggaaaatttggggggcggggtttttttaaaaccaaccctttctcccagggggggtggtttttttttgggggttttaaggagcaagtgccctttaagggcggatattcctgctaaaattgtggggaaataaggggaaaaactttggggtttataaagggaaacataaaaattttatttatttttggaaaaaaggggggggggcat

SEQ ID NO: 173807 - DNA, 488 bp, Arabidopsis thaliana
actatgacgtcgcatgcacgccgtacgtagcttggatcctctagagcggccggccctttttttttttttttttttttttccttttttttttttttttttttttttttttttttttttttttttttttttttttttttttttttggggaaattggggtttttttttttttttcggaaaatttttttttccggatttccctgggaaggggaaatttgcaaatcccaaaaatgcctttccccaaaacaggtttttttaaaaaaaaaagaaaaaattccaaacccccctttccaagggtttttttttttttttgaaaaccccaaaacttttttttgacccccgcccttaaactttcccctttcctttgcctttgtaaaaacccttgttgtgggaacccccaaattgttcgcctgaatagaagggttttttgtgggtgttccccccggaaaaatgccccccaaacttggggctttggttaaaattcaagggaa

SEQ ID NO: 173808 - DNA, 481 bp, Arabidopsis thaliana
  unsure (1)..(481): unsure at all n locations
ttgacgtccctatgcacccttccgtaaccttgaatcctctaaagcggccgcccttttttttttttttttttttttttttttttttttttttttttttttttttttnccaccaggggaaacctgagccttgataatctgcacccccaaaacctggaaataaaccactttcctttttcaaaagggcaccttattttgtagaaccacccgccctgtaaaaagtctcccttccccctgtttttttggcagaaaacctgcttccattctggttggcatccaaaaataacccccggttatgtgtcccattgcctcctccgttgtaagctcgggcccccaccttttttttaccactgcaccgtcttgcagggtttggcctgttcctaaaggcaaattcttgctctacggggggctgttcttgaccctttttttgtcccctaaccctccgtttctccttttttggttcttgcctaaccataccgtactc

SEQ ID NO: 173809 - DNA, 508 bp, Arabidopsis thaliana
ttaggtgacctttagaagaacttgacctcgcatgcccgccttccttagcttggattcttttgaaccggccgccctttttttttttttttttttaaataaaccattttacctttattttattccccattaaaattttccagccattcgggaggtaaaaggtaccccaggggttaattttttacttttttcccccattttgaaccggtccattcggagtttagtgcccttattttttttggcattttccttgaaacaccttaggccattccccttttgaccattccttttgaccttaatgtttttgcatttgcttcccacatttccgggggtatcgtctgaaaaaaggttcagggtcattgtcaactacttatccttcatcaaaatgttggggagtttgattcgatgttcctggaagaagtgctaaagactttttcgtcaggagaaaaatcccccaaaggaagttattggttttcttctgcatcttgatgataactgcaaacacaaaacg

SEQ ID NO: 173810 - DNA, 497 bp, Arabidopsis thaliana
cttactatagggaaagctggtacgcctgcaggtaccggtccggaattcccgggtcgacccacgcgtccgatgaaagtttagagattttttgaaagaacaaacagatatcgaattcgagttttgcaaaaatggtatcgggtggaggaacctttatctcattccaattccactcgctttccgttaacaaccgatttctacggttcatcatgggggcgtcggcggcgaggttacaccgtcaagctggccggtcgatgagaacagtgagatctaacttctatcaaagcggagatcaatcttgctcattcgtcggctcaatcggcgataaatcagagtatgcgtcggagtttctctcggattccgtcattcacatgagactcggcgagcttgctttgaaaaacagtaattctcttaattcaacgcttccttaatgaaagaggaagcgtttctcgacatttcttaggcgtttagtgatttttccgcttggaagaaggatatct

SEQ ID NO: 173811 - DNA, 708 bp, Arabidopsis thaliana
  unsure (1)..(708): unsure at all n locations
gggggagcactatacgacttacttagggaacgctggtacgcctgcaggtgccggtccggaattcccgggtcgacccacgcgtccgcaaaaccgcaatccgcgccgagaaaacagattcctccgccgccgctgctgcagcccccgccacgaaagaagctcccgtgggattcacgccaccggagctagacccaaacacaccgtctccgatcttctctggaaggggggggggtcttctacgtaaagcgcaagtggaagagttctacgttatcacgtggaactccccgaagaacagatctttgaaatgccgacgggaggagcancgatcctgaaagaaggccgaatcttcgaagctagcgaggaaagaccgtgtttatctttggggacaaggttaaatccaagacaaatcacttcccgttttacagggggttcctaagggggaggtcattttcttctccctaagggggggtgtatccagagaggcgattcccgaaagagaaggggggggccacacttgagatctttggggaanaatggtagccccattgaaggttacgttcccggcgcaacaaggttttgattgggaaattcggaaacctaaaacacccaaccctttgggccttggggaggaagatataacccatgtgtcatggtaatttttaaaggggtttttgtgtaaataaaaaaaaaaaaaaaaggggggggccgttt

SEQ ID NO: 173812 - DNA, 495 bp, Arabidopsis thaliana
tgacgtcgcatgcacgcgtacgtaagcttggatcctctagagcttccgcccttttgtttttgttttaaaaatgcctattgcgattaccttagagattccaacaatgatgatacatacaaagcgtgtgttggaaacgatacaccataatcaaattgcggcatcccggtacaaatcaatcttggtacgcctaacccaccctaattttttcttggggggggggacttaaactgctatgcaattttaagggaagcaaatgtggaaattaaagaccacacaaacctttattgttagcatttagccagtttccgggaaagaaatcacctttgaatctgttttttaccttgggaaaggaagagcctcttttgttggggagcctgggcttagaaaatccaaacttcggtatgcacgggaagaactaagcaatttgggcatcccgcatttgtcacgttctttttcagaggggccccaatttttatgtcattggtccaaaacaat

SEQ ID NO: 173813 - DNA, 489 bp, Arabidopsis thaliana
tctacgactttcttagggaaagctggtacgcctgcaggtaccggtccggaattcccgggtcgacccacgcgtccggttttgtggatcttgctggttctgagagagttaaaaagtcgggctcagctggttgtcaactcaaagaagctcaaagtatcaacaaatcactttctgcattaggtgatgttattggtgctttatcttctggcaaccagcggtgttgcttataggaatcacaagctaacgatgttgatgagcgattcattgggcggcaatgccaagacgttaatggtttgttaatgtgtctccagccgaatcaaatttgggacgagacgtaccattcctcttttatatgcatcgagagtgaaaccgatcgtgaatgatcccagcaacctttttcatccaaagagaggggcgattgaaaaagtggtacatactgaaagaccagcccgaaaaaaggggaggaaaaaactggtggatttggggaaaacc

SEQ ID NO: 173814 - DNA, 955 bp, Arabidopsis thaliana
  unsure (1)..(955): unsure at all n locations
agggaaacctggtacgcctgcaggtaccggtccggatttccgggtcgaccacgcgtccgggcaatgacgcacctaatgaggtgctaaccgaggcgcgtctattgctggttgaaactatttncaaacccgctcctggggctaagcttgtaaaaaaaaaaaaaaaaaaaaggggggcgggcgcttctattggaacccagggggagggaccgcgtgcatgcgaangaaaataaaaaatttattggggtgcacctaaaattaaattcacctggcccggcgttttaacaaggggggtgactgggagaaaccctgggggttaccccaacttaagtcggtttggaaaacatacccccttttggccagggggcgtaaataaaaaagagggccccacacaatccccttctcacaaattgtccccaacttaatggggaaatggaacccgccctttaggggcgattaaagccggggggggggggggggttacccccaaggtaaaccattacatttggcaggcgctaaggccccgtatttatagttttctccgcttcttaaagagaatgtggccggtttccccgcaaaataaaaagaggggctccttagggagcccattaatgtgttaacggccccccccccaaaaattatttggggagggccacgaggggaccctcccccaaagaagagttctccctttagaggagaccccatcttaaaagagacttttacaaaaggaaaaacacgcccttggggtttttttttgatataaagaattgcccttcgcccatgtgaaaaaaagagggtgaaaaaagtcgcgcgtggaaaaaataaggtccctttgggggctttgggaaaggggcacccctggttttttaaaaaacaacagagccccaagaaaacccgtagttttttttaaaaaggaaagtgttaatggcgggctatttcttggggggggcgaacgaaa

SEQ ID NO: 173815 - DNA, 499 bp, Arabidopsis thaliana
tttgaacgtggataggcccccttccgtaacctggatatcctttaaaccggccgcccttttttttttttttggacctaaataaagttggtccaaataattctaagcattaactcaaaatacatactaacaaaaccctaaacagcctcattacataaatgaggaccaaaagaatctccaaggatattaacccctaacatgaataattatttcttatataatcggccatttaaaatttcatgcagactacatatatatcaaacaggttttagtagatcgtcgggtaaaaatgatacagtacagatccgggtagtccctccggtttatcggtttttttatccaatcaaaccggaatgttatcgatggagtatgcgtcaaagtcgaattcgccatcaaccggtgcaatcccttcctgcttaagaagtgcgctcataagatcttctggattactatactgctcgtgaaacgccattgttgctgtatccgtagccactctctctga

SEQ ID NO: 173816 - DNA, 467 bp, Arabidopsis thaliana
ctccgactctctatagggaaacctggtacgcctgcaggtaccggtccggaattcccgggtcgacccacgcgtccgatcgaatgagtattcaacaacagattgctgctgttcgagctggaaatagtgttcaaaacaaccggaatggctgatgccctctagcggggtcaagcagtctttgcctcggaggacccaccgcctatgctaaccctcttcgcaatcatggcggtgaggcagccgatgttatcaaaccgcattatccgagagaaggggtttctctggaaggaacatatcccccgagaggcagagaaggttaccgacaagttacacttatctcacaacacaacactcattaagctcgatgccttataacaacttccaacaagaacttccggtgaacagttcccgctggcaaggccccaggggtttcagtgccgggttggaaagccacttttaccaggaagaggtta

SEQ ID NO: 173817 - DNA, 508 bp, Arabidopsis thaliana
ttaggtgacactatagaagaactattgacgttgccaggcccccttccttagcctggattcctttaaagcggccgcccttttttttttttttcttggaccttctggagtctttccttccttgggtggaccttcataatctccaaaataatcagaaaggatggcctggaaaagatcaacaggtttctccacattctccatttttacctcaacttcaggctcttctatggatgtctctttcttaggaactggcaactaagatacttgacgtgcagatgcagctttcactgtttccggcaagaatacgagagaatccattttgtttctcgctcgcggagcaggtggcagctttcccatgaatggatcggggagatcaaaacgtttgcacaaaagaggtgaaggacgccattggaactcttcccttttaggatacgtcttactcgatttcatgtctaccactccagtgtctttaatttgctctgttcccccagaagtaaactgaagacctcca

SEQ ID NO: 173818 - DNA, 508 bp, Arabidopsis thaliana
ttttaggggacctattgaagaacttgaccttgcatgccccccttccttagcctggattcttttaaaccggccgccctttttttttttttttttttttttggaaactaattcctgtttttcaaaccttattattcttttggccaaaaaaccgggccggtttttacctggccaattgggaaagggactcgattttcctttaaggagtccaccagacgttttaaccttatggaaaaaaaggtcgtcttaaaaaccactaaaccaaacggagcgagagatagttgtgaacccccttaacctttggaacacctacagggttgaaatctgaagagcttttttcctgagggacgtgctacttgtttaaaaaggcttgtaggttgaagtatcaatctgctccggaggttcctttatatcaacctcaaacctttcttgtccctggttaagaacctctgaatctgaagcagatgcaacaaatgtgattgcaagcggacgcttgggcggacgcttgggt

SEQ ID NO: 173819 - DNA, 881 bp, Arabidopsis thaliana
  unsure (1)..(881): unsure at all n locations
taatacgacttactatagggaacagctggtacgcctgcaggtaccggtccggaattcccgggtcgacccacgcgtgcgcccacgcgtgcgcttgcaatcacatttgttgcatctgcttcagattcagaggttcttaaccaggtacaagagaggtttgaggttgatataaaggaacttccggagcagattgatacttcaacctacatgccttcttaaagaagtagcacgtccctcaagaaagaagctcttcanatttcaaccttgtaggtgttcaaagggtgatgggggttcacaactatctctcgctccgtttgttttaatgttttctatgacgacatttttttccatatgttaagaacgtctgttgcactctntaaaggagattcgagtcactcctcacaatccacagtaaaaagctgcccattttttttgtccaagaaattttttgtttgaatatcaagatttattctcaaaaaaaaaaaaaaaaaaaaaaaggggggcccttctaaagatccaagcttacctccgcgtgcttgcgaatgaatagtttttttttgggggcacctaaattcatttcactgggccggggttttcaacggtgggaatgggaaaccctggggttcccaatttatggcttggaaaactccctttcccaggtgggaataaaaaaagccccccattcccttccaaattgcccccctaatgggaagggcccccctttggggccttagggcgggggggggggttcccaatgacccttttttcagccttagccttttttttttttcttttttcgcagtggggttcccgaaattaaagggccctttggggcctttaggtttccccctcccaatttttgggggggtccaggggccccccta

SEQ ID NO: 173820 - DNA, 511 bp, Arabidopsis thaliana
ttaggtgacactatagaagatctatgacgtcgcatgcacgccttcgttagcttggattcttttgagcgggccggcctttttttttttttttttttttggttttttaaaccgtagaaccccaatcttatttatttgccttataccattattcttaaaaaccaaagccagggttaaagggttaataacctgggttattaccggccattggggctaatggtttttattccttaaaccagaacccttttattccattctttcccattattttttaccttttgtaaagaaaccctccccggggggggaacctttttttcttgggggggttccgggggcaacaacattgggggccctaaccgaacctttttttttttccttcctttggtccactgtaattggtggttgcctgcactttaaactacaaaccgctttttctcctctttacttatagatgtcacggccttgaccaggaaaacgtttccaaagagagcaggatcttagaaaatcttcaaaa

SEQ ID NO: 173821 - DNA, 710 bp, Arabidopsis thaliana
  unsure (1)..(710): unsure at all n locations
tatacgacttatatagggaaagctggtacgcctgcaggtaccggtccggaattcccgggtcgacccacgcgtccgggagttttctactggatcgctcagcttctcggctcccaccgccgcttgtttcctccttaaatacgtcaccgggtggattggcggttccaacccacagcgttgcggctggactaggatcgatagaaggagtagtgatgggagagctcatcaccttcgctttggtctacactgattacgccaccggcgttgatcccaaaagggtgtctttggaaccatcggttctttcggcatgggttttatggttggtgcaaacatcctcgccgcgggtcatttttcggtggatccatgaacccaacacggttcttttggacaacttgttgctgccggaaacttttctggncaactgggtctactggggtgggaccactcatcgggggggggacttgcgcgaacttatttacggaaatggttttatggggttttccaacacatgtccttttggttttgctgattttaaaggaaacagggaagagccttgagtcattgtncttggttggggtactttgccctcaactttcttgttttgtgggagtgtggcccgttccttggaattttatccaatgtggtgaaatttattaaggggaaaaaaaaaaacaaaaaaaaaaanataaaaaaagaggggggccgttttaaag

SEQ ID NO: 173822 - DNA, 517 bp, Arabidopsis thaliana
ttaggtgacactatagaagactatgacgtcgcatgcacgcgtacgtaagcttggattctttagagcgggcggccttttttttttttttttgaagaaaccattattaaaaggttaagtggttattaaaattacaaaagcgggactggataacaattaccgcaaaaaaatattaaattggggggccggaacaaaataagaaacccaatgggtttgggaaattccttgggactaattaaaaatgttgcttcaaaaatttggcccacttaaaaaaattgtaagggtaaaccattgaaacctttttattttttttaaaatcctttgccttacttaatttgggggtttggtaggggaaaaatgcttcccaaaaaactaacccattggggtttttagatgttttctggccacgacaattttagaattaaaacatttttgttccaaataccaaagaaacccgacgtatggatttttaaccaaaaaagggctgaattttaaaaaaagacctggaaaattcccttat

SEQ ID NO: 173823 - DNA, 231 bp, Arabidopsis thaliana
aatacgactctctatagggaaagctggtacgcctgcaggtaccggtccggaatttccgggtcgagccacgcgtgcgctacactttccattaattaccaatatatttttactacttaaaaaagatattggtcttgaaatggagagttccttaacgaaatggtgtgtactgctagtgaagccgcgatgcgggcttattgctgtaaaagcacaggcacgggctcaagctccatg

SEQ ID NO: 173824 - DNA, 483 bp, Arabidopsis thaliana
cttagggaacgctggtacgcctgcaggtaccggtccggaattcccgggtcgacccacgcgtgcgcccacgcgtgcggaaagacattgggagagttaatcccaatttccaggttcttcttttctcggcaacttttaacgaaactgtcaaagattttgttgcgcggacagtcaaagatcccaaccaattgtttgtcaaaagagaggagctggctttggactcggtgaagcagtataaagttgtttgcccgaagggagcaaacaagatcgaagtcatcaaggatcagattatggagcttggggatattgggcaaaccattatctttgtgaaaacaaaagcgtctgctcaaaaggtgcacaaagcccttgcagaaatgggatatgacgttaccagtgtccatgggaatctgactgaatcggacaggggtaagatagtttaaggagttaaagaatgccttactcaagtgctcattgctaccgatggca

SEQ ID NO: 173825 - DNA, 499 bp, Arabidopsis thaliana
taaaaaagctatgacgtcgctatgcacccgtcacgtaagcttggatcctttagagcggccgcccttttttttttttttttcactaattacgggcttacaatacattgggttaagtagtaaaaaataaagagtggcattaacattaaaaaagaaaaaaaagggttttagggtggcctaaagtttccagcacacctttaataggatagagagtaataagtaataaggccctccctcatcgccaagtagaatgggcggagaagtaaccgagaaggcccactagtggtgcattgatataagtcgtgggctcagactgctgaaagtaaggtcttgaatccggaaaagcatcagtgacattaggtccaccgactacagcaccaaccaaaaggtttgggttaggatttgggcttaggaaatagcgagagccttctttgcaccctatgtggcttggatgggctgaaaccgaaggaaccgagctaccacggtgatgaatcctacgtgg

SEQ ID NO: 173826 - DNA, 839 bp, Arabidopsis thaliana
  unsure (1)..(839): unsure at all n locations
taatacnacttactatagggaacgctggtacgcctgcaggtaccggtccggaattcccgggtcgacccacgcgtccggttgggaaaggcctgaagatatggacactctccgtactgtttacaaaatcgatagagctcatcctggttctgacgtcgctggtgaaaccgcagccgctttagccgccgcttcaatcgtttttagaaaacgcgatcctgcgtattccagacttctacttgaccgtgccactagggtattcgcgtttgctaacagatatcgcggcgcgtatagtaacagtctctaccacgcgggttgtcctttttactgtgatttcaacggttaccaggatgagttactgtggggagcggcatggctacacaaagcctcgaggaaacgagcgtacagagaattcattggtgaagaacgaggtcattcttaagggctggagatcccattaattgagtgtggtgtgggacaataaggcatgctggggattaatggtcttaatctcccaggggagtggttattgggaaaagcagagttttttgagtctttcagcaaaacgcagatgggtttatctgttctatttggctggaaattctccccccaagtccatactcttgagggggggtcttgtgaagactggaggagatacttgcacctggacctcctttctttctcctatggggtactctaatttcggacctgccaaaaggtgggcttgggggaattaatggttccatttttctccggaatggccagggggggtggatactttcggaccccccaggggcggcttctggtggtccggccaatttcccggggattttacggggggctgg

SEQ ID NO: 173827 - DNA, 656 bp, Arabidopsis thaliana
ctatacacttctatagggaaagctggtacgcctgcaggtaccggtccggaattcccgggtcgacccacgcgtccgagacacagatagtgaagaatcagatgtgagtggttctgatggagaggacacttcatggatatcttggttttgtaatctaagaggaaacgagttcttttgtgaagttgatgatgattacattcaagatgacttcaacttgtgtggactcagcagtctagttccctactacgagtacgctcttgatttgattttggatgttgaatcttctcaaggagagatgtttacagaggaacagaatgaattgatcgagtcagcagctgagatgttgtatggactgattcatgctcgttacatattgactagcaaaggattggcagcaatgttagacaaatacaaaaactatgactttggaagatgtccaagagtttattgctgtggccaaccttgtcttccggttggtcaatcagacttacccgcgatctagcactgtgaagatatattgcccgaaatgcgaaaacatttattacccacgatcaaagtatcaaggcaacattgatggagcttactttgggacaacgttccacatctgttcctgatgactaatgggcatttcaagccagcgaaggcaacacaaaactatg

SEQ ID NO: 173828 - DNA, 888 bp, Arabidopsis thaliana
  unsure (1)..(888): unsure at all n locations
atagggaaacctggtacgcctgcaggtaccggtccggaatttccgggtcaagccacgcgtgcgtacacacatacncccacncnttccgtncnaattataccaaagtccagacaatggaactcaattgtgttcaatttcttcaaaacaagactattcttttcaccggaactcccggttccttgcgaatgttttttttgagagaagattgacaatccacccaatttnaaaaaaaaatccctttttgtagaccatctacaataaccctcccctatacccttaccacaagagtatttaaaaaaaatttttaaggtataacacaaattttggcaattaaaaattaatacctttttttccaaaaaatttgtctccccccccgttatttacccacctaccaataagcctaaattacctctcttttaaaaaaccttccaaaaaaaaaaaatttttttttcatttttcccgcccaaaatcttttacaaaaaaatttatttcggctttaatcatacacttgacccccccccctcctactctcccaaaaattttttaaacccacttcctttcccttctaacttctttatttgaaaataaccctcctctctctttaaaccctcttcctaaaaatctctcccatattcctcccttcatttaccctcaagagacttttagacattattatacactcttcacacatgtccccaaaaaattcttttctcaaaaatcacctatacagcccatcatttccattagcccacaatacttaccacaataacaaaatctcttttccataaaaaattccctcccctatcgtcccccatatcacaatctttaaaacttttcttcattatcctataattcctacttaccctacactactagtattttttacct

SEQ ID NO: 173829 - DNA, 504 bp, Arabidopsis thaliana
  unsure (1)..(504): unsure at all n locations
taggtgacactatagnagnagcttgacgtcgcatgcacgcgtacgttagcttggatcctttagagcgggcggcccttttttttttttttttttttttttttttttttttttttttttttttttttttaaaaaaaagacaaaacggtttttacattatcaatcggggtggtttggttccaatttttgccccaggcccaaccttggtggggcccttgggccctttcccttttatggacaaccccaattggtttactttttccttattcccctaggttccaaaaaaaggggttgtaagcaaaccaacgttggttcccgtggtggggggccggggaattcaatgggggaaaaaaaaccggggggggtggttttggggcctggggggttaaaaggtttagggggggtggtttcccccggccagttggttccccccaacccgttggatggagcccgcccctggttgcttttggccggggggaaggggccttcctttcccttaaaaagaac

SEQ ID NO: 173830 - DNA, 575 bp, Arabidopsis thaliana
  unsure (1)..(575): unsure at all n locations
acgcctgcaggtagccgggccggaattcctcgggtcgacccacgcgtccgcggacgcgtgggcggacgcgtgggcggacgcgtgggaaccactcgaacaacaacaacaacaggaacaataggcacaacaacaacacaaacccaaacacataccaacaacgnacggtggtttcggttttcttttattcccagagcggggagccaaacgggagccagcagaaaaaagggatacccctctaagggcacgaaagctgcttccttacagccggcggaaacatcttccgaacttgaggggtatcctgcggggcgggcagaacaggtttctacgggagccaccaagggggatcccactcaccagcaagcccggtggggagaccccaccggcccagggggggcttttttttaaccctttcgggtaaaacggggggggaaggggaacttattaaaaacccccgccttattcacgggggattggggcccggaatgagaaaaaaatgcggggggggggctggttttaagaggacgggggggaacaaaagggggtagctaaatgtggtgagggccagggccttggga

SEQ ID NO: 173831 - DNA, 907 bp, Arabidopsis thaliana
  unsure (1)..(907): unsure at all n locations
ctatacgacttacttagggaaagctggtacgcctgcaggtaccggtccggaattcccgggtcgagccacgcgtgcgaaaatttgttcctctgcgcaaacccaagaaactacctggtgaaacaatatttgaggaatacgagttggaatatggaaatgaccgcctaaagatgcacataagaaccgtcgaggctggcaatcgatctttggtcggggggggagctnatcgggagggggggcctctatacgctggccttaaccgggctcgagaggggtggcaccaaaagttgggggatgggcatggggtaaccaatttacccgaattaaagggaaaggcaaaaacttagggggaaccccctttgtgtgcgtgggggggcccgaggatgattttacctttacttatgggataaaattttgcgggtattaattgatgccgccgaaatggggatgttggcccctctttataaaaaaaaaaaaaagagggcgcccggtttaaaagatccaaagtaacggcgccggtgggtgcgaaggatttgtttttttttaggggcacctaaattaatggggcggcggggggttaaaagggggggggtgggaaacccggggggaccaaattatggggttggggaaatccccgttttgcggggggggtaaaaaagaaagggcccccccgatcccctttccaaagtggccacgcgaaggggaaggggccccccctagaggcattaggggggggtggggggtgcccagggtaccctactttcgagcccctgggggggtttggttttccttctttccgaggtggggtttccgaaaatttaaagggggccttgggggcattaggccgcccccccccaatgttggggggggggggcggccccttagaggtttcctttgggggacctaaagg

SEQ ID NO: 173832 - DNA, 379 bp, Arabidopsis thaliana
gacttttttagggaaagctggtacgcctgcaggtaccggtccggaattcccgggtcgacccacgcgtccgcggacgcgtggggtgatcttagaagaggtgttgagattgaattgctacacctggtcgtttgattgatatgtgtggaatgtcaacacactaatttgaagagagtgacttaccttgtactggatgaggctgacagaatgtgggacgtgggatttgaaccccaaattagaaagattgtatctcagatccgacctgatagaacaacactttttttggagtgcaacatggccacgagagggttgaaactcttgccaggcagtttctacgagatccatttaaggccattattggatcaacagatctaaaagctac

SEQ ID NO: 173833 - DNA, 517 bp, Arabidopsis thaliana
ttttaggtgacactattagaagactatgacgtcgcatgcacgcctaccttagcttggattctttagagcgggccgcctttttttttttttttaccatctaaggccttacttcttgggggggcttcaaatttaaaaattgaaggtggttccccccccccccttccttaagggtaaaaggtaaaaaggtggcattaaacctggccttaaaaaaggcacctttcttccagccaacttgggcagttttaatttaccattgaaactttacctcttccttttaaaccttttcttcctttctctggcctccttctcctattccacaaattattcaggaagggctaacatggttaataattctcccacacaaaccatttggaccttcttcctcttaaccctcggggctggttgaacagttatttttttttaaaaggctttaaaatcccaaccctgaggaagatcttatatcttggatcggttctttaaaattatcatgggatcatccatcgaggatcccatttgt

SEQ ID NO: 173834 - DNA, 906 bp, Arabidopsis thaliana
  unsure (1)..(906): unsure at all n locations
ttaggaaacctggtaccctcaggtccggtcccgatttcccggtcgacccacgcctccgtaaggatataaaaaatggcagatggtgaatacattcancctctcctctgtgacaatggaaccggaatggttaaggcttgatttgcttggaaaaatacaccaagaactgtattcccctaccatcgttttctccctcgaggggagtggttcatggtgtgtatgggaaaaaaaaattcctacgttgtgggatgaggctccccccaaaaaaggttttttcacattgaaatttcctattgaacattgtatttttaccaccgggataaattagaaaaaatttgcttcacactttctaaatgaactcccggttccaccataaaacacccttttctttcacataggctcctttaccccaaggccaatggggagaaattaccttatttttttttaaaactttcaaccttcctcccttgttttgccttattcaagcttgttttttccctctaccctaggggggccacctaccggtattgggttcgcccctgagaaagggggaacccacccttcccattaaaaaagatttccttcccacacctctttttggtgagaccttccggcccgaccttctttattccttagaaaatcttaccggcgttttttcccttcttcctcctaaaaggcttaatcgtgggggtaaaaaaaaacttcttttatatcttttttccccaaaagagacacccaacacctctcccgtaaaaacttggttgccctagacagggtcccctgggaaaaaaatcccctccccgattgtttccccacttttgggaagaagatggttttccaaacctccattctcttaatggtcgttaaaaacttttaaacttcctttggacaccctctttttttctacaa

SEQ ID NO: 173835 - DNA, 446 bp, Arabidopsis thaliana
  unsure (1)..(446): unsure at all n locations
gtgacactatagaagnactatgacgtcgcatgcaccgcctacgtaagcttggatcctttagagcggccggcctttttttttttttttttttttttttttttttttaaaccaaacgggactttattttttgaaccaaaccaaattaaaaagggccaccaccaagggaaaggtaggggttttcccatgaattaaaagcctatttgccttatggagatttttttaagaaccaaaaagaattttttgatccttccttttaccttaggttcctttaaaaagaatggaaaaaaaaaaagatgggagttaggggaaggcatttatttttaccgtccaaaaagaaaaatggagattccaaccttccttggtggaataaatttttttctttttattatttaacggggctgccttttagaatggcggaagggacctgctctcccccctgaaagata

SEQ ID NO: 173836 - DNA, 872 bp, Arabidopsis thaliana
  unsure (1)..(872): unsure at all n locations
agggaaacctggtacccctgcaggtaccgggcccgaattcccgggtcgacccacgcgcttccggaaagggcggtaaaaaaaccaaaacctaaaccaaagagcatttatacctctttaaaaaacccacaacccaaaaaaaacaaaacgggggtgaaaatggtattaatctttggcgcccnggcccaagcttttttttacaaggaagcagggccaccctctcccgttaccataaaaaaaaatgccgcggcgcgtggttgcaaggggcaacctctttgtcgtggggtttgagcgggggccgaaggcacaccgcggagctactggagagagggggtgcccgcccctcggccgcgagtctataaacagccctgcgtgtggccgaagcgcacgcctcgcgccgccccggtggggcgggaggggggtatgcgagacgtagtctccctccaatggggggggtgggatatcgtcatcctcctcttgctcgtcttgccggggcgagtttggttacggtggttctccgccgcgcgcgctcacgcgcgccgccgcgccgcggcgcgcgccacggccgcgacgcggcggcgagaagcaccgcgtgccggcggtgcgagtgatgagcggtttcggtcccgcgtccgcgtggttagggccccagcaccactgtggtgccgctgtttttagacttctggtcgtcgggcgtttggcacgtggactgagatgtctcctctagtgtacaaggctcgcgccccgcggcggagccgggtggcgcggcgacggtcccctctaagcggcgcataatatagacgcacaggcaagctgtcggcgaactattgagcgtgcggggcgtagcggcaagggaacgcgagcgcgtcggcggt

SEQ ID NO: 173837 - DNA, 920 bp, Arabidopsis thaliana
  unsure (1)..(920): unsure at all n locations
tagggaaacctggtacgcctgcaggtaccgggccggaatttccgggtcgggccaggcgtgcgatttttaacttttgcgtgccttccttatcaacttgtaaacaaagctacaaatatctttaaataaggacccaactctttttcaattcctcccatcaatcttcttcattttgtcttgtgggggggggggtttttctattttgaggggaaacaatttttccaaagtgggttcttataaaaaaacctttcttccttctttgaaaggggtccttctggggaacaaaacattttttgttactgggggggcttggcttttatcgggaccccatactgtgtgttcaacttctaaaaagagggtttaaaggggttcaatcatccgataattttggataactcttgttatcaaagctgttaataaaataaagggaacttttttgcccctnatcctttcaaaaaactcgacttaattgggggggacctaaaaacaagggagaacttgaatctttcttcccaacaaaattggagcccggattcatttgcgggcttaaagcgggggggaagaggggaaaacccctccccttctttacaaaaaactggggggaaacattattttttgtagaccctgggaagaccaccggcaaagggggggtgttcctcttgctcgccgggtttgggacaccctaaaaaatcccgccgtggaaaatcttaataaagggcgttaatccctatgggggacctacttttccttgagaaaatgcctaaatttcaagagcgaaccggaggggagattttgtggggggctccacccctgagaccaagaaaggggcatttgtggagccaaaggagtcccaacccttcctctatcaaaaggggcggtccgcgcccggccctatgtttggccgccttccccgggaggggggg

SEQ ID NO: 173838 - DNA, 512 bp, Arabidopsis thaliana
  unsure (1)..(512): unsure at all n locations
taggtgacactatagnnagactatgacgtcgcatgcacgcgtacgttagcttggattcttttgagcgggcggcccttttttttttttttttttttttttttttttttttttttttttttttttttttttgaaaaaaaaatgggttttgtttatggccaattcttccaaggtttggcaattttccttttggaaggtttaaaaccttaaattccaaccttttttttttcctaaggtttttccctggatttcaaagaatggaagaaaaggcaaattccaaccggttaaaactgggttcattttccggaaacaaatttggttgcaaaggcccatgctttgttgttgccgggatcggccaaagggtcagaagggttttttttgggccccttaccagggacaatggtttgaacgaaaattccaacctttgagaacttggccatttttccgtttttgagcttcttcaccttaaactccgggaaagcctttgggtcggtagcaagacccaatgggtcgaa

SEQ ID NO: 173839 - DNA, 892 bp, Arabidopsis thaliana
  unsure (1)..(892): unsure at all n locations
ggccgaattcccggtcggcgccacgcgtccgacaagttattcaccaaaaaaaaaaaaaaacacaaaaagtttcaatggccgcctccacaatgggctctctcctcccctgcctttgccggagaggctgtgaacctttcccccgccgcatctgaagtcctcttaacgggccgtagagacatgaagaaaactgttccccaaccaaaagggtcattcaggcacccatggtangatccccacccagtcaagtccttgggtcctttctttgggcagtcacccgcctaccttaccggaagattccccggagactacggtgggacaccggtggactttcagcttaccccaaaacttgccaaggaaccgtatcctataattttcccacgggggggggctttgctcggaacccttaggttgcttttcccttaccttttggcttagaaccgaacaatttgcgaaaaggggttttgtttaaggcccttttccaaactttttacgaaggaggatctttttctttgaaaccccctttttggcccacccctaaagattttggccctttgggcccctcaattttttttgtggggacttgttaaagccccaaaacccaaagaaatggcctttggaaaaaccccatactttcttttccccgggggaatttttccaccttttgtgctttccccccccaaatgcttttcggggttgaggggaagggctctaaaaccgaaattggttttttctctttttgctcttcgcgccacctctccctttgagggcccaataaaactcttttactttggctcccacacaacaccgtgtggcttttaccatttttccgagaagacccatatcacgattttttctttttcacttctcacccaggaaaaataaagaaaaaggt

SEQ ID NO: 173840 - DNA, 510 bp, Arabidopsis thaliana
ttaggtgacactattagaagagcttgacgtcgcatgcacgcctacctaagcttggatcctttagagcgggcggccttttttttttttttttttagaagaattgaaaaaattaaggaacttttattttatggaaaccggttgggtttattattcttcccccaagagaataaattaaaatcacttttttttccagccaagggattaaatggacccggcctttaattccaatattttaccacttaaacggtccttttttaacctaaggcggaaacctcaaccagaatggggggatggtccttttaaccagccttaaccacaccagacgggaaattcgactggttaatcgcgttcggaaatccctgcgtttaagggcacacacccgcttgtttccggtaaaccgaattccttttcccaaccactccattcacatagttcccggtttaaaactgcattcccggcacatgggtccacaagttcagtacccttgagctagcagcatcactgagcttc

SEQ ID NO: 173841 - DNA, 480 bp, Arabidopsis thaliana
  unsure (1)..(480): unsure at all n locations
tgacgtcgcatgcacgcgtacgtaagcttggatcctctagagcgttcgccctttgggtttggtttttttaattaaagaaaaacactgacatgtgtgtgcacatcgtctagtgaatcaccctttgaacgaagaaacttcttatgaccgtttttagggttttgcaacgaaaacctattgatttcaaattggacgcacctggccaacggaattttttttaaaggggggtgttanaaggaagcctgctcttggagaacccaaaactttgaccgagtcttctgggcctgaagccttttaaagacgaatggatgttccggaaacaaccggcgggtaaactcttttcctaagaattttacgccccacggggccaattctctatccaggggcaggggactttccccctcgcttaaaaagctgcgattttcttacctacgagtatattgttcttgcccgcgaaaaaaaatagccttgaccccgggaatc

SEQ ID NO: 173842 - DNA, 519 bp, Arabidopsis thaliana
gtatttaggtgacctatagaagactatgacgtcgcatgcacgcctacgtaagcttggatcctttagagcgggcggccttttttttttttttttttttttgggggaaattactttcaattttattggacctggttcgcccaaagaattttaccaccatggggatccgatcaagaaccagaaccggtggattaatcaccttttttccttattaattaatggctgggagacttaatggaaatggaaatttaccggttccttttttggaaaaacaaaaagcctttggttttctttttggttaaaagcctctcctcctcctcccttggttcctcaccggcggggaataacaaagggaggggccttacccaaaggaggtggtggcggctggcctggttcaaaacccaaaaggccttctaaattccctggtggaggttcccactacctaatcggcctttgaacctgggtggccgaatggaaatcctcgcttggggggatcaaatttacagctggaaccaaattggc

SEQ ID NO: 173843 - DNA, 462 bp, Arabidopsis thaliana
ttataacgtcgctatgcacccttcacttaagctggatatcctttaaagcggccgccctttttttttttttttttttttttttttttttttttttttttttttttttttttggaggggggaagctaaatttcataaattaagggggggttacaaaaacttgtaaaaatccaaaccctttttcccatgacataaaattttgttttttctaattggcatttttttaaaagtcaggttcaaaaaattttcctccaaaataatggaaggccttttaacggaaaaccctgtttccaagtccaaaattcacaaacttcaaagataaaaaatcaacctaaagaaagggttttaaaaaatgtgaaaaacacttactgttgggggctgttaaacttttcattttctttgtaaacgggttttaaaccccggggacgtgaaacgggctttttatcgaccttgatttcagggaaa

SEQ ID NO: 173844 - DNA, 888 bp, Arabidopsis thaliana
  unsure (1)..(888): unsure at all n locations
tggtacgcctgcaggtaccggtcccgaattcccgggtggagccaggctgccaccacacgnnccctcttnctcttccttttccttttctctctcttctcattctccccatacccttataaggaaaaatcttcaaagaagagaagtgatggccaaacacatgagaggagaaaatcccatgggggtttctttttttcttgagagccaggagaacctctcaaagaatagggtggaaaaaaatggtggtggccattcccttagaggcttgcttgtttcccatccccattcgggattcttttttataattagggttttccccccgggaccttaaaacctggaatccccccttgttaaataaaacatttacccccttttattttaaaatttttttgaaaaaaaaaccgcagaggaagggaaaaaccatggggtgtgtttttattggggagcaaaaaggttcccttataaaaaaacattttgtcctcagtctctcacatgaatctctaaagagctggctgtaataaaatacacaacaagggccaaattttcccataaaaatattgtttgggctcaaccattagaaaaaaagagagtttctccttaaaaaaaaaacaaatccccttcccccaatggggtggggatcccaacttaaattccttctttccctcacaaatattctgtgggggaaaaaataatgggtccaggggttcaaaggtcccccttccttttggaagggccctttttcgttgtttgggaactttccctttctttattccccactgtgttttctcctcgggggggggtagaggggcctaaaaaaaaaaaatgcggcccctctgtgctttcttgcttctactccgactttcttttcttttgggtcgccgcagaagtata

SEQ ID NO: 173845 - DNA, 891 bp, Arabidopsis thaliana
  unsure (1)..(891): unsure at all n locations
tagggaaacctggtacgcctgcaggtaccggtccggaattcccnggtcggcccacgcgtccgcggacgcgtgggcggacgcgtgggcggacgcgtgggtgacccangtgaanaatctacagaagataaacgctagggaatcagatttaggaatatctgatgaagcttcatggcacgcctaagtacaaaatctttgcttatggtggggggcnggaggcctacccgttcaatctaaacaaaagggatctttctcgccgttttttctcaatgtagggaaatgggtgatgtcattcttattcaaaacaggggaacggtaattctaaggggtttgctttcttgcttatgaaaatcaaaaaagacccttcttggtggtaatatccgaagggagctcttgtgtggggacgaccatttaggggggccttgtggggcttcaaaaagcccaaggaggggttgaaacccccaccccaaataaaggggctcgggggtttcaaaactttaaaagaggaagaggtcccggggggttcttcaaatttcccccaataaaaagacttaattctggttggggctgaaaaggaaaaatttccaggggatctaacaaattaggagggggggtgtttcaactttttaaaggagagcgctccgggttcttgaaattcaaaaaaaaaaaacctccccctggtggggaataaagataaattctcagggaaaaacattaatggctaaggggggccactttcccatgagaattcacccttgggaaaaaagtccggggggggtttgattccccttgggccctaaaaaaaagaggggagggggttggccccccaaattctttttgagacacaatacggcgggggttggttttaagcgctttatttttttgggggagggc

SEQ ID NO: 173846 - DNA, 503 bp, Arabidopsis thaliana
taggtgacactatagaagatcttgacgtcgcatgcacgcgttacgtaagcttggatccttttgagcgggcggcctttttttttttttttagggtggactggaataacttcattgtaaaaaccaaaagttaatttgttaaaaaaaccaccacccatggttcgtcattcttagccttacccggtattaccaaaattatcattctttccttttaagccaaggtaggggttgtcgcgcctccctttgagtctgggcttaaaggggggcggggtttgcccttcttttaaggccaaaccacttaaggggttaattaaagggggaacccggaaaattccggtgggttaagttaaaattcgggttggcctttgggaacccttggtttccttccaccaccaaaaaaaaccccggtgggtccattattaaattcagttccaccaggttttcttctggcttttgggttggccacgggaggcggtggtagcggcaaagccgtttttttggaggaa

SEQ ID NO: 173847 - DNA, 475 bp, Arabidopsis thaliana
ctccccttccccccttccttaacctggattcctttaaaccggccgccctttttttttttttttttttttttttaagggggaaatcttcatggggtttttaattattattttttaccaggaccaaggaggcaaaaattgattcgatgaactttttaaacctcataacctccatttaatcagcattgcttgatttcaaatccaatgctcaacaaagtcctagctgattccataactttttttccaccaacgtccaatgcttttttactctgcttttaactttctcgccccaccgagcactggcttgaagtcggaatgttcacctgatcgtctgtcctggttctcattgatgttggagcggctgcagctacaagcattgagcttggaggaccatggcgtttcttaggcaccggcatgtcggggttgggtactcctttgtatgtgattattactgcttttgtgttctcgactgctgtct

SEQ ID NO: 173848 - DNA, 282 bp, Arabidopsis thaliana
  unsure (1)..(282): unsure at all n locations
gtcttattagggccacctatagaattgctatgacgtcccatgcacgcgtacgtaagcttggatcctctatagcggccgcccttttttttttttttttagaaagaaaccactccatgtcttagatagagttaacatagtaacatcatcccaacacanagcaaaggaacagaccatgtgacgcagcacgaaaccaaactaagagatcaggttttatttataaaacatanttattgcgtgtagataagagagatagagaaaagtgccagaacccaagagctcatc

SEQ ID NO: 173849 - DNA, 945 bp, Arabidopsis thaliana
ctctactttactatgacgccgcatgcacgcgtacgtaagcttggatcctctagagcggccgccctctcctttttttctttttttttttctttttttttttttttttttttttttcttttgttttttacaccaattttttcttttcaatttttggggaccccaaaaaacaaaatcccccccccgggggaaaggggggttttcccaaaacccagggggggggggaaaataaaccccgcctttcaaaaaggtttcacatccggaccccaaatctttattctaggggaccctccccccccccaggggggggcccaattttaagggccccgcctcaggggggttccctttcgccgggtggtttggggttaaaaccggcctcgggggaaaggggtcttaaatccaacccatttctggggctggtacccccccctccccccccgaggggggtgtggccccaccccttatggaaccttttccacccccccgggaggggggccccttaatacaccgggccacggtaaaaaccaccgggggggtgggcgtggcccgcccacccaaattcccctggggggcggaaacagaggacacctccccccccgggtgccaccggggtaaacctgggcgctgcggggcttttcttccttcacaacggaacaccatttccggggcgatccccccccccacggtcgcggaaaaaaacacccccccgcgctcccccggcgtggtaccaccgcccctcaaaatctttcttgtggagtaaagagggggggcggccaacaaggccacccgccccttgttccgcccaccacggccgccctcccgttggaaagcaggtgggtctaaaaacgcgcggcgcgtcgtcccaacccgcgcgcccctcaccacgccccccccgaccccggacctccaccgcgcccacccggcagcgaggccgccaggcgcgaccag

SEQ ID NO: 173850 - DNA, 326 bp, Arabidopsis thaliana
  unsure (1)..(326): unsure at all n locations
gcggccggcgctttgttttttttttttttttttttttgtccaataacgggggtatttcttcttttaatatctcattattatcacattccacaaagctagttacaaggtcagtatatttgagtacactatgcgtntgtgaacaaaacaccactctaaattttctgagatgtgaaaatgctcaggattttggagaaacgacgaaagcgggggcatccaaccgcttcccgatcattattctccagggaacaccgcacgttttcccgcggggccctttgaaaaaattaaccctcaggcagtccatttcgcaccttttttgtccccccgcc

SEQ ID NO: 173851 - DNA, 429 bp, Arabidopsis thaliana
  unsure (1)..(429): unsure at all n locations
ctatgacgacccatgcacgcgtacgtaagcttggatcctctatagcggccgcgctttttttttttttttgcgaacacaataacaaagttctcaactaggaaaaaagtaaaaaacattcaggggatggcgagagaaaagtcttcacaatccgtcataccataagagtgttaataaaacaagacanaattaagatagagagagtggcggcccattggaaaaaggctagtacgagtcttggtgaagcttaaagcttgtcttccaactcagatagtggagtcatcgctttctttaatccctttcttttgctgatatcagccaccaaaactgaagcctgagtacccggctcaaaagggtcaaaaaaatcattttccaatgatcaaacacacactggtggaatgcctgtnctgaaggtggtgccctaagctgact

SEQ ID NO: 173852 - DNA, 612 bp, Arabidopsis thaliana
  unsure (1)..(612): unsure at all n locations
atacgacttactatagggaacgctggtacgcctgcaggtaccggtccggaattcccgggtcgacccacgcgtccgggattatggactacaaacacaacatccgtaatatgtctgttattgctcatgtcgaccacgggaaatccactcttactgattctttggttgctgctgctggtatcattgcccaagaggttgctggtgatgttcgtatgactgataccagagctgatgaggctgaacgtggtatcactatcaagtccactggtatttctctctactacgagatgactgatgaatccttgaagagtttcactggagccagagacggaaacgagtacctcatcaatcttattgattcacctgggcacgttgacttttcttctgaggttactgctgctcttcgtattactgatggggctcttgtgggggtcgactgcattgagggtgtgtgtgtcagactgagactgttctacctcaggctcttggtgaggagattcnacctgtcttgactgtcaacaaaatggacaggtgttttccttgagcttaagggtggtgggggagggggcgttcccagacttttttcgaggggtttggagaacgcctatgtcatca

SEQ ID NO: 173853 - DNA, 535 bp, Arabidopsis thaliana
acactatagacttactatgacgtcgcatgcacgcgtacgtaagcttggatcctctatagcggccgccctttttttttttttttatcaaatacatctgttattctttttcttcaaaagactaccaaattttatgtgtgtatgtatgtatatttcaaaaatacattatatcatgcaaaagaatatacaagatcgaggacatgtttaaagggaaagaagaaagaagcaaaggcaataaaaactactaaggtacaaatctggactggtcacgactgccccagctactatgtgactgtgagcgatcaaagaagtcagaactataatcttgactcccaaaagccattctttgaaacatccttatctgagcagattgttgtttcgagtcaaacacttggctctgtcctgggctcattccgttggttatgtccgttgcttcttaaagtgtgtccaaagctctcaccacttgactcatctttggtcttttggcagctgaagtggcggacacatgccagcgaagtttttaccattttgaacattt

SEQ ID NO: 173854 - DNA, 311 bp, Arabidopsis thaliana
acttagggaacgctggtacgcctgcaggtaccggtccggattcccgggtggacccagcgtccggacaacgcgaattaaaggaaactgttttatttatccgcgctttactaataccgcaaaagctgaaagctttctatgtcaaactactaagacctttagaggacacattcttgactacactttgaagtcgaaatactgttatataaggaggggggtccttttggccaacagaaattatgtacataatctaacccgccgaaatgtcgtcgaaagaataattgctccgaactgaagaaataatcaagaccacc

SEQ ID NO: 173855 - DNA, 773 bp, Arabidopsis thaliana
  unsure (1)..(773): unsure at all n locations
ctgggacgacccatgcacgcgtacgtaagcttggatcctctagagcggcgcgcccttggccttttttttttttttttttttttttttttgttttttttttttttttttttgcccaagagcccggggccttctattaataacaaaaacttttattagtttggacccctcactttctaaataaaaaccccccttttttaaaaaagggggggggtaaaccaaaggggcccatggctaaaaaaaaacaaaaaagggggggggccaaattttaaaacccaaattccccccggggttcaccgaaggataaaaagaaaagggtgnggttaattggggctctttttccccgggtttcttgggccccttggaggggtcctatgggggccttctcacgatatcgcccttctttcaaggaccgggatcagcattggggtgggaacttggaaccgaattttcctaaaaaaaagaaaaatgaaaggttttctttgtccctaaaacacttgcttttggattccaaggggcccggacaataaatgggggtaatcaaaattgacctggcggtttcaaccccgaatccggggggaaccgggaagtgttttcaaacaaagttcaaaccccgggggaataaagcttaaaagggcccggggtcttaaaccgggcccccgggtttcaaaggtttaagttccgaaaaagggggggggcccggtgtgccccctctcctcctccttaaaccttcctccgagaaccccccttcccccggggaattccctttaacgggg

SEQ ID NO: 173856 - DNA, 823 bp, Arabidopsis thaliana
ctatgacgcagcatgcacgcgtacgtaagcttggatcctctagagcggccgcccttccttttttttttttttttttttttttttttttttttttttttttgggagaaatttttttttttttttttttcttaaaaaaaaaaagatgcttcctaaaaattgttttcgaaaaggaagaattaacaatatagattttttccgggaatggtagcgaaaccagaaaaagagggtccactaggtaaatcaaaaagaggtaagaacaaaatcgatacaacaccatctctctctcggcattcatttagggactaccttccgggggattctcagtctccattggttcggcaaaagctggttgctctggctcactcttgccctcatccggctgctcacctcccttggcttggggggcctttgctttagccaccggctttggtttgggcattataggcctgcaaacttgcccaaggcctctgccttgctttaaccggaagtgacagaagaccggtgtgtcatacttgggaaggggggcctgttgttgtgcttttccccgaacctgcttctggttccaacacttgggaaaacctttggtttttgccagtcgggggaacaacttgggacccgaaacatacgggctcttggagcggtatacagaaccagcggtaatgcccccctttttcaagactctttgaagcccttaacgggaccccccctcttgagctctcagcttcgaaattaaacctttggggcttttcccattttatacaaaaatcctaattccgggaatacgccaagaagttcccttccagaaagggttattctcggtttg

SEQ ID NO: 173857 - DNA, 741 bp, Arabidopsis thaliana
  unsure (1)..(741): unsure at all n locations
ctatgacgccgcatgcacgcgtacgtaagcttggatcctctagagcggccgccctttttttttttttttgaacacaaatttcaactactacaatttatagggaaagagaaaattggtctatggtagttgtttaaacaaaccagaaactttcatatcaataatacaagaaaaaagaaacagagggatttgtttattgggcctggggggatgtttaaagtgaaaagacagaaaaaacatanaatcaagtttaagcttgagggttgtcccacttgagggggttcaccacctcccagggaagccagggtcgtctcttccgaaatgccctacgctgccggtttttgaaaccttccatttcctccttttttaaggccaaggtgattgtcatcattcctgggctaaatcgaatgtctttttcaccatcttaaggatcttcttgctggaatcaaccctgtcccgaaggtggaacaaaaacaacaatgggtcgggtactcaatgggcgatgaaacctgaacaaaacccctgggagccctcccttaacccacacactttttggtgttggcctaaaaaggaaactcacttttgtgaactttgggtgggtttttcccgaaaaacacccctcctgagccccctccccccgttggggaaggaaatcctcccccagtaaaccacatacccgttgggcccccatccaaaccggccttagggtaggggaaaaagtttttccccaggatttttttgaaa

SEQ ID NO: 173858 - DNA, 813 bp, Arabidopsis thaliana
agggaacgctggtacgcctgcaggtaccggtccggaattcccgggtcgacccacgcccgtccggcttgtatgatgatgaaatcgggacatctgtctaataaaaactcggtgagatctggttatagtcttatttaatcacgtgtcacctgtgaacgactaaacagcaaatattaaactgtctgacactcttgctttatggagaatggagaggaatatttattattgcagatgttattcgagggtacacagaacaagctactgttgatgaatgtccatgcggacctgtaaagtaactattcctcgggcacttttgaatgtgattgccaattgaaggacagtaccccccaaacgcgtgggtgctgaggacaagaaacctaagtctaatgctgagagggcttattttgtttacaaccatgaagagaaaggcatttaaaacgaacgtccttgcttcttccggtgtacaaaagattaccttattgaacagcttggagactttcttagatacgcaatctgaccctcttggggaaaaaggcaaaaattgatgatttttaggattgtgtaacgccttgaagcccttttaaggtacaccaggaattgtcaataagcggctggggtggggcgttttaaatgtccccatttgttccaaactcagccgaattgtggagctttaatttgttaattaacagggaggtttttcttttaaaaaaaaataaaaggggcgccctctaggggtaccggctcctgtccagggatctaagggttatattttaaagagggcgaaaatttactcagggcggagttcaaaaattggta

SEQ ID NO: 173859 - DNA, 364 bp, Arabidopsis thaliana
acttgacgtcccatgcacgcgtacgtaagcttggatcctctatagcggccgcccttggtttttttttttttttttttttttttttttttttttttttttttttttttttttttttaaaaagggaggaaaaacccgtttttgtttcagggaatttatgaatttggggggagagattcaaaatttttccaaatcttttcttaccgggggggacaagacccgaaccccaattactttggttttcggggaaaaaaaaaaaaaaaacttaaacaagctttgctttgggcaatgcacaaaaaaaacaaaaacatgttctccattctttaatggggggacaaagccaaacagttttttaaaacccggtttt

SEQ ID NO: 173860 - DNA, 502 bp, Arabidopsis thaliana
  unsure (1)..(502): unsure at all n locations
tgcacgcgtacgtaagcttggatcctctatagcggccggcgcttggtctcttttttttattttttttattttttaggttttcttgttttgtgttatttttttttttttttgggaaaagggaaaactgggtggatgggattttaaaaggaaaaaaccacctgtggaaacacacgggctggggatttttactagggcgcggggggcccactggtacaataaaattgaaacaaaaaaggcccgaacttccttttggggtttacacccccaaaaaacatcatcttctttattttttttcgcctaggggccgatataaggccccttcaggtggcgggtgaccacagggccctgggtgggaaaaacttagctttggccccctggggccaaacccttgtattggtctaagttgggggccccaccccgggggaattaaggaatcccccnttcctgcaaaaaagattcttgcccccccggggaccttacttttccttccaaaagactcccg

SEQ ID NO: 173861 - DNA, 897 bp, Arabidopsis thaliana
cacgcgtacgtaagcttggatcctctttagcggccggcgcttggccttttttttttaacaccaacacagactggtgggtatatgcagatacaccacaatagataagaaattatccaaaatacattcaaacagcaaaatatgggaagagacaataacaaagggagagactttcagatcctcctcttcaaaggaggggaatctgtctctctatatataagataaaaggaagcgatgctcagaaaaaaagaaacccaccctgatttggtgaaaaaacggaatcccaccgtctaaccaaaaatgggaaggggtacgaaggacctggaggagcttgattaaaaaaccagaggccctgccctgactggaaggaaagctgtcaggaaggggggacctgaccctccttggggagagagggggagcaaactcccctacaaagaccgggccaacattccactgcaacctcggtgggacccaccccccaaaacaaacggtgcatcctaaccggggaaaaaaaaaaacacgcccccaccggagggcctaaaaaaacgggcacattgaaacccgccatggtgacaatcaaaacccagagcctggtttgccctcaaacctccaaaaaaaaaaaactctggtcggcgcccactgggaggtgcccaccaaccgggcacaggggccccccgaaatcccgaccggactggaagggaccaccttaccaaaaggaaggctataagccgagggaaacagccaaagctctcctgggaaatgtttgcggccaacccaacaacaaaaccggaaaaaaaaaaaccggggccccataaaaacaacaaaaaatggggcccacaccgctccccagaaacaacccccgtaaaaataccaccccgggaggcgccttggcccagggta

SEQ ID NO: 173862 - DNA, 564 bp, Arabidopsis thaliana
  unsure (1)..(564): unsure at all n locations
ctatgacgtcccatgcacgcgtacgtaagcttggatcctctagagcggccgccgcttggcctttttttttttttttttttttttttttttttttttttaaccaaacaaaagggaccgtgaccttttcaaaccccagaccaccacccggtggttttaaaaaaaacaccatttacaaaaggcgcccaaatgctttttaccagaaagggggagcgatatcctaacaaaggcctggaaaacattcacaaaccattcttggctcaaaacggcccaagcaatgggaaaaccccggaaaagctaaaaacgggttccctaaaccatcgggaacattattttccccattttcccaaacgggaaaaaaacccctcccctttgccctttcgggaaaattcccggcccactgcaccaattacttccggttgcccaaacctaaaaatttttcccggcccctccgggaccccggcctggaattcaaccccccncgggggttttgttttgcgccccgggggggttgggccccaaaccaaagggggttttttcaagggcttgagcccccggaaagggttt

SEQ ID NO: 173863 - DNA, 475 bp, Arabidopsis thaliana
ctatgacgccgcatgcacgcgtacgtaagcttggatcctctagagcggccgccctttctttttttttttttttttttttttttttttccaaccatgaaggaaccaaaaattatcttccaagtatagcgaacacgatttaaaattgtctaagggatccaaagagatggcaacaaaagaaaccgagtttcttacaactcttgaacgatttcctcagggacatcgataaaatcctaaaactcaacttctttggcttaatattaatcttcttccacataacttacttaaccatccggaaggttttgcctcacgagtttctccttttaatgcaaagacttccactgcattacccatttctcccattcttccttaaaggcctttcttttttcttctgctgggaactcaacagaacaacacggcctgatcctctgcctaatattgttgtggacttcttaagggccttggctatctcttcttc

SEQ ID NO: 173864 - DNA, 420 bp, Arabidopsis thaliana
ctatgacgtcccatgcacgcgtacgtaagcttggatcctctatagcggccgccctttgtttttttttttgaccggaaaaaaaccagagctgtggcatacatttcagttttactaacaatacatacacaagctccaacaagcctaaacatcttttgtggcattgtcatataaccatttcattataatcgcgtacaacataaacgagtggaacctgccaccatctatttttctaaagagggaaagccactgcaagtttttagaccaacgggttgagtaacgtgcacaaatggttaaccctaaccttaactttttccgacatttatgagaagtcttcctttcacccttttttttaaaaaaccttacaaatttccccaagtatccggccgaaacaaacttcggatttattccttagtgaagaaa

SEQ ID NO: 173865 - DNA, 758 bp, Arabidopsis thaliana
  unsure (1)..(758): unsure at all n locations
cacgcgtacgtaagcttggatcctctatagcggccggcctttttttttttttttttcatgataaagagattttattcattacttgtaaaaaaaatgttccttcctttgtataaagattaataatcatacagcttattcccacttctataaactaattttggaaagggattattctttattttacttataaaccgaagcgtaatttaatatggtggatcttatattcttggggctcaagaattctatgaaaaaagaaggctcgacctctaacttcttgggtggtgccttcaacctgagccttttcttccacattaacaaaacctttctccaaaacctaaagaagccggggggaggaccaaaacccccctccgttaaactggggacagcccgaaaagttcccccataatacacaggttttttaaaatcccaacctcgggttcccttggttaattggaccgggagttttatagacccaggcaatccccccttcttagaggaaaaaaaaagggcctggggaaccttggggtggtttgaccccanaacccacccaaaaccttgggtccccccttgaagacttttggttgggaaaaccaaaacccggttcttttttttactgtccccaatcttgtttactcacactttggaatttttaggttccccacgcttggggagagaaaggatttttagggccctttcccccctttttttttatccccggggaaccccaccttgaaaaaaccccccctttttttgttttg

SEQ ID NO: 173866 - DNA, 725 bp, Arabidopsis thaliana
  unsure (1)..(725): unsure at all n locations
ctatgacgtcccatgcacgcgtacgtaagcttggatcctctatagcggccgccgcttggtcntttttttttttttttttttttttttttttaaaaaatcacatgccttaaattttgaaaaaaaaaaaatggagacttctgattcttgtccatggacaaacacatttgtatcctcaaaataagaccatccaaattggatccatgagaggacttaaaacaatgaaaccaatgtgctctttcagataaccaacatgaaaaaatatttcacccaaatctcttcatatcacccgacactttagactcaaaaactattagacccataacgactcagcattcaataaaacccgccccaagcgatccccaaccacttgtatgactcgacaaacattggtagattgatgggccaaaaaatgggagactctggatgctaaaacttttgggggttatttccttgccggtttggcaacttaaagaggaccttttttggtggggaccattttttctgtttctttgttcaccaattctttgcccgctctcttcttttttgtggttcacttaagctttcccgctccaaatttcggttgggttttccctcgttttggctctcccaggcattctaaaaaggccaaagggtaggggttttttgtttcttttttttttttaaaccaaaaacttcctgaattttgataaatggttgaatctaaaaaaacaatgggtccaaaaact

SEQ ID NO: 173867 - DNA, 869 bp, Arabidopsis thaliana
  unsure (1)..(869): unsure at all n locations
ccgacttatatggggaacgctggtacgcctgcaggtaccggtccggaattcccgggtcgacccacgcgtccgcggacgcgtgggccaaattctcttctctctatctctctcgcgtacgccgcaccgtagcgaccaattgaatccacgaggaaatctcagtaaatactatggcgaccaacgaacccgagcacgagctcttagacgaggaggaggccggagctaacgaggatgaggacaccggagctcaagtcgcttcgatcgttaggcttgaggaggttgccgtcactaccggcgaggaaaacgaaaatgccctccttgatctgaaatcgaagctttatcgattcgataagggtgcaaatcaatgggaaggagagagggagctggtacttgggaatttctaaaagcataaaaaccacgggaaggattcggtctcgttatgaggcattctaaaactttgaagatctgggctaatcactttcgttaaatcgggcatgaggtgtcaagaacacgttggaaatagaaaggcatgggggggggacccctcgggactttggtgatgggaacctcaggagagagctttttgggtccgatgtggcttttttgagaattgcaaaaatttatgcaaaagttcagagaagttgttgggtctgaaaaaaaaaagaaaagagcaagatgcccgtaacctggtggccttttggaaaatggctggggagagacaaaacggggagaaaaccaaccgaagcggggggaccggaaaaccnaggggaaagcgaaaataaaagaagcgggcggaaatttggggagcaaaaaacaaaaaaggggccccccaaaaaaggggatattaattgccaacccgggggaaaaaccca

SEQ ID NO: 173868 - DNA, 405 bp, Arabidopsis thaliana
tatggggacagctggtacgcctgcaggtaccggtccggttttcccgggtcgacccacgcgtccgggtggtgattggcctctactgagagtgatgaaaggaatatttgaaggaggacttgagagtgccaacagaggggctgttgatgaagaagaaaaaaatgttgaaggccactggggggagggacttttcaattcgggggggggggaagggggaacacagacactcgaacctttttggttggtgcccaacccggggaacaaaaataccacaaggaaggggggatggggacttgacttggactctccccaaaggttgcccctctaaagcctttgctaacccacgttaatttatttttggaccctcctcaaggtattcccgtaagtcaaatatggaggtaaaatttt

SEQ ID NO: 173869 - DNA, 327 bp, Arabidopsis thaliana
  unsure (1)..(327): unsure at all n locations
ttggatcctctatagcggccgcccttttttttttttttttaacataaaatttagttatttcttttcaagtgagatttaagaagttgattctaacattttgaagaaagaagccttcgtactcttgcatgtgagttgtgaattanaagttgctagaccttatttgatatatgtgggtgggcataacttcatcaggctactaacttagttagaaaccatactctcagtctccttcacgaacccatccccgggtcaatctttatcagatttcaagcctctcttctcagcttttctctgctcaactgcttctttctgtctctaactaaatct

SEQ ID NO: 173870 - DNA, 524 bp, Arabidopsis thaliana
  unsure (1)..(524): unsure at all n locations
cctatagctgnactatgacgacgcatgcacgcgtacgtaagcttggatcctctagagcggccgcccttgcctttttttttttttttttttttttttttttttttttttaagaggaagttatgagccttttatataatgaatcacgataattttgctgacatctttaagctagacaatagttagattctggtttcctatttctgattacaataaggggggatcanactttaagctcttaagggtttgcaagaagaaataatagtcttcagaagatcaatggccttgagaaaaatgggtctctctcacattctcctgcacagcctgaaggagttctgtcatcttgcctcggccgtaactgggcatgggtttcaacatatgtactggatggattgggtgtatcgcctgcaatggctcaagggacagagcttgctcatctgactcgggttcaacggactgggttgggggctggacttgacccttattcatcacctgggggagaacggctaaaaagggttgccgtactc

SEQ ID NO: 173871 - DNA, 275 bp, Arabidopsis thaliana
  unsure (1)..(275): unsure at all n locations
gtacgtaagcttggatcctctttagcgggcgggcttggtctttttttttgttactgaatcaattgttgcaagttatataataggacaatacaacaatgtttnataaagggggaatctctctgggcactctcatattctatcttatagtataacagcaaaatgatacacacttttattatatagagggagaggggtcgatttatttttactgcaaaaaaaacacttccttaatcaagaaaagaatcttttttatggggggtgggttaaagtcccca

SEQ ID NO: 173872 - DNA, 391 bp, Arabidopsis thaliana
  unsure (1)..(391): unsure at all n locations
tgcacgcgtacgtaagcttggatcctctatagcggccgcgcttggtttttttttttttttttaactaaaattatattttttttcagaaacgaaaaaaaaaaacttatgaacaaagaaaaaaaaattcaatttcatcaaagcaattattgatcatcatcatcatcttcttcctcaatcagtatcttgaaagngcggacaactcctaaacttataagctctggtctttgaaaatccttttcttaccacaactttttcactccttcttcatcactcgatgattattctcatcaaccccaattcaagatcttttcatcggcatttcatcatcatcggcttatcttcgttaccgggaacagaggctaaaattaggggtttgcctgaataaacaatt

SEQ ID NO: 173873 - DNA, 665 bp, Arabidopsis thaliana
  unsure (1)..(665): unsure at all n locations
actctagactactatgacgtaccatgcacgcgtacgtaagcttggatcctctagagcagccgcccttggttttttttttttttttttttttttttttttttttttttaatttttttttttttttttatttttttttttttttttattttttttttttttttttttttttttgaaaccccccctcaacacccccctaaattaaaagggaaaaagggggggaggcccccccaaaaaaattattctaaaaaaantctcccctatggccccccaaaaaataccccggaaaaaattttttaaaaaaaaacggaccccccgggggcgcccggggaatacccggaaaattctcgcgggggccccccaggttcccaaaaagggtcccaaaaaagaaacgtggaaaaaacactgggaaataactgggccctggggaaaacttggtgaaaatnaatttcccccacacatctcccncccaaaaaataagggggaatattcggggggcgcccgagggggcgacaaaaaaaaaaaaaattgcttttcttgggggccccttccccggagaaaaccagggaaaacttgtttaataaaaaataaacagcggnaaaaagggggaaaagaagccccccacaggggccttttttatcttttaaaaaaaaaaaaggaccccttcc

SEQ ID NO: 173874 - DNA, 1003 bp, Arabidopsis thaliana
  unsure (1)..(1003): unsure at all n locations
cctatagactagctatgacgtcgcatgcacgcgtacgtaagcttggatcctctatagcgggcgccctttttttttttttttaaaaaaagacatctcattgctcgtaataacaacatcctcagcattcataatttcatcacatagagtttttacttcacaagttcttatatcgaagagtcagttttcataaccattaaaacataacgcaaatcaatcaatattgccagaggttgcattgcataagtagcagtagtaactaattgccaaagaaagtctggttgaagatacgaaactcgttttgattctataagcaagcaaactactcaagaanaacatgttaaactttgaagaaccacgacacatctttcagaaggatccatacctttgtgaaaattaatggattctgcttcagaggttcatactggccatgcaaacaacctacctttggtggaaacatctgagaagggagcttggaccaatttccgatcacaatggcccaggggacaaactaaaggaagaaaggcgggcttgggttcccgttcattctggataattttccatgaaagggaggcgtggagaacaaatcaaaatacggaatcgccacgggtgccaaaccccattttttggaagaggcttcattaacattaacccccttccggcgcttggccccttacctcctagagggccgaacaactttttgccggaaggaatagctcagagggctcgcggcggggaaaacccccggacggagcccgagggacggaacagcgcggggcgtcacttgacagtgtccgcgtgaaagagggtggccgggcagtgtggggcctcacacccgcgtccttcaagagcgcccggaggtgcccgccgcgcccgggagtgcccgacgtgtcggcgggggacgaagcgggggagcgatcgccagcgcccggcgggggcgcggcgtggcggcggccgggatcggtggcggtccacccggtgttgcgcgggggggcgcgccgggccg

SEQ ID NO: 173875 - DNA, 780 bp, Arabidopsis thaliana
ctatgacgacgcatgcacgcgtacgtaagcttggatcctctatagcgggcgccctttcccttttttttttttctatttccttcttgggggaccatggcaaaaaggagaaaatcaatatacataggcgccaccatcatcatcaataaaagaatgggatcaaaaatctccgaagcagcttccctaacttgcttctcttcgtaacgaagagaacaacaggggaaaggaccttgcctacaaactggagaaaacaaaggcctttataaaagaaccatgggctccttcccgctttaacccggcgtgaccaggaaaatccgcagccgccggcggaacgctccccaccttccatattcaagcacttctggggctttaaccacatccccccgggattagacccacacccgagggaggcaaagccccggcgggaaaaactgcggtaccaccgggggggccctcaccgcaccattgtgtaacaccactcctccaataagcgccttccttgaaaccgcggcgcgagaacgcgtggcgggacgcgcgccacgcaaatccggggcgccggcgcaaccggcagcgcccaccgcgcacgccgacacgccgcgcggcgcccagcagcgctccagaaccgcgagcggcggagaacgcgccgccacccccgagcgactaccgcgcgagagaggctgaaacgacgcgacaccgcgccagagacgcacgcgccgcgtcctacgggcccgcggcgctcccacgcacccagcatgagggaagaggccggcccgcccgcgcccc

SEQ ID NO: 173876 - DNA, 558 bp, Arabidopsis thaliana
  unsure (1)..(558): unsure at all n locations
ctaatcgacttacttagggaacgctggtacgcctgcaggtaccggtccggaattcccgggtcgacccacgcgtccggttttctttggaaccctaatcaacttgtgttttatgttgacgatacaccgatcagggtgtacagcaagaatccagatgtttactacccatcggtgcagacaatgttcctaatgggaagtgtgcataacggatcgataattgacccgaagcagatgccttacattgctaagttccaggcatcaaagattgaagggtgtcagactgagttcatgggaatagataaatgcactgatcctaaggtctgggggaatcgcaaacagctaagctctaaagagaagacactgtacctaaacgcaaggaagacggacctggattattactatttgtctgacagacagcgataatccaagggtgcctcaagattgtngaaagttacacttaaaaaaagatcaatacctgtcacaggggttaagcctacaaaacaattatcttggaaaaataacctattgttactggaagaatgctttatgataagccttttt

SEQ ID NO: 173877 - DNA, 919 bp, Arabidopsis thaliana
  unsure (1)..(919): unsure at all n locations
ctatgacgacccatgcacgcgtacgtaagcttggatcctctatagcggccgcccttttttttttttttttaagaaagaatcataatcgtgatactaaaggtgggtgagctccaaatcatcttaagaaccttttttcttttgtgtgtgtgggaatttcaagaaagacgacaataaaacataaaaagaaccattttttttagatggggagagcactgggactttttttttaacaaaaaaaaaatccatctttgtgtctgtcaagatccacagctggagcttgcatgcacaaaaaccatttttaaggctgaggtttactaggatctcctcctccaaattaacatgacccccacctgattaaccgggtgaacccggttgcccccggcctttttctcaaccctaactttgttaaaaatcactgaaaaaccttcggctgatgccggatattcacatcccaattcaccaaattttggcaagggacaaccttttcccaacaatggggcttgaaaaagggagaanaatttccccaaaaaaactcggaaaaaccatgtgggggaaaaataagaaaaaaaaaaacccgccgaaaaaacccaggaaggggagaaaaaatatattttcgacccctgggggaaccccgaaattccgaaccggccctgaggcgacacaatttccttaaggaggcaaaaaaactcgggaaaaatggcaaaatttttccctggaaaaagtttcccctacaatccccaaaaaccacccgaaacaaaaagaaacctggggccctaagagganccaccacataatggtgccccaccccccctccaaagaaaaccgcgcccgctctataaatacgccaccccgggaaaggccttcatatgcccacgaggttttttacaaaaaaagaaaaataatccccccctccgccaaa

SEQ ID NO: 173878 - DNA, 633 bp, Arabidopsis thaliana
gggaacagctggtcgcctgcaggtaccggtccggatttcccgggtcgacccacgcgtccgaaaatatatttctctctcactttccttggttttctcgggggcttcttcttctcctatttctccctcaaatcgttttctccagttttcttgggataaatcttcctcctttctgcagacgccatgttttacaaaggtcgtgccttgccaaaatttggtgaatgggatgtgaatgatcccacctcagcagaaggttttacagtggtattcaacaaagctaggggatgagaaaaaaaccgggggcaaaccgggatcaccccggtaaatccaggggaggtcatgttaaattctgaggaggagatccttagtaaccccaccctaaaaaaagggttctggtggatgcaagctccagcttggggctctttgacaaacacaaagatggattttgcctgctgctaaaaaaaaagccccagtgcctacccctcttaaaagcaatgggttctttttttggtttaattggccggcttttttgaattcaccccccacccccaaaaaaaaaagggttcctaagaagatttgggacctcacccccccttttgttcaccgattatgatcccttcttataaaaaaaaaaaa

SEQ ID NO: 173879 - DNA, 927 bp, Arabidopsis thaliana
  unsure (1)..(927): unsure at all n locations
gctatgacgccgcatgcacgcgtacgtaagcttggatcctctagagcgggcgcccttccctttttttttttttttttttttttttttttttttctttttttctttttttcttttcctttctctggggccngaaaaaaaaaaaaaatttttccattttagaggggtttttgccccaaattaaacccctttatttttttctttttgggggcggggaaaccccccggtttctctgggaaaaaggggccttttaaaaaaggggccgcgggggaacccctttttcccctttcaaaccacccctttaaaaggggggaaaacaatattcccccccaatttctcgccccccgttttggtaaccccgaccccccccctggggcggtggggccccccccgacaccgggggtgggggggtgggtttcctataagggtatttgcgcccccccacaaaaataggcgggcccctcatttatttttcccggatttctggggtgggaaacccacttccgggggggattttccggccccaaaccccattatggttgtggaaaaatccttttaaggttcctgaaaacaggggggggggatctccaggcgctttggttttgatctcgggggggccaatacccacacgggaaggggtgttctccccccacaaggggggggagggccacccgcctggggcggaaaacccggccttatattcgcccaaaaggagaacaaatccctccctacggggggcggcctatcctgacaaacccccgcggaaaaaggcgccgtggggggctgcccccaccccgggaccgccgtaatggtgggggcgccccttcccccagggtcgcgttcgaggcccgcggcgcggttcttccccgcaagactcggcacgcgcttgggcggggggggacgggggcgcccgccccgcgctccccgccc

SEQ ID NO: 173880 - DNA, 593 bp, Arabidopsis thaliana
  unsure (1)..(593): unsure at all n locations
cctatagaatagctatgacgtcgcatgcacgccgtacgtaagcttggatcctctagagcggccgcccttttttttttttttttttttttgagaaaaatgcggagagtctcttttcttctatttttttcaacctttttttataacataacaaggacgaggtaaaactcttttgtttaccgcccgcgcgcttctgtttaactagcatttggccttggttccaaagaagaggggaccgtgggaatgggccattaccattaccaatggagccacaccaggaacccagattccttcaccgggctcacaatcttctgggactaagaaggtggagtcccccctcntctggagtcccgagaacctttggaataggatagacctgaggttccatcatcgatcctgggggggccccaaggncttcgggcttcaaacccgtttccaagcaaggtttggacttgggggccccaaagacttccacccaaaacagaaactggcgacttctgggcctttatgcgaaggcacattatctttcctgggttccaaaagaagaaaaacgatcctggcacattggggcccaagatcctcgggggagagggtac

SEQ ID NO: 173881 - DNA, 478 bp, Arabidopsis thaliana
  unsure (1)..(478): unsure at all n locations
actatgacgacccatgcacgcgtacgtaagcttggatcctctagagcggccgccctttgtctttttttttttttttttttttacagagagacatacaatgggatttattttcccttgatcactatgtctatcataaagatcttctttttagggtaaaacaaatggtaaattatattattatagaaaatnctaatgaatactttgatcatatatggggggagcctcttttgaatcactgcatgggctatcactccaaggtccttatgtgcttctgccactggcctgtttcacctgcttcagcatctatgcagtctccatcatcattatttgatgaaccaatggcatgcaagctaaatgtggtagtacatgaaaccctagcttcaaccaccatcaagtccaaagatcttaaagggttcaaagaacacaaaccacatgcctgcctcatttttcctggcattacctttattaatgaacccct

SEQ ID NO: 173882 - DNA, 897 bp, Arabidopsis thaliana
  unsure (1)..(897): unsure at all n locations
gcatgcacgcgtacgtaagcttggatcctctagagcgggcgcccttttttttttttttttaaaacacagtaaggaaccctttggcaaattaagccaacttgaaattttgtggggtttacaatataaaccaatatatatatatatatatatatatatatatatatatatatatagagagatttagagagtggggactgancaaagtcaggtccatagtttagttatactaccattttcacatgaacttaagaactttaactccaaatgcaattcctatgaaagttgcaatggcgatcccaaatattcccggccagaatcccgggaactatcaacgagttccattcctttggcggggccattccagctgcggtggtgggtcctccgacattacctttgatgctagaaagcagcaccttacctcgatgtttagcacctttcctatgcccaatataaagccaagaggggccaaattgaaccattgcaacaaaatatgccccgcccaggttatcacacttatatgtttccgtttgcacccccaatggaaaaaaccccggttaaacttagacccttgggttttcaaaaaggaccaagaacacaaatctgggaacccgaagaacattcttaaataaacacaaccggtgggataggcgggagagctccacccaaattccgaaacctcttttaaacaagcccacccttgcaaaactattgaacaaaattcccgtactttaaaaacccgagattttttttatgtcaaagctcgtgcccgttggggtaaaaaacgaagagggggcaacttcgaagtttttgaacccaaaaaagagtgtacataacggcctttatctttagggccgccaaagttacccggcggcgcaaaggaccttgtaaattgagtgg

SEQ ID NO: 173883 - DNA, 402 bp, Arabidopsis thaliana
  unsure (1)..(402): unsure at all n locations
ctatgacgacgcatgcacgcgtacgtaagcttggatcctctagagcggccgccctttaccttttttttttttttttttttttttttnaaaacggcgtttcaaactttaatttaattccacgaaactgattgtataatttcggatgcgtattctaaaaccattgcatgtgcccatcagctttataaaataacatcctgggacatgtgggttctaagggaattaatataccttgcaaaaagacaatgtatatatatttatgaggaaattagtattatctccgttcacaatctctaagcagagcatttgttcaggacaacagattcaatagggatcttatcaacccggaaaagccagtccaccggggctccttttctcgggacaaaatacacgggttaggggaac

SEQ ID NO: 173884 - DNA, 769 bp, Arabidopsis thaliana
gggaacgctggtacgcctgcaggtaccggtccggaattcccgggtcgacccacgcgtccgcggacgcgtgggcggacgcgtgggcaaataccaaaaacaagtcataagaatcaaatgggggttctctttcaatccttcaactctaaagatgattcggacaagtttttggatattagaagttttggcatttaatagtctttggatgatggaagctcgggatctatctaacaaaggaaagacaatttttgatttttggcggtgaattgtcgaaacatacccgagttttgacaaaatttggagcagttggtgatggaaagacctcaacacaaaagcgttcaaagaaaccttacccagcttgttcaaaggcaggcggcgggggggggcatcttattgttccaccagaaaaatggttaaccggagtttaacccccccaccctttttactttgttttccaaagaggggcaacttttctttgttctaaggaagaaactgaatatccagtggggggccccttggcctttttacggaaaagggagaaaaggcagcgggcccaccttttgcttgtctattcctgggcacaaacttatttgtgttttttttcaccggtacatacggaactataaacaggctaagaaagttctcggggggagaatatctcaaggggggattaagggggacacaaacctcaccactcggaactttttttttaaaaggtgaaattcgaacccaaaatatggtcccccggggggagaattttctttgtttgcaa

SEQ ID NO: 173885 - DNA, 606 bp, Arabidopsis thaliana
taagccttggatcctctatagcggccgcccttttttttttttttttcatcacgagaatctttagagttgtaccctttttattattatcatcatcatatctcatatccacctaaaacagtgtcaactattaaattctcgacaacccacaaaagcgagtacgcccacacttcatattccgactgtgcaaaatcccgtgtccgagatctacttacaaacgcaaagtccactttgggtcctcaaactaacatcgtttgcctctatctccacccgtcaatcttttttaataataccaataaaaacaaaatgtttttacgaccaccaaaaattaaaaccaccatttaaaaaacacctctcaagaacccaaatcatttcccgttttggatcgtcaaaaccgacaaattcccccacccttgacgtcatcatattctgcggtttcctttttcatcatggaccccttaccggaaaacaataaaagcccttgttttaaccaaaaaaaaaaagggcccgtttaaatcgccttaccccttatacttaaccaaaaccccctcccgggacggggggttttaccccaagcggtacgggaaccacgtgttgtttatccttttt

SEQ ID NO: 173886 - DNA, 508 bp, Arabidopsis thaliana
ctgtgaagccgcatgcacgcgtacgtaagcttggatcctctagagcggccgcgctgggcttttttttttttttttttttttttttttgggacagagaagaaagtatttaccagttcaattcaaatgaagaaaagaaattacaaatcgggggcaacaagaaccgaaattgattttttttttcggttccttctttttttaaaaggggggggttgaaacagagatttatttaagttaaagcaagggcaggtcttcttctactacttctaattaccatcaggaaggagaagaagaagaagaatgtggtaatggagaagtgctttagtataaacggaacttctcctttgggttctggaaaacttgctccgcaatcggagggccattcccgtgtggtttcttgatctccagactagatttctggtaaacccccgggcctcctaaagcatcagctttgaaggcatcaaacccggtgggtttagctggttcggctttggcttcataaaccaacctc

SEQ ID NO: 173887 - DNA, 909 bp, Arabidopsis thaliana
  unsure (1)..(909): unsure at all n locations
actatgacgccgcatgcacgcgtacgtaagcttggatcctctagagcgggcgccctttgtttttttttttttttggtttttttttttttggacagaaaaaaaagtttttaccagttcatttcaaaggaaaaaaagaaattacaaatcggggtcaacaagaaccgaagggggttttttttttcggttccttctgtttttaaaaggagcggtttgaaacagagatttttttaagttaaaggaggggcaggtcttcttctactacttccaattaccatcaggaaggagaaaaaaaaaaaaaaggcggtaatggagaagtgctttaataaaaacggaacttttcctttgggtttgtgaaaacttgctccggaatgggagggcctttcccgtctgctttttttgatctcaaactagaattttggaaacccccggggcctcttaaaaatcaggtttgaaggcttaaaccccgagggcttaggggggttgggttttgggtccataacccacctttttggtctagaaagaggaggggttccaaacccattgggcaggggtcaaaaaagcggaaatcccggattttggaccccgagtttggtaagtttctaaagcgccttttaagggaggggtttaaggtgggcaggggggacatatatttaaaacctttgggggaggggggggcacccttgtttttggaaatacaccggcaaagggggccccatcccaaggcctctctttggaggttcctacgggtgggggagaattatgggccttgggaaccgttggtggacgggaataagaaacccgagaggccgcctttcggcacttcaatcttccaaagngatccaaggagtctcggcacgtgatagaggcggcataggcgcgacggaggccgcgggcagcccgggcagcggg

SEQ ID NO: 173888 - DNA, 877 bp, Arabidopsis thaliana
  unsure (1)..(877): unsure at all n locations
ctatgacgtcccatgcacgcgtacgtaagcttggatcctctagagcgggcgcccttttttttttttttaatataaaggggctcataatcacagaaggaaacagagctctctgtattagctttaacatcaaatcagatataagaggttctgttttggtttggtggttatacttaagaacagcgaattaccaaagagggagattgtgatcgcctggggcttgtttttcttggctttgcttcaaaagcaaaagaggaggttcttcttcttcttcttcatcttcgggaactgagcttttttttgacgatcaatggaaggcaagtaacttttcctggctaatcaaggctttgaaaagggcctttttagaacttatgagctctgcttacagggcgctactttggagacggtggggtaaaaagtcttctttttcgaaggattccatttggcttttgatggagggttccaatttaccttcaggtttggaggttttcggaacacagttaaggaaaaaagtcccgggaggcggnaacagagagaggggacaacctcgttttaaggctttgcgggggaaaccaagtcctttggggtgctttggtttcgccgagagagaatgacggcgccgggaaggcgcttgagaaccccggggagcggagcggccggccccgaccggcgagggcgccaccgggcgggggctggagcctcaagcttggggccgcgagtagaagtagcgtgtgagcggtgggggcgggggacgcgcggcggggggtgcgcggggcgggagagcctatgcgcgggacgaaggggccggcgtagcgccgcgcggctgctggtgcgcccgaggggcgagtgacggccgcgcccctgagaggcggcggggaga

SEQ ID NO: 173889 - DNA, 846 bp, Arabidopsis thaliana
  unsure (1)..(846): unsure at all n locations
aaaaaaaaaaagggggctgttggggactccctanccttcactatagggacagctggtacgcctgcaggtaccggtccggtattcccggggggacccacgcgtccgaaaggaccaaaacgcagcgttttcttccggagatcagtcgggcggaaagcggctacctttttgtctgcctagaaaatttgntcggttctttcttttactctctttagacaaaacccacgtattttttgaataagggggggggagagattcggccttggaaaaaaacactggtttcgccaagctaaaactaccccggggggaaaaagcaatatagtggaccccgaaaaagaaggctggttcattttaaagacgaggaaaatcactgggggggggtttgggagattttcattgtgggggctgtgcgagaacccctaggcatggttccgggtccagggtgtcccataaaattcctctggggaacccaagtggtgaatattttttaataagggattgaatcttcttgcccccggggattctgtgtagacggccattgcccccgttgtataatggggaaaataattcgtggggaaaccctcttctttcttgggtgccccggaaatctcttggggtgcccgcttttcttttttgggttccgcgcgggtgtgaccggcgaattttcaccctgttttgggtccaccgaaagaacgcaagatgagatttgcgcgggcggtaaacaattggcggttcctctctgtcttgcgccccggtcgggtggggttatttgggatacacattgtgacacgcgcgtataattcccgggggcgccgggtggcccagtggacccaactcggtgctgtggcc

SEQ ID NO: 173890 - DNA, 559 bp, Arabidopsis thaliana
ctatgacgccgcatgcacgcgtacgtaagcttggatcctctagagcggccgccctgggtttttttttttattttttttttttttttttttttttttgggggggaaaaaatataattgaacaattgggttttgttggactgctttaaacaacacattttgtctatacaaaggcgtagcctatgatcataaatcaatattggggggggcgggattcaacaagccagcacaaacgcaaatggcatctaccttttccctacggggggctttttttaagcttcttacaatcatcttggctgacgtaatacgctgttaccgccttcagcttcccatttaaataggttttttctacctctagggaccatggaggagacgttgataagggaagctctgctagttggttaatggcaacatttcttggaagaaacataatgatggggtgacccaatgttcatggccgccttaaatagagcatctccggcacgaggtctcaacattgtcttcatatcatacgggctcgctttaaaaaaatcagggccctccccaggaggcgaaaggaata

SEQ ID NO: 173891 - DNA, 520 bp, Arabidopsis thaliana
ctatgacgccgcatgcacgcgtacgtaagcttggatcctctatagcggccgcccttttttttttttttttattatcctcaactcttatcttctctttttataggaacaacgttgatgcgattgtacatccattacatgtgaaccccttctcacggccaaggtgaaattttcataatatacacaaaaagggcaacaaataaagaagattatcaatgaccacacacggctgggctaccatactggggcatgctactaatcccaaagacatgtagttagtagtcagatttacgcgtggtagccagtctcccaccattgacacaggatctaatcatctgggctttggctcctccaataacttcaacttggcgatattcttccagagagagtcacgttaaggcccgccccatgaatagacaaagttgcatctgaaggggccatttgtgaaccggaatcttgcccattggcaagcccaaaaaccgaaagagctgaatttgggaaaaaagatctgatagttggctga

SEQ ID NO: 173892 - DNA, 492 bp, Arabidopsis thaliana
cgggcaaggcccccgtccgtaagctggaatcctttaaagcggcctgccctttttttttttttttcattagcaccactatcgcaacctgcatcagtaggattactggaaacgctaatactataacctgcctggtcccgcttggccttttaacaaatgaagtcagattcacccatgcttcctttaagctttttttaactaccccttcttttaccattggcaccttcccctcctgggaacattcagatactctttcttcccttgctgctagcggttcaccatcctcaatcaacttatgcccttcttggttctccagcttcttctgcttcaacagttcatgtgccattcttatccaatgtgcataagcttctctacattcttctaaagtagactgcactattttcccttaccacactgttcttttagagaaggccacattgacataaacattccatatacaaccctttaccgagtctctgaaatctcttttcaagt

SEQ ID NO: 173893 - DNA, 490 bp, Arabidopsis thaliana
gacactatagaagactatgacgtcgcatgcacgccttccgtaggctggattcttttgagcgggccgcctttttttttttttttatcgggaaaatggtttggggggcttaacctcattggtttccggaccaaaattctttggagaggtttaaggttcttaaaatcgatcctaacctctaaaccaaacctgggaagacaccttagcctcctgacttcttttaaccttaaaccagcaaaaatttcagacaccaaaaccaggggcagggaactccctaactggagccatggttgatttctgttaaatcatgaccgaaactttgactgtttcttctccagtttcattttgaggttggctataatcttatcctgagcctgtatctgatgttccttggcattgagcttctgcttcagttcttcaatttcttttgaatgaccttcgcagctgattgcgaactccatagctttgagtttttccttcagttcttccattt

SEQ ID NO: 173894 - DNA, 513 bp, Arabidopsis thaliana
tgacactatagaaagactatgacgtcgcatgcacgcgtacgtaagcttggatcctctagagcggcctgcctttttttttttttttttttaatcaatccttgacattgtaatatgatatcaatacaatcaaaatctcacccattaaagttttgaaactatagtactttaatatttatacaataactttggaatcgaagcagacttcctcagtacaataatgagaaattgtcacttttgaaagcaagcgctcaataaacattacattaaacaacatcacctataacaacattttaaaccggcctctatatgaatctatctcttcttacacatatctacaagtagctcttaagccatacattcacacttagtctgaaaatcatccacctttcctctccaagaaagacagcacggaatgggtttaagctacataacttacacagcattgcggttctcgggattattttcagaccctctttgatctaggtggagtccctggagcgaaaagggatcctt

SEQ ID NO: 173895 - DNA, 522 bp, Arabidopsis thaliana
  unsure (1)..(522): unsure at all n locations
tgacactatagnnagagctatgacgtcgcatgcacgcgtacgtagcttggatcctctagagcggccgccctttnttttttttttttttttttttttttttttttttttttttttttttttttttttntaaaaaaatctcagtctttttccatgaatcttctaaggtttttaaccaaatttttgaacaaattctatacaaataaccaatatcacccttcacttttttccaacgtagtagaccctttcctgtccccctttttcctcctccttccacggaagcaacacatccttttaaaacaactggaacaacaacaactactccggaaacattgggtgtgggggctttttaaacatttccaacaagagcatttgggacatttgggttttccaaaccattgctgcattggaacttgggacattatcaactactaacacagttgggttttttgcaacaagagaaacatccttttaatgtcggactcgaacttttgaaacaaccgaagcttcctttcctgggccgaa

SEQ ID NO: 173896 - DNA, 494 bp, Arabidopsis thaliana
  unsure (1)..(494): unsure at all n locations
acgtcgcatgcacgcgtacgtaagcttggatcctctagagcggccgccctttnttttttttttttttttttttttttttttttttttttttttttttttttaaattatttttttttttttttttttttnntnnnnnaaaaccagaaacaaacttttttttctgacattacattttgggccggaaaatttcagaaaacaaaaagaaattttgtttaaaaaatcctcaaaacattaacaaagttgttttaggttttttaaccaaagagatcaattccaaagttttctttttttttttaagatttttccttttttttcttttcctccttggggggggggggagcctaaccaacaccaccacctccagaagttggacttttttggggaggaaattcttcaccacccccaccaccaatgaccaccaggaagacggggggggttggaaaaacaagaaaaaaagaaaattgaacccccccagatgaattgggggaaagagt

SEQ ID NO: 173897 - DNA, 501 bp, Arabidopsis thaliana
  unsure (1)..(501): unsure at all n locations
cgataattagtgacactatagagacttgacgtcgcatgccgcgtacgtaagctggatcttaagcggcgccttttttttttttttaggataagcttctcttgcttatgacttggtctgatggtaagcaatagagaaaacatagatttaggtaagtgtgatctactacaaagaaatctccagtttcttggaacgcaagtatgactcttcgagggaaaactgtatttacaattagattagtacgtctcaggacttngtgcgtttctcagaggatgaattgcctgtatgattctcctgagaattcttctggatattctcgccttcgagcttcgctgagaacttgtatggcctctggaaatctctggcattttgactgtcaatactcagattgttcaatttctcctcattttgtaaagcttcaagctttttctgcatagcttcatgctcagctcgaatccggaaaggaacaccttgcttctggtagacattattctgggcaaggtc

SEQ ID NO: 173898 - DNA, 503 bp, Arabidopsis thaliana
  unsure (1)..(503): unsure at all n locations
tgacactatagagagctgacgtcgcatgccgcgtcgtagcttggatcctctagagcggccgcccttnttttttttttttttttttttttttttttttttttttttttttttttttttttttnaaagtcaaagaaaattggtgggaccttttagtaccttacccaggtcttggccaaaagaaagtttgaaattttaaaaaaacaaaaagggggttaaaagggactgtttgatgatcttttggaaacaaaattggtttcctttttggcccatatattaagacacatttatgggtatatatttctcctctgcccttttttttggatttttcctcattcatcatgagctttattaacctcctcactagtctttgattcatcagccggggcttcctctgtctttgattcatcaaacgccaacaacggtttgatgtcaccgttccaaatgcagggagaagccaagaacccaattacgggtgggacaatgtataacaaagcaggctgtgt

SEQ ID NO: 173899 - DNA, 517 bp, Arabidopsis thaliana
  unsure (1)..(517): unsure at all n locations
tgacactatagnagagctatgacgtcgcatggcacgcgtacgtaagctgggaccctttaaagcggccggccctttttttttttttttttaatagaaattttttaatccttaaatcttttaattcagatatttaacattatgaaatcaactggagctggggtcaacttttcatcaaagaatattgggtttccaacgatttccttcttcttaatcatggagctgagacatgaccaatcgaaaggaggaatcgcatatggtcctttgactaatccatcagccatcgatttgtgtgcagcctcagtcatatgaaggccatcccaggccacatactttgaaggatcactacaagcttccactcctacactcccacaacttctacttaagttgaagttgtacggccctcctacaccgcaacaagctgacaagtgtctgtttatgaatcttggttctcggccaaggcgcaatgaagcattgtagtagtcagcatatatgatgttgacgtgaggggtaagcttcc

SEQ ID NO: 173900 - DNA, 509 bp, Arabidopsis thaliana
  unsure (1)..(509): unsure at all n locations
ctatagaagagctatgacgtcgcatgcacgcgtacgtaagcttgggatccctctagagcggcgcgcccttnnttttttttttttttttttttttttttttttttttttttttttttttttttttnnncaaaaaattggttaacttgccttaaacctgggggccggggggaaattaaccggaaatttccaagggttccttccacccttaaacccccccaggtcacttttttcctttttttgaggggtttgaatttaccccaaccaaattgggcttcttaccctttttttccccggcttgagaaaccttaccaaaaaaaaggagattcggaagggtttttcttaccctcaacttggaggttggccccaactttgcaaaattgtaattgttttttttccgagtgacttgaaaatcgaatcttcgtttgttttattgggaccttgggaatttccaatacctccttttcggttttgaaggctaactgtgttgttattctgtggaacattactgt

SEQ ID NO: 173901 - DNA, 346 bp, Arabidopsis thaliana
  unsure (1)..(346): unsure at all n locations
gtcgcatgcacgccgtacgtagcttggatcctctagagcggccgccctttnttttttttttttttttttttttttttattttatgttttataaagaaacaagttttgatatgctttttttgttcaggtgcggcaccggcccacaagagtcagggcaaagcagatggcctggtttttgaccccgaaacgaaggaatcaaaggttggggtttttttccgcgcgagctttggacaacaaaatgggctgaccaggcttcggtaaacacttctacaagactaaagaagctaagggagggtcagggttcctctccaaacacctcaaaaagtatatgaagattcgggtgggat

SEQ ID NO: 173902 - DNA, 519 bp, Arabidopsis thaliana
tgacactatagaaagactatgacgtcgcatgcacgcgtacgtaaagcttggatcctctagagcggccgcccttttttttttttttaccaaacgattatataagaattttaacaagtgaacgaaaataaataaaataaacaaagggcaaacgggttcgattcagttgggtttaggtcttggtccgaacatatgtcatcaccggtccactgatctcaatctcaaattcactcgactcgactccaccaccgtcgtatgtttcgagtcaaactcagtacgccgccgtcgaaagtttccaagcggaggtggtaatgagtggacgagtgtgccaacccaacatcaaacatccattactctcctccacacgataaccttggccactattaaacacagacaaaagcatactcgcttgcttaaacgcgttagacccaagatgtgccggcgctaaaccggacgaaccaaaccggtttccccattgactcaacgtttcgtgtctctcgactctgtcaggaccttcacaag

SEQ ID NO: 173903 - DNA, 490 bp, Arabidopsis thaliana
  unsure (1)..(490): unsure at all n locations
ttgacgtcgcatgcacgcgtacgtaagcttggatcctctagagcggcctgcctttnnttttttttttttttcttctttttttctttctttaaatattggctaaatattaaatacttgcttgtctttatagactaaattaattaaattcccttttattacccaaacttttacttttcattttttttcgggccttaattcaaaaggttccaacctttttctggcctcaaattttttaaacccttggaaaggggttggcctttaaaaaaatacttaaaaagttaaaaaccagcccgtggtttgaacaatggcacttggtaacctgttcttttaaccgtaacaaacgttagtccttaatacacttccgnccttcttccaacttgttttttgacataccaaggataccaaggaagttgggtactcaaactaagtcttgctagggagtatttagtacttgtaactggtacaactgaatcgacgtcaccactgaaaa

SEQ ID NO: 173904 - DNA, 207 bp, Arabidopsis thaliana
tacgtaagcttggatcctctagagcggtcgcccttttgtttttttcttaacggcaatttcatgaaggaggggatttacaaaaatgtaatgggacaaggagagttttaaatacacatacagggtgtagctacaccattcacaatctcacgaggggggccaaattaaaatgaaaaacccaatattgattcaaattataagggggggggg

SEQ ID NO: 173905 - DNA, 298 bp, Arabidopsis thaliana
  unsure (1)..(298): unsure at all n locations
acgcgtacgtaagcttggatcctctagagcggtcgcccttngggttggggcttttttttttattttttnnaaaacaaaaagaagttcttaatatagtataaatctaggtgtgagctatacaaagctcaatatccactattgtgttgaaaacaaagaaaagaaacaaaactcatttaaggctcttacaaaattttaggcctacggagggaaggaaacatacttcctcacaacttggccgattcatcctctgacactcttcaacatttctattcttagttccttactaaggagggcctaa

SEQ ID NO: 173906 - DNA, 376 bp, Arabidopsis thaliana
gacgtcaactgcacgcgtacgtaagcttggatcctctagagcggtcgcccttttgtttttttcttttgacacaacgataactttagcacaaatcacttgctcttgtatcttgatttttgttcagttttacatggaagccttgtaaacatataattattgtacacgaaaacttacgtaaatcatattaaaagcgggatataaacagatacataagtggtgcaatcgaaaagaaaagatggccttgaaaacatagtttcactttcaaacgcgcaagggatgctatctgagatcaatgacatcaaacttgagattggggttcatgtaacctccttacgggtattggaaatgggccctccgtcctcggggaaactgggcg

SEQ ID NO: 173907 - DNA, 474 bp, Arabidopsis thaliana
cacgcgtacgtaagcttggatcctctagagcgggcgcgcttttgtttttttctttttttttttataaaaagccatagaggcgttttataactagcgtatcaaatataacaggaagcgggctaagtccataaggtctccttggggaggaagaagggcctacaaaaataagcccaaaaaaaacggccgcggcgtccccccgggaggtgggggccccgccccgggggccacaaaaaaaaccctagagggggggcataaagggggccccccccaggggccagggggccccccggggaacaacggaccccccccaaacccccaaaacacgacacgaggcggaaaccagacggggagcgggggccgccccacaggcgcgccccaccccgatagcggggcggccgcaccgccggcccccaggcgagcacacccgcgcccggaccgccaaccgaaggcccacggcccgcgcggcgggcggcg

SEQ ID NO: 173908 - DNA, 507 bp, Arabidopsis thaliana
  unsure (1)..(507): unsure at all n locations
gacgtcgactgcgcgcgtacgtaagcttggatcctctagagcgggcgcgcttgtggttggggcttttttaaataaaaatttattttattttcctgagtagcttaagagaaatttgatctttgtnttcggcactacgggcccaggtgtgggggtttgttcactcgatttcctctatacatttccttaaaccccaaaattcttaagccctttgggggagagggaaacacccacctttttttttattaaaaaatttaaacgggtcccctaaaaatctcactgcgcctactgggttccccccacctgcatgggggctgagggggagtcaggccctttatcagggaatccccgcggggaagcccggcccccgggggggccgggggcatctccggcgtgggaacctccccccctgcggggtttaaaaaggtggggggggcgcccgcggttaaacgtgcgctccgggtggccggggagaagcgcttccccccttttcctaagggggggcgtttg

SEQ ID NO: 173909 - DNA, 376 bp, Arabidopsis thaliana
aggtctctaccactcactattaggaaagctggtccccctgcaggtaccggtccggaattcccgggtcgacccacgcgttcggcccagccttcggttaaaacccaaatctcttaagaggaaaagattgcttaagtttgattaaacatttcaaaatcaatggcttgttagaaccaaggtgccttgaattcttaagaagacaaacaccttcctaagcttggtggttaataccgttccagaaacttgacacaggagtaaccaatcttattccgggagaatcgggaaaatgcgtgcgttaccggtgtgccacccatctttcgccgaggtgagcctatcgccgttttcggttgagagaaacaaaacaatcgcacgtcctcac

SEQ ID NO: 173910 - DNA, 329 bp, Arabidopsis thaliana
tcaggtacctacgactcactattaggaaagctggcacgcctgcaggtaccggtccggaattcccgggtcgacccacgcctccgggagcgtcatgggttgggatcctattcattctactgattgggaagggtttgggcgttggaaggccaagattcaacaccaatttccagcttctattcaaaatcattaagggtcttggggtccttacatttggggccattcttattacttttcttgcaccttctttgattaccatcaaagacttattcatttgcatgcctggcttcatgcccacttgattgggaatgcctcttaatgcaccagcctgt

SEQ ID NO: 173911 - DNA, 478 bp, Arabidopsis thaliana
atgacgtcacacgcacgcgtacgtaagcttggatcctctagagcggtcgcccttttttttttttttttgtgatataaattaaaatttcaatagtttaatctttaagggtaccacatgatataaatctaatgactaatatataacatgtgataataagttaacgagtttctttagctaaagaaaaaatctttgataaccaatataaattgataactaccagggcaaaacatctttgatctggcctgaatcaagaacctgaataacttgcgcttgaacttgaatcctggattgataaggaacctcccatcagctgagaaagggctactgcaatctgagaaccgaaaggggattttttttaacaaccccatggtttgtacaaaggaaggccccccgcttaactatttccccgggaagaaaaaaagggttttcttgcctttcccggaccggttctttcccttgttcctaaaaaacgcccccg

SEQ ID NO: 173912 - DNA, 467 bp, Arabidopsis thaliana
  unsure (1)..(467): unsure at all n locations
gacgtcgcctgcacgcgtacgtaagcttggatcctctagagcggcgcgccctttttttttttttttttgccaaaaataaaaatgtggagcttcagtttcagattgctttaatctcatcccaagtgtttggaagataatcaagattcactcacaataaacatattgaacagaaacatttaagtagatcttaagggaactcactaacataacagggagggggccctanatatacaaagcacatcataatattcttcttccttcctaaggggcgcccaacccacgggggcgttgggacctacgggactttcgtttgcttggaagtttggttttatttccccaacggggtatagcccgtcctaaaaaccttttaaattctggccatgggaaccccctaaaaaaacctcctccaccctttagttttttagggttcaccagaaaattcgggcaatttttttggggttgaaaaa

SEQ ID NO: 173913 - DNA, 458 bp, Arabidopsis thaliana
  unsure (1)..(458): unsure at all n locations
gacgtcaaacgcacgcgtacgtaagcttggatcctctagagcggtcgcccncnggggaaaagcttttttattttttttttttttntnngagggaagaggatgcttgattcataaattaaatacccgggggtttttttaaagggcttttaaaaaaataaacccccccatagaaaaaccaacgaaactcctacaagaggaatttcacttttaaaaagggcgagaccttttctcaatccttatttttaaagaacaaaaaatgacctgaattatattttcaccgcatccttttatggggggaggagcgtaaaaaaaaattactggtccttgcattcgggggggcctctctttttgtttacctttacccaatatttggaaaactcccttcctttgtgggggcaaaggggggggtttttttggggctctgttttttttttaacccaaaaaaaaaaggggccccc

SEQ ID NO: 173914 - DNA, 496 bp, Arabidopsis thaliana
tggaacaccctccaagactatgacgtcaaacgcacgcgtacgtaagcttggatcctctagagcggtcgcccttttgtttttttcttatggtacacaagagttgtaaatgaattatcaagagttccaagggtaattatatatggtacaccgaatcccaaggcccgggatcgatcaacccctcacttgggcatttataagtaaacaaaactgttcccaacaccttgagggggtttagaggtgaaaaccaacaaagggaggggggattactaagatagtttgggcacccggtgtaaaaaataggatggggaatgcattaaaaaactgctttgcaggacatgggatggacaactaaggcgtgaggaacacagggggccaaataatggtctgggcaaaaatattttggccccaacctccccatccgagggaatacccgaatttctttggttaacccaatttgggattaaagatggacctatctttttttttggggaatttt

SEQ ID NO: 173915 - DNA, 449 bp, Arabidopsis thaliana
gacgtcgaccgcacgcgtacgtaagcttggatcctctagagcggtcgcccttttggtttggtcttttgagtggaaaatatgatttgtcttttggtttgatatatataagtttcttctaatgcattagtttacattttgctaagggactaagctttcttctctctaactttcagacatatttggaagtaaaaagtttccaaatcaaaaacaatggggtggaagaattaaatattttgatccccaaaataagcttcaggcctttttcttcttctggattctctgcagcttcctccatttaaggtaaatttgggaagacaatccaccgaacaccatggacacacatccccatgggttggaagaataacgggttccggctcaaaactgaagataccacggtgcttaccaacttcctggggggggtatgggccggttacctaaaaccccaatct

SEQ ID NO: 173916 - DNA, 279 bp, Arabidopsis thaliana
gaaaggtggtacgcctgcaggtaccggtccggaattcccgggtcgacccacgcgttcgattaaactttggtttcttcgaatttcgagttcttggtctttccaaaggccctactttgggcctagcattaaccattggcggtttaaagcttcaaggtttcatgggccagaaagaagtaactattggtgaaaacctttggaattaattaattttggaggcttttgaaaatggcttattaccaggacttcattgataatggacaaaggtaccttaggggattg

SEQ ID NO: 173917 - DNA, 452 bp, Arabidopsis thaliana
  unsure (1)..(452): unsure at all n locations
tacgactcactatanggaaagctggcacgcctgcaggtaccggtccggaattcccgggtctgaccacgcgttcggtaaaataaaaacccgaaataattttaaaaaatatttgtatttattttttggattaattttttggtgatcggatgggggtcctacacaagcctggggatgaaacggggggcggaccgacgcccgacaatggtctcgggaaattgagaaagtcacaatcattatccaacgtccgatcttttcctccttttctctcaagcgaccaagtccccagaagcatcatgggtaccaaaggggaatacantgttcgtgggtctccgtaaattgaaattgatccgggattctccaccctgttcaagcagcacccttgggacacctttaccccctgggacaccatgctatgctttggggaccattcacttgccggcaaattcctttcc

SEQ ID NO: 173918 - DNA, 446 bp, Arabidopsis thaliana
gacgtcgaacgcacgcgtacgtaagcttggatcctctagagcggtcgcccttttgtttttttcttttttagggaaaatttttttttttttttttttttttttttaaaccaaacatatattttattccaattgggtaggttttattcaaaccatttggttccttttccatttgggaaagctcaatggttttctgtcacaatgaaaccaaaaaaaagaggggggaaacagagccggcaaaaaacagagtatatgggggggattcaactgaattaaccttcccaaccacgcaagtgggtgggtcgagccactcggttaactccaagagggaaagcccccatccgggggggaaaaaatgagtttggcccctttgtttgagggtgggaaaagggtccagatttttttttttttgcacttcccaaattcatttttttcctttccaccaaaag

SEQ ID NO: 173919 - DNA, 482 bp, Arabidopsis thaliana
  unsure (1)..(482): unsure at all n locations
gacgtcaaactgccgcgtacgtaagcttggatcctctagagcggtcgcccttttttttttttctttttcccaaatatcatatcattcactaattaaacatacttaggcgaaagccaaatatacttagctttaaaacctaatttgatccccaaaaaacaccatcggggggctattttacaagttccgaatccaaacaagagaactgaactaagaggggggagaacctcaaaactgctgaaaagggaaaccaanatctcctttgttcttgccaaccttggtgggaaaagagttttaagaatattggaaaaactccttcattcggaatcgcaacacttcccagaaggtgggttaaacttttaatgggccctaaatgaaagggagggggtttgggaccaaaccggttttttttggtaccccttgggggggtcccccggcagttaaaaaactggggggggggggggccttaaaaaacgggggaaaaa

SEQ ID NO: 173920 - DNA, 496 bp, Arabidopsis thaliana
  unsure (1)..(496): unsure at all n locations
gtacgtaagcttggatcctctagagcggtcgccctttgggttttttctttttaaaacgacaagaacaaatcactatggttcttatgttttaataccacccacaaaaaaaaggggtgaaaccgccgagatgggcttttttattttttttacccccctgggaaaacattaaaggcttgcgaaaaaggggggagttattttaagcccgaaggggcctcggtccggggggcctccctaaaaaaattccggccncggttccgggggggcggcccaccggccccccttggggggcttattcaagaggctgggggaaatcgggggccttttttaggggcctgagggaggaggggcctccgggcacaagttccaacaaattttcaaagcttggaaacttggagggtcgcaaagcggggggggccctaaggaaaaaaacaaaacccccttttggttgggggccccctctccttgcgccccttaaaagtggggaaaagcccggggg

SEQ ID NO: 173921 - DNA, 405 bp, Arabidopsis thaliana
tacgactcaaatagggaaagctggtacgcctgcaggtaccggtccggaattcccgggtcgacccacgcgtccgcccacgcgtgcgtttctatttgaaatgaccctggtttttcatgcctaaaacggtgttctgcgggttaaagaaacatataaaagcctaaacggcttggtgacaacttaccgttcttgatttgttgaacacgaagggattaaagccttgccttttctcccttatacaaagaaaacaaaaagggcaggctttttcaaagattcaaggtttccaaaacggacctgctacacaaataccggttctatggaagacccttaatccagttaagttggcggtggtttacaaggtttgcattgggaaaacccttgcgttgcccaattttattgcctttggaa

SEQ ID NO: 173922 - DNA, 359 bp, Arabidopsis thaliana
accactcactattgggaaagctggcacgcctgcaggtaccggtcccgaattcccgggtcgacccacgccttccagagaataaccaccttatgggtttgggttaatcctatgaatttcttaagaatctctatcaatggagggttggctcaaggaccgccacctggtatgaagaagcaccttcttctgcaggtggagtaagaaccggctactgggacccttgtttttaccgggccttcttgaaatcaccccaccacttaatcttaagggccttaattgccgtggaatgccttggccaaaacctcaaacccagtttcaaaccagaagtggaaaccgaccagccccgcgaattccaaggggag

SEQ ID NO: 173923 - DNA, 414 bp, Arabidopsis thaliana
  unsure (1)..(414): unsure at all n locations
agctggacacgcctgcaggacaccggtccggaattcccgggtcagacccacgctgtccgccacacgctgtccgcccacgcgtccgactagttctagatcgagagcggccgccctttttttttttttttaacacaaatcatacaaaccaataaagtacaacncgtngaacagnttataaacgttaatgggaagggaaaaggcaccttttttttaaccctaaacacaggaaagggggactaacaaacccttccttaattgattcctaaggggacacattacacattcgcctcgagagagttctaaaacacagttactacagctacctaagcttcaaaaaaccccacaacccggatgtttaccgaaataaaccatggcataccttgttcggaattcttgtgtttcaatatatttccc

SEQ ID NO: 173924 - DNA, 463 bp, Arabidopsis thaliana
  unsure (1)..(463): unsure at all n locations
atgacgtcgactgcacgcgtacgtaagcttggatcctctagagcggtcgcccttnggtttaatcctttttttttttttatagattaacgatcattaattaaactcatagttacaatgcataaaaactaggacaagccattaaatccagaaaacacaggaatctgctacagcaaagacatacattctctacactcaaaccacctcacagatgctctggggtatttaagaaagacaacacacgaaagtaaaacagagagcttcttaagtccgaaccatatgacaagagaaacatatttactcaggtacaaatttcttcctgagctcagagacgaattcagtaaccttctcaggatcaggcaaggacttanccacgctctccctctgcaaacacttcttaacccaagcaatcagtttcggaacctcagattcgatactgaagttagcaaacttctcgtatgctgga

SEQ ID NO: 173925 - DNA, 312 bp, Arabidopsis thaliana
acgactcactaataggaaagctggaccgcctgcaggtaccggtccggaattcccgggtcgacccacgcgtccgcgagaaagacgaacacttaccaaaaaaaaatctctttgtgagctttaacgatcgtaacaatggcgaacgaagtgattcttcttgatttctggccgagtatggtccggatgaagacaaggatcgcattgagggagaaaggtggtgaatttgttttccgagaagaagatctaagggacaagagtcctttgcttcttcagatgaattccattcacaagaagaattctggtcttattcacaat

SEQ ID NO: 173926 - DNA, 465 bp, Arabidopsis thaliana
tatgacgtcaactgcacgcgtacgtaagcttggatcctctagagcggtcgccctttttttttttcttttggtctgtaaacacaaaattgataatttaaaagccgtcaaatcttgttgtatacacacattaatcgtaattatacattaggttataacacgtacagataccaatcacacagtatagatagataagacttaaatatgattgatctaggcgggggttgagaaacccatttaaatccttcgcacgaacccatctttctgacaatgctgcacatgaacacctcaagaggacgaacattggttcctgctagattcactttacctttcccaggggtgaaactggtgaggcctaaatgataacgcagctcgtcttctgatgcagcgtacggaatgtcattttgtttccaaggatgaggaagggacatttgctagggattatcagagagaaaaacgcaagctttt

SEQ ID NO: 173927 - DNA, 299 bp, Arabidopsis thaliana
  unsure (1)..(299): unsure at all n locations
gacgtcgactgcacgcgtacgtaagcttggatcctctagagcggtcgccgttgtggtaattcttttttaaaaaaagaaaacaaannaacgctatagntccattgaggcgccggagggaaaaaagacttagaatgactgcacgtggtacggggtgtgtgttttgaaaaaattcggacctcgttcgggggaaagtgtggttggattccttttttttggggtgtgggggggtgttagccggctttataatgttaaaaaaaaaaagaacccgttctttccccagttcctattccaccccccct

SEQ ID NO: 173928 - DNA, 513 bp, Arabidopsis thaliana
acgactcactaatggggaagctggcacccctgccggtaccggtcccgaattcccgggtcgacccacgcctcccagaaaaaaaaaaccttcattttattccgtcggccggttcatcttggtgcttccgagccagccaaaattatcggcggagaatttatcggctctctctttggaaattctggtccggggagaatcggccgatccgaaggtccgttatcctcttctttaccgttcccgggattaaattccttgggggttttttttcctgggaaaggccggggttccggaagggggggtggattttggtccgaccacttaccttggatggataaggttatggtttggtaaatggaattttttgggaggattccggaggaggaggagaggaaccattccgtatcctagaccctggaatggccctattattaggatccatatgatgcctatgagcgcgcctttgagtggcagggtcctaagggggggctttggtatctatctgtaggagggctttta

SEQ ID NO: 173929 - DNA, 346 bp, Arabidopsis thaliana
gcacgcgtacgtaagcttggatcctctagagcgtccgccctttgttttagtctttttaaggcacacaacttttgataaagaagtttgcaaacgaaaacagaataccctatcaaccttacaaaatatcaatttggaaccccaaacgggacaaaaagaataaattaccggatggaagggaccccccaccggctcaaaggctcaagttttttataagaagcaaaaaacaaaaacaaaaaattgtttttaaaaaaaaaaacaaccccttcctattaaaaagaggggggaacaaccactcggcggccccaaagggggttttaataaaagggagggggaaaaaaccaccagg

SEQ ID NO: 173930 - DNA, 434 bp, Arabidopsis thaliana
cttggatcctctaaagcgttcgccctttggttaagcctttttttttttttttttggaggaactagagaggtgacataagatccagtaagcaacattatcttaaaagcaatatgacagtagagaaaatctctcacaaaagacccaaaatcgagtcgtgcaaaattgtacgaacaacaaattttaaaaggcgttccttatcaaagatccaatccagctacaaataacaacattggcttaacgcttcttagacacaccaacagtttttcctctgcaaccaattgtcttggtgtgttgcccacaaacacggaaaccccagtaatgtctcacaccacgatggtttctgattttcttgagaccctcaagatcatcccctgagcttcatggcaaagggcattggaacacaacttgagaaaccctccccatcccttgaaatc

SEQ ID NO: 173931 - DNA, 389 bp, Arabidopsis thaliana
acgactcactatttggaaagctggcacgccctgcagtaccggtccggaattcccgggtcgacccacgcgttcgctcgttttctttggcggcttttttattcgcgcgaagcaaacgatcttcaaccatggccaccggcgcagatgttgacgctgagaatcaacaagcgctcactaaccaagtcaagctcttcaaccggtggacctatgaccacgttaccggcacatacctcagtcttggtgactacaatggagttcaagcagcttaacatgctaactttggttcccacaccggtggaagaacatttgggaagagaatcaagaagggttaatggcccattggtgagaagcttaccaactcttttatgatgcaccggaagaaccaccgtaag

SEQ ID NO: 173932 - DNA, 453 bp, Arabidopsis thaliana
atgacgtcgaccgcacgcgtacgtaagcttggatcctctagagcggtcgccctttgtgtttggtctttttttttttttttgggccctggttcagctagtttacgctctagtactcggcttcttgttgaaagattcaataaagcggaacatccaacgatctaacattcctgtcaaagcaaatgtaccgcctaatacagcgcaaagacgattgattaaggggagaaaactacggcgttcttccttgatggtcacagtgataggtgaaagatcatataagaagtaaactgctggccatgtacggtcaaattcagtcattggcgtgaaatattcagttacagagtactgatttgttgacagtacgtcttttgaaagattctatattctgtgggaacaatcttaatatagtatttgaatgttccactggggtcatggagtattcgggtggtgtcatca

SEQ ID NO: 173933 - DNA, 367 bp, Arabidopsis thaliana
cattccactcctatttggaaagctggtacccctgccggtacccgtcccgaattcccgggtcgacccacgccttccaagaattaccttttggccgcttaaaagaaatgggaagaagcttgttttaccatggccagaatgactggttttcaccggtattgagaaaccaaccaaggagaagaagattttttgggaaggagattaatgccagggttaaacctgttccattcaaaaccgtggttattgtgagaagacttaaccaaagggagattccttctttcccttcttcaggggaggcaaagaggcttccttcagaggctaggtccattaaggtgtcgaccactaaaaaagttggaagcagtggaaactc

SEQ ID NO: 173934 - DNA, 490 bp, Arabidopsis thaliana
gaagagttatgacgtcgactgcacgcgtacgtaagcttggatcctctagagcgggcgccctttgttttttttctttttttttttttttttttttttttttttttgttttttttttttttttttgggggagaaaaacccccttcttttttggggggggaaatgtgaatgttcaagttttttggggcccccggtttttttgggttatagctttttggacaaatgggggggtgccctaaaaaaaaatttttttttttttaatttttggcttccccgcccaaaaacaaggaagagggttttagctcccccctttcgggggtgggttcaagcggtggaggcccttaactcttgtggaacatttgggggggggtttggttttttctctacaggttttaaaggggaggcccccgggtgtttccccggggggattttgaccctttgggttggttttgaacctatttcaaaaattcttttttggggctcccctttttgg

SEQ ID NO: 173935 - DNA, 496 bp, Arabidopsis thaliana
  unsure (1)..(496): unsure at all n locations
gcacgcgtacgtaagcttggatcctctagagcgttcgccctttgggtagggcgttttaaaaaaaaatataatnnataaaatattttattttataaaaatttttttntttannnattttggggacccaatccggggcttaaaaaatttaagagtgaaaaaaactcccccccaaaaaaccggggggggcccactttttttttgggagtttggaanttaaaaaggggggaacttgaaaaaaatttttaataacggaaaaaaagggggcgccccccccaaattaccaaattgttgggggaagcgcttttaagggggcgggggggggggggggcttcccaatttataggccacaaccacaggggggggggcttcttttgtggggcttttcccctcgactttttccccccccgtggggggggggtgcgtttaaagaaccggtgactatgggaaaaagaacaaaattttcgggcattgtggcggcgcccaagttctttaaaaa

SEQ ID NO: 173936 - DNA, 421 bp, Arabidopsis thaliana
gacgtcaactgcacgcgtacgtaagcttggatcctctagagcggtcgcccttttgtttttttctttttttgaaaaagtaaaatatcaatgacttgtctcaatgatccaacattacgagctacaacaactctacaagagctcgtttgactcagggttgattctatcaagtgtattcacatatgtatagcttgaaaacaaaacaaaaagcttccgggaggtacacaatcgcagagattcatgtttcaaaaattatcattattcacattcatcatgggcaaaggtaaaaagaatatatttagtgtttggggaaggagagacataccaaacccactggcttaaatggtgggccattgctttgaagcttttccaaggctggttgtttatgaggatacccttactcggatgtcttttggcggataaa

SEQ ID NO: 173937 - DNA, 484 bp, Arabidopsis thaliana
  unsure (1)..(484): unsure at all n locations
tgacgtccactgccgcgtacgtaagcttggatcctctagagcggtcgcccttggggtttagtcttttttttttttacaaatcatattccccaaggtaaaaacggatttaanngggagagaaccacatttaaactgaaaaaactggaacagcgagatataaactaaagaccctcccatttttggctaaaaaaaagggggaaaacaaaaaaattcttcttggggtgtagtggaaaacaacccgggcgaatcctcttaataaaaaaggcaccctgttgggaaagctatatacgcttccccaccccctgttaaaaaaccccgtggccggattgcgcccccataaaaattccttttgtgggggggaaggcccaaaaaaacccgggggtgggggaacaccacttactggggggagcccttctatttaaacaacaccccgctcggggcgcaagcgggcattcttatcccccctgtctccaaaacaatcccc

SEQ ID NO: 173938 - DNA, 327 bp, Arabidopsis thaliana
agctgacacgcctgcaggtaccggtccggaattcccgggtcgtacccacgcgtccgcggacgcgtgggtgggaacatcatgatggatgaagagaccaaagcaataaccattattgattatgaatattcatgctataatcctggggcttatgacattggcaatcacttctgggagaagggtggcgattaccacactggaacaacttttattatggattattggaaataccctggtggggaagaaccaccaagaattctgaaaacatttttgaagtattcaaaagaaaaggccaacgattctatgggccaaaaacttctaaaagaacgt

SEQ ID NO: 173939 - DNA, 389 bp, Arabidopsis thaliana
tacgactcactatgggaaagctggcacgcctgcaggtaccggtccggaattcccgggtcgacccacgcctccggttggtcttcttcttcctcttcaatttactttctcttcccgaattctctttggccgaatcaacttttccttcgatcttgggcttcttaaaatcccgaattattcccttaagggttggcttaataatcggcggtttcttcggcatgaatttcaattccggggcggccaacgccggggccggccgatccggagaatctttcggcggttaggagaatttcaaggcaaccaaggaatccgaggtcacacagaagaagtttcaacttggcaggccaatctaccccttggtgggtcaattcaacattttggatagccagggt

SEQ ID NO: 173940 - DNA, 490 bp, Arabidopsis thaliana
tgacgtcgcctgcacgcgtacgtaagcttggatcctctagagcggccgccctttgggtttggtccttttatcataattttttttttttttcagggggaccctttctttttttctaaaaaaaaaaacccttttttttttttttttttgggggaaatttctggggaaaaaaacaacaaaacctttttgttcccccctttccaatccctattaatattggggggggcccaccttttcaaaacggctttggagcatacttatgtttttaaaaagggccttttctccctttctgttgggctgcacggttttttccatgggcctcccccgcccggggagggaaccctgtgttgggggttgctctagcggggattttggcccccctttacactttcccgcgggggggaacccagggccccccctgtgggaggcgtggtacaaggtttcccttttttaaacacccctcctggggggggcacccaatcctccctggggg

SEQ ID NO: 173941 - DNA, 503 bp, Arabidopsis thaliana
  unsure (1)..(503): unsure at all n locations
agctggcacgcctgcaggtaccggtccggaattcccgggtcgacccacgcgtccgattattttggccgggagcttcttcatttccatttccattgccattggactcttttcttttaccaacctttcatttttggtagctcttatctctacggcgaattggtttttcttttcttcttcgaatccaaaatgaggaccatcggttttcttttggatgcgtatcattggctcttttccagaatccggttggttcttgcctctggggcgggagggattctctcgccagactctaccaaaatggataagccttccattgtgaaagaggctgaaactgtacatgtgcctccacctcctactgagaagctgctngtcctggaaggaaatggtttggtggaatcacatgtctgtaaggaggctttagatcgcggctaatctgtctctagcctaagcaggcaggtaggccgtctttacagagtcctgggcctccagagtaacatggcatcaag

SEQ ID NO: 173942 - DNA, 409 bp, Arabidopsis thaliana
  unsure (1)..(409): unsure at all n locations
atgacgtcgcctgcacgcgtacgtaagcttggatcctctagagcggtcgcccttttttttttttcttaaggacatactcaatttattccaatgtatttcggcgctgttgttatgacattacatagcttgatgtgagaacataggttattttgtctaaagagtaacaatagttatgcctttttttcaggctcttcaccaatcaataccgagttgcttggagaggaatanattatcaagatccgtgattaatggggccgatgaattgacatagctttgcatatgtatcttagccggcgcctcatcctctttgagcatattaagtaggggagcccttgtgggaagagcatacctcccaagagaaacagttttcgtatggcccatcgctggggggggagcaaaccttgagcat

SEQ ID NO: 173943 - DNA, 489 bp, Arabidopsis thaliana
gacgtcaactgcacgcgtacgtaagcttggatcctctagagcggtcgcccttttgtttttttttttgccaaaaaaatgctttgtttgaatcactatatatgttacaaacctacccccaaccaaagggagaaactaaagagcgggacagggtgttttgaaaagaagagagcaactcacaggtacatatagattacgggttctctctctctggctcgtgaggagccccagtttggtatggtggcccaaaaataaatttataatcttcactagggccaccacccttttggaaacaccagggggaggcattgaaagggttcttggggggggtttcctaacataccaacttttggaaaaatctccttccccgattttcccataagtgaattccacccttcatatcaaaacccctcccataaggggagggtaaaatgtccttccccccaactttatttccgagggggggtaaaataaaactctttgggaaaaaat

SEQ ID NO: 173944 - DNA, 538 bp, Arabidopsis thaliana
  unsure (1)..(538): unsure at all n locations
tctccaagattatgacgtcaactgcacgcgtacgtaagcttggatcctctagagcggtcgccctttggggtagggcttttttaaaaaaataattttttttttatannnaanttaaaaagacaaaaggggtttgtataaaccaacaaccttttctttttgggaaaaaaaaagaatttaaaaaagcccccccccagagaacacgtggaaaacggaactcttttttctgtgagtctggggggaaaaaggggggaaatttttaaaatatttcctggaaaaaaaaaaatgttgcccgtgttttattttagggtcgtgggggaaacccaagttggatagggcctggaaacattttttttgttcttatttattttaaaaacagggggtgtgggttttttttttgtgtggcggtttcccaaattttttaaacccccctggggggggggttgttgttttaaaaaagggggctctttgaagaaaaaaaaactctttcggcctctctgggggggcttttttttttaagaaagaaaataattgttttttt

SEQ ID NO: 173945 - DNA, 325 bp, Arabidopsis thaliana
caggtctacatacgactcactataaggaaagctggtacgcctgcaggtaccggtccggaattcccgggtagaacctcggctacgggaatgatgctgatgcaattggacgtagtttaaactgtgagccagaacggaggatttgtttagcatccgttgtttccttgatgccaaatcacatgaagcaatatagcccgactattccaattaggatgtattgacccagcagtggtttttgaaagggccaatttgctacctagactaatacctcctacgtagcttgattggaacgtaaatggggattgacgggctggccattggggttggg

SEQ ID NO: 173946 - DNA, 307 bp, Arabidopsis thaliana
  unsure (1)..(307): unsure at all n locations
gtacgtaagcttggatcctctagagcggtcgcccttttgtttttgtctttgctcaaaactcanaatctcatactttgggggactcaaaagcaaaatcttataaacttctgtgcatcaactaaaacccaaaaacaataaaagcgggaggcccactttctctagcctaccctttttggccagactctctctcatttaaatgaaggcgacccacggggcttggttccttttaaaaaaatattaatcactgcccggccctcatttctccaccccaatgaaacgatccaaattttctacttcttttaaattc

SEQ ID NO: 173947 - DNA, 403 bp, Arabidopsis thaliana
tacgactcactataggaaagctggcacgcctgcaggtaccggtccggaattcccgggtcgacccacgcgttcgagattaccaaaatagaaaaatctaaggggtgggaagctctgcagctcattcattcatggggacgacgattcccactacaggtaccggaactatggggtcggcttcttctggccctaccatcttttccttacttaaaacgacttaacaatgttaaccattttcttctttattattcccattttctattaagcttaataccggtcttggttggcgggacccttccggggattgaaggggtgattgcttcgggaagaacaaacctgaagaatgggggattcagtccgaaaagaagagggagaaggggagaagaagaagaagtgggttccaacc

SEQ ID NO: 173948 - DNA, 465 bp, Arabidopsis thaliana
gcacgcgtacgtaagcttggatcctctagagcggtcgccctttttttttttcttttttttttctaaaaagcgcgcgctttggtgagccatggcacatagcgcactaaaggactctctgagccatggtgcgctttgtgccatttaaaactcagattggtagtcaattctcaaattatccaatatacaacttctttatcttttaagggcgattgacaatgacaacaataacagaaaatttcttcaagagcattcgtttgtaggagagagcaaaaagcatgtcttgacactgtttatgtaaactgtggatgaggtccagtgtcagacgatggatcccatcccggcggttttatattgggccaatcgccacggcatcccaagcgtatgtacaaactcttcttacctggaagtcccttgtctgagatgatcagttgcttaaggcactcaaggaagcctgagccacgcttt

SEQ ID NO: 173949 - DNA, 455 bp, Arabidopsis thaliana
gacgtcgcctgcacgcgtacgtaagcttggatcctctagagcggccgcccttggggttgggcttttttttttattttttttttttttttttttttttttttttttttttaaccaactggtttaggtggataattataaaattaattcacctttgatttaattaaaaacaatatctggacaattgcttgacctacaaggaagggcttgtacaaggggggttcccaaacccggtaaaacaaaacccaaccacaagctattttttggcggagggagaagctttttcccgcaaagttttttatttctgctatcaaaattcaaaaccccccaaaaaaaacaagtgaagaaggggaggtctttttttcaaatttgaacctcctcaagcccccctgggaagacgagactaattctttctcccaaaaattatcccgatgataacaaagatccccgcccttcca

SEQ ID NO: 173950 - DNA, 528 bp, Arabidopsis thaliana
acgactcactattaggaaagctggtacccctgccggtaccggtcccgaattcccgggtcgacccacgccttcggtcgtcatcatcatctactttttctgcggtttttccaactgaattatcttaaccagggaaagttaaaccgagtacccatcttaaaatcattaacttcacttggatttaaaggaacccttactggtccatcattagaagggagaagccacttcagttaccaggtcttaaggcccttgaatggaaggggatggtgatgaaccttagaacacttgttatttcctccaaggttgtaattgaaaagtggccaagggaggagaaggagaaggagaatggggatttcttaaaggtggaaaaggaacctttgattgccaaggttaatgcggagaaggcaaatcatgttcttgtggaaaccaaaaggaggttatggaaggagcctcgagtggttcacagagagacctccttgattcacaggaaaaggcaaaggacctagacctcgaatggaaaagagttgcagg

SEQ ID NO: 173951 - DNA, 535 bp, Arabidopsis thaliana
taccactcactatatggaaagctggtacccctgcaggtaccggtcccgaattcccgggtcgacccacgccttccgcttaaactggatgggataccaaacaagttcttaccgatggtggaaaagccacccttggtattaagaatggcattaaaaatggggggaatggttccagccggttccactttgacccttaactggcaagaaagaagtccaaccttgaagaactaatcaatggttcttataagggaatggattccatggcttcgtgacctgggaaatgcagccaaatctttgaaggagggaagtctaatggaatgggtccgcaagcaatatgcacctgggaactctgagcttgggaggcaaatagaagaaggaaaagctgattttgagtatcttgagaggaaagctaaggagtttggagaaccaaaggttccttctgctaaacaggacctcgctgagatgattttccaaatctgcatgtaggaagaggaccaggagggctttttatgtttattaaaagaatcgccttttttta

SEQ ID NO: 173952 - DNA, 377 bp, Arabidopsis thaliana
gaaagcttgtacccctgcaagtacccgtcccgaattcccgggtcgacccacgccttccccgaccccttggccgacccctgggcttgtacttttaggaataacccttaagggatccacttttaacaaattgatcaccaatggcacttggaccattaccttatcctaccagccattattatgaaccttatctggtacctggtaccaccattgatgatgatgattaaccatccttcttttgggaaccacaaaggacttattggattaattggggctccttggacctttttaaaagccttattcttattttttgacaaaatttttcattggaaccacctcctttttacaccattaccattttttcacaccttaatttctgg

SEQ ID NO: 173953 - DNA, 349 bp, Arabidopsis thaliana
  unsure (1)..(349): unsure at all n locations
ggaaagctggcacgcctgcaggtaccggtccggaattcccgggtcgaccacgcgtncgggagcttcactgaacgttcactactcggctcacacgcgtttggtgactgcataagatacattgacgatggactaggggttataaccctactcgatcgagcatcgactatgatctatagaaacgagaatgatggagatcatcattttctttgctctggtctacactgtctacgcctgcagctgttataccaataacggctatctagtgaccatctcttctctcaacatctggcttatcgactgacgcaacatgattactactaggtcattctacatggtatccatgtagcca

SEQ ID NO: 173954 - DNA, 435 bp, Arabidopsis thaliana
  unsure (1)..(435): unsure at all n locations
cctttgtgttttttcttttttttggcaaacgatatgtattatagcaaatgaacacaacaaagctctgtttcatggaacagagtatgtaagtctgatgaaatttcacaaccagaaaaaaaaagacagtctcaacacccgttnaacttttcttttttttttctcaaggggggggtttacttaanagttaaccaacctcctataaaaaataaccccaacttgaccgctttttactacaacttaacgggaaaaaataaacaccctgttttactgataactaattcttcccaaccaattatcagtgtgcctggtataaggcaaatccctcccttgacctttcggggttcccccctttcccctgtttttgggggggggaattgttaaaaaaaaatttgaatttttcccctttacccacattttttccccggacataaatgc

SEQ ID NO: 173955 - DNA, 524 bp, Arabidopsis thaliana
ggaaggtggcacccctggcgggaccgggcccgaatttccgggtcgacccacagcctgccgaggtatgtgatacacacgttttcattgagaaggaggatataaattcctttattgaaaaaggaaaaaaagggccaacacaaaggtgggcaggttaacctaagggaaaagttatggcggacacaacagagtggaatccaagtgtggtttcttctgatggtgtgggaagtgttgggtctgaatgggttgcacaggaaggagaatgtgtggctctatgagtccagccttggggagaacaggctctatctgccaccagtgagattgtgggtgtggccttacatggccaacatgttgtcttttctcagagctttcaagacttgtgaccgtgactccttcactcgcactataatcaaagtgtatggacctaaaggtatatataaagcacacatgttcgggaacccagtataatagtcacaacatcagactcttgccggcgtgtgctgacagactatgatgcgtacaagcca

SEQ ID NO: 173956 - DNA, 332 bp, Arabidopsis thaliana
acgactcactattaggaaagctggtacgcctgcaggtacggtcccgaattcccgggtcgaaccacgccttcgaagtactggatggcttcctggctggtgaaccattccatacattggtttggtattcatttgcttggccacgaaggtccaatcccgaattattcgcttagaactgaaggaacggttgggaactaactaactaccatgggtggcaattattggataatctaccacattgaagaccttgaagggaagaaggaaggggcaattctggggaataaggctaatataagaaccggtaccattggtcaaccttaattttctggccgaga

SEQ ID NO: 173957 - DNA, 501 bp, Arabidopsis thaliana
gccgcgtacgtaagcttggatcctctagagcggtcgccctttgtttttgttctttacgagaaaaagtaacaaactctttctgaagcatctatcttacaaggaaccaaagaaaatagaattcccccctgagggggggaacatcaaagcaaaattccactcataaccacttttaaaaaagcgtgctttaagggtttgaaaaacaaaaacctttttgttggttgtttggtatttttaccgcacccaaaaacaaaaaagaagacttcctttccctcagggggtgggttagttccgagaggggttgcccttttttttggggggcaccaaacaaatctttgaaatttttggtggaaggaaatctctccttggagttccaattgttttcctacttggggcccaatttattcccaggtttttttaggggcatggaaatccctttctggttttcaaccattccgaaatatagtgggccccttcacttttaccaggagccggcaaacggcc

SEQ ID NO: 173958 - DNA, 434 bp, Arabidopsis thaliana
tcatacgactcactattaggaaagctgctacgcctgcaggtaccggtcccgaattcccgggtccgaccacgcgtccggttctttattcctgggttggagctggtttaatgggtctggagacatttgattatgaagtctctcacttcattttggttgggtgatggaaaatggtggcagtggattttaagggaagcttaatctcatggattattcttttgaaatccccttaagtgaatcaatgaaaattgaaaaagggatggtcaaccttctaactcttaatccctcaattgctctggccaccttggagcctattttccggtgcaggttggtaaggtttcattggaagccgtggctttggagtggtctggaggtgaccttaattctgaaagaagaaggaatagcctttactggaggttttattggaagcacttttt

SEQ ID NO: 173959 - DNA, 452 bp, Arabidopsis thaliana
acgactcatattgggaaagctggtacgcctgcaggtaccggtccggaattcccgggtcgacccacgccttccgggatggtggaaggggtttcttaactaaggatgtggttgtggaaaagaagagtttatgggtctagctaagtagattattctattggatcttatggtaccaccatacctggatggtgtttggtctaaactctttagtctttttttggttacccatcaactcggttttatattttattggccccctttggggcattattaaaccccttaccattattttccttcacttggacttataatcaatggtactcgtgtccattcctgaactccgattcttaaacttcttttccacccgggaaaggggaaccggataaaaaccccggttcttggaattgctgccttttttaaagattctagcttacaaagggttgcttggcaaggtt

SEQ ID NO: 173960 - DNA, 510 bp, Arabidopsis thaliana
  unsure (1)..(510): unsure at all n locations
gactcagctgagagaaagctagctacgcctgcaggtaccggtccggaattcccggcttgacccacgcgttcggttgtcaagtgcgtcacactcaattacgctatgggaacatctggctttgccggtgaagatgctatcaggaaactcagttttcatgctgcgcagacacctacatcttttcctacctgactaccacatctggtacctggcaaggtctttcttcactggttgatnaccagcactatagaccacgatccgtatcttagactgactcgtgatggagcaccccggttaggctatagcaagtccgccctgatagagtacaacagtcattgctggctcgcagggagagaatggacaaatgtatgctagtgatccagacactgctatctatgtgactgattccgtatgggacatttaacacaagacaaacagatttagcctcttagaggtgaacaacactgcctggtagagcaccgacaactgagagcaaatttcgaggatgacata

SEQ ID NO: 173961 - DNA, 209 bp, Arabidopsis thaliana
  unsure (1)..(209): unsure at all n locations
cgaatgtattaggtagcactatagnaagattatgacgtcgcatgcacgcgtacgtaagcttggatcctctagagcggccgccctttggttttttttttttgaaacaatgttttttttaacaaaaagaagttcttaatatagtataaatctaggtgtgagctatacaaagctcaatgtccacttatttgtttgaaaacaaaggaaagaaa

SEQ ID NO: 173962 - DNA, 506 bp, Arabidopsis thaliana
aggtctcatacgactcactataggagaagctggtacgcctgcagagtaccggtccggtattcccgggtcgacccacgcgtccggtcactatgtttattttgcaagaagaaggtctctcttcacctaatacttagcatatgagcattcgactatgattgctgagatctgctttgaacttacaggtgctctcaaggacgaggatcgatcttgtcttgcgaatgctctatagaacaatctgcagagactgtctatatagctatcagatgtgctagaaaatgtgactaccattgtgagaaagtcagttgatgctttaagagctctactgatacaacatgacgaactagcagctttcgggcgggaggagagagctatgattgaaacgaaatgctaaacgctgtatcaagcttggtttgtgaagacttatcagattgtgaatagtactaatcatcttgaactagcttcatagagtgattccaaaggagactaatggataggttaaacctgcc

SEQ ID NO: 173963 - DNA, 536 bp, Arabidopsis thaliana
  unsure (1)..(536): unsure at all n locations
acgactcacnctagaggaaagctggtacgcctgcaggtaccggtccggaattcccgggtcgacccacgcgtccgattctactgttttaaatttggaactgaataatctgagaagtgtggactcatcaactgttgcttatgatggaaatcgtggatcatgtatagagctataccagattgaaccatatgcgagtgactgtcattgatcgagactgcgaggtcatatatattacggatcatacttgcgcggaaatacgcataagactagatggagtcatggggatgacgaacaaggtatgatgatgcagcatgtgactgtgggtatgagagaatatgacagcgcatgacgtctactactggtaagaggcaagggaaattctcatggaagcagcaaggacgggagatgaggaatgtctctaagaccatttgcattatgggtgcggtcaaagtatactggaaaccgtattgaatgaaagggcagagatatgatgacactgaaacaccggttaattgacatgcgtgcctatggatcatgaa

SEQ ID NO: 173964 - DNA, 458 bp, Arabidopsis thaliana
gctcacatacgactcactttaggggaagctggtacgcctgcagagtaccggtccggaattcccgggtcgacccacgcgtgcggtcacactgctttatatttagccctgaaaaatctgaaaagtctgcactcctcaattctttcttacgaaggaaactctgaaacatgtataaggctccactagggtgaacgatatgcagtaactgtcattgatcaacctgcgggttctaagataaccctcatattgcggcaaataccagatgacagaggtaataagtttctgacgaacaaggaatcgttggcagcatgtgatgttgctgtcgttgactatgacagctcagacgtctactcatggtgagaggcgaggaaaattctcgtggaagtagctaggaggggtgaatagagatgtctcaagaccactcgttttctgggtgcgggcaaagatgacttggatccata

SEQ ID NO: 173965 - DNA, 498 bp, Arabidopsis thaliana
aggtagcactatagaagatcttgacgtcgcatgcacgcgtacgttagcttggatcctctagagcgggcggcccttggttttttttttttttattttttttttttttttttggggggattaaccaatcacaattaaattcccagaaacaaaatcagaattgggttaaaatccttagaaaaaaccattatcccaaaaattaaaatttcaaccttaaaaaaaggtaattttttttattgggttcaaaggttattggtcaaggattggtaccaggtccgggcccccagatcggtttaggtattttccttggaagggtaccaattacctgggccctaccgaccccgttaaggccacccccccggcccgtttttttttttcaaaaacctgggttttacctaccgccgttaacgggtccttccttttcattttcaacttcatttttggtccctttttttccgccgccgccaccgccattttcttaaaacgggggcaacaaaccaa

SEQ ID NO: 173966 - DNA, 487 bp, Arabidopsis thaliana
  unsure (1)..(487): unsure at all n locations
gacgtcgcctgcacccctacctaagcctggattctttaaaacgggccgcccttggttttttttttttgaagccactcgttttttttaatgagtggccaacccagaaccaggaggtcaaacctaatttcctggttaatttcatggaagggggcccacaagcggtcctttattcccactgagggtgtgccacaaagngcccaattttttagnccgagaaaggtggaaccgggggtggaaaaggatgcaaaatattcgccaaagtctgtgtctgatacatctgaaccaaatccaacatctgtttaaaatagtgaaccgtgggcctaaatccaaccttnttaataattttctccctggctttcgtatgtatctaaatacagcgaatcttcctaaacatctgtttcttctgttccctggacagaagaatacgccatgtaaagcttgtcatataatgttacatctcccttgtctttcacaagtaacacttgtt

SEQ ID NO: 173967 - DNA, 519 bp, Arabidopsis thaliana
aggtgccactatagaagaatctatgacgtcgcatgcacgcgtacgtaagcttggatcctctagagcggcccgccttttttttttttttttcaatgcaaaagggttctgatagctgaaaacgagccttacccatggctcaacctttgggaaaatcatgacttaattattcttcactggggcctaatgagcaaaaatgaccaaattgtttttctatggaagtcaagggcttacctttacgcctattagcctcctttttttgctgaagcttttttattccttccttattagatttgaaatggtttactatggttccttttaataccgctttcttggttgctggctcgaattatttgaccaatatgctcctcttggtttttaacctttaaaactaaggttggcctacaagaatcaccctgattttttccttattaaaccaaattctggcccaccttttattctccttcaggtcactctaaaaacgctaaacctcacgctgatgctcattgacataaattgtcc

SEQ ID NO: 173968 - DNA, 503 bp, Arabidopsis thaliana
taggtgaactatagaagatcttgacgtcgcatgcacgcgtacgtaagcttggatcctctagagcggccggcctttttttttttttttagttggagagtggattttgaattgaatagcggaagttataccaaaatggtatttttggattccaagggtagcgatttcattcaacaacgattgggatcagaggagatcaattaattcaataccaaatggcccaaacgaatttaaaaggccaagtaataacttagacaacccaatacaggaagataaataacctctaatggcagctctagatctatctctgtctcatctatatataatgccttggctacttacctctagataaacgcagacttcttcttccgcatactacaacctcaagctttgcaagtttgtagtatactttgttaggactatacaaaagcactctcttatctatgggattaatctctgcaccagctagttctgccaaggcattgaactgagtttatcgaaacgct

SEQ ID NO: 173969 - DNA, 478 bp, Arabidopsis thaliana
accttgccttccccccttccttagcctggattcttttaaaccggccgccctttttttttttttttttttttttttttttttttttttttttttttttttttttttttttttttttttccaccaaaacccggggattaaattcccagttttccattgacttaaacccttgggggaacaactgggcccaaaaaacaagggtttttttaaaacctaaattcgcttttagggcttaccaaagttttaaaacaaaaccaaaaaccatccccaattggaattatggttaaccgtcaaacaaaaaaaataaaattctaaactttgtttaaacaatgggtttccaagattttgaattttttggccaaaaataaacacattcttttccgtttggcccagtgatagaaaatccttttttttcacccttgggtttgacattgcccccagcttttttttgaaaatacatgaaaacaccgtcctttggggg

SEQ ID NO: 173970 - DNA, 479 bp, Arabidopsis thaliana
tgacgtcgcatgcacgcctacgtaagcttggatcctttagagcgggcggcctttttttttttttttggtattagcttttttattccttaggtttcaaaaggggattcggtttcgatctggctttattttggccgtaccgaaaatttttaaccaaaccagggttattcaatttaaaaattggaaatggatttggcgatttaataaccattcccaaccaaaaccaatggaaaaggttgagaaaggaaaggtcacctaacccggtattctaaccgaaccgttagttgagccacttgcaccggtcgatttaaccgaagttccttcgccgtttttatggactcctcctctgggcacatgtaccgaagagttcctccacaaaaacgacgcgtttttaagaaaagcccaccggtctcttgcacgtaccgaatcactaccggttgaattcggtacagcactggctcgaacgctaccggtagcacctt

SEQ ID NO: 173971 - DNA, 484 bp, Arabidopsis thaliana
tgacctcgcatgcgccccttccttagcctggattcttttaaaccggcgccctttttttttttttttttttataggttgattcaaaggtaattaaaagccaaaaaaaattcctaggatataatttggtggccagtttgtgtgtgattaaataaaggtctaatctttaatttttattatggagaaggggaaaatccaaaccttatggattgttcagagctggagaatggtttacatgtctgcagctacagggatagttcctttctaaacatgaccccacctctttataaagaaattatccaccaccaatctgaaccatggagatagttacacagctttatcgccagcatttgctttcttcaccagctccttaagctcttccctgctcacgtacttgatctcagccacttaatctgggttgggttgaagcttcacatcccgcacgatgaagagtagatagtcaacttcgtgctctccccatttccca

SEQ ID NO: 173972 - DNA, 505 bp, Arabidopsis thaliana
ctatgacgtcgcatgcacgcctacctaagcttggatcctttagagcgggcggcctttttttttttttttattggaaccattattggtttttaagggaagagtgagaaaaatgcgcaaaaccggtaaaaaacctcaaggtttaaaaaccacccccaaagggtttaaagggatccggccatggactttttttaaaattttaaaaacctaatttttaaaaaacctaaatgggaaaagtggaccttatgcccggttattaccttacagccccaatttttacttattaaaccaatgaaatgctgctttcacctccgggaggtttcctcacgccgccaaagtagtctcggaactctgactttccgtctgcaaaaatgttgtttccgctcatttcacggagtttagctgagcttaactgcttatccgcactaccaggtgattcatcgcctttgaaaatgccgttgcctgtgagttcctgaaacttctggttatgtatcttctttgatgtctt

SEQ ID NO: 173973 - DNA, 470 bp, Arabidopsis thaliana
  unsure (1)..(470): unsure at all n locations
gggaaagcacgtacgcctgcaggtaccggtccggaattcccggtttaccccgggtccgggcggaggtccacaaaattntgagtaagatgatgattaatgaggaactgccttccagctgggatcagccaacaccatgcattntcttccatgaaaggcaacacagcganattacaatccttggctttccagataacggaagaaacttcctatttggagatggagccaattanaggggccattaaataatcacacggggggaggggggtctggaatcttgtttccacccgaaaggaccaccatccggactttccggggaccccatggggggggggggattttggcaaaacagggaatttccggccagaaacacaggcccatatccggttttgggggagagaaaacttccgccaaaaagggccccgggacaggccacccccgggggggggttcttcccgaatagtttctttaaa

SEQ ID NO: 173974 - DNA, 218 bp, Arabidopsis thaliana
  unsure (1)..(218): unsure at all n locations
atcccactcaccttagggaaagctcgtgcccctgcaggtaccggtccggaattcccgggtctacccacgggtacgggcaaatgctatccatgtcctcttccggataatanacngaacccttctcactcagattgagcgatacttgaaacaggccattgtggataagaatcccgttgtttcaagggcagctttagtcaggggggcttcacttgctcaag

SEQ ID NO: 173975 - DNA, 496 bp, Arabidopsis thaliana
tgacactatagaatgactatgacgtcgcatgcacgcgttaggtaggcttgattctttaaaggcgggccgcccttttttttttttttggattcaacaatttttttatgataccattcatttttaacttggaattaaaaatgggccttaaccttaccatggggggggaagaagaaaacaaaaaaatggttttttaaaaataaaaaggttttcctccaaagttctttttggttaagaactttggctaacttcgtgtaaatttttccaaccaaaataagaagtaatggggcctttgtttctgggttgcctcgaaaaaagattcttgaacaatctggttggtaggaaaacattttgcatccaaatgtcattcccaaggcagttccaagtatgaatcctataacagctgctatccaacttataaaatattcttcatcttcttctggctctggcgccatgtaagattgttgcggtgttttcccatggatatcacaaattatat

SEQ ID NO: 173976 - DNA, 512 bp, Arabidopsis thaliana
taggtccactatagaagatctatgacgtcgccatgcacgcgtacgtaagcttggatcctttagagcggcccgcccttggtttttttttttttttttttttttttttttttttttttttcttttttaaattaaacctcgggatttaacctttaccatgggggccattttcttgggaaaccctttttttttccatttgggaaaaccaaaaaaatgttcgggaaccccttttttggaaagggattttttaaggtgggttttcctaaccggaaagcaggaaaaatttgtgggccgaaaacccgaattttaaagccaagcaaaatcatttggggaaaaatttagaacccgaccttacttgtttttcctaaaatgtttccacggtttgatacaggtttttttttaaaagaagggacctttttagtttcttggaggccttgtagggaactcagaaatcttgtgagcatcaaatgttcgatttcagtttcaatctttctctggaagatgcattcaagttc

SEQ ID NO: 173977 - DNA, 476 bp, Arabidopsis thaliana
tgacgtcgcctgcacgcgtacgtaagcttggatcctctagagcggtcggccttttttttttttttttggaataattacaattatatatcattattccaatcaacatctattggtgtggagaagtgggcttttattcattttataaaaaaatagaacactaaaaccttcttctaaagaagacatgtttccagagaaaaataagatttttttctctgagatccatacaagaaaggtgtataccagggaagcattggcacaagcacattatagtttcctttgagctttcgcatgaactcccaaaggtaaaagtcacgttatggactggaagccttaatgtggtcggttttgctgcagacctgtccaggcattccctgggggcaacatcgcatgaaaacgaaacccattctttattggcggctaaatacttgaacttaaagggtggcggttcgagcctcaaccttttgggcacttggtgg

SEQ ID NO: 173978 - DNA, 470 bp, Arabidopsis thaliana
  unsure (1)..(470): unsure at all n locations
atacgactcactttagggaaagctcgtacgcctgcaggtaccggtccggaattcccgggtcgacccacgcgtccgggcggatcaagataaaaaanaanaaanactcttctaaaaatgggaataatggaggcagagaggaaaacaacagtgctgggctgccagagacccatgtgggatcctctctccttacacttacactncttanagagactggacccanaggatgttaagcatganggtcatttcctggggggatctcccacaacaaacttcatcaaactaagaggggtgttgggctgtcctattaccccatgggtcctgggcatgaaaggggagggaaagtgggggaggttaaatcaaatttctacccttttccccgggggggaccatggttgaggtgcgtccccttgtgtatgttccggcggtttctccctttgcaagaaagggggggaacaattttccccaaaagg

SEQ ID NO: 173979 - DNA, 486 bp, Arabidopsis thaliana
  unsure (1)..(486): unsure at all n locations
ggaaagcacgtacgcctgcaggtaccggtccggaattcccgggtcgacccacgggttcgggcacgcttacaaaaacattatgggttatctcacttatcttcaccatttgtgttcttgcaaccgcgttcaaccacaagaatcggtggattttatcaagggacacccaccgtctcctccctgggagccctataatcgtgaaactctgcttatctccgtgagaagtcggacaacaatctctgggggaatcctaaacaagaaatctgcgccctggaaaggtttttaaagcttcccaacatttcccttcggtcttttttcttttttttttaaacatcaaaaataatctttgaacatccgtaaccccccttgggggtantccccccccctttaacgaggggcaaaaaacctttctttacaaaataaaaaaacattgggtttttctccttttaggggtaccggggaaaaaaataaggaaccttccttttaaaa

SEQ ID NO: 173980 - DNA, 483 bp, Arabidopsis thaliana
cgcgcatgcccccctaccttagcctggattcctttaaaccggccgccctttttttttttttttatataccaggttttggtggtttttttaataacccaggggaaaggtaattattccggttaatggaaaattaaacatgctttcactaatttggatggagttcttaagcggaacctccaagggaaccattctggagtcttgatgttccataaagggtttcttcaaagcggataatctcgttctttgagccataagcaacttgagttctatcgccaaggttgatgatggtcttgccaagcacggacttgtgtccatcactgctgaatccaccagcattctctatgagcaggccaagaggagccacttaaaacaacagcctcaactttgccttagccgtaggagaagtcacatttgtgaagattcctttctccttcacaataatctggttaacatcaggaaccattcctccggtgtatcgcagtg

SEQ ID NO: 173981 - DNA, 495 bp, Arabidopsis thaliana
gccacttttaaagattcttgacgtggctggcccccgtccgtagcctggatatcctttaaagcggccgcccttttttttttttttttttttttttggaacaacagcacaaaattttattttttatccataacaataaacacattggctgccataaaaggttggaacattgactacaatttgggcaatattttacaacaaagtattattgcccgaacaataagaagattttgtgggtataaaaattttcagggcacatgagatgcgaggacttacattacattatataacattatgttcaatgtagaacatcatctcttctggaagaattggctacctctctcaccaattccggtaccttcaagactggatgagaaatgagaccttgcgcccggcctccacgttagttctttgagaagggaaaccaaagacgagagtgcggctgaaatttggctgtcttttatgttcttacatgatactactctcatgctctcaagc

SEQ ID NO: 173982 - DNA, 548 bp, Arabidopsis thaliana
  unsure (1)..(548): unsure at all n locations
ctaatcccactcactttagggaaagctcgtncgcctgcaggtaccggtcccgaattcccgggtcgacccacgcgtccagggacgcttggttaaaaatccccccctaaatcaaaccttctttgagagatagatccaccgttgaaggaacatatctaaaccgctgacccttttgtggaagaatatgcccccttattccctaaattcccttctttaaaagacaacttttaaaactttttttttggggtggttgggaaccataaacaccacttttttttaaaacaacaaaatctccctccctttaattaagcttaatcacccaaagaccctnttttaaatcccctttcttcaaaatttctccaacccttaacccaactttcttttttaataaaaattctttttcttcacaaaaccccttataaaaacctttcctaatatttataaaacaattattttttacttcgtttgttaacgggggtttagtcttcccccaaaccccttttcacgagatataaagtttttttttttggaacttttttttgggcgtgggg

SEQ ID NO: 173983 - DNA, 488 bp, Arabidopsis thaliana
cactatagaaagagcttgacgtcgcatgcacgcgtacgtaagcttggatcctctagagcggccgccctttttttttttttttttttttttttttttttttttttttttttttttttttttcaaccaaacaaagaaaatccatttcccaataaaaaaacaacgaatataaaattcgattttttatttaccatcaaccacttaacagaccacaaaatgaagggtgtttacggattcaacacagattaacgggtttgtatgtatgatctaggcaacggggggggggggaccaggataagcaggaagagtgatgatccgcttgtctacaactggacctcccacagggaaatgggacagactctgaaagctagagtcattaatccccagaacctggggcactggatcatcgaaatagcacccaatcccggttggtgagatccccattgggtgtgcttccaggtacaaaacttgtccaacaacacccgtttccc

SEQ ID NO: 173984 - DNA, 481 bp, Arabidopsis thaliana
gagctatgacggcgcatgcccgcctacctaagcctggattccttaaaacgggccgccctttttttttttttttttaacgtattaataacctggtggattggtccggatattggaaggctcctaagttattaccaggactggaccaaatggatggtaaacaaaaccgaatctttaattcaattcctaattaaaagggaccaaactggacactgttctatacagctttaatctgttgggttacccttgcggaatagatcaacgagtatgttccagattttgatcctcaaagcggaagcttcttccggtttaaaccacttcttgtgaatcattttcaaatcctgcaatgtcagcctttgaggagcctcttcgatgaaacgtcttatgaagaagagcagaaacagaccacagtcgaaatcgttcttctgttgtggaacctgcacttcagcttcgttgatcatattgggaaggtctctccatactt

SEQ ID NO: 173985 - DNA, 444 bp, Arabidopsis thaliana
tttagagtcataaggatggggtctttatggacgaagggagacacaatgcatagtgtgcttaaactgttgtgcacattgtgatccaaaagcttagcttatgtgctcaccaaataaaccgaccagatgcgtatgacacaagttaaccctaatcttctctttatggggggtcacacacacgttcatattatatacatacaaaaggatttttataaatgaaacaatggagcagtgttcttcatatcctaaggacatcttaggtacctttacttcttgttcctgatccttgacttgtactccatagatcatgttgttctctggcgcaagcccaacacatgccctaagaatgttttccagcattgcccgctgcttcgacagaacgttaaccaccggtgttccgggcgggacaagaggtgcctttgtgaggtaactggagttggtagcttc

SEQ ID NO: 173986 - DNA, 423 bp, Arabidopsis thaliana
  unsure (1)..(423): unsure at all n locations
ccaagctctaatacgactcactataggagaagctggtacgcctgcagtaccggtcagattccgggtcgaccacgcgtncgcaatncactcatctnaaactcctatacaatggaacacaacacaaaattcagaaactgggcaactacggggccccttccttttttttgggcgggaaaaagggaattccccgcgggaaaatttggtaaagtcccctaaattttccggggggaaaaataggggccccgtcttccgaaaaagccccaaagggggggggccctaaaaaaaccgggccctttttaaaaaatccttgtggggcggccaaaaaaaaaatttttttttttttggggggaaaaaatttttaaaaaaacgggttttttaaaaaaggggggaaaaaaaatctttttttttttttagtgggggggg

SEQ ID NO: 173987 - DNA, 382 bp, Arabidopsis thaliana
  unsure (1)..(382): unsure at all n locations
tcatacgactcactttagggaaagctcgtacgcctgcaggtaccggtccggaattcccgggtcgacccacgcgtacggggtgccanaaatttccnatttcactttcacatctccctctctcttacaactctgtatccgtagttatagtttcntcctaaaatttcttttcttgagtgttccaaatgaaattgtgagttctccgagttatatgcatcccctataattttagggatgatggaaaccacaatggaggggattcaaaaaaatggttctgggggtgtttccctttgaaaagcaccaagaaacggccctctgtttctatgaagggggtggatcttgaagaaagcaagcccactgctttacctgagcccccaaagattcc

SEQ ID NO: 173988 - DNA, 483 bp, Arabidopsis thaliana
  unsure (1)..(483): unsure at all n locations
ctatagnaanattatgacgtcgcatgcacgcgtacgtaagcttggatcctctagagcggccgccctttgggttttttttttgcaataagccaccattggataagggagagcagtttagaagacacatacgggaaacagctgctcacacggagacgagactttgcgaagcacctatgacgtgcaactttgagaagcaagatctatgacgaggaaccatttgttacaggagttttttaagactctgagagcaccacaggagcatgccatgatataggactcgaatctgaaccacacaccgcatgcctatcagatgatggcaaaaaatggtactgctgcatcttagtgctgctgatcagtaatcactgacatgaatgacttgctttaacccagaagggcacttgaacattggccagaggccttggtaagagctcaaatactccggatcgctccattggatcaaactagggaactcctttgttagga

SEQ ID NO: 173989 - DNA, 495 bp, Arabidopsis thaliana
aggtgacactatagaatgagcttgacgtcgcatgcacgcgtacgtaagcttggatcctctagagcgggccgcctttttttttttttttttataaaagtgcaatttcatttttaacatcgaatcctggaaaaacaaaatggttttggtaataccaaaagcggtttacttttggtggacaagctagcagcattaatgtgtgcccacatggtagcaagggaaaacgtgctcctttgaataagattgtatacgtgctataggtcagactgacgggatcacgcccgggttaaaagacatgtaaagcagggttttagttgggcccgggtgagtgacagcaggttagacaaagaaccctgatgtctctcttatagatggaccacccgcttaggcttctgtaagtttacagatatgatctgtttttacaaccttatcaaggcctcatgcgtctatgagaggcgcttcgggatatacatgatcgagcccaccgaggggtggtcc

SEQ ID NO: 173990 - DNA, 472 bp, Arabidopsis thaliana
tgcctgccccccttccttagcctggattcctttaaaccggccgccctttttttttttttttttttttttttttttgggaaatccggcctttcccttaattaagaaaagccagggtgccgccaaatccaaggttttagggttaaaaccggtggaagaaaaaaacggcctgatccccaaatttcagtcccaaaggtggataaaataaaagtttcttctacctaaaaaaaacaacctaacttttttttttttttttcagcctttgcggtttttttggctctagctccggcatgccttttgttagtgcgctcaaggcgtttcttgtcaaaagccttgaaagacttcatttctgaagtcagcttgacgagttccatggtaggcttctcacgtacaataggcaagtagtctccttgaacttgggtagcattagccaactcttctggtgtagagtcaccagccttgaccttgcgggcac

SEQ ID NO: 173991 - DNA, 483 bp, Arabidopsis thaliana
  unsure (1)..(483): unsure at all n locations
aacgcacgcgggacggagccgggacccactagagcggccgacccacgcgggcgggaagaaaagaaaaggccaagcgacagggcggggcgaaaagaaacagaaacacacaagggacgnggaggcacgaaacaggcgcaaaagcgaggaagacagaaagaacaaccccaaagagggacacaaaggcgagaggcaacactttttttaaacgtgttatctacctgtactgtctaccattcagggtcttacataaacttgctcacattattataagaggacccttcttctcgcacaggggttttagccatctaggccagctttttagcccataaccgcctttgctctgccttctgacaaacaatcactttccttactggcttctgcgcttgggcccctaccaataaactttcctattttacacacaactggggggcggcaacggtgactcctatgttcaacacttttgggaaaaggttgctaattgag

SEQ ID NO: 173992 - DNA, 531 bp, Arabidopsis thaliana
gcacgcgtacgtaagccttggatcctctagagcggtcgccctttgggggtgtttttttttttttatggatacatcgtgccactacgggaaatctatttaggtaactttataattggaaacaacgaaatgttactgggtgccacttatgtaaccttttatctagtacatactataaatggaaatgagcgtttaataaatccgacgcgcttttttttttttctgagggtgataaagaaattactgatcactgaagcttcattactaacaaatcatgttcatatgaggcacaagaaagccttataacctactcccacctctctttatgtcttttctgctatgcacaaagagaaatactctgataggtaaaaaaagcccaaagaagacctgcctctctacacctcttaaatgcttatgcaaattctaaaaacaaacataaccggaccatctattgctaatgacctaatatagataagaaatgtggaaggagggatattacatttggataataaccaatcttgcaatataacttcc

SEQ ID NO: 173993 - DNA, 477 bp, Arabidopsis thaliana
cccccttccttagcctggattcttttaaaggggcggcccttgggttttttttttttttttttttttttttttttttttttaaataatgggctaaataataaaatcctggcggcctttaatggcctagattaatttaaatcccttttaataccccaacctttacattttaatttttttggggcttgattttaattgtaacaatttttttttggacttaaattttttaaagccttggaaaggggttggcctctaaagaaatccttaaaaggctaaaaagcagcccgtggtttgaacaatggcacctggggacctgttcctttaacgcgaacgaacgttagtccttatatacacttccgtccatcctccaacctgttttttgacataccaaggatcccaaggaagttgggtcctcaaactaagtcttgctagggagtatctagtagctgtcactggtacaactgaatcgacgtcaccacg

SEQ ID NO: 173994 - DNA, 456 bp, Arabidopsis thaliana
tgacgtcgcatgcacgcctacgtaagcttggatcctttagagcgggccgcctttttttttttttttttttggcacaacatattttggtattagggcatgccattactcaagtagcaaaaaaatggtgtaagcgccaacctgggatgggaaccaaacccagaagccgagccctttggcaatctggtttggaggaaaaaaaaggtttattttcactggattttattccttaattttaaaccccctggtgcaaacttcagaccattgaagcttcaacttccacttttttcattttaagttccgaaaacggtttggggccaccacattggcaatggcttggccggaggcaaaaatccgggccagggcatggctgggggcacaattaataacctggaattttctgagaacaggcctaatattcaaaaggggcttcaccacatttgggttggcagaattcct

SEQ ID NO: 173995 - DNA, 485 bp, Arabidopsis thaliana
cccttccttagcttggattcttttaaacgggcggcccttttttttttttttttttttttccttttttggcctaaggggccaattggttgaacgcgaaaaggttggaccattccaaaccggccaaagatttccccccaaagaaatttaaaggagggccagccaaaacccttggtttattattaccaccactcttctttaacagaaaccaccactggttaattaaacccttaatataataaccaaccctgttattcaaagagcccacttttttattggatttattccaaaagcctggaaacccaccctggatctatacgcctttggttaaatcagggggatgtttttggatcaagagagaggagggcacacaaaaccagaggggggttggcccccacaggttataaaagcttgaagccatgaggattgaagatgtttaggtggaaaagctaaagccttatggttgagcaaagacaaacgggtgtttt

SEQ ID NO: 173996 - DNA, 501 bp, Arabidopsis thaliana
tagggtgacctatagaagagtcttgacgtcgcatgcacgcgtacgtaagcttggatcctctagagcgggcggccttttttttttttttttggattacacaaatcaaaacggatttattagcaacaaccaaatatcttaatattttttattaggtaccaataaataccagctttcccattatacttaaaaaccctaaccttaaaaactcatttattagagcatttttggttttggggtattacctactacccttgggttacttcttacaacattacacacaacttaaacttacaggaggttatttattaacgaattccctttaaatttcttcattttggattccattttcttcattcttaaacggtctggtttgaatctaaacatttggggccggggtttcttaattcggcggtttaatttcaacaatttctttttcattcttaacaaaatccgtttttggggcctaagccttttttttttaagccttaactaaacctcatg

SEQ ID NO: 173997 - DNA, 381 bp, Arabidopsis thaliana
  unsure (1)..(381): unsure at all n locations
ggtcacactatagnaatatctatgacgtcgcatgcacgcgtacgtaagcttggatcctctagagcggccgcccttttttttttttttttttttttttttttttttttttttaagaaacatgacatttaatttttgcataaaaaattgaaaacaagggagtattactatcttcacatgaaacggataatgatgttttcaatgactcgaggagagaaaacgtgtttcttacaacacaaatgcacatttgggacacgggccatattatggagatacaacagggcgggtcgggttgcggctaacaccaagtcccaaacccataggaacatgttcattctggcaactgcatccatagccataatagtaagtcaaagagggacaatg

SEQ ID NO: 173998 - DNA, 500 bp, Arabidopsis thaliana
agaagattatgacgtcgcatgcacgcgtacgtaagcctggattctttagagcgggcggcctttttttttttttttttaacacaatcctcttgattttccttattcaaattatccagacccggggttaaggaaccaggagtggtttggaccaccaccttccccaccaccaccaccccacccttattaccaccattacccttaggacctaggaaggatttaggaccttcaaaggatttaaaccctcaggtaaggatgacaagattgggttttaacccaattggcttcagaattatcagtcttcttcactggcgtcttcttaactcttggcttctgcatcctccatttaaacatcaccttggtctccaagattccactgttcaggctcatcttctggggctcctatgggtgggggtatgtctgcagagtcccagtcgttttccccatcatttccaagctcttctccacggcaagagacctgcaaatgtggtcgtctccttgcc

SEQ ID NO: 173999 - DNA, 487 bp, Arabidopsis thaliana
tgacgtcgcatgcacgcgtacgtaagcttggatcctctagagcgggccgcctttgttttttttttttttttgaaaccttcactatttgtcaagcgcatgtgcaaacacccaacctaagaaatggggatttcctattttccggacagatattatataaattgggccccgcgggcaacttacctttgagaacaagagaaaaaagggtttttttctccttgttttttaaacaatttgggaggggaaaaaggtttatatgtaaaataaaacaccccccccctcataaaaaaactcagagaatgatccctaagaaagcttaatgatttttccaaagggtcttgtggcgcgggcaaaatcaaaaaatagtaaaattgcgggaaaaggggtgctcttcaaggccccatttgaaaaaaaagcttctccgggaccctgccctcagtgttaaaaaaatcttttttccccttttaatttaaaaattccctgtttagga

SEQ ID NO: 174000 - DNA, 510 bp, Arabidopsis thaliana
  unsure (1)..(510): unsure at all n locations
gtgcactatagaagacnatgacgtcgcatgcacgcgtacgtaagcttggatcctctagagcgggccggcccttgggttttttttttttttttttttttagaagaaataaaccccagaaaataggtccaaaatattaggtccaaccgaaaccttaaaaaaaaaggttaaaaggttacccatggcttaacacccctaatggttaaagccagcgggggggaaaatttttttaaacttcttcattttggttcctttaagattgggattatttttaagtggggggattgtaagattgggtttaaccacattattggcaataatggctaattcaaggcttaaacttcctgggaatccggctcccgaaggggtggggctaatgggggttgaacccagaggggaaaaaagcggcctaaaagaaaaaaagtccagggtccttaacagactggtcgttctggtctggataagttttttttctcagctcatccatgatggagttttctgggttaatctccg

SEQ ID NO: 174001 - DNA, 672 bp, Arabidopsis thaliana
tacgttcactatagggcaaagctgtacgcctgcaggtaccgggccggaattcccggggcgacccacgcgtacgttacaacagggttctctcaacgcattcccttcttgaacatacggatgtagctggcctcttggaaacgaagccatctatgacatttgccgcgagaccctaaatatcgagaggccaacctacacaaacttgagcaggggggcatcacaaaaccatttaatcctttgaaaacatctttgaggggttgagggggccatccaacgaggatatcactggagttccaaaccaatgcttgtcccaaaatccccggaacccatttaatgctggcatccttagcgccccagtatctcacaccccgcaggggttaacacacaagcagcttatcaagcccgctgaaacacaccaacggccctgtttctcgacccaccctacgaaagaggggcaaaggtggcgacccggaaacacgggcaagggaccatgggcgggccgttctgatagaacccgaggcagaaccttcgccccccaacaaagtccaacgcctgttgttcggccacaacaagaaagcaagaaggcgtggtcactttggtagcagggcgggccctagtgggatcacaggcgacgacgaccccgcgcccctccacccgtgtggtgacggggggacc

SEQ ID NO: 174002 - DNA, 490 bp, Arabidopsis thaliana
  unsure (1)..(490): unsure at all n locations
tcgtaagctgggatcctctagagcgtttcgcccttgggggttagagcttttttttgagctatgaaaacttgaggagattctaaagatttatcagtttgttacaacataaagccataaatggctgacaaaaagaaaaaatcgaacttgaagaaaaagaagtaacataccagggagccccctttaagatttttttacgaggggtgggcaggaaaacgggcacccactgatcgaaaccctaaaaccanagcaacgacgcgggaggcagagcctcttgctcttcttctttcttctactagtatcttcatcacaacccgacgcccaagctgaacctaactcaaatgactgccatgaagaagagctgggcctagtccaggttaattgactagagcttcacgataataatagctatattagagcttagatctacgactactttccgaacgatgcgggcccgcgtcgaccggtgtcgtgagcgcgcttgcggaaggga

SEQ ID NO: 174003 - DNA, 248 bp, Arabidopsis thaliana
ctactacgacttactatagggaacgctggtacgcctgcaggtaccggtccggattcccgggtcgaccacgcgtccggaggaaaagacgagacataattggtgagatccaaattcacaaatgatgtgcaagcggcttcggagcttaactccgcagagatccggaggagtgcaagctctcaccgcgagcaaaagaccattgtccccaactttatagggaacgggggggggacccagatggttgaaaacag

SEQ ID NO: 174004 - DNA, 480 bp, Arabidopsis thaliana
  unsure (1)..(480): unsure at all n locations
tacgtaagcttggatcctctagagcggtcgccctttnggttaattctttttttttttttgtcttgtaggaagtaaactacatattcaattaagctcaaggaggtgtttttgtgtatgaaaaaatacactaaagctttagaatctaaatatcaactgcagaaggaatgtcgtcgaccgttagatcttcctcccatcgggggactcaganccgagtgggcctagtatcccgtcagaactcagcgtcagtccactctcaggttggaagcgaagcatgtctgcacgagccatggcttctgcttgcgcaattctctgtctgaatgtctgagccatctcctcagccttctcgaacacaagttttgggttacgaatcatatcaccaggggttggctccagcttctttggggagagacttactcttcctctgtcacggtcgggactcaatatcataacccttaaagggcaccaggctgaagaacagtt

SEQ ID NO: 174005 - DNA, 463 bp, Arabidopsis thaliana
  unsure (1)..(463): unsure at all n locations
gcgtacgtaagcttggatcctctagagcggcctccctttttgtttttatttggttcatcaaaggtatttactaattcgaattcaaaaacataagtaaactttgatcttgccgatttaataaatactagattacaaaatcaaagataaaccacatgtttggacaattagtaaaaatcgnctctgcacttctcctactaagtagcggggcagagggagatttcgagtttctttcagttatcagaaaggtggcctaagaaaggatccatcttcacacctaagatcttgacattaggatttgagtgacctttaacaaatacttncgtcacctgactgcatccaaagaccttcaacactttcagagatgaactgttatcgacaatgtagcctaataaatcgttggacatttctcggcaccaggatatatccaaaatctgcagtttatctgaatgtttggaaagtgcta

SEQ ID NO: 174006 - DNA, 774 bp, Arabidopsis thaliana
  unsure (1)..(774): unsure at all n locations
cgcgagctctatacgactcacttagggacagctggtacgcctgcaggtaccggtccggaattcccgggtcgacccacgcgtccgcggacgcgtgggttttttattctttcctctttttcttaagtctttagattttctactgcaggctataaaaaaaaaaaaagcctacacggctgtatcagaactttttgttctggattgtaataaaacatctcgataaagagatgggctttaccgtcttaacaaagaaaaaaaaagaggccggccgttctataggatccaagcttacgtacccgtgcatgccacggtataactctttctttagtgncaccctaattccaatttcactgggccggggttgtaccaacgtcgtggacttggaaaaacccttggcgttacccctaatttattggcctttggagcatcatcccccttttcctccggttgggggtaatatccaaaaagggcccggccctgatcgcccctttcccaacatttgcccctcccctaatgggaagaagggaacccccccttgtttgcgggcccttttatccggcgggggggtggggggggttccccccaggggtgaccggttctctttgcccaggccccttaaggcccgtttcttttggcgtttcttcccttcctttttagcaacactttgggcggttttccccggaaagctctaaattggcgggctccctctagggttcccgtttgaaggcgtttcggccctctcgccccaaaaacttgtttgggggttggtctccgtgg

SEQ ID NO: 174007 - DNA, 429 bp, Arabidopsis thaliana
  unsure (1)..(429): unsure at all n locations
cgtcgtaagcttggtcctctagagcggccgtcctngggggnaagatccccnnnnnnnnnnnnnnnnnnnngccctccgctaatagaaaaatccaaaagttccccatgacaattcgaatccaaagtttaaaaaccaaaagaaaaaaaaaatctgtaacatttaaaaattttaaccatttggaggttactattagattccaggggcttaagaaatcctgggaaaagaagggaaaaaaaccctaagaaatagggatcgagaatcaccgatctcttggttatggcttttggaaacaaacccaaattttttttaatcatccatgtgggatttttggagttcccaatttgatcttatcttatggaaaattttttaaaggaaaaataacttctttttttggggttgggggggcctccccccaaaaaaccaaaccag

SEQ ID NO: 174008 - DNA, 432 bp, Arabidopsis thaliana
  unsure (1)..(432): unsure at all n locations
gccgtgggggtaaatccttcaaggtgaaccagaacggtattaccaggtgtgatggaaaatacatccttatgggtccgagcaagagtcaaaccgatggaagttaacaagatgtgctgtaaaagaaaaacgaaaggaacccgtactgacacagaggttttatanttttgggggggggaggaaaggaaagcccacgggaacagcaagggcggggagacgggggggagggcggagagcgaaccaggaagggcagggaacgccccaagagggcggggagcgaggggggaacaggaaagagcagagggggcgagaggaaaggggaggggggagggggcaggagggagaggcagagggaaagaagcgcgaagaggaacagaagcgagaggaccgagggggagggggagagcacagaggcaggcgggggaggggggggga

SEQ ID NO: 174009 - DNA, 475 bp, Arabidopsis thaliana
  unsure (1)..(475): unsure at all n locations
gtaagctgggatcctntagagcgttcgccctttggggtaatccttggattcaaacacaaaataaacattattgggtcaggatcttcgctttgattgcctcgaaaaatgcaggggatatctgagccgggagaaaatggaatgcgaaaaggggcacgagtgaacttgatgggggagaaaaaatgggattttctcttttgggggggtgaacgcaacggggggcacggaaggggggcaacagcaaacatagggacgagcgggccgaaacgggaaagagaaaaccacacgggacctagaaaggagaaacgcacaagggagaaccaggggagcggaggggaagaaccgggaaaaggggccgggagacggcgaaggggaaaagagaggcgagagggaggggcaggagagcgagaagaagaacgagcgaagcgcggcagcaggaggaaaccgggacgaggggcgggcccggcgaggggggggg

SEQ ID NO: 174010 - DNA, 483 bp, Arabidopsis thaliana
  unsure (1)..(483): unsure at all n locations
gtacgtaagctgggatcctctaaagcgtttgcccttttttttttattctaaactgaatcacaaatcccatagctatttaaataaaacacagaaaatttaaaaataaatcaaaagaaccctgggagcttctcctttttcctggtcttggataaaagtcttctcctttcttcctactggtgggaaccgtttttttttttagggggcggaacaaaggncccggggacattacaaggaaaagggcctttatttgtcaggaaaattaataacattctcttttctctctgaaacaccacaattactaactggggacataggtcccgatccagcccagcccaatggagatgaaagacattggcttgaagaaacaggtagatgaaggaattggtctttccggggccaaagtgataggctccggacacgaacaagaaagccgggaaatgcaagctccaatgtatttcaatcgatcaggcattttggagaatc

SEQ ID NO: 174011 - DNA, 480 bp, Arabidopsis thaliana
  unsure (1)..(480): unsure at all n locations
cgcctacgtaagctgggatcctctagagcggtcgcccttgggggtaaaccctttttatttacctttttttttttttttggggggttaaattccaacatggaatcgacttcagactagcagctttgattggacaacccaaattggagcaaataaggatgttcttatgaactaaaaggggaaggaaatggggagatgtcctaatctaaaggagggagaggggncccagagaacaaaaaccctctcctggggaatcggaatttcaccggtgggtgggggggcgagggttcttttaggggccttaagttttctgggaacctctaatcggggccaaaaacccagaccatgtaaacaacacgtggatgagcagctgccccaaactttggggaagaagaaatgcatgatgggccggccacgggaagccaccccccgcccgatacagggaagaaaatccggcggggcctccagtgggaaaaggacaac

SEQ ID NO: 174012 - DNA, 278 bp, Arabidopsis thaliana
  unsure (1)..(278): unsure at all n locations
cgaaagctgggaccctctaaagcggttgccctttttgttttattccacacaaacgttgacttctgatttactctgaatatctacattgnccaaagatgcatgtaaaacaaagaagagacaccgacaaatgggtactacaatatcccaaaaaggcttttttgttaagttttggaacaaaggctgcgttctttgcgagggagggcacaagacaaacccgaaaaaaaannnaggcgcagaaacaaaaagaaaaggaagagggaggcccaaaaccaagaaca

SEQ ID NO: 174013 - DNA, 480 bp, Arabidopsis thaliana
acgcgtacgtaagctaggatcctctagagttttcgccctttggtttaacccttttttagggtctgaattcatttggcaacagaaagaacacattttttggtgcatatattgaaggtacaaagcgattaaaagagcttataagaaaactcgagggtttgtgagggtaacgcgaacgaaacggaagagggatctataattttgcgggggtgccaacaccccgaccggaccgagaaaaacacccccacagcagcgagaacttgaatacaccacataacttgtgaaatttggccgagaataccctggaacacggacatctcgaaaccgctcgccagaagctatttacggaatcgctcacaaggctctcggcaaagtcatcatccaccgccggttcttcataaccgggaagtaccacttatctcttatatgtaacggtcctatctaaccactttaatctctctgatactattaacccaacttccc

SEQ ID NO: 174014 - DNA, 302 bp, Arabidopsis thaliana
tacgacttactatagggaacgctggtacgcctgcaggtaccggtccggaattcccgggtcgacccacgcgtccgcccacacggacgtgacattactcgtcaaacccaaattaccaaagcttatgcagacgctgatgagcaacacttgaaagccttcgaggatgcaccttctcctgtttcatatgaccatcatcctcgtcttatgggacacgacggctggactcgctcgattgcaacatcatgacgaactcgagccatgggctatacagaacctgctaacacatgcacagcgtttacttacca

SEQ ID NO: 174015 - DNA, 477 bp, Arabidopsis thaliana
  unsure (1)..(477): unsure at all n locations
cgtaagctgggatcctctagagcgttcgcccttggggtgtaaaccctttttatattttttctttttttttttcgggaggagaaaaatgcatagtatttgagattaagagtatgaagatgatgtacaaggaaaactcataggaaacatctaagggtcatcatcgtggagaaggcggctctggggtttttatctgggcggggagngggcaaaacnaaagcccgaacaccctaacggggccgaacccccgagggggggaccagaccggaatccaaaaaacccccccactcaagggaaggcccgaggggggaaagaacaccaaagcggccccccccacaaacccagggaacgggccgaggaccaaaccaacaaaaagggcacccccagggggggccccgagggggagggccgccccccgaccacctacctgcaggggagaacaaaccccccaaaccgcggccaagagggaccccaaaaaac

SEQ ID NO: 174016 - DNA, 467 bp, Arabidopsis thaliana
  unsure (1)..(467): unsure at all n locations
cgtaagctgggatctctagagcggctgcccttgggggtgaatcctttttatttttttttttttttttttttgggggcccccacccatgaacagggaattttattttatttaacactttggtattcgttttccaagggctcctaggaacaaaatcccggagggataggaaaaaagtgggagcaatttcatatttaaaagggccataacatnnattaaaagctaaggggggggacaagaaatggcctacattaaaggcgccacacattacctacggaattaccgccggacaaaactgggaaaagaggacaactaacatcccaaggtttgaaaatgggtttttggaacacctgactgggggctctggtttcaagggggctgggggtcattttgagaatagggatgggacccgtttgggaaaatgcacctttcccaccctttaaactttggggggggggatttcccacggg

SEQ ID NO: 174017 - DNA, 500 bp, Arabidopsis thaliana
acccgtacgtaagctgggatcctctagagcgtgtcgccttggggtaaagcctcttttacgggagttttggaccaaagaggcaaattgatagacagcgagaagctggaacaatacaaaacgtccgaaagattacacgcaaaagaaatttaaagaaggccatgcaaaaacccctagcttaattataacaactttttcttttttcgggggggggcactcgcaaatcaaaaccctagataagaaacaaaccctgagaagcaaagggtccacatatatattctgaattcttacaaaggggctcacgaaacggcacgtgatgattccgcgcatgcgggcgagcaaggggggatgtagcacgatcaagggggcgggagggtcccaaacgaaccgatggcggactctctgatgtaacgagcaaagaggggcgggtgggagcgggagggagtgtgaagatagctgaacaggttaaggtagcagggtgtgatacagggaccgaggaagct

SEQ ID NO: 174018 - DNA, 484 bp, Arabidopsis thaliana
  unsure (1)..(484): unsure at all n locations
ggacctcaagagcgttgccctggggttttatccctgtagaaacaaaatatttattaagttggatcatcttttattaaatacagtaggtagaagctcctttaatctatggagcaagttgaaagaagagacatgaagatgatctcgatggggcataaagggggctgggacttttttctaatggcggggggggagccccggccncaaagggcagaccggagcggaggacaaccgggggcgggggggggccacccacgaacgacagggaccaaaagccagaagccgggagggaccccagcagcagggacaaaaggggaaaccaacgaaaccaaggaccgaaccggaccggggccgccggagcagaanncgacacaaaccccacaagagaccaaaccaaagaccccaagaccggagccccgccccaccgggaggacccggcggagaaaacaaaccaggacgggaaagaaaaacaacccgggccgcaaag

SEQ ID NO: 174019 - DNA, 410 bp, Arabidopsis thaliana
  unsure (1)..(410): unsure at all n locations
gtaagctgatccttaagcgggctgctnggggggaacccctnccnnttttatgaactggagttatttttttgtatcatcatattcactaacgtacatcaatttaaacttttttttaaatgcataccctaatataataaggcctttaaggaattatcctattgacggtgtaaaaancaatttttcaagcaagctcttaaaggtttaccacaaaaacagtggttaaacataaacgacgccgcttaaagatgatcaaccggggaacctacccgaatcctcccaacagagatggttatggctaagatccaaatgaccaataaacgacccacctgaaatcgatctgggtattgggccttttcagattattatacgacaaatcaaaaactgtgaaggaagaccttgggccaaacccc

SEQ ID NO: 174020 - DNA, 501 bp, Arabidopsis thaliana
gtagcttgggaccctctagagcgggcttcccttttggtttttttttccttataaccacaccacattcttaattcagaaattaaaattattttctaagcaagatctatacatttgaactggaacaactggcctgaggagattccggcagaaacatttctctatattatacactaccagaaagatcatggaagcttttttttttatccagacgttgtgcatcatatggcttttcctttccttctggttcttctgcattcccattctccttcagcttatatgcaccatctacatacaattccgtgtcccacaggaatgtcccaaacgccacagcctcgagaaccaaccgcttcagactcgaaaacgatgtcactatggtctcatcactctcttccgtgccaaaaagagccaaactttgcttctctatcagattccttgcctcctctggccttggttttgcgcatctctgcaatgtctcgggatcaaagtctgagaagtaatggc

SEQ ID NO: 174021 - DNA, 237 bp, Arabidopsis thaliana
cgactcatatagggaacagctggtacgcctgcaggtaccggtccggaattcccgggtcgacccacgcgtccgcatagtcactctttgacttactattatggctatggctggagttggcataatgaacatagccatttgggtttgggactcggtcttattccggacccaccccgcactgatgaatctccataatattgttttcgggcccgggggggcccttttggttggaaagaaaca

SEQ ID NO: 174022 - DNA, 482 bp, Arabidopsis thaliana
gggaacgctggtacgcctgcaggtaccggtccggaattcccgggtcgacccacgcgtccgatcaatttgattccaaataacattctcatttttacacagcctattttgggacacgacaaccttaaatctacagattccgtttatttgatcggaacaatctttctctctctctctagggaaccgtttttaaaaagctggggtgtctcttggttccagaaattaactatactgtaacgcggggtgacctggttagatcagccggtcttcaattgcgggtcctatatctttggttcctaccgaacatccaacagagtcccgacccttttttcaacgtaatagagatgccatgggacttaccattaacctgggtggggacacacaacgaagagagcccccaggataccccattcctcaccctttggttcacatccttgattattcttttaacacacaccccagcgttaaaggctccttcttgctgg

SEQ ID NO: 174023 - DNA, 473 bp, Arabidopsis thaliana
  unsure (1)..(473): unsure at all n locations
acgcgtacgtaagcttggatcctctagagcggctgccctnttgtttttaatccttttttttttttttttttttttttttttttttttgggatggggataaagaccttacatagtacatacaattacaagaatgataacctttaggcttgtatgtttataatggatgcttttacattcatatcaacaccgactttttttttggagcgctagngggagactactggggtacaacaatttgataccaaaagctaccagagtgtaggaaaaatttatttaaatggtggggggcgggggggtctgattaaaagaagttccacttttgttcaccttcgccaaaaggaaacccaatgcgactttaccccctaaggttgagggaccacggaacaagcaaattgcaccggccacaagtcctaaccttttggtttaagtttcgtagaggggtttttatttttttcttttgttggggggtaaaa

SEQ ID NO: 174024 - DNA, 676 bp, Arabidopsis thaliana
gtcgactgcacgcgtacgtaagcttggatcctctagagcggccgccctttgttttttttttttttttttttgagatcaaaattgttgtttttttccatataattagaaggttacaattactatggtttccgcaaaacaacaaagcaggaatagatcaaggccctgacagagcccatcaaggaggaaccccacccttttttttggggagggacaaccaagagtaacccacccattaaaaccggggggacaggacttgggccacaaaccacaattaaatataaccgagacttcccaccaacaacctttatgaaacccatccaaagaaccctgtagcggaacataaaaaaatccgtcaaaaaaaaataccgaaaaaaatatttacactgttgaaaaagagactttaccgcgcagataaaaagtaccgatgaaacttgggacgaactttgtctcaagatcctcgaaaccgcgtgtttatagaaaaagtctaggggggaaggatacaccaagacaaactcctcttaaagggaaattttaagaaaaagtttaaaaagaaaaaaaaatggattcacgctaggactcttaggcaaaaggggttgttaagccggcgaaaaaccagggaaaaaacggggccgccctaacagctgtagaaaacggtaaacccaccctttgcgccaaa

SEQ ID NO: 174025 - DNA, 631 bp, Arabidopsis thaliana
tacgactcacttagggaagacggtacgcctgcaggtaccggtccggaattcccgggtcgacccacgcgtccgcagggtttttacttttctagggtttatctatctcattccgcaatcatggagtctctggggaagctacagctacatcaccagccattccacctttccttcactcacacctcttcttcaacattccccaaaaacctcttcaaatcctcaattcagcgaattacatctctcaaatccgcttcaattaaagctgccccctccaaatttcaaaactctatcacccctctcacaaagtccacacctttccgtctcttcaaatccacatgcataactctaacaaccggcgaggctctgcttttggcgaatctccatctcatatcgccggcgattgcagctgccatcgcgcctccatcctcagttgaaagcaaacaaacggtacctcggaaaaagaaagagatccctggatcagctttgatgactccccttcttgtttcgacctcttgggtgatcgttgaacttgaacactcaatctgcatacctgacggaacatgggaatggccccatgccccgttagatgtggaacctgcaaaaaagaatccccaccgtcgaagccaacaacctt

SEQ ID NO: 174026 - DNA, 620 bp, Arabidopsis thaliana
tatgacgtcgcatgcacgccgtacgtagcttggatcctctagagcggccgcccttttttttttttttttttttttttttttttttttttttttttttttttttttttttttttttttttttttttttgttaaagaagccccccaacaaaaaaaaagtttcaccaaaaaaaaaaactttggggcacccgggaggggacccccaccgaagccccacttgttttaatttattggagggaaaacacaagcgggggccggcggtttaaatttttatgttaacaagggggtattcccgggggggtccccctaaacggacaaacaaacccttatacctgccaatattaaaacagctcttaaaaaaaacggaataaaaggggtgggggccgaagaaggcccaaaacccttataaaccgccgttttttccaccctgggcgcccttgaaaaaacaaccctttcgaaaacacaacggggggaaaaccccacccctacagtggcatgagggcgcctgaggggcgcctttaagacagtccttattgttgccttttttttaaaagatttaagggggggccaaaaagagggtgaaaatgatggggagtgttaaatcggccttttttgccccgccc

SEQ ID NO: 174027 - DNA, 777 bp, Arabidopsis thaliana
  unsure (1)..(777): unsure at all n locations
gcacgcgtacgtaagcttggatcctctagagtggccgcccttggtgtttcttttttttttttttttttattttttttttcttgtttttttttaatgtttggttttttttatcggggaaaaaggttggttggggtaagatataaaatattttggtggtgtaaggggaaaataatgagaccctgagggagtttaatgacttnggggggggggagagaaaaaacttgtttataacaggaaaatattatgggggttacttggggggcgtgcccaaagcgttgttttggccgtagcaataaaaggaaaaatattcttcttgcgctgagggggttggaacaaccataaaaagtggggttcttattttttggactcgtaaatagagaggggtgggtttgagattttcttaagagaaattgtccaagtattgtacaagaagagagggggtgttggtggaaaagaacgaaagagggggtggagagtcttggataaataggtttttgtgggtgcccgtgttgtgggagagaagtgtacgattcgagagaaggatgatgagtggatgggtggtgttgggaccgaaggtgttggaaagaagtgggtgttggggcggtggggtagaaaattagagtttgtggttaggggagaggggtggtggtgggggggggggggtgagggagattattggggggaggataggggtgggtgggtgggttgggtggggaaagggagggtggtgattggggggtggaggttgtggtagagaaaaaggagggtgggtagtga

SEQ ID NO: 174028 - DNA, 458 bp, Arabidopsis thaliana
  unsure (1)..(458): unsure at all n locations
ctatcggagagctatgacgtgccatgcacgcgtacgtaagccttggatccctctnaagcggctcgcccctttggttttttttctttagtataaataatatcattcatcataaaacatgcggatacacacctgatatcattcctctacaagttaatcgttccttacaaagtctgtccaaatccccaattgtttggcatcacattatgaataccttttgtaaccccttcactcgtggggaccatgattgaataccctgaccatggaattaacaccagtggtgcagttgtgagctcaggggtttagcttggggttgcacccgggttaggttgttttaatttggctcaacctggtgggctcgaggggcctcgttcctgtggtggggaggatcttggaggaagggggcggagttttgttgggagattggcgcctgcagtggtgggccagaaatgcgggggggg

SEQ ID NO: 174029 - DNA, 983 bp, Arabidopsis thaliana
  unsure (1)..(983): unsure at all n locations
ctatagaagagttatgacgtcgactgcacgcgtacgtaagcttggatcctctagagcggtcgcccttttttttttttttttcagattcagataattaggaaaagagtaagacacacnatgctcataaccgaaagaaaaacatattatacacctcataactaataattctattacctccccaaaacaaaacaccatacgagtttaagataatagacatagatagattgtcggttnaatgtggaaacgtngaaaaccatagattttcgatagccgagaaaggaggttccacactctccatctgattgggcaggtctggtctgatccggtccaactcggtttggttcagtttatgtttggtctagctgacatagggagggtccatgataacccactgaaaaacttggctatactgaacaggagcggtttcccaagagtagttgcgggtcattcctcttctcatcattccttcccatgaactgtttatactctctgtacgttgctgcagccaacctcagggccataccttgctatcnttcgcaaggaagtgaagacccatcctgtaccagtaccagctccaccttttgataaaggtggaattctaaccgattcttgaagccncaggccatgacaactgaatggtccggtctattgctgtaggtatttaacaaagggttaatgtcacggcaagaaagaaggcaaagccggttgatcgttagaaatgcgcattgaaccaaccaccccggattgggcctggatgagactctaactgcaatcagctggatatgtggggccccaccagcgtactgaaatgaattggccccttagacggaccagggtggaaaacaagcctcgtggtaaggttctaaacatatggaattggctaggggaccattctttggggcattgttgttttgagaactagagagaggagagggttcggggggcatgtatttcatgtggcataccttgcgagaaagtgaaca

SEQ ID NO: 174030 - DNA, 887 bp, Arabidopsis thaliana
  unsure (1)..(887): unsure at all n locations
ctatagnagctctatgacgtacacatgcacgcgtacgtaagcttggatcctctagagcggncgcccttttttttttttttttaagaaacgtgaatctattctaccatactgtcacaaggacaaaggttttgctttcgactatccttgtttgatgaaaaatcttttgctgagagttgaccgggcatttccatgtcccaagggtctaaaatggtggaaacattcatatgcttgactataggactgattccccctcggcgaatggtgcaacattgatagctggtggtgtccaccgccgggcggtgtgacgggtccttggcatgggtctgtccggtctgtttagtgtcgtggtgttacaataacaagcaagggtgtactctgtttgtacaatcatatgcaggttcattatgtatgttttcgttaaattctttctctcaccaacgatagtgtatactatttgatttgttgtgagtgaagatatagcagtaatatgttatttgagatcatctatactatgtccatgtatcttgagttattttactcctagaatattattaggttttactctctagtctgtccaagccttacgcaactctgacggcttctcttcctctgtcttttcgtaatatcttagcaattctgacgtgatactgcccctttacgaatgcagtggcctctgcatatagatgatagagtctgcgcatttaccactgaattctctcgatgacaaagatacctctataaacgtgacgcctcgcattccatggtcanagctttttcttatgatttcgctctctacattcgtgcgtgttacacatagtacaagcgtcccatatgtataagaagagttagtaatatatctctcatctctaacatttcagttctgatat

SEQ ID NO: 174031 - DNA, 915 bp, Arabidopsis thaliana
tatacgactcctatagggatagctggtacgcctgcaggtaccggtccggaattcccgggtcgacccacgcgtccggaagactagtaccggcagatcttacggagaaacctcgtcaacgaagcggagttatggagggcatgtctgaggtggcaggattgcgaccagaggaacgcttgtatcaaagctctatctctgatatctctatcattggactttctctacagcgattaccgacctgaacatatccgagcggatgatcgagatggggcaggttgactctgggagaacgactgaggatgatgggatgcaaaagagttggccagtctgcggctgcgatgtgggaggtggtaaggccaatgggagagcgcgctgaggggcgcggtgatctggtgactggtggcataaagggagcagggagaaaggtagatagagaaggagagagaagatgaagagagtgaggtacaaagagagactacgaaaagataagttagataaatagagatagacaggtagggtagtaaaaaccggacataaagtacaaattgtgctatgtcatagaacatagagtaaactagaaaaaagattaaatgtagagagaataaacttatacatcggaaaatacgacatcagaaacccagagggtacaacagaagagcgagaatggggagcagaatgatgctcgatatacaggagataatataatggcgaaagtgtatacgataatatgaacacaagaagaagatgtaaacagacagcgcacaatgaaagaatgatatataactacgctaggcgaggacacacagagataaatcacatggagtataaaccacgatgttgtacgtcaaaataacatatggagcgtagaatacgatattatatgcgtgactacaagtaaggaggacgaggaagagaggc

SEQ ID NO: 174032 - DNA, 356 bp, Arabidopsis thaliana
  unsure (1)..(356): unsure at all n locations
tttaggtgacactataaagatctatgacgcgctgcacgcgtacgtaagctggatcctctagagcggcgcctttgtttttttttgaagtaatttttttggcccggtcagaaaaggaaaattggaaactccaaaccttaatttgggttataaaaccaggggttttttccctttaaaaccccaccccgtataagggcccntccccggtgggaaccccttgggagaaacaaaaaaccggtgtgtttcccgggaacccctggggggtttttttaaaaaagaggggaaaaaatctttgggtggggtgtgtgggaggagaacccctctatattggcccggtggaaaaaaaaagtttttttttt

SEQ ID NO: 174033 - DNA, 1016 bp, Arabidopsis thaliana
  unsure (1)..(1016): unsure at all n locations
cactatagaagccttatggtntcgactgcacgcgtacgtaagcttggatcctctagagcggccgcccttttttttttttttttaaagaaaaggttaattaaacaccattcatgaaatgacagattaaatgaagcccactatgtatgtgtatgatgatatatagtgataggcagggactgacatggcaactacaagaaacaactggggtgggatgtgcattatctttttgacgaagtgaacgtacacaaatgtgtgaaccgggtatggagcacaggagggcggggagactgcagacaaagggcgaatgtggatgggggggaagctggatatataggaactgagaataaaggtgaagggtgaacgagaggaatcatgttgggtatgtatcacgtgtacgaatgggtgggaagtggacgtgtaaaggagtggggaggagaaatggagatggttagtattcttgtgtaagaggagatggtgtgaggggatggagaggaaaattaggagcaggattatagagaaagttgaaagaataacgtatgtattaagaacgctaagagagactgtggaagaatggagaaacgatgaggataagaaagaaaaatggggaaagagctgagaagataagtcatgttgtttactcgagatatcaagtatatttctaagaaagccgggaataaatctatgaggagggaggtgaacgtgatgacaggttagtgtgaacagaaccaatgtgcagcgtttgagtagtaatagtcgacgaggtgccagtaaaatccaaagaggagggatagtgagtcagagtaggattatgatgagtgagatccatataacgcgattgaaaatagaattagagtgtgtctacaatcatttcacttattaagagaacgatgagagtactatacgcggaacagggtctagaagactaagtaataaattagtaacgagtagtgatcaagaacgagaatcaagtgcgtaaataaggggtgaatcggtgtacgaacagaagtagtggacgc

SEQ ID NO: 174034 - DNA, 221 bp, Arabidopsis thaliana
acacgactcactaaggggaagacgggacgcctgcaggtaccggtccggaattcccgtttcgacccacgcgtgcgcccacgcgtacagagcgtacagatctctctgcaacataatcatagcagtagaccttctgcttcgtcgtatggaaatcagcgcatctgcaggaggtatgtaagggaggcttcacatatttcaatacaaatgcagagctacaccagggg

SEQ ID NO: 174035 - DNA, 831 bp, Arabidopsis thaliana
actatagaagcttaatggcgtcaactgcacgcgtacgtaagcttggatcctctagagcggccgccctttttttttttttttttttttagttaattaatggattatcatcaagttgagaagacatattcttattacattcatatacaattgatatgagggatataacacaattgcacacaaaaataaagatattaaataaaagtgaatgaatgattctttttttacccaaagaccttgggttggtgtgggtgggttgaccacaaaagtgatatgatggccaggccgtgcaattattcgtgggcctgaggagtgtgactgtgacctgatgcagggggggtgggggcttgggctggggacttgacattgggggagagcaggaccttggagtggtgagggaggtgtggcgggggaacaggggtggtgccatgaggactggggggcagaggggagctggtaggtggaccagggtgggaggttggggagggtgggtgggggatgatgggggtagggggacgggaagtgtggggcaggctagaatggggaggctggggtgtgggggggggcatggaagaaggtgggggggaacggggagggaagaagggtgaggtgggttgttgggtgggagggttgcggggtaggggagacgggcgtgagcgtgatgaggggagatgggtgccgcggttgggttgaggagagaggtgggggatcgagggggacgggatgaggtagagaagggaggggaggagtgaagtgaggtgcgaggagtggggtcagagtagcgggtagtgagcaggaggagggggaggggatgaggaggtaagtataggtgag

SEQ ID NO: 174036 - DNA, 420 bp, Arabidopsis thaliana
gagagctatgacgtcgcatgcacgcgtacgtaagcttggatcctctagagcggccgccctttggttttttttttttttttttttttttttttttttgagaataaaaatgaagttaactacttaagggtgatctattacataaatcatacatggagactccgctacaaacaccatcaagaggtttggccaaataactcgagtgtcagaatcatattccagacgagaggtgttgaaacataggtttcacataaccagtgacaccaaacaaaagcaactttaatggttaaggatacttaagggggttacttaaaggaattaatagactgttcaagacccgatcttattgcgtttaccaccgattcttgcgatgctgaatgaggataaggaggatgatcaagatgcgctttctcttggaagcta

SEQ ID NO: 174037 - DNA, 768 bp, Arabidopsis thaliana
  unsure (1)..(768): unsure at all n locations
acttagaagagttatgacgtcgcatgcacgcgtacgtaagcttggatcctctagagcggccgcccttttttttttttttttctgataactccgacctttcactgcaaactttttagtacaacggattagtaaataagcaaaaaccaatctctcgtacttttactcaagtctcgaacaaactgatacttctttgaccagtgactagtcttaaccataactaatacgtggtaggtgaatcatcaatctatactgtaatctttccagttgtgtcttgagaattggagacacagggatcagcgtcgtcaagctttctcacgacctctctcatactcggtctgagattcgggagcttcgtagtgcagagaagacccatcttcagaactctaaatcatgcttcttctatataagtggacaaaacttgcttgtccaaacattttgaaggttcctcggatcttggttagatctgagagtagacatagtcaacaatgtctttcccctctccatactcgtcttccataggccgaagaccggtaactagctctagaagaaccacaccgaagctgtacacatcactcttttccgttgccttgaaggagtaagncagctcaggagcatattgccatgagttccagcaacgcagctccattcatatccttttgtctgcaacttgtgcaactccaaaatctgcgattntcaacntataaatctcgtcaagtaaattgttgcttgactttatatctctgtgaatgatggggtggcaacaatcat

SEQ ID NO: 174038 - DNA, 693 bp, Arabidopsis thaliana
  unsure (1)..(693): unsure at all n locations
atacgactcactttaggggaagatcgtacgcctgcaggtaccggtccggaattcccggttcgacccacgcgtaagccggctcgtgggaaaagaatatccgactgtatcttctatgttctctagtactatcttgctatggtggtggggtataaataggntagggctcatccttggagctgggttggatgcttaatcatgagaatgatgcgacacttcttttcagactgtgcgcaaaatacttactgacactctgattcgaggtgtattcgcgcgttacacggggtgtttccaagagctgaagatagctgctattcatttttgagactagatcataaccacacaggatttggggtgttcactgtcagtaagaatcataatataaagaaagggtttaaaaactaatcaataaaatattactatcgaaagctgacagtgtactgaaagtaaagggcnattcccagatcctaaggcttcaaaaggatctgctaaaaagggttcctacaagaagtcttcaattagtctgaagaagagcgaatctaaagtggttaatctggtatacatctagaatagaaggggaatccatggagaaagcgaaaaatacttgaattttagacgtaaggagactcccggcaatcgccaggaatatgggctacgaaataatagaaaaaggctttactgctggggggatgcttt

SEQ ID NO: 174039 - DNA, 566 bp, Arabidopsis thaliana
  unsure (1)..(566): unsure at all n locations
tttaggtcgcactatagnaatagtctatgacgtcgcatgcacgcgtacgtaagcttggatcctctagagcggccgcccttttttttttttttttttttttttttttttttttttttttttttttttttttttttttttttttggggggaaaaactttaaaaatttttttactatagggagaaaaggccttttaaaggcccatacctttttgtttttgcgcatacgtgggaaacactaaaacaaataatctctgggcaaaaaaaccccccctttccacaaaaagcaagcgaaaaaaaaaccactgggattgctcgggataccccctgatacgtaaatggggaaccactgtttttgtccaaagcacctttgtaaaccatttgggaagacattgtactgccggaacttggacttggcgncgncattgtctctgggctgggttcctcaactgattttaggctggggttgggagaaggacaaaaagggatgaccttnttgggaaatttcgcgcccgtaaatgtactaaacttatcggcatacccgtagcttttggcgcgtggaccccccct

SEQ ID NO: 174040 - DNA, 515 bp, Arabidopsis thaliana
  unsure (1)..(515): unsure at all n locations
ctatagnagattatgacgtcgcatgcacgcgtacgtaagcttggatcctctagagcggccgccctttttttttttttttaatttctgaaatcttaatatgttagagatggccatctctagcacaatacacaggcgaactccaaactgcgcgcgatctgatacgtaggctaatctctttttagaagagttacaaaacggtctaaatataaggaatatcttgtgcgcatagaaaagaccaatatcgataagcaaccatctgtgagagagactttggtagacctgcatgacccctttgaacacttaaatggctgaaatctgaagatgttaacacctgatatatgatgatacttgtttaataaagattgtaagcccctgtcttaaagcgctcaggaagatcttctatatgcgacctgaccgtgatgttgatcctgatcaaggacctgggagtctcaagcagacgcaacaaatgtgatggcctgacccgtgtgttcaaatctaccagatctcccatccct

SEQ ID NO: 174041 - DNA, 595 bp, Arabidopsis thaliana
  unsure (1)..(595): unsure at all n locations
atacgactcactannagggaaagccggtacgcctgcaggtaccggtccggaattcccgggtcgacccacgcgtccggagatgcgtacgcaacgatcaatttcctgatccacctaattctggtcctgatctcatgctgatgggtatgcgatgtatgggagacagctagagacatcgaagactacaaagaggagctcttgtgctatgacaaagaatactacgatgatccagtattccggaaacatatcttacatgccaaactgcgagaatagggtctgctggagtgcacaactctgaattcagacactcacttttgtaaccggagctgcttatagctattaacaattcactattccgacatccatctaaaatgctccacgaatatatacctctggctataccagatatggatgtgatccggcaatcagatgtttgcttgtgcaacactgatgggattgtccttcctacgctacaacagattgtaccatctactggccattcttgtggactggtactgtgccataatgcagagctagcctaccagatgtgaactgatagtagtgctatacatcccgtatctggctgatacaaaagcga

SEQ ID NO: 174042 - DNA, 494 bp, Arabidopsis thaliana
tggacttgcctgcacgccttccttaacctggattcttttaaaccggccggcccttttttttttttttttttagaatgaaccttaattctttagaatagggaaagggttttggaccacctttttaattcaccaattccttaaaacttaaattccaaagctttaaaatttttactttaaccaaagctcaaccccaaactaccacctatttttttggcgggttaggctttttttgaaaacttgcctggtgattgggtagcctttccttaagctggttaagtggcaaacttcttaggcattagaccagagttgatgttaggcaaaacaccaccgtaagcgattgtgacaccactcagaagtttccccatttcttaatcgttccttatcgcgagaagaagatgcctcggaataatcctggattcctggttatctctcgaagcgttaccagaaagctccaaaacttttgcggggaggtattcaagaccgggggccatgta

SEQ ID NO: 174043 - DNA, 505 bp, Arabidopsis thaliana
ggcgacactatagaagttctatgacgtcgcatgcacgcctacgtaagcctggatcctttagagcgggcggccttttttttttttttttatcttaaacgagtttattttttgaactacattcaatgcttttaaaccggacttaaaatcgaggggtaaccgaagaaatagcagagggtttattttttatcaatcgaaaaagaaccaaggtaaaaccacccaatttaattgtcttggagggcgggcttttgagggggaacaattttcaattggggcctttgaattttttaacggcttttggcggttttttctttttttggtttttgggcagtttttttttttggtggcgaattaaaacccaaccaatccaggtccttccttgttggtccggtttggcctggttttggcaccctatggtttggttaagaagctggttgtttctttagctcctttttttaaggctttgaaagtcaaggggtttaactagcatggaggcttttggctttaa

SEQ ID NO: 174044 - DNA, 512 bp, Arabidopsis thaliana
ttaggacacactatagaagatctatgacgtcgcatgcacgcgtacctaagcttggatcctttagagcgggcggccttttttttttttttttattttaaacgaagtttttttttgaactacattcaatgcttttaaaccggacttaaaaacggggggtaaccaaagtaataggagggggtttattctttatcaatcgaaaaagaaccatggtaaaaccaccccattttattttcttggagggcgggcttttgaaggggaccactttcaattgcggcctttgaattttttaacggattttggcggttttttcttctcctggtttttgggcagtttttgtttttggtggcgaattaaagcccaaccgatccaggcccttccttgttggtccggttttgcctggttttggcaccctatggtttggctaagaatctggttgttcctttggttcttttttttaaggcttgggaagtcaaggggtttaactagcatcggggcttttggttttaaaggct

SEQ ID NO: 174045 - DNA, 523 bp, Arabidopsis thaliana
attaggtgaactattaaagattatgaagttgcatgcacgcctacgttagcttggattctttaaaacgggccgcctttttttttttttttctttaaaggaatggtcaattaaatatagggggaaccaattagggtccttttcccggataaaggaattttaatttacattttaccttcaacaaaattcaattaggtaaaataaaacggcccggcaaggattttcctcctttttttggtggtggggtagtaaaaaaggttaacttaattccaggcttttcaaaggaatggattaacaagttccacggtttggttgggaattaacctgcaaaatgtaccgccttgaaaccattgttattgttggaaccgtggcaaatccaaagctggataataaacaaagctgtgcagcctttttttaggctttaattttttatccatatgtttcctcctattagccggacaaaccgtttacagagagctagcccaagtcctccacggaaatggttcctctgagttccggtccgagg

SEQ ID NO: 174046 - DNA, 482 bp, Arabidopsis thaliana
tgaccgtccctgccccccttccttagcctggaatcctttaaaccggccgccctttttttttttttttggatcctggagaataggttttttgggccggggatattggcctccttaaaatttggaccaagaaacctggctctattggaaataaagcgggccaggtttcttcagggttccaaccacacttggggaagggaccaacctgaactgactttcttaatccaaaatctggaaactggttggccagggttggctccatacctggcatggacatcatggctgttagctcagcatcagtcacttcacagtcctggggggtatcctttattttttccgggtcatagccaaattgtgccaagtagttcttgtactttgcgatgaactcaggtcctggatttggcgtccttgagtatacctgaacaaagcccttgtctttggctccagaaacaagtgcgtagttgtcgtagtctgtggctatgaca

SEQ ID NO: 174047 - DNA, 510 bp, Arabidopsis thaliana
tttaggtgacactatagaaagactatgacgtcgcatgcacgcgtacgtaagcttggatccttctagagcggcccgccttggcttctgttggtcttgtaccaaacccactgtacacatttgaccaaaaaaaaagagggttctgttccaatcaaggttgccaccacgggatttttacaaaggtgctttttagcggggcaaagaccaactatctttctccgtttttatttaaattataatttgccggtaacttttcggggacgaatttggtggccaaaggcccaaaaatattttaagaggtctcccacttggtagcgagggtcttcaaatggtcctttccctttgacgacaggtttgaccgaggaatcaacccttgtggaactggccgaccttttcgtattggacgggatgaccctccattttggtaaaagcacgagcttcattggcctggcccactgggtactaattgccaccaggggaaacaaagtcttgtgtttttccaaatggactatc

SEQ ID NO: 174048 - DNA, 516 bp, Arabidopsis thaliana
ttaggtcgacactattagaagatcttgacgtcgcatgcacgcgtacgtaagcttggatcctctagagcggccggccttttttttttttttttttttgtaaatgacagtttctgattattccttcaaaatataatttgaagtttttaatcttctaaagggaataacaccgagacgaagcacaacacagttcgatcattgaagaggattgaatggagccttaatttgaattttaaagattcattagaaccgaagaaaactggttcttttgcgggtaccattgtatggaggaccaaacctggtggtctgaaggtgatatgactgggattggttttttgggcttgcgtactttgggaatatgacccaaccgtgaagaaactttccgttcattccaactattcctttggcagaatcttcttaaggggcatatttaaccaattccaaccctttggaatattccgatactttggctgggaccaccttaacattaggaactttttcaaactgagccaaagccgt

SEQ ID NO: 174049 - DNA, 520 bp, Arabidopsis thaliana
atttaggtcgacactattagaagatctatgacgtcgcatgcacgcctacgtaagcttggattctttagagcgggccgcctttttttttttttttttatcaaaattatcatttatctttagtttcagcattttacaagggcttcttggattttttaaggtgggagccccaaggttccatacctttggtcccaaaaaaaatttaagggaaaaagaccccacccagaagccacccttttgtgggtctttaccaaatccttctttcttgaataattatttcattagaaaattaacctaattctttttttttttttaattagaaggaacccttccctttggtaaaaaggcttccctaattggtgggttttttaagccgcccgcaaaatttgcggtggaacaaaaaaagatggttaaaggcacccatgtgccagtttatgctaacccatgggaattttcttttttccttactaatccactccaccaaaatgctgtgagcgttaaccataaatttgaccggcttgtt

SEQ ID NO: 174050 - DNA, 504 bp, Arabidopsis thaliana
acactattagaagatctatgacgtcgcatgcacgcgtacgtaagcttggatcctttagagcgggcggcctttttttttttttttttttttagccgggcaaaagcacccccggttagggagcgaagggccttggaaattacattgacttgggaatcttaattcttaccgtcaatggattggattattacctgaattccttattaccttggataccttaaaaaccttggaccgaccaaaaaattcttaaaggaaacttggcttaagggttaagggaggtccaattggttaaaaattcattaggttttgggggaatccgggaatcgcccggcaatggttaaactggaaggacccggtggggtcaataatggacattttggtcctttttttttggcctgggattgcctggccaactttttttgggctttcaaggtacctagaaaggtctttgccaactagaaagtaatccgttcgtccaaggccttcgtttctttccaaaaagccgat

SEQ ID NO: 174051 - DNA, 488 bp, Arabidopsis thaliana
tttgaacgtgcatggcccccttccgtaggctggattcctttaaagcggccgccctttttttttttttttttccttgagaatggaaagaattttcctactacttaccactggccttatggtcatccatctacacaggaaaaaatggagcttaccatggtttaatccaaggtcctaactgactaccaaaaacaaaaccctcctaaacctttttttaaggtctcacaccaccaccttccagaagaattcccaaaccattgagacgcaacgctccaaccccaccattgcaaaacccgtgatttttaatagtctgggatgttggcaaggcaggtaatgacatctcaggagcacatagagacaaagaagactttgacgatgaagatggccatggagcagcaatgttgtctgtcaaatcacatgtaaagctgtagcctgatgtgttatcaaatatcaagtctgcaggatagcttctcagaagacaaccttgttgc

SEQ ID NO: 174052 - DNA, 516 bp, Arabidopsis thaliana
tttaggtgaccttatagaagagctatggacgtcgcatgcacgcctacgtaagcctggatcctttagagcgggcggccctttttttttttttttttttttttttttttttttttttttttcacaaacaacagaacctttaactttatttttccattacaaaacccgttatggttcggagatttaaagaaaccgccaccccaaaccggggtaagaaaattccaaaccgggaaaaagaccaaattggtggaaaaatcattagaatcaggggggtttaagccttttcttaggccttcttttaggaaaaggcccttcttttttaagaatcaaaacttttaccacccccttattaggccaaattggattttttcttggcctaacctccaggcccaaagggttattccttaaattcaatttaacccccaggtttcctgggaattccccctttccattgggatggcacctttccctaatggtaaatcccagaatttttcttccaggtttcattaagaaaggggt

SEQ ID NO: 174053 - DNA, 517 bp, Arabidopsis thaliana
  unsure (1)..(517): unsure at all n locations
tttagggtgacactatagnaagagtcttgacgtcgcatgcacgcgtacgtaagcttggatcctttagagcgggcggcctttttttttttttttctttttttctttttttttttttttttttttttcctttttttttttttttttttttttaccaaaattgggggggcaaattaaggttttattggtcattaagaaaatggttccgtcccaagattgcgttggcttaaaaactttacaagaatcccttttaagttttgaccgatgggaaacttcccctttccatttaagcttttatggtttgaatgaaacatttggcgcttggaaaaattatttaccaccgcgcttccgggaaccgtgggcggaccccttccgggacccctgggttcacccgggaatttcggaccggtgccttgaggggtaccaagttttccttttggggggtggattaaagcttgggggtatcatgggcattggtggttccctggggaaattggtattcggttacaatttcccacca

SEQ ID NO: 174054 - DNA, 522 bp, Arabidopsis thaliana
tttaggtcgcctatagaagagtcttgacgtcgcatgcacgcgtacgtaagcttggatcctctagagcggccggcctttttttttttttttttttttttccaaaatcgctatatttatctttgcctttctctaagaagaatcttacttacccctagaacctcccttttctggcttttatatcttctactcttggcttatctctaaaagaacccaaatgggagggagtaagaagcctggtggcacttgaaccttttcttcttcttttgcaattggccaggcgaattcttatgaccaccgaaaagttggtcccatcgaagcccccattatttttttattttaccattggattaggcccgtgcttgaccccggtgaccgtcttagggaccttcatgggatgagagaaggcgttcaactttccaaccttggcgggggtggagacccatccttggggaagtccagtgttcttcacttggtgggaagaattaatcttccttgtgggccaaggatcttgccttaggttcc

SEQ ID NO: 174055 - DNA, 495 bp, Arabidopsis thaliana
  unsure (1)..(495): unsure at all n locations
tatgacgtcgcatgcacgcgtacgtaagcttggatcctttagagcggccgccctttnttttttttttttttttttttttttttttttttttttttttttttttatttttttttttttttttttttttggggcaaattaattaattaagcccaaccttttccttggaattgggtgttcaaatttttacccattttccattaaaaaaggtttaaaattttaacttaaggtcattacccaatattggcttcaaacttttttttccttcccaattccgattaaaaccccgaccatttaaaaaaacttgaccatgttttttatttttaaaaaaaaaaaaaccatttacccccatccatggggtaaaaaaaattttaatcgaaacccctttttcttttaaattgaatttaaagttttgtttttgactttttcattcgccttggagggaaaacaaagggattccaatcttttattaaaaataaaaccttttcttttttcacc

SEQ ID NO: 174056 - DNA, 475 bp, Arabidopsis thaliana
tatgacgtcgcatgcacgcgtacgtaagcttggatcctctagagcggccgcccttttttttttttttttttttttttttttttttttttaattctttattttttatgtagaaatctttccattatcgttcaaaaataggatggacaaatcatttgctgagctagaagcctacagagtttttgtatctttccctagatatgcctttttttttcataggaaaacttgtcacattttacatgtaaaaaacaaatgatcaaattctggttgtagtccatgtcatgaaaaaaggttggtcaatgattcagagtttcaccaaggaggagctattacaactgcacccacccactgcggaagggtatacagctaccggacgcttggttccacccgggaattccggaccggtacctggaggcttaccatatttcgctatagtgagtcccataagcactcaggttaatcatggccaaagctgtta

SEQ ID NO: 174057 - DNA, 524 bp, Arabidopsis thaliana
tatttagggtgacactattggaagatctatgacgtcgcatgcacgcctacgtaagcttggatcctttagagcgggcggcctttttttttttttttttacttaagagccatagtccttatattgggagaattggtttgatgggccattaaagctggaaggttaatccttagccttttaagaaagaatttggcttcctaccaccagacctgcttaaccttgggggatccccattccttatttctttcttggacccggattcggatggaaccttttagccttattagccggtggttgagcctgtggtggttttagtgattttggtggaccttaagttttttttccagacctttcctttttcctttggcccaattcgaaattaaccttagggaaaacccaacccgccatttcgttgcctgacccagcgggaggagcttttccaccacgcttaatttgcaccacatccgttattctttgtagtccgaaccggttacttagtccgttgcttaatccagcctttttcttca

SEQ ID NO: 174058 - DNA, 515 bp, Arabidopsis thaliana
  unsure (1)..(515): unsure at all n locations
tttaaagtttttaggacgtggctggcccccgtccgtaggctgggatcctttaaagcggccgccctttgtttttttttttttttttttttttttttttttttcaaaagggggaggaaacctttaaaaccggaggcttggcaaaaccttttttaagagttaaaacctcacccccccctctggagaaaggcaaggacaattaaccggggttggggaaaatttttttaacagggcccgcaaaaccaggttcttaacaaagtccgcaaccaacaggcagagggactttaactcaggcattactctgggggttagtagctaaacccgacttgttgctgctgtgggggctgttgggggggttgctgccctgcctgtggtgtctgctggaaaccaccgttgtatcctccaccagagtagcctccgtaatatgcattagggtcttgaggcatcgngcccccatactgctcctgtccttgcccatacccaccgaagaaaaactggctgggatcccccgactgttg

SEQ ID NO: 174059 - DNA, 514 bp, Arabidopsis thaliana
tcacactatagaagatcttgacgtcgcatgcacgcgtacgtaagcttggatcctctagaaccgccgccctttttttttttttttttatgcgttcctcacttcattattaacccaagattaaacctaagaacctttcaaatttttttttttatttctggttcccaaaattcaataacttggtttaagggtattaagggaagttaaaaggaaggacctggaaggaatgaaaccgggccaccaaagccttaaccccccgaaggtgaacccccccttttttttcgcctttaagttttaccttaaccaattccaaatttggttattccggcttcttctccaagttgtggctgttattcattaaaaacccggggtaaaaaaaaaccagccttgaaaccgggaaggaagaaaaaactgccttgaaccattttccttgctttatccttggcccggcctcggtagaatgaaaatgctgttgcagcaatggttagtgtgaaaagtgttgattcgaggcaaaacc

SEQ ID NO: 174060 - DNA, 508 bp, Arabidopsis thaliana
  unsure (1)..(508): unsure at all n locations
taggtgacactatagaagatcttgacgtcgcatgcacgcgtacgtaagcttggatcctctagaacgggccgcccttnttttttttttttttttttttttttaccccaatgaaccttcaatttaatattttactggaaaattttctttattccttattagaaaaacctaccttaattgcattgattttttattcaaaagggttggttccaacccgttggaagttgggtttgtcaactgacttcaacctgaaccaacctgaaaaggtccttttttgacaatggtaaaattcccagttttttaagtataaatatcttattgggtaatccaatcaggcaacttccattcaaaaaattaaagtaagttaaaaagtcccaattcaacggcagcattcccaattggcttcccggaacatatccttcgaccggacccaaatggtaagagctcgtaatgttgtccctataatcaacagagctatccataaacctctcagggtcaaactcttccgggt

SEQ ID NO: 174061 - DNA, 510 bp, Arabidopsis thaliana
tgaggcgacacttatagagtgctatgacgtcccatgcacgcgtacgtaagcttggatcctttaaagcggccgcccttttttttttttttttttttttttttttttttttaaaagggaaacttcaaactttttttgaacaaattactcaaacaaaaaacacatttaaacaaatttcccattttttcaatgtttttcaatcaaatttaaatagagagatttccaagagtcgtttccttgtcttttaagaaaaatgtttgatttggtggatcaagtctaataatctccctccttttcttcttcaacatcatactcaccttcctcatcagcagtagcatcttggtactgttggtattcagcgaccaaatcattcatattgctctcagcttccgtaaactccatttcgtccattccttctcctgtgtaccaatgcagaaacgctttacgcctaaacatagccgtgaactgctcactcactctcctgaacatttcttgaatcgacgtcgagttacc

SEQ ID NO: 174062 - DNA, 506 bp, Arabidopsis thaliana
gggccacactatagaaattttcttgacgtcccatgcacgcgtccgtaagctgggatcctctagagttgccgccctttttttttccttttttttttttttttttttttttttttttttgagggaaattgaaacaatgatgtttgtcaaaaagctaataagaagaaagtttttagattaattcgaattgggacaaaaagaacatcttttctttttccaactgagtttgcgaatatcaaagaaaaacgcttgagtagaggagagaagtatcaactgagtttactacttgatggtcgccttggggatgctggaagtgcaaggtccagccgaggtcatgaattgtatgcctttgtatgtggctacgccattttcatcagtgtagagacccggggttatcttctctagttgcttcttttttgggttcagtacatcttctggctttccttcaatccctgaaaatgaaacacgctctcctggtttagcaccagcaggtggtagcaacggctcta

SEQ ID NO: 174063 - DNA, 531 bp, Arabidopsis thaliana
gactcactttagggaaagctggtacgcctcgaggtaccggtccggaattcccgggtcgacccacgcgtgcgggggcgcgttcgcccacccgttcgctcaaaagcaccttccttttttttcctattctttctcatcatctttcttattatgaactaaaataaatgttcagacaaaggggccatttctaccatttataattttatattacacaactatttgtgtggggggggggggcgcgcacccgtgggggatttatatatacatataacatatattggcaacctttactactgggatttaacctgcaaggcccacaaacagagggctacacaaggctttccttctctctttcccctttcctttttttaaaggggcaagagggatcaatggtttggaaaggggttgacaatttgatcaagttttgaagaagccaattgaaataaaaaaagaaaaaagaactccttgggggggggaaaaaagggatttgtagcgaaacgggcggaaaaaaatgggccattagggatcccaatt

SEQ ID NO: 174064 - DNA, 510 bp, Arabidopsis thaliana
aatacgactcactttagggaaagctcgtacgcctgcaggtaccggtccggaattcccgggtcgacccacgcgtccgggtagtcaccaaaaaaaaaaaaaaaacacaaaaagtttcaatggccgcctccacaatggctctctcctcccctgccttcgccggaaagggtgtgaacctttcccccgcggcatctgaagtcctcggaagcggccgtgtgacaatgatgaagactggtgccaagccaaagggtccatcaggcagcccatggtacggatccgaccgagtcaagtacttgggtccattctttggggagtcaccgagctaccttaccggagagttccccggagactacggatgggacaccggtggactttcagttgatccccagacattcgcaagggaccgggagctagaagttatccacgcaggtgggctatggtcggagccctaggctgggttttccctgacttttggctaggaacgggatcagttcggagagggggtttggttaa

SEQ ID NO: 174065 - DNA, 510 bp, Arabidopsis thaliana
  unsure (1)..(510): unsure at all n locations
agctctatacgactcactttagggaaagctggtacgcctgcaggtaccggtccgngatcccgggtcgaccccgcgtccgccacgcgtncgtggacgcgttcgcgaactgattagcttgcctgtggaattaacaatcttaatgttctaaagatggttaatatagtcgccaataatgtgatgtgtttgaaggattatttatatgtgcgatatatttgcgaaatgttttttattggtgggctgtctcttgcttcacatgacaatgataagaatgcctttagatttggagtgggaagcttacgatcgctgttgtgtatcagcgagtgttaaatatttcgtgtctgtttgagaatttgcaggagcgggaaccctttcattggatgttcgctaaaagagttcctttttcatctataaatggtagatatattcctattgttaaactattcttgaagattaaaccggggagttgtgatcagactttctagtgctttgcagattttattttaaggaggc

SEQ ID NO: 174066 - DNA, 338 bp, Arabidopsis thaliana
  unsure (1)..(338): unsure at all n locations
catgcacgcgtacgtaagcttggatcctctagagcggccgccctggcttttttttttattttttnttaatttttggaataatattataaagagaatcagcaaagattcctaaatacaaaaggggaaaagagagaaagactgctcggccggagcactgatcaatacttgactgggtttctttattggctcgggggctatatctctaaaggggagttcttcaaaatggagatgcactgcgggaaaaaaaagacgaagctttttattttcattcaccggctaactaaaatgctttttaatctcagatggggggtgggggggcttactttcaagctctccat

SEQ ID NO: 174067 - DNA, 516 bp, Arabidopsis thaliana
  unsure (1)..(516): unsure at all n locations
cggcaactaatacgactcatttagggaaagctcgtacgcctgcaggtaccggtccggaattcccgggtcgacccacgcgtgcgcgcacgcgttcgcccacgcgtncggtcgtagtctctctctctctccgcaaaatatcactcggagaaaagaaacagagacacgaaacagagaaaaccctgcgagagattccgcggcgaaaaagaatcggggcaaaaacaatttccggtcttctcttttgtgcgggcgggggggtctccatcggacggtctccagggcaggcgaacaggctttccggttagaggagttcccgacggaggtttcagagcggagggctctcctccttttttggttaacactccctctcgccggtatactgggtccttcccgcggatggttatcctttagcaaaagggaagggggtttctcacgcccttccatggtccggcctttatcggaaaccgttaaacattgggggtggggaaaatgcaatattttttttggggggaagggggg

SEQ ID NO: 174068 - DNA, 857 bp, Arabidopsis thaliana
ctatgaacacgcatgcacgcgtacgtaagcttggatcctctagagcgggcggccttcgtttttttttttttttttttaaacacaaagaaataaccctttttattggggctttttttttgtgcttacacaaggttttgggaaacaatcaagatttcaacaaaacaaaaaacaaacaaaaacggatggatctttttctcaaatggggggcaaaagggaggggaattaataaaaaaaagggggggggggttctttttcttcaagggccttgtttctaatctcggaaaaatccgtaaatttgcatttttttttatcttttaaactaaagattttttttagaaagaacaaaaactccacaaaaatttttccaccagggggtcttttcaccaaaacctaaaaaaaggtgggttgctgaaaaaactggaaagggttggttttcccaggggcttctcatgctctactcaaaagatggggaacccccccacagggtttgaaagaaaaacccttgttctcccttacaaaggagaaaacaaaaatggcctccttataatcctaaaaaaaggtttgcccactgcatcctaagcgggggaaaccaccacaccctttgttgggcgggtcacctcgtcttaaccgtaaaaaaaagctgaagggtgtttggcgtaaaaaaaggccccgggggttgataccgtttctccaaacaagaaaaaccgcagggtcacggggtttaaaagattttttctctaaaacgaagctcttttaaaatggcctttttttgggggagattttgaagagacaaactttttatttaataaaaaatggagattaggtggaaaaggccgaagggggttaccccccaaaaa

SEQ ID NO: 174069 - DNA, 544 bp, Arabidopsis thaliana
aacacgactcactttagggaaagccgctacgcctgcaggtaccggtccggaattcccgggtcgacccacgcgtgcggagcttctctctgataagggcacttcctctgacccttttatctaagctcaacgctgcaactctcgccggcgggtacttacccatttttcttcctttttcccgagcaaagactcaatttttattctccgggggggagggtcaaccttttaaagggggggggttatcttttgatgcgacccggtttggagaggggaaaaagatacatcgtgtcggaaattcggattgatttcctaaaaaagggctcaaattccccatcagggcgcaaacggcccagggggggggagcttgtccaccggcgcggtgcggcttgaacttggcgggcttagcccgggacctgtggggtgggttctcggatctgggcaacagggaacgacctctttttatggcggaggactcggacgccaccccggacggaaccacaagtttttgcgagcgccgtccccaacgcgtgtagggggtgttgtactc

SEQ ID NO: 174070 - DNA, 779 bp, Arabidopsis thaliana
cgcatgcacgcgtacgtaagcttggatcctctagagcgggggggctggtttttttttttttgagtgacaaataaatattccaaataacggggcttcttcacacattgggatcagtttacagaaaaattcggttcaattttttggttcaaaggagctttatgctttgatgaaaagcggtatgtaaaatggggtgcgggaattcagggagggagacgagaaaagaaacaagttattggagggggaatcccaagcgcgaaatggtcggggggtgggataagcgccaaaaaaaaatattatattaaatcttttaaaactaaaaaaccagacctctggtttttgtttggaacccaaccagggggaggggggggggggctaacattccctttatgccttgcttggggatggtggtggagagccagccaagccccttatagagtccttctcaggggggggccatgggcttttaagggaccaggggcgtgacgaaaaaaatgaacccccaggtgtgcagttttttaggggggttctcggggggggaaattttgcttgttaacaatacaagcgaacgggctccctaatctatcctcattaacgtcggggaaggggggcctggttaaaagagggggacgtcgttgggggccaaaaaaataaggcctgggtttctggaagatggccccacagggggggtgtgggtggcccccacctcccgggggggggggggggtgttgcttcacagcctcacggggaccccggggggaggggggcgagcccccccaggg

SEQ ID NO: 174071 - DNA, 889 bp, Arabidopsis thaliana
  unsure (1)..(889): unsure at all n locations
ctatgacctcgcatgcacgcgtacgtaagcttggatcctctagagcggccgcccgcggttttttttttttttttttttttttttttttttttttttttttttntttntttntnnttttctaaaggaagttttttctggggctttatattatggatcgggggatttgggacccctttgaacaaaaattctttccttttaaagtgcgccgcgggccccttcgaggccaaaataaaaaataccgcccaaaaacgaataaccccctagggggaaagcttaaaacccggaagaaaggtttggggctccttctgcattaaaaccccccccgctccgtgggtgaaataccgggaaccaaacttacggtaaaaaccaggaaaaacaggggccccctccccttttggggaaaaaaaacaaaaggcccttcgggtttttgttcccaaaaaggacccgccccctggtttaagggaaacccgtctttgtttcccaaatttttgacccggggtcttttttcctttttaaaaaaggcccaaaaggggtagaccaccctccaaaaattttttgggtttcgggtccacaccccgagcgaaaccccttcgagaaacttccacatcctttttggcgcccgggaaaaactttatttgggtgttaggctggaaaaaagggatttcccacaaaggtgacgggtgcgtcgttggggttttcacttggggagaaaaaaccatttttttcttaagcgcttttctccctttttccccgaacggcgtgaacccactttttgcggaaaaaacttcacaagggtcgcttctccgcaggagaaagtgtctccccgagcaaagtggtgaccccgcttcgaaaccccttctaagaacccgtttcgtttttgagggccgca

SEQ ID NO: 174072 - DNA, 521 bp, Arabidopsis thaliana
atacgactcactttagggaaagctcgtacgcctgcaggtaccggtccggaattcccgggtcgacccacgcgtccggtttggacaaaaagcttgcccagagaaaacattttccctctgttaattggttgatttcttactcaaagtattcaacggcactggaatctttctatgagaagttcgatccagatttcatcaacatcaggacaaaggccagagaggtgttgcagagggaagacgatcttaatgaaattgtccagcttgtaggaaaagatgcgctagcagaaggggacaaaatcacattggaaacagctaagctattgagggaagattaccttgctcaaaacgcgtttacaccatatgacaaattctgtcctttctacaagtccgtgtggatgatgcgtaacattatccatttctacaacctagccaaccaggcggttgagagagcagctggaatggacggtcaaaagattacctacactcttatcaagcatcgcttaggagatcttttctcccgttta

SEQ ID NO: 174073 - DNA, 464 bp, Arabidopsis thaliana
  unsure (1)..(464): unsure at all n locations
ctatgacgccgcatgcacgcgtacgtaagcttggatcctctagagcgggcggcctggcgctttttttaaatttttttttntntggcccccaaccatttacaaaaactcctgtttcttatgctttgggctaagctacagggttcgtttcccacgttaaaacactaacttgatattttttttgggggggaacaaaactgagcattactgaaaaatagtgggggggaaatggaccaacatttttttcgacaaaacggggatgcgggacttaggagggaactggttcaaggggggcctgctcatgcccttcccggttaaggttgactgccaaatttgcacatcccactcctcccgggctactaagggatgccccttttgcccattccttttcacaacctcgctttgtggccaaaagggaggaaaccttttttacgggaagccttccttaggaacgggggctaaccaac

SEQ ID NO: 174074 - DNA, 509 bp, Arabidopsis thaliana
  unsure (1)..(509): unsure at all n locations
aatacgactcactttagggaaagctcgtacgcctgcaggtaccggtccggaattcccgggtcgacccacgcgtccgggcagtggaagacgacggcacgagcttcaccgaagagcgaaaatggtgaacattccgaaaactaagaacacttactgcaagaacaaggagtgcaagaagcataccttgcacaaggtgacgcagtataagaaaggtaaagatagcctttctgcccaaggaaagcgtcgttatgatcgtaaacaatctggttatggaggtcagaccaagcccgtcttccacaagaaggctaagacaactaagaagattgtgctgaggcttcaatgccaaagctgcaagcatttctcgcaacgcccgattaagaggtgcaagcactttgagatcggtggagacaagaagggaaagggaacatctctcttttaagttggtggttcatctatctactnttttttggtttggnttgggacctgtcctgcttcaatactgggatatactt

SEQ ID NO: 174075 - DNA, 573 bp, Arabidopsis thaliana
  unsure (1)..(573): unsure at all n locations
agagaaaaacgaaaaaaaaaaagtttgtttggttacatacgactcacttaggggaagcacgtacgcctgcaggtaccggtccggaattcccgggttgacccacgcgtgcgcggacgcgttcgcccacgcgtncgcccacgcgtgcgcggacgcgtgggctcagagaccaattctctcaatctccgtcgtgcgcttttggcttgattttggaaataaggaatctgaggaaattgatacaagtggggctctgatgggaacctttttattggggggggggtgcaaaaaaaaactcctttgtgggaattcagcaggcaaggttaccaggcttcccttgtggaattaaatttggaggggcctgttggaatttcccactattttaaggcttaaatttgcggtgggggaatcgggggggagaaaaacggagcaagcttttttcatgagaagggagtttgagggggcaggtttttgactccctgaggggtttcgtggggttgggcgtaaacaagccaggaacttgaatgggtaaggaagaaaaaaattgtttttgccaccaaaaaaataccaggtgttggg

SEQ ID NO: 174076 - DNA, 603 bp, Arabidopsis thaliana
  unsure (1)..(603): unsure at all n locations
ctatgacctcgcatgcacgcgtacgtaagcttggatcctctagagcggcgcggctggttttttttttttatataaattacgcaagataaaaattatacgaaacgaagaacttttacattattcacatttccccaaatgaaatatattaaaatttatatctttggggtgttttctccaccaccttcttctttttaataatgagggtgggtngtttaggaaggaggcttgaacaggattgaaaccttaagggctagcattactccggggatggagccaactccggcgaccaacgggatcatcaaacaaccacagcttaacatgtggagacaaacccacttaatactccatctctaaaccttcctgtggcttaaatacatccccaccggaaaggaaaccgggaagggccaaaaccctaacgccctaaaaatcccttacgagggcgttgaaaaacgggttaagcgtggatatcaaagggggcaaaaccacaaccccgcttcgggaaactggtcctgaaacgtggacttttgccggggacccaaaaaccaggggtccgggttttggattcctgggccaccaagggccgtgggggagaacctagggggg

SEQ ID NO: 174077 - DNA, 621 bp, Arabidopsis thaliana
  unsure (1)..(621): unsure at all n locations
gatttactgacctatataagactatgacgtcgcatgcacgcgtacgtaagcttggatcctctagagtcgggcgcgctgggtttttttttatttttttttnttttttttggagatgaaatgtgttattttaagaaggcaagaaagtagaaacaagtttaacaaaagattcattaaaacaatgattacccaacaggaccagggaaggattatatataatctaagcgtgtggggctccaaaagtgctggcgggatgattaaaattactaaaatcacgatttcttccaaagcggatttttctttggtcctttttttcttgggcccggaaaagaagttctccaaggggcacaagggaaaatttcctacactctaaaccgaaaaaaaggaagggagggaaatgggtgggttttttacttggtgggctttttccccatggccattcccccaataatgtccaagggtggttgatttacagattcttggtggggagtggacaattcttggttggtgtgtttttggcattcccccattattttaaatcccatacgggaaccaaaaaaaaaccggagtcttagagcgagggaaagggcgccttttgctggttacttttttttttgtgggggg

SEQ ID NO: 174078 - DNA, 530 bp, Arabidopsis thaliana
atacgactcacattagggaaagctcgtacgcctgcaggtaccggtccggaattcccgggttgacccacgcgtgcgggcgaacgcgtgtattttaggacagtttctagaaaagatttttgcgatcggctcgggcatggttatgcatctgctcctccatacaatattccatgttcgaatttaccgagcgggaagaacttccggtacttgggaatgggacaatatttatgggggggatgatctccctcctgggaatttaagacacaggggcccgtatggttttgaattattctgatgtcgatatcaccagagggggttttattacccggggggtgagtccttttttaggccaaatggggacaaggaattgaccattgatccggaagggggttttggggatttggaaactgggctaccggagttgggtttttccccaagggggcctgggtggtttaaacccttttctttttttctttaggaccacttctcctcactggggaaagagaaaccagtagacagcggggggcgggagg

SEQ ID NO: 174079 - DNA, 705 bp, Arabidopsis thaliana
  unsure (1)..(705): unsure at all n locations
tgacgccccatgcacgcgtacgtaggcttggatcctctagagcgggcggcctgtttttttttttttgacgacgggaaccaattactatacttatgtggggtaatataacagttaaattcaatctgggagacacattttcacattctttagagaaagcataccaaagggattgtgggaaaaaattccttttgcaatgtgggcgggggggctatcttctcttttttcttcatgcaaaatctggaagcggggggggtaacataattgggaacctactttggatctccctaacacaggttcaggaccgggcttgcgggaaaatgatttgacccttgggccttggcaacttgggaaccctcgggggcttctgagaggggagggggatcccttttttgctaaacccattattttttccaattggttaggggggggaaaacccaatttcccaggggacaaaacccttaccctttttctttttntggaaaacaaaggggtcctgaagggtgttcacaaacccaaccactcccttatttttgagtctccggcctggcatccccttcttaaaactgagaccttgctgggggggcaagggtgaaacaaacaaagttgtgggggaacctcccccgttaaaggggccagcccctttttaaaaattttttggggttaacccgggggaaaacttccgggggaacccctggtggggggaaa

SEQ ID NO: 174080 - DNA, 475 bp, Arabidopsis thaliana
  unsure (1)..(475): unsure at all n locations
aataccactcactttagggaaagctcgtacgcctgcaggtaccggtccggaattcccgggtcgacccacgcgtccgagtttattttatttaggaaactttgtcttttttccttcctctgcgctgtcttcttcaaaaaacaaaatattttgttttttgttctattagtaactttgctttctccacaattcaaagctaatttagttctattcattttttgctctctcttttgcggagatttggtngaagaagaaaaataaaaagagttataatcaatcagatcttgttttaagtgcagactcgttatttctcttcctcacctaagcttcagcatcggaaatttaaaactaaaatcgcatcaaatcccggagataggaaagaaataattgattgtttctagtgaagaacaaaaaaaaaaaagccgaagactttacatctggggtcatcgatttgaataagatcttcttttttgttatc

SEQ ID NO: 174081 - DNA, 513 bp, Arabidopsis thaliana
aatacgactcactttagggaaagctcgtacgcctgcaggtaccggtccggaattcccgggtcgacccacgcgtccgcaacaagcagaagagattcgattctccattatcttccttctaaatgccttccctaatgttatctgataagaaagaggagaagaagatgaagaagaagatggctttggataccccagagcttgattctaagaaggggaagaaggagcataagctgaaactatctgattcggatgaagaagagtcggagaagaagaagagtaagaagaaggataagaagcgtaaggcttccgaggaggaggatgaagtgaagagcgattcaagctcggagaagaagaagagcagcaagaaggttaagttggggcgttgaggatgttgaagttgataaccctaatgctggttctaagtttcggatttctgcgcctttgagggagaagcttaaggcgaatggtattgaagctctttttccgattcaagcttccacgtttgatatgggtctc

SEQ ID NO: 174082 - DNA, 278 bp, Arabidopsis thaliana
ccctatactagactatgacaccgcatgcacgcgtacgtaagcttggatcctttagagcgggcggcgcttgttttttttttttttttttttttttagaacaacacgatttgcttcatacaatattaaacaataatttttggagccaacaatacgtaggaacacattacacaacaatttttttaaagaccgagccgaaaaggggatttcggtcgagggaggggcacccttccaccagcaataaactgaacaaacccgtttttttttgagcttaagaagcg

SEQ ID NO: 174083 - DNA, 542 bp, Arabidopsis thaliana
  unsure (1)..(542): unsure at all n locations
aatacgactcactttagggaaagctgcgtacgcctgcaggtaccggtccggaattcccgggtcgacccacgcgtccgcggacgcgtccgcccacgcgtccgcccacgcgtncgcggacgcgtgggcagtagaatcattttacctatagtgtttcccgctttggagaaaaacggtagcagccattggaatcaggctgtgaagaacttgacagagaatgttctcattgttttgtgcgatacaaatcctgatttattcgaagaatgtttgcacaagttccaagaagatcagcaaaaagcagaagatactaaaaagaagaatggagaaacctggagacagctagaggagattgttgcttcaatggcgaagtaagagttttttctgcactttacgtgattcaacaagaaatcgggttattgggtttgttttgtttcctttacgcctgaaaggtatatacatttactttgctttgcttgcttcatttaaggatctgggtttcgacttttagactaggtttaattcagttaaaacaggggtgagatttt

SEQ ID NO: 174084 - DNA, 865 bp, Arabidopsis thaliana
  unsure (1)..(865): unsure at all n locations
gcatgcacgcgtacgtaagcttggatcctttagagcgggcggccggcggtttttattaaattttttntttttttttgggtttttttttttnttttttttttgaacggaaacaacctttttttataaggaaaccaaaattccctaaatcccaacccccccatgatattaaaagaaaatctgttcggaaggtggggaaaatccggcggaattttttccaccaataacctttttggggaaaaaaaggacgcagaaaaatttttaattttaggtcacccgtaaatttaaatttaagggggggaaataaaaaaccacaaagggggggggggaaaaagccccttggaccctcggatggcccccagggaaaaaaaaaattatcttctttggccaaaatggtctggaggaagggccccctcttgggtttggggaacccgggcccaaacacttgtcccccccaaaaaaacgggtttgttaggggggggagtgttgttttctcccccccgggggggggaacaacccggggcatcggggggggggaaaccccaccggggggggccaccccccccctcacaaaaaaatctccccccaggccacacccctgggagggaaaaaaaaatacccctctttttttgggccctttccgggggggggggagaccctaaaacccggcccacccggggaatggggccccaagcaaaggggggccccccccaaaaagaaacaagtgcccctccccccccatcctaaaagaaggggccggtaacaacccgggcgggggggagcgcggggcgaccccgaaatcccgaccggccccgggggccccactttcctaaagggggtataaaagcggcgaacagagaacaccccc

SEQ ID NO: 174085 - DNA, 833 bp, Arabidopsis thaliana
ctatgacctcgcatgcacgcgtacgtaagcttggatcctctagagcgggcgccctttttttttttttttttttttagacatcaaataattggataaaaaccttaagtcattagatggaaaacaagattcttggtcggaaactacaaaaagggatcgagcgaacaaacatattataaagatatgtaaaattcaaagggcggggggggttttggatgggggctccctcttttaatatctaaaaaaaaggcagcggggggtgggggttttctttttaagcaggagtttaaaatgtcttctccaacagggtttggggacatcggcataaatccttttcttgggatgggggctgaggggcgaattacccttccccaaaaccctgtttttggaacctggcctgctacctttttaagggtgcccatggtggccggcccaaggtggcttataactgaagaagggatttcttgcaatttttgggccgggggaaaccgctaacaccccttggtttccaaaaattgaagcttaaccctttagggggaaaaactgaaaaccacctccttctttaaggggttactttttaatggggggagggggagtacctcccttctttaaagagggcttagaaccctctttgaaaagtgattggggtttgggcacaccttttttttttttaaaggcctttcccgggggggggggtttagcctttttaaaaactcccctataatttggaaaaggggtttcggccgggggcccccgagattccggccggcccggggggcccatttccttaggggtttaaaggtgggaaatagactaactttcctggaaaattttcc

SEQ ID NO: 174086 - DNA, 341 bp, Arabidopsis thaliana
  unsure (1)..(341): unsure at all n locations
gttcgtaagcttggatcctttagagcggggggccctgttttttttttttttttatatagaaagggagtttaatctttttactctggtgtcttcttgggtggccaactccttacaacgagctaaaggttggtaattcttttttttcataaaccggacaaagcaaaacatgtttttaaacccggaggacggacttttgcttgggccnggaagaaaaaatacaattttaggctggtgggaagggtccccccttcctgggttccaaaccccagggggacccatttttgtacgggatattaaaatcaaaacttaattcccaaacctcccccggaacttttttcttt

SEQ ID NO: 174087 - DNA, 538 bp, Arabidopsis thaliana
atcgactcacttagggaaagctgcgtacgcctgcaggtaccggtccggaattcccgggtcgacccacgcgtgcgattcttccttagttcctcatcaaactcaaaaatctctatctatacggggagtatcatactatcttcatcattcaccaccagcattgatcatcatctgttggaaaatatgaagagaacacatttggcaagttttagtaacagagacttatcccaagaagaagaaggagaagacggtaatggtgacaacagagtcatcatgaatcactacaagaattacgaagctgggctgatcccatggcctcccaagaattacacttgcagcttctgcaggagagagttcagatctgctcaagcacttggaggccacatgaatgttcatagaagagacagagcaaaactcaggcagatccctttttggctcttcgaacctcaccaccacacaccctattgcaaacccctaacccctaattttagctcctctttttttctcttaaacaacaacaggtcaatcttgagcctttcct

SEQ ID NO: 174088 - DNA, 717 bp, Arabidopsis thaliana
  unsure (1)..(717): unsure at all n locations
aactttgaaaccgcatgcacgcgtacgtaagcttggatcctctagagcggcggcgctgttttttttttttttataaattagggagggatgtgtaatacatacaggacattgataaaccatacacatagtcttaccataaaccattagggaaatgcagtccaaaaacaaggtttaaataacaaagccctttttatgcccagtggggggaanaacctcatgccaaanaccataaatatggacagcttaaccaagcttaacaacggtgggagctacaagcaggaacagtcccattcccttccaagaactctggtttaaagtggtgtttttcccaaccccatacccataaaagaatgtaagcttactttttccaaaccaatttctttttaacatttttggaagcaatcctacactcttttttggttcaataagacaaaccttttattactggggtgaataatccggttttaccaacttggtggtttccaccatttctttgaactaaccaagaaaaacccttttttacaaggggccaccaaaaaaaaatcttttttactaaaaccctcctgccatggtaaaaatcggggctgtggcctcctaataaaacataaagagtgggcgggttaggagtcctttatagggacggaggggccaacaagaggggggagagcacctttttttgaaaatgggggccccggctatcttctttttgggaataag

SEQ ID NO: 174089 - DNA, 638 bp, Arabidopsis thaliana
  unsure (1)..(638): unsure at all n locations
ctatgacgccgcatgcacgcgtacgtaagcttggatcctctagagcggccggccttgctttttttttttatttttttttattnttttttttnntttttttttttnttttttnttttttttnnaaaaccaaaaacacagcccgcttaatattatttaatggcccacaagcccccacacaaatttgggtggggtggaatccttccaccagaaggtgcgtgggnacanctcctncctcctcctgggataaaaatttaaaagggggggttttttaaaaaaccttttttaaaaacaaacaaagggggagggaacctatatccaccctctttttttttttatgagccggaagagccctcttttttttgtcccaggagaatggggatgcccccctctttttttttgttgcctccaatgcccaagggagatatttttttttaaacagggctttttttggaattttttccctccgggnggagtctaaaaaaaaaccccctcatagaagtttgttagaccccccctctttttattgggtttcccccccgtttcttttaattaaaaagggttttgtgagggttgtgttaaaacacaaagggggtgttttttatttggtggaggggggctctttccttctcttttttttt

SEQ ID NO: 174090 - DNA, 547 bp, Arabidopsis thaliana columbia; identical to SEQ ID NO: 128687
  unsure (1)..(547): unsure at all n locations

SEQ ID NO: 174091 - DNA, 379 bp, Arabidopsis thaliana
  unsure (1)..(379): unsure at all n locations
ctatgacgccgcatgcacgcgtacgtaagcttggatcctctagagcgggcgcgctttttttttttttttttaatatccaaaaacaatatctattgaactcttataaaacataaacgtattaaacctatgatattagtatcttctcttttttattcaagagaggggaaacaaaaacacatggttataattaaagtctaaaagggggagtaaggaaggaagatcaaccccaggagtttaagggaacttaacatacacagaaaaaaaaccttattctcttgtgaaaaatcatcatcattatcatctcttaaacaaagggagctcntcttccttatcatcttcttggtaaatcttattaaacggggtaggaccagctggctca

SEQ ID NO: 174092 - DNA, 894 bp, Arabidopsis thaliana
  unsure (1)..(894): unsure at all n locations
aaaaaaaaagnggggggcctattgtnacgcccttcctanagcttgacctngcatgcacgcgtacgtaagcttggatcctctagagcggccgccctggcgtttttttttttatttttttttttttttttttttttttttttttnggcaaaataatgcctcctaatctctcaataaagttttagcttgataaattcaaatggatgcgaaaactttcatgaatagagagatttagatcccttgtgtgggtttatttaagaatggatgaaaacaaacaaggtttttcaccatttccaaaaaacattggaaccccacttgtacttggccttgccttcgaattccaaaacattttcttttgagataaatggaactttttttttgttggcaaaattttggcaccccttgaatttctcagggaactttccacttcccaatttgacaatgaatgctctccaaaattttgctccccttgttgccaatctttttttttattaagtttttggtgggtttcctccctcgagggttttcgcaatgacccccgctttatcaaaaccaaaaccccaccagggaaaaaatttttctcttaaaaaacctggcttgacgttttctttaatcctcaactttttcccaaaacgcgttgacttttatcccaggttattattttttcttcttcccaaccccctttttatttcccaaccactttcttgtttcctttcccagcccaaccaaaattggttacttaaatggaaaccttatttatgcccccttaaaaattgttttttttttttttaaaattaaaacggccccgtgtcacccgaattccggccggcctcggggaccatttccctttggggctttaaacttggaaatgggatactttccttgaattgtccccac

SEQ ID NO: 174093 - DNA, 515 bp, Arabidopsis thaliana
aatacgactcactttagggaaagctcgtacgcctgcaggtaccggtccggaattcccgggtcgacccacgcgtccggctttcgcttttaaaaaaaaacctatcaacctctcttttttcttccttgttcaacaacaatggagctttggggagttgcggtgacaccaaaaaacgctactaaggggactactgaagaagacagccttgaccacatttctcaggctttactagactgcacagcgaaatctggagaatctgaggttatgagtgtgactgttggtggggctaaacttgttattggaacactctcacaagacatgtgccctcagattacctatgattcggtttttgataaagagtttgagctttcacacagcggctccaaagcaaatgatcatttgattggctacgaatcccgcaacatcgagcacgatgacttcactagctctgatgatgaggatgctcctgaagctgtctctgctcctgcccctactgctgatactgccaacggatatgc

SEQ ID NO: 174094 - DNA, 481 bp, Arabidopsis thaliana
ctataacacagcatgcacgcgtacgtaagcttggatcctctagagcggcgggcctgggtttttttttttgaccaaaagttcatccatgtgggggtcacataaacaagaaaacaattcaaatctatcaggtcgaaaccctaaaggttgaaacacatatcgggtgggcacacaggaaacgatcttacattcccgaatagctaaatggtgcaggtcaatgagattacccccagagaaaaaagaacgggcttggggcaccatcactttcttggcttctggttttctcgggttaacaccaggaagcctcttggagaaattttttattagggataatcacagggcattgttctccaggttcacaaaacattgtgtttggctaaagaaactggccctttataaagaatcattttttttaattcaactgggcccgagggtggcacttgcataaaaggcttccttcaaccccataaacaaaagtggacag

SEQ ID NO: 174095 - DNA, 521 bp, Arabidopsis thaliana
ctatgacgtcgcatgcacgcgtacgtaagcttggatcctctagagcgggcgccctttttttttttttttttttttttttaggatcaaagtctgttttgaataataaattttagtagttgtcaaacaagagtcataaagcatctcatactcatagagaaagagggatgaaatatccaaacacacgataagtcttagaagggggcatgatattcttcattaatttagggcataaagatagatagagggggaatcaactcagcagtagaacatgacacgcttcacattctctttcagagctgggaggggcctcactgcagcattgacattaggcccgcgtgtgcttctaccagccattccacctccacgtgccatgctcccactagccattgagccactgtctgatgtctctggctccatgtagaatcgagccctaaaagctgctagatgtgcataatatgcagggggaacaattgaaactgagcgtgggcatcttgcttacgggtaacataagttattgggca

SEQ ID NO: 174096 - DNA, 368 bp, Arabidopsis thaliana
  unsure (1)..(368): unsure at all n locations
taagcttggatcctctagagcggcgcgcccttcctttttntttttattnttnttttttttttttttttttgaaactttctgcaacattaccctaaagcagcaaaactttggaaactgacaaaaattggaaatgattcacctttatattgtttcatttctaaaacaaaaaaaaagggtgagaatgttcaaaaaaagataactccaaagattttttcaaactaggaacaaaaaccttttcttataaaaatcatgtcggttgcttctacataaaaaggttaagttttaaccccttatatgtaaccttaaccttcccgcttgggggcctccccttcccaaaaacaaaaagaaaccttattcttccaattttg

SEQ ID NO: 174097 - DNA, 528 bp, Arabidopsis thaliana
cgtagcttggatcctctagagcggccgccctttttttttttttttatttgctccccattacgagccaaaatcttgcccatctccagatcaccaacacactcacagaaagcctgaaatgaagttagaagtactcgtaatgggtcttgctgaccagaacttgcaagtccatgacaggggcgcaattgaagagtaagtgccccaacgacagaagagtagcttttctcaacagctttctttccaatttttccgccaccccgaaaaaaagcagtgagagcaaaaatggcagcttgaagaatatcatcttctacatgtgtttcaaaagaagagctagtattctctcccttatgtgaatcacttttaactaaagactacgattgagaatggtattaaagggtccatgaccaaactgaaagctccgtatgttgagagaaacataaaatgcatcttgcattggccatccccacccattctatttttgtcctttggcacgatgtcttttccagcagtggccaacactttattaaacac

SEQ ID NO: 174098 - DNA, 875 bp, Arabidopsis thaliana
  unsure (1)..(875): unsure at all n locations
gactatgacctcgcatgcacgcgtacgtaagcttggatcctctagagcggcggcgctgtgtttttttttttttgggctttaaactctagttacatcttataaataaaaatgacaaatttgggagcagaaaaattcatcatttacgagttgaaaccatttatttgcataccctctcatttgctttctcccttcattccaaagaagccgatatgggactacgtcntccttctaataaaggttttaagccacctccttatttttctacatctgaacctacatgtgggttgtccgatccgggtcaaccccacatggtttgccggcggaaaccacgatcttatgggccaatttctatttgcttttgcaagcattttggagggaatatatactattactactgggctacttgcaattnggaattccacaaaatgtgtcatttttttttggccggaaaaagaaacccttttaaccccttccaacctttcacttttatttccttaaacctgaccttgatttttataaacctagccaccgctcgaattggttttattcctttaaattgggatttgacgataaccccaaaaccattttcttgttttataacaggataacatgcttaaatatttaactggcccctgatttcaaacaccatttacttaataggggaaggctaatctagttttaaccaaccttggaaaaacatatttgtttttaaggccggaaaccatacgggtcacaagaaaaaaccaattggtacaagtttaaccggaggcggttttttttgccggaaatgggtaaaccaccatttttttttgggagatcaaaagaacttttgtttccccgaaacaatgttctttcatttgcgcaaaaaaaaaaaa

SEQ ID NO: 174099 - DNA, 604 bp, Arabidopsis thaliana
  unsure (1)..(604): unsure at all n locations
ctatattaagactatgacctcgcatgcacgcgtacgtaagcttggatcctctagagcggcgcgcccttcgtttttttttttttttttttttttttttttttttttttttttttttggggaaccaaaaatttttcattgaaagggccaaaaaaccaagaaaatttcagttttctatctatgaacaaagaaaaattgtaattttccaaaagggggggggtaactttttctgaactcatttctatgaatctcatgaaccgggtttttttttgttttggccgcgtttcattttccgtacgggtaaggaaaccggtttctccaagaaagaaacattgacgctgttccaaaaattggggttttggtggaaaaccgggaatttgttccacaaaacccattgtttttgggaaaaataagcccaataccgggaaaaaatggttccattccgggggggtttggtacactggggaaaaaatttggacccgagccaaccccccgcccgggcccggtttaaanttggcagggctcggttggaaacggggagaaaagtttccctcggccggaatattccttgaaacatagggatgggggaccaagggagcatttttaa

SEQ ID NO: 174100 - DNA, 528 bp, Arabidopsis thaliana
  unsure (1)..(528): unsure at all n locations
ctatgacaccccatgcacgcgtacgtaagcttggatcctctagagcgggcggcctttttttttttttttttaataggagaaaaagcaatgaaagaagagcaaacacataagcattctttctcttgaccaaagttaaaaacacacaacantttgaaacatggacaaactagaatgtacttgaaagagcaaatgggaggatctaacggcggggagacagcgacttggagattcttggcaggaatcaacattgggaaggagggtcaaaggcgaggaaagaagcttataagagggagattagagagagaaccatgtaaaaacaaaccacaaagaatgtggttattacaggaagcaggggctctatgacagaaaccgcgctaggaactacatgcatcggtcccaggaatgggtgagtctccattggaagccaagtataaaacctcagctgaaccagccccacagcaaaaaccagtggggaagaagctggccagaacaaagagaggccaacccgaggcatttgcaaaaaagaac

SEQ ID NO: 174101 - DNA, 549 bp, Arabidopsis thaliana
  unsure (1)..(549): unsure at all n locations
ctatgacctcgcatgcacgcgtacgtaagcttggatcctctagagcggccgccctggggtttttttttttntttttttttttttttnttttttttttttttttttctgaacggaaacaacttttttttttaatgaaaccaaaattccttaaatctcaacccctccctgatttttaaaaaagaaagggtttctggaaagggggggaaatctccccaaaaatattttccaccaataaacttttttcggggaaaaaaggatgtaagtaaaantctttaattttagttttaccgtttaattttaattttaagggggggatttaaaaaatttacaaggggggggggggaaaaagccccttggatccttggatttaccccggggaaaagaaacagtttcttttttttgccccaattttttggggaaatggcccttttttggcttttggggacccctggccctaacccttcggggcgccgggggccaccccgggaattccgggaccggtccctggagggctcccaatttttccctataggggagccttttaaagct

SEQ ID NO: 174102 - DNA, 703 bp, Arabidopsis thaliana
gctatgacctcgcatgcacgcgtacgtaagcttggatcctctagagcggccgccctttttttttttttttatgtttttacatttttgtgatagcaagtttgagaatgaacatcataaagatacaaagttacagatttttgttgtggaagcaaatactaaaaattacaaaggtacaggggtggctaaagatacacagacgcgggctgctctgacttctctgactagttaacaacatatctcttcagcgaggctggtggatgtttctcggagcagcaacaaccctctggttttcccatttcgctggctttttccgatacttagctggttccacaatcgatctcgggctcctgtttcacttgatttcttaaccatctcacccttctttccaaagccaaattcggagggggcttggaatacattctttcatacaatccttgatcaaactcacaacatcagtggcaaaaaaatcttccttttatcaaatcaaatgattcggaagaagatcagctacatgatttgacctccaacctttttatttgttccggggaaaaaaaacattcccgccctgcttcttgtgactgacccaatattaggggaccaagtcgaaattgtaacaattgccaccactccgggaaaaatcttccccttgccgacagttgcggaataaaaaagggccgcggggttaaaaaaaaacgttttctaa

SEQ ID NO: 174103 - DNA, 739 bp, Arabidopsis thaliana
gctatgacgcccgcatgcacgcgtacgtaagcttggatcctctagagcgccggggccttgtgttttttttttttaaaactggaacattgaattaaactcaacaaattgggatgatttacataaagggtgtaaaaattgatacaaaatccaaagaatttgataatacatgaaaaattgggagtttctgggatacaaacgaccagagagggatgtaaataagaatccaattaacaaaaaagagccaattgatgaatgtttttttgtgcggatcaaaaaaagctcgaagcttttgaaagccttttctctggcttttcttggaggggttactcgggcctggggtaaagggagatgctcgttttgactcctatccactcacaagaggtgttggttggggtttttgaaaaatgagggtcggacccccgcacccgtttgaggttcgcgggttgaggccccgcttttccttttgttcacttgaagaggttggtcttacttcttggggtactcgcttttctcaaaacactggggagtgtggaagggtttcttctttctttaaattccttttctccgcgggttttcttgagagggtttccacaagaattccaatgctggattgggtttgaaggggagttgggtcttaaaacttccttttagagaatgttcacccgggcggagaagttatggggtgtggtcctaagtgattctcttagggttttgagagaggggccgcaccttttctggt

SEQ ID NO: 174104 - DNA, 329 bp, Arabidopsis thaliana
ctatgaccccccatgcacgcgtacgtaagctttggatcctctagagcggccggccttttttttttttttttagcatattaatattctttttttcttcctcaactaaaataaagaatcagattctaatgcttaaagagatgtttaaatctcccacatgaaaaagatgctttcccaaaccaatcttcctctttccaatctatggggcgcactcagaactttacatatctctaaacataaacccaaccaccggttcttccctcttccccaatcgaaatcttgctgaaatcctaccaaatgctttcctcggcaatccgtgaattcgcccgcgg

SEQ ID NO: 174105 - DNA, 876 bp, Arabidopsis thaliana
  unsure (1)..(876): unsure at all n locations
ctatgacaccccatgcacgcgtacgtaagcttggatcctctagagcggcgcgccttgcgtnttttttttttttttttttttntttttttttttttgcggcttctacaggtcttgtaggggcaaatctctattacacaaaaatgtcaaacgatgtggataggtcccgtaatctcaaatgactttggactcagttttttttatccggggggggaaaaccccaataatcccgtggaaaaaaccaattctcccaagggtgaattgggcccttcaccatttttcgacccaacagaattctggtttaaattaactacagcctctgctccaagtactcttctgaacctcatccgggatggggggtgtcccagacttgagcttatcacattccgttggagaggcctctgaactcatttctcagggcttgattctcggtcaaaaaactttttacttttttgggaggtggtccatttcggccgcttcccgcatcttaaacccctaacgggttcaccggtaaattggttccctttctggcccgtgagccccgttcatccctcactgggccccaggttgggaaaccctaagcccctcccgattttaaaataaccccgcgggctccccgtttttggggcaccaaccctgggttccaccagcgaccttgaaaatctggggaacaaactatggccaaggtcgggttataaataaccccgggagtgggcttctctattttataaaaaaacccccgggacatttttcctttaagaagcccccttcccctaacaaaaggcgttataccccttaccttttttggagccccttactttgccaaacgtgccctcaggccttggggggccaaaaaaggggggcccggagaaaaaaccc

SEQ ID NO: 174106 - DNA, 785 bp, Arabidopsis thaliana
ctatgacgccgcatgcacgcgtacgtaagcttggatcctctagagcggccgcccttggtttttttttttttttttttttttttttttttttttttttttttttttttgggggaaaagggtctttcatttggggggataaaaagcatgaacccttccaaataaaactttacattggcggggaactcaaacaatttggttcaagggggcgggtttttcgggggggtactttgtaatgtatattaaaccccgacgatccgttttaaacgtaaaacaagcccgcatggtctgacaaatttgtttatcaaaaatagattcttaggcttagcgattaaaaaattttaaaccccccgaaaaacccaaataaatatgggcctttttaaataaaatgaaccggtttaggggaactctcccgggaaaaaaaactcatttttcccctggggggtcaagcttcccaaagaggttttcaaaaagggttaggccattttttgttgaatcggcgggttttaaagcctaatggccccacttagttcccaccaaaaaactctttcggggatttgcttttaaaaagctcttaaccccggagttttggcggcccaccctcccgggaggcggggtcccccgggatttcggccgggtcctgggggtaccagtttcccttaggggagtataaaaggtggggaaacagggacaaggggtccctgggaaattgttccccccaatcccccaaatagagcggagtaaagggaaccggggggccaaggggaccaccacatattgggggcccc

SEQ ID NO: 174107 - DNA, 478 bp, Arabidopsis thaliana
cactatatatgagctatgacgccgcatgcacgcgtacgtaagcttggatcctctagagcggccgccctttgttttttttttttttttttttttttttttttttttgggaacccaaaagtcaaattcaataagctccaatgcattttgagcataaaataactctcatgaactacaaagaagggcgggagccaattgctaactccagtacatgatgggggagtaaactgtaggagggccaaaatgacaaaaacttaaaatctcaaagcaactaaggcaatagaacatatgaaacgtaaaaggaagggagacatctaatcgaacaggccgaaaccaagatctccatcactttcttctggggggttcgccttcttctcctccttagaagggggcagaggaggagcttctccaacaaaagaaggtgcggaaacaaacactggggcaccgcctccaccaccaccaggaccaacttttatgataa

SEQ ID NO: 174108 - DNA, 739 bp, Arabidopsis thaliana
tctcgtaagactatgacctcgcatgcacgcgtacgtaagcttggatcctctagagcggccgcccttcgtttttttttttttttttttttttttttttttgtttttttattcttttttttttttttttttttttttttttttgggggcggggggggggggggaagagtccttttccaaaaagaaacaaaaaacccctcttttgaaggggggcgggtttaaaccgcccgcgtttttttaaaccaaaaccaacccccccccttttattacccccccgggagaacccccccccaaaaaacccccccctcataaacaaagtctccccccccccccggggggcgctccccctttaaaggggggggaacccagggggggggcccccccccccccccccccccgaaggggacccccctttaaaaataaatttgcgggggggcccccctctccctttcttcccacccttcaggagaaccccccccctccaacaatgaccccttttttacaacctgggggggccccctaggaaaaatttgggcggagaaaacccccccttatcttccccccccctcctttgcccccccctcccccccccggggggcccccccacaagttcccccctacctctttttaaacaacccccctccccgccggggggataatttttcttcctctcttttcccccccccgaaacaaaacacctcctcctccaaaagagccgcccacaaacccccacccccccccc

SEQ ID NO: 174109 - DNA, 562 bp, Arabidopsis thaliana
  unsure (1)..(562): unsure at all n locations
gccctatattatgactatgacgccgcatgcacgcgtacgtaagcttggatcctctagagcgggcgcccttgttttttttttttgggggatactaaaagatagaaacgagaatatgaatatatgatggtaactaataaaagcatgaaagtttctgtgaagaatctctacgacctactcaaaacacaaagtctaagaaaacttatcgagggcggaaggcggtattttnntttcttcaaaccaaaaaaaaatattgggcggggggagttactaagagggcttcttttacggaatgcctaatggatgacccccactggccaccatcaaataatacaaacccccgtttaccaacacaaacaacaatggccgccaccccaaaatatacttcgacgtttttcaccctttttgtgtgaacccgggttagcctttgcccttgagtcaaaagaacctgacacttaacaccttggaaaccaaacccaaaggaacacttttgaagggggtgatttttttcttcctttaaaatcatatttgtgtggttgtttggcctccttgaatcgggaaggga

SEQ ID NO: 174110 - DNA, 595 bp, Arabidopsis thaliana
  unsure (1)..(595): unsure at all n locations
gacctcgcatgcacgcgtacgtaagcttggatcctctagagcgggcgggcggggtttttttttttatttttnttttttttaaaagaacaaagctttgttttccaaaatgttttgcgttaagtgcaaaaaagattagacaacaatttacacggtggcgccggtgaatacaattttaatctaaattttttttacggggggggaaagatctggcgattcagtcttgacaaatttggagggagagagatcattcgattcccccttccttgagaaaggacttcttccttttcgagagggaacacagtcctaactttttcaccgcagagatttcattttttcaaactcattttccatcccatttacccaaagctcaatagcttgcttccttggcactaaccggaaagccaaagacctggattcngtgtttttctctttgggatccctaacccttaacaatggacttggattcaggttcttccatttggggaaacatcctggaattcccagggtaacgggggtgatactgccaacgggggttttttgttcctttttttttgcaagcaatctggtatgattaaagcgatgtgccgtttttttt

SEQ ID NO: 174111 - DNA, 844 bp, Arabidopsis thaliana
  unsure (1)..(844): unsure at all n locations
gcacgcgtacgtaagcttggatcctctagagcggcggcgcttgtttttttttttagggntttttttttttttttttttgaaacgggatcacaaaatagtttttaaggatattaggtacccgtgtcgacattaagaacaaaatagaataacacttacaattacgtcccataatgatgacaggagctcaagggggggcaccatgaaaatcgtttatgaaccaaccttacttggaataaggaatggcagtttaaaagataaaaattactttttgggggggtgaagactccactttggcgggattacctccaagcaaaaagatatttttccttggggaggtaagggcggggcattcaaagcccaaaaccggggccgataacctttgtggggcgtaatttagccaccttttatgaggagtgttcgccacccaccggtgacaggcattttttaggggaacgaaccaagaagaggggggttaatagggtgggccctggggttaaaaaaaaaaaaaggagggggcccaaatttacaccctacgggggccggggaattcctgggtacggtatggtcgggcaaacgggggtttactttggaatgagggctaatttcaaggattcttttttttaacgggggggcttcgggaatataacaaggggcttttttgagaggttttttaatggggcacaatcggggggccgggccggggggggggcacaccgggatgggaaaagttagggagaagcaaaaacctgggggaccaacatttttcttcaagcaatacaccgtgggggatcacgggggcgggggaagggataagtggccaagatctggggggggggggcgaacc

SEQ ID NO: 174112 - DNA, 353 bp, Arabidopsis thaliana
ctatgacgccgcatgcacgcgtacgtaagcttggatcctctagagcgggcgccctttctttttttttttttttatttatctttttgtgatgtgtaaaatagaaaaaaagaggtaaaaattgtatacagacactcccaaagggaaagttttaaaattaaaatataagctaccacagacaaattttttaatatttactctaatgaagagtaggaaacccggggatgactttacaaaaaaaaatattgtggcttaaatggccaaaacgtcatcgagacatctaaccttcatatggggagataaaggtttaccataagtctttgtcccggggcggagggcctttaaccaaaaactcc

SEQ ID NO: 174113 - DNA, 526 bp, Arabidopsis thaliana
tatacgactcacttagggaaagctggtacgcctgcaggtaccggtccggaattcccgggtcgacccacgcgtccggtcacatccaattccgtgaggacacataaacccaaattatactgggtggctcaaacatgggtatgccctccactgccttcgccggaaaggctgagaagcctgccacatcagatatcactcggatgctgccgtgagaccatgatgattattgtcgtcgagctctagggtccatcatgcaacccatgatacggatctgaccgagaaaaggactcgggaccattctgcggggagcctccgagctaccttaccggagagaacgccggagactactagtgtgagactggtgttctattctccgaccaacagacctttaccaggaaccgagagcgagatgttatccacagcccatgggccatgctcagagccctaggctgcctaccccctgatctattgagatagaacggagggaatttccggagagccggttcggttcaaggacctatcacagatc

SEQ ID NO: 174114 - DNA, 637 bp, Arabidopsis thaliana
  unsure (1)..(637): unsure at all n locations
cttgacgccgcatgcacgcgtacgtaagcttggatcctctagagcgggcgccctttttttttttttttttttttaagaagctatgaatatattaacacggggtcaccatcagaagcagcttgcaactgagaagcatactgtaaattccacaagatatcttcgaaggacggtcggcttaaagattcaggtgaaacacattgggggatcagagttatcactcttatcagtgatccgtttcgacaagtggcttgtactgtcggattcaccattcttctcctcccttcttcgctctccaacgatgccagttcgtctcgtagaaatgcttcttctcttgcggattcagatgggccaacgattgattgtagaagaatcaatccaaagctgntaacatcggcttctagccttgacatttgccatgattttgcgatttctgggttatggctgggtgcttcagagacaatggacaaaccttattcactcagcttcgcaaaccgatggtgggtaagcaaaacgtgggttagtcttgagtctattgctgaagaatccaggaatacctccgtgggaagaaaatgaacagcttttgcaacacctgggaaaacttatgcctctctggccaattatacccttacctgaactt

SEQ ID NO: 174115 - DNA, 767 bp, Arabidopsis thaliana
ctatagttgagctatgacgccgcatgcacgcgtacgtaagcttggatcctctagagcgggcgccctttttttttttttttgattaaagaactctttttttagcataacatatctaaaaaacttatcttgagaatacagaacttctgaagcgagaattacaggtttgtccagctatactttgctacagaaatgtgaaaggctctttgatcaggggacttaatcgatccattgctctggcttcatgaactgcttgttgaaatcaaaccagccaatgccgtattttgcagccaatgagaccataatgtgatcaattcctttctccattaccttgaggccacacatgtaaacaagaggagtggctttcttgaacaactgccataactcgagctgcgattgcgccatacgaggccacatatacattgaccgctctttatcgggcgctgagcctctgcttatcgagtaatgcaccctgaagttccaggggcctctgctttatcttaaaaactcctttaggaaaaccaaaagctaggggttgggccaccagaaaacccaagctagccatgggcgtggaggactatggtgtcaaagacatcctccttagaagacctgatgggacattcctgcccttgggaagccgggggttttgaaaaaaggaggttctatgggtaagggcgtttaaaacaaacctacaaggtcgggaatcccggccgaattattgttaggggaaacctctagcgggggaggcccctgcccaaatttcttgcccg

SEQ ID NO: 174116 - DNA, 853 bp, Arabidopsis thaliana
  unsure (1)..(853): unsure at all n locations
gcacgcgtacgtaagcttggatcctctagagcggccgcgctgcggtttttttttttttttttttttttttttttttttttttntttttttttttttttatattttttttttttttttttttntttttnaatnaaaataattcttcctccccgggaagggaaattttttaccccctttcataaacggaggagggcccccccgggcgcttttattaacacacccctttttttttttatgaaaaaaaccccattttttttcccccagggaaaatcccagaaaagggttttcaaaatcccaagggggggccttttccccaacccccccgccccgggaaaagatgggacccccccggcgccccaaaaaaaaacccgcncgcggcccccctttgtcccccaccccccccccccccggggcccccccccccccccccccttttcccccttttccaaaagaaggtcccccccgcgcgtggggcgccctgacacaaccccccccccaaggggaaaaaataggggaaaaaaacgccttnaataaaaacccgggttttatttccccctccccccccctcctccgggcgccccccacaaaaaagaaaaagaaccctcctctccgcgngagaaaccggggggagaagagaaatttggtggaaacacccccncccccccgcataatcacccccccagaaaccgtggggnaccacccaggcgtcctttccccggttaacccctcttagagtggtggggacccccccccctcaacncccgggctactcttcccccctctcaacgggcccccgccaaaaataaccccccgcggtgaatccctcccccccgggagcgcaccccccgcgacc

SEQ ID NO: 174117 - DNA, 445 bp, Arabidopsis thaliana
cctatattaaactatgacgccgcatgcacgcgtacgtaagcttggatcctctagagcggccgccctttttttttttttttaagaaacataaaactctatcacccataagttttttcactacaatgaaccctgttttactacaatccattatcatcaacaagatgtaccagaaaagaaaaaaaacaagcttaccatgacttcatatgaacctgggcgtgaaagcgagcctcctaaactctgagaccaaaagcgggtcagagaactagactacacctactaagacaagtacattttgacatatacatcatagagctgctgcagatatccatcactgacgcctgtgcatacaagagacttacattatttcaaagtgaaactcgtatgccttcaacttttgcatcaccagttagttaaccacctgcctattatcagtggtgtctcggct

SEQ ID NO: 174118 - DNA, 244 bp, Arabidopsis thaliana
  unsure (1)..(244): unsure at all n locations
ctatgacactccatgcacgcgtacgtaagcttggatcctctagagcggccggccttccttttttttatatttnttttttttttttaacaaagattttttcattcacaccttttttcgaaacagatgaaagggaacaacactgtttgccatttcctttctttnccgtggggaaggagctgaaaatacaaaatttatttccgcctttggtgggtgtcctaaaagagaagagggtctccactaaaaa

SEQ ID NO: 174119 - DNA, 861 bp, Arabidopsis thaliana
  unsure (1)..(861): unsure at all n locations
ctatcttaaactatgacctcgcatgcacgcgtacgtaagcttggatcctctagagcgggcgccctttttttttttttttgaagatacataagtagaaattcatagaaatccgtaatgtgaacgacaatgtgaatttacaacagaccgaccaaataaccaacaaccccacacagggcttttactctaatttttctctttagttttttttgggggggggngacataacacagaaagaggcgtctttaaggcctccttttnggcatatataacttttcttatttattgataatcggaaaactctttttctttatcaataataaccttcttcctatgctccacactttttgagacttctgactctgtatatatatattatcagaatttcacaatggacaacatcttcctctctttttgccaacaagatgctggcactcacttattagcttgaaccaaaaccagtcgcacatggtttttaacacctctttattcacagaatgttcatacccgttgctgtnttttgggcctattgtttgttaagggaggggattttaaaaacatttgaacaatggcggggcgggccactgtttctctcgttctaaacgtccatatgggggacaaggggggattccggactgacctttctttaacccaaaccaaaatcgcctgggcggtgtggaaaaaaaacttttttcagcgcttggttttttaaaacaactttggtttcgggaaaccgttaatcgaacttaggattccaatgacggaggtttaggcccctttttttttacttggaaatatgtaaaagcccctgttaaaaaagctaggaaaacctggggataaaaattggggcggtcttatgaaaac

SEQ ID NO: 174120 - DNA, 848 bp, Arabidopsis thaliana
  unsure (1)..(848): unsure at all n locations
cactatataanactatgacgtcgcatgcacgcgtacgtaagcttggatcctctagagcgggcgcccttcgtttttttttttttttttttttttttttttttttttttttttttttttttttttgggggggaatctttgaaagttttattgaaaaatattaaaccctggaaacatatataaccgggaaagaaccaagatttaattttggccaggggggctgccgtcaaattgggaatataattcccaaattcataaattttgggtgcggcccacccggagagggaacttttgttcaccacgcaagcataaatttctaaaaatctcttaaaaacagaacatggggacacatctaaattacatttattacataatgggcgagggatttaacccggaagtttaaattattggaaatatgacccaaacacctgcatatgggttttatggcataggcttgaaggaaaaaccggtaaaaggggccccggctgcaacgcaaaggggccgacccgtaatttaaaaagctggagggaagacaaaggaaatgccacgaggcggggagaatttttttgggttttccaacaccccccttggggggggaacccaccggtttttttttaactttttatagaaaaaaatccgttcttaaggggggggggaataccaggacaaaaaggttccccctttgtggcgctcgcccttccaagcttatttttaaccggcgaatcgggttctttggggcccctagaggagccaattgactgcccatttcccggaaggtttggcacttggccttggccaaaggtttaaaaggggggaagcggaaaaggaacccctcaatttccccctaaaaa

SEQ ID NO: 174121 - DNA, 506 bp, Arabidopsis thaliana
gtaccgtaagcttgggatcctctagagcggggggccttttttttttttttttcgtgaagatttatatcgcttatttagtagggaattccaaaacatattctcttaaggaatgtgcaataaaatatagggagaacagataaggtccctctccccgatataggatttttatttttcatattacgtggagagaaaatcaatgagttagatcacacaagaacggcatggattttcttctttctctggtgggggggagtaaaaaggctcaccttaatacaagtttttccaacgggatggatcacagttccacgggctggtttggattaaacttgaagatgaagcgcattgaaccacttgttctggttggaccggtgcaaatcccaagcttgtaataaaggaagttgggcaacccttttttagggcctaattttctatccaaatgtatcctccatttagcccgacaaccgttaaagagagcaggcccaggtccccaccggaaggggtccttt

SEQ ID NO: 174122 - DNA, 469 bp, Arabidopsis thaliana
  unsure (1)..(469): unsure at all n locations
ctatgacctcgcatgcacgcgtacgtaagcttggatcctctagagcggccgcccttttttttttttttttttttaatccgcaacggtctcattacaaacataacagaagggtgaaaacggaacaacgcttttgatgatgatgtgtggtttttgtttcgagaagacatgccacaaggaacanaaccactgtgtctctctggtgggctgacaaacaatataagaagatcccggctctatgaagagaccggtgaaaaggggaagaaagaatcatgcggacttcaagaaccgcactcttttttcattcggctctggactgaccagctcgggaggacaaaatgatccccacgatgagaccgtatagagcaagagcttcagcgaaaatgagggataagattcttaccaacgaaaagctttggcctgtgagcattggccctgacaccagcatcgccaacgatacctattggccttt

SEQ ID NO: 174123 - DNA, 687 bp, Arabidopsis thaliana
  unsure (1)..(687): unsure at all n locations
catgcacgcgtacgtaagcttggatcctctagagcgggcggcctccttttttttttttgaaaaaaacaaccactccttaattcctctacaaaagagcgcaaagcccacaaaaaaattggcggggtttaggggcctttttgtttttaggagggcacccggagacaaaaaaaaagactttgtattttctctcaaaagggcgttggagaacacaacaagggcgctcggaaaaataataaaccgccctaacgataacccagcttaacaagaagcataccttcttcccgtttagaaaaacgtgaaaaccttttccacttcgaggaacacccccctttccaatgggcccccccagggaaggaaaatatcctcgtttcttgccccccggagaaaaacccctacctctttaagtctggggcttttccgcgccggaacggtacacacttcttgtggtttcttgttctcccccaccggagggggcgcaaaacctcggcgttgcttcaaaagcttgtgtctctcccccccctcacttattntcactctcccgaaccataagaaacaattcgaccgctcggcggcagaagtctcccccacaacaaaaccccccccttacacctcccttttagagaattctgcgcacggcgctatcccgcgagtgacacacgctttgcgggaggacccacatacggagcg

SEQ ID NO: 174124 - DNA, 415 bp, Arabidopsis thaliana
  unsure (1)..(415): unsure at all n locations
gacgtcgcctgcacgcgctacgtagcttggatcctctagagcggtcgccctttggttttttttttttttttactagagcttgttaattaaagggggcnaaaagaaacacatagaaactaattcatgcgaacaaaaatgttacaacaacaaaatttaaatgtgttcgatcgaaataatattaaaaacacacatattttaagcagtttttgaggtgtggatacaatgactccacacgttatccctattattcaagtattgggtttcaggggcaattaaccttggtctgttagcaatatatttaatgggattatcgggaccacactttttcttcttggacaagaccttttgaagaggattgaatgaggggtgcgtttgggaaagacacgcgggggtatgcgggactcccccccggcgt

SEQ ID NO: 174125 - DNA, 381 bp, Arabidopsis thaliana
  unsure (1)..(381): unsure at all n locations
aatacgactcactttagggaaagctcgtacgcctgcaggtaccggtccggaattcccgggtcgacccacgcgtccgcttttggtgttaaccttattgagttactcaagaagctctaaaaacaaacaatgttcctatgaagatgatttatatgtaaacattatctcatatctccttccacggttccaaaactatgctgtttaataatggtttttacangaaatctaagggagatggttatngaacactgggctcgtaaaaaaaactcctaaatgggcattgaatataatnnnnnnttgaaggtggagacgggcccctcaattcaagcttccccaacggatccttcccaagaaggaaaattttttttctcgataattctaaat

SEQ ID NO: 174126 - DNA, 364 bp, Arabidopsis thaliana
  unsure (1)..(364): unsure at all n locations
aatacgactcatttagggaaagctcgtacgcctgcaggtaccggtccggaattcccgggtcgacccacgcgtccgtgttctttattcttattctgtaaaaatccgactggtttctgagggctaaaagatacatggctaaactactgtgacatgctactgttctatacatacctttangaaggacggaaacgtgtatccctactacatatcaatgacgagcttttgcgagaggattatagcatactaggattcttacaagcactacaacgtgatcattggatataaagcggtgtgtgtatggaaaaataaccctcctggtgaataggtgcagggatcttgaccaagaaggaacagtccaacacta

SEQ ID NO: 174127 - DNA, 408 bp, Arabidopsis thaliana
  unsure (1)..(408): unsure at all n locations
tgacgtcgcacgcacgcgtacgtaagcttggatcctctagagcggtcgctcgcgagctagaactaggtcaatttgctacaacttagaaaatggcggcggctacttcatccatcgctccttctctttcatgcccatctccttcttcttcatccaaaaccctttggtcttccaaagccagaaccttggctctacccaatatcgggtttctctcgtggggggggcaagnctctgaggtcgcttactgccacacgcgctggaaatggcgccactggatcctcccttgccgctcgcatggtttcttcctctgggggcaaagcccctgtttctcttcgattttggaccacgccccccaaaaaggggaaaggcgggcgtggctggggacagccgccgggtggggacagggggccg

SEQ ID NO: 174128 - DNA, 523 bp, Arabidopsis thaliana
aatacgactcactttagggaaagctcgtacgcctgcaggtaccggtccggaattcccgggtcgacccacgcgtccggagaacccaaggagtagaacttgggacccacttcttggtccgcaaggaaaccaagcgcctgctggctcaagcaagattgaaaactggagctcccgaatcagagaaaagtatggtttgaaccagagtccaccggtgaacccgaaaggttgatgagggcaaataatcatgtttctaaaactgcatgtgtccatatggtctctgtgaagctctctttctctatgttttgctctttgcaacttctcgagtgtgcataaacatttactcaaaacagtgctggattggtgttacacatccgggataagccttttccgttgtgggtgtgcttgggccaacctggtttggaccgcgcgggagttcgttgcgacctcttcagcgggcgccgttctttctctctgcgtatcgctgtccactcccggctccgcgcctctccccccccgccccccccca

SEQ ID NO: 174129 - DNA, 417 bp, Arabidopsis thaliana
  unsure (1)..(417): unsure at all n locations
tacctttcttcttccttcttcatcattcatcattcatcattcatcattcatcattctcatatctctcttcttttactggngatcacaatatctatctagttctaaattgggaatgatagatcctaatccttgggtggggcaccccttnaccttaagggacttaaaaccaggctccacatagcgatagagagagagacctcgtattgggctattcatccaagtctctttttttcggctcaaaggggaaaaggggaccttttccaatcctgggtcctttccgtctcctataaaaaaacgggggtcctcccaccactctccgccatcccccagaacgggcgccccctcgcccccctccaccccgcccccccccaaccccggccccgccgcccccccccgccccccccgcccccccccccc

SEQ ID NO: 174130 - DNA, 511 bp, Arabidopsis thaliana
  unsure (1)..(511): unsure at all n locations
tgacgtcgactgcacgcgtacgtaagcttggatcctctagagcggtcgccctttttttttttttttttagctataattgtggtggtggnttttactttttagtcattcaaaagatacatatgatttagggagcatgccattgagccttacattgtattgaaacaataaaacctctttgagccttaatttggattgggaanacgtttaatttgggtgtgggggnnaacaccaggaggaaccctttaaaaaaacaccccctcgactgggggtcacttaggggcccacgcgcttttttgtgattgtggttgggttgttgacgtgggttgggtgggtgacggcggggccctgcggtctctgtgggaggcggtggcgcgcgtgccgtcggggtggccggggcagggggccctccggtgtgttgcggcgctgcccggcgacgcggggcggcagccgtcggctggcgggcgtggagcacggggctcgcggtgtgtgtggctctgggtgttgcgtgtgc

SEQ ID NO: 174131 - DNA, 526 bp, Arabidopsis thaliana
aatccgactcactttagggaaagctcgtacgcctgcaggtaccggtccggaattcccgggtcgacccacgcgtccgggcacagtgaccaaaatcacacacttcacaagaaacaacctatggatccaaatgaatctccaccaaaccaatttcgccacgtggtggccatgccttatccaggtcgaggacacatcaaccctatgatgaacctctgcaaacgccttgtccgtgggtaccctaaccttcacgtgaccttcgtcaggcacagaagaatggctcgggtttattggacccgaccccaacccgaccggatccatttctccactctccctaactcatcccttccgagcttggcagggccaaagacttcataggctttattgatgccggctacccaggatgggaagaaccattcgagaagttttttgacaggccttaatttcacccccctggcgaggggaaatattgcggcgaccactttcccgtaatttgtgggcgtgggccggaaggcgccaaaagaaaagggaa

SEQ ID NO: 174132 - DNA, 479 bp, Arabidopsis thaliana
actatagaagagttatgacgtcgcacgcacgcgtacgtaagcttggatcctctagagcggccgccctttgggttttttttttttttttttttttttttttaacaacgaataagttatttgtatacttcaaaaataataataacaaaagatataaatgaattatatagtacgtataggaatgtattagaaaaaaaaaccataaaacaaaaaaaatgaaactcattatacaaggggtgggaggctccctcctgcaaggggaacacacactcttcatcttgggagggtattatacgttgcagtagtagccgtaagtttactaaagcttcttaggtagattatatgtcttcttgagaaacctcgtggcagattcgtcgttacgggaacacaaaacacgtaagagtgtgtttggctccatgccattccactggcctgatgttggaggcaacggaagcctcgacttagctgaagaaccatatgct

SEQ ID NO: 174133 - DNA, 430 bp, Arabidopsis thaliana
ccgcgtacgtaagcttggatcctctagagcgtttgccctttggtttttttctttttttaaatcaaatggtttatctactggtaatgacaatttttgagtgcaccattatcaaatactggtaagatcttggctttacttttttccttggggaacaaaccaacgagaagaacaagacaattgtccaaccaaacttgtattttatggtgagagttttttgccgccttagatatcgagagaagcgggcaggagagtttagtctatttccctctaagaattgctcaatcaataaattgcagattgacttttgcgaagctgctacttcgcgggcaggaaaagaatcctctagccttaagcttaaccatacgtacagatccaaaaccttgtgaatggattcaagttccttgagttctggaggtggttttggaaacct

SEQ ID NO: 174134 - DNA, 499 bp, Arabidopsis thaliana
ctctcgaagagttatgacgtcgaacgcacgcgtacgtaagcttggatcctctagagcggtcgccctttgggtttttttttttttttttttttttttgggcaaaaaaattacttattcatatatataatagatgaaataagaaggattacaagttattacataacatgaagtttcttgacaagagattctctaccatgccataaatagagagaaatgcatttttggagggtgggggcaaccacattttgatttacataacgatgcttttttaggttttcattcaaggctacaaacatcaagttcacctatgttgtatggacattaaggtagagcaagaggagctcagcttaatctgaacaatgtatccatatttcctaaatcatattgccaaggctgcaaattgggcatcgggttcttgggaacaggtggttgatattttgttgccggcggaactgagaggtggtttacgcccaccacacctactcagtccacccacccc

SEQ ID NO: 174135 - DNA, 460 bp, Arabidopsis thaliana
atacgactcacttttagggaagctcgtacgcctgcaggtaccggtccggaattcccgggtcgacccacgcgtccggtttttttttttttttgcattctaaggagaagaggtgatcgaaaccaaccacacgggaggagcttatgccattttcctccccggggaaggtgtaacattcacacatctcctaagctcagacagctagatagatattggagtcataattagttgcggaggcctcacagaagaagagttcctttgttgataaagctgctgcaactccacctgtcaagcaaggagccaacagaccattgtggtttgcttataggagagcctctctaactgggatgggagattaccttggtgaatatgggattaccccctttgggttgagtgaactctcaaagtgagcgtggtcggttccgagtcagcggccggtggtgactcgccttgtatctgcggt

SEQ ID NO: 174136 - DNA, 339 bp, Arabidopsis thaliana
  unsure (1)..(339): unsure at all n locations
gacgtcgactgcacgcgtacgtaagcttggatcctctagagcggtcgcccttttttttttttttttttaanncaaacattnatcacttagcgaacatatatttcatgcttgatggaggttgatcctagctgtaagtccccctcatcttcttactttgcacccacaagagcgaatatttagaatcaagtgggagcgcggcgagaaaaactttttttttggggggggggaaaaacaacacaacgctcttcattaaacataacaaaacccctctacaactgaaaatgtagcatggaatgcacctctggtagcgccatcccgcgtctaactgtatctcgcccg

SEQ ID NO: 174137 - DNA, 428 bp, Arabidopsis thaliana
atacgactcactttagggaaagctcgtacgcctgcaggtaccggtccggaattcccgggtcgacccacgcgtccgggagctaattctgagcgcagaactttgtctctggtgtgtctgagacccatatatcgacggtagagtatgtttgcatctatcacgtacgctagtgcctatatcctagtagtacaccgatgaggatgtaaacctgtaaacgatgatcgggtgacgtattgaggatgagaagtcagcaaagatgacaatcataagttattggctagacctgacgaaggcactggtacttcatctgaatccattcttctcacagagaagtacatggatgaagaatgtgatcttctttccgagatggctggagctgaagaaaaggagctatattagttgctggatcttcaccctcagaatgacttgaa

SEQ ID NO: 174138 - DNA, 490 bp, Arabidopsis thaliana
  unsure (1)..(490): unsure at all n locations
gacgtcgcactgcacgcgtacgtagctnggatcctctagagcggccgccctttggtttttttttttttttttttttttttttttaaaaaaaaaaaaaaaanannaagaannnnggggggaaagaatttaaaaataaatttaccccggggaatatgaccaaccaccttagtttccaatcggggggaaaaaccggcattaaaaagcgccttttttttccgggggggggggccaaccctcctaaccctccttttccaaacatacccccctgccctttttcatctacacacccacactccctcagctgcctccgcaccgcggcgtccggggcccagcacggccctgtgggcggtgcgcgccggccgtcgccggccccccgcgccgccgccgcgcgcggcccgtaccccgacgcccccccgctcccgcacacgcccccgcctcccccgccgcggccggcgggccgccgcgcccgaacctccccatggaccgcctg

SEQ ID NO: 174139 - DNA, 505 bp, Arabidopsis thaliana
gaagagttatgacgtcgcctgcacgcgtacgtaagcttggatcctctagagcggccgcccttttttttttttttttgataaggccaaaagatgcagtaaaaacatctcaccaacgacaaataaacgtgtcaacaacaacaatgaaaaacatcccgaataacttaaaatgctttccagctaaagattctgtgatctgcagttctacaagaaacataaactcagtgggatctaataatgaaaaggcttttggatttcttaaacactaagcagcagcttttgctgtgtggggaagaaaagctccacaaacctacaacatcttggaataaaaggaaaaacactaagccgctttggctcgggggagaagaaaagcccccagcccagatcttggaggaaagcacctggcactctacacttccatttgtctcgaacgccccggccatggtcgtgcaccctcggtgttccgcccgttgtcggctggcctgcccgccgccgggctgtccgccgg

SEQ ID NO: 174140 - DNA, 535 bp, Arabidopsis thaliana columbia
atgatctcgccggctactatccgactcactttagggaaagctcgtacgcctgcaggtaccggtccggaattcccgggtcgacccacgcgtccggctgtctacaactcttagtggtaactatggcttccctctgtgcatctctgggatcactcagcaattaagtctgtccaaagaaatggcagatcatgacaagagaaggaaggtgatacagaggagaaggagatcagaaggtaaacatgagtacaagagcgcatggtgaagaagatgtggagaggcttcaagagaatgaagatgttagagatctagttgctttactacaagatctaggcttgtggagcttttcttctcacacagccaaagctgcttagtgtttttacttttattacaagatgttgtaggtttgtggagcttttcttccccacacagcaaaagctgctgcttagtgtttaaggaatccaaaagccttttcattattagatctcactgagtttatgtttctctgagaactgccaaccaccagatctttaacttggaa

SEQ ID NO: 174141 - DNA, 522 bp, Arabidopsis thaliana
tgatagtccggcactacccgactcatatagggaaagccggtacgcctgcaggtaccggtccggaattcccgggtcgacccacgcgtccggcgggtaacccacatttttgggttaacgaggatggatcgtatcaagaagaaggacagaagaataccaagggatacatatggggcaaggctgggactaagttactttgtgctgtattgtcacttcctgtaccggcaaaatctaccgcgaatgcgtgtggggaacaactctatagcgcaaatagcagaagcattctggaccatcttgagcataggactttgcaaaaaattcttttggttggaaacaggggttctggaactagcacaatattcaagcaggcaaagatcctttataaggacgtaccattcttggaagatgagcgttaaaacataaaggtgattatccacaccaatgtgtatgggtatctccggactgttcttccaaggcccgcaagcgtcttcaaaaacatccttctccctttccgcccacgcgcgg

SEQ ID NO: 174142 - DNA, 513 bp, Arabidopsis thaliana
atgacgtcgcctgcacgcgtacgtaagcttggatcctctagagcggccgccctttgtttttttttttttttttttattggtctcttaaaaaacataaatatatatattaaaatttctcaaattactaatgccttcggctggaaattttaatagtaataatgaaaatactaatattgatagatgagtttccgataatgccctcagacttttaagggggggggcatcaaagcctgaccaaacttacaaaaacgcgcaccaatgttccacgaccttcaagcttctaccgtcacctccttccgactgtcaaccaacgcccctgccccaccaacactcacgcatatttgcaccccacaccccctcccccccttttttactgccccccctccaccgtcttctctgtccgcttggccctccgccggttcggcccctctcgggttgccgctctacgtgtggtgcctacggatggcccctctcccgcgccctccccgcccgcgccccttcgatcctcctcgt

SEQ ID NO: 174143 - DNA, 551 bp, Arabidopsis thaliana columbia
atgatatgccggctacaatacgactcactttagggaaagctcgtacgcctgcaggtaccggtccggaattcccgggtcgacccacgcgtccggtaaaccttctgatgtcctctaaaggcaatgttcttcggtgtgatgtgacggggaaggttttaatgaaatgtttcctttcgggaatgcctgatttgaagttggggttgaatgataaaattggtcttgagaaggaatcagaaatgaaatctcgccgagcgtaagagtggtaaaaccattgagcttgatgatgtcacatttcaccagtgtgtgaacctgaccagattcaactccgagaagactgttagttttgtaccaccggatggagagtttgaactgatgaagtatcgaataacagagggtgtaaatctgcctttccgtgtattaccaacaatcaaagaacttggtcgtacacgtatggaagtaaatgtcaaggtcaaaagtgtgtttggtgctaaaatgtttgcccttggggtcgtggttaaaattccagtgccaaaacaaacagccaagaccaattt

SEQ ID NO: 174144 - DNA, 492 bp, Arabidopsis thaliana
  unsure (1)..(492): unsure at all n locations
tcgacgcacgcgctacgtagcttgnatcctctagagcgntcgccctttttttttttttttttagaataaacaataattttacgaatgttgtttaggggatttaactcatatatgcattatatatatcccatatatataatctttctacaagcaataacaacaaagatcatcaacaaaccaatcatgcggntctaacattcctattaaggggggnggccccaaccaacccaaacaacaaaaaacaaacccccacanacaacangaccaaaagaccccaggccccaagacccgccccccgacaagacaccgcccgccggccgcggcacagaccccgagccgagacaccgccaccacagcacgcaacccagaaacaacaccaacagaacacgccgccacaccccgcgaacagcgacaggagcgacccccccgccccaaacaccccaaaacacaaaggcgggcaaccgccgccgcccgacgcccccgccaccccac

SEQ ID NO: 174145 - DNA, 526 bp, Arabidopsis thaliana
  unsure (1)..(526): unsure at all n locations
ctatagnagagttatgacgtcgcctgcacgcgtacgtaagcttggatcctctagagcggccgcccttttttttttttttttttttaatcttattctaaaacttatcattattcttgcaaacgcgttataagagcagcaaattcattcaaaggaggaacatagactccttagaatacctgaacacaataggtttactgatgaatatgaaacaattattctgaaagtctagagaacaagcttattccttcttcaaggtgtcttcaacttggggcgcgatggaagcaactgataacaagagataagtgagggggtacacccgtaagcctccgggcctcgaggccttcgtggatggcaccctccccggcgcgtccccctgactcgggtcccctccccctcgcgtcgcccccttctcagagggccgcccgcacccacctcatttttcaccccgcgctccacgttgtttctgttcccctttccgtcctgcccccgccgccctccgcccatcgtcccccgcttttcttcctcc

SEQ ID NO: 174146 - DNA, 487 bp, Arabidopsis thaliana
tgacgtcgcctgcacgcgtacgtaagcttggatcctctagagcggccgccctttgtgttttttttttttttttttttttttttttttttttttttttttttttttttttttttttttttaaacagggaatttcccattagggggttttttttttttaagaattctttttttatatcgctttacagttttttttttggggggcctttttaggaacggggggagttccatacccccccttttgattttaattttgttggaaaatccggaggccccaagaccgcccttaagattccgcaaggcccaaaaaagggcccggggggaaacttaccccagttaaggggttggggaaccccctggggtatatatttgggttttttaaacagacttatttccggggcaatcctgggccagggttttttaggagaggccccggggttaatagattcctaaaatggtttttttggctgggggggaggattcggggttt

SEQ ID NO: 174147 - DNA, 480 bp, Arabidopsis thaliana
gacgtcgcactgcacgcgtacgtagcttggatcctctagagcggccgccctttttttttttttttctttaaactttatatatataagaaatcataaagtaaaataatgttacacttctaaaacctaacgagttatttcatcattatctcagtgattaccacaaatgaccatcattaaccttcttgttcatctgctaaggagttttctcctggggggggggaccaacccccccaccccgccgtaaaaactcgccccccccgtctctcgcctctctatacccgatgcgaccctctatgccctccttctagcttcctcttccctcctctcttccctgtttcttcactgccttcccacactcacacgctgtttcgctcttttggataagtcatttttccttctctcatcctactttactcttatcgttctttagcgtttttttgtttattttttttatccacagctttttttctcagccctctc

SEQ ID NO: 174148 - DNA, 507 bp, Arabidopsis thaliana
atgacgtcgcctgcacgcgtacgtaagcttggatcctctagagcggccgccctttttttttttttttttttttttttttttaaatggaaagcactgtaaagaaaactgattgagttatattaaaggcgggcaaaaacagatgtcaatcctaagctggaaaaacattactaaaactgcagagaaaaaaagctgctttcacggatactttttgtgacggagtaaaaaaaaactaccaagttgggtacagaaaattaaaccacttgatgtttatggctatcatactaggcgttgttggcggtgaaattccttgcgaccctcatgggagctaaaaactcagggtacattcctttgggggggggtaatattgatgttctggatacctagacccgagcattctatgctattcgctcattgtttgtctccccgcggattcaattggcttgacccggtcgggagaacttgggcttggcgcccaccacctcccctcactgaccgtttagggtggag

SEQ ID NO: 174149 - DNA, 510 bp, Arabidopsis thaliana
  unsure (1)..(510): unsure at all n locations
tgacgtcgcacgcacgcgtacgtaagcttggatcctctagagcggtcgctttttggtttttttctttttttttnntttagaaaaagactcaaaaattctttcaataacatgtagtcaacagaaagtagtcacattctacagtataagggaaaaaaagagacaagtcagaagagaagaaagtgatgattcatcaatttgagaattgtatccttccagggggaatgngancgcggttaanccattaataaaatagttccgggcctggggatctggaagagacacatcccttggcgtccgcgaccagacggcgggggggcggtgcggagcggggtcggcggagccggccttcggcggggacgcgcagcccgtgcctggctccaggcccgcctcctcgcttggcgactcttcgcagagccggcgggcggcgccgccacaacgtggtgcgtgggcggccttgtgcggatgggcgggtgtcggccgcacggcgccgcgctacttcgaaccgcggcc

SEQ ID NO: 174150 - DNA, 546 bp, Arabidopsis thaliana columbia
  unsure (1)..(546): unsure at all n locations
atgatatgccggcatactatcgactcactttagggaaagctcgtacgcctgcaggtaccggtccggaattcccgggtcgacccacgcgtccgtacggctgcgagaagacgacagaaggggaccaccgattcttgcgtcagcctcgtaggtgaacgaaatggagtgcctatcggtccagcggctggatcggattggcttttgatatatcccaagggtattcgtgatctcctactacatgcaaaattgaggacaatgatcccgtcttgtacattacagagaatggagtggatgaagcaaatattggcaaaatatttcttaacgacgatttgagaattgattactatgctcatcacctcaagatggttagcgatgctatctcgatcggngtgaatgtgaagggatatttcgcgtggtcattgatggataatttcgagtggtcggaaggatacacggtcccgttcgggctagtgtttgtggactttgaagatggacgtaagaggtatctgaagaaatcagctaagtggtttaagagattgttgaaggagc

SEQ ID NO: 174151 - DNA, 500 bp, Arabidopsis thaliana
aatacgactcactttagggaaagctcgtacgcctgcaggtaccggtccggaattcccgggtcgacccacgcgtccgtacggctgcggacgacagaagggggaggaagataaagaaagttggaaaatggcaaaccctagaagagtagtgatcgagaaccagagattgtcacctttaatcaacctactgaagaagcctcaagcgattcctctgcttctctcgtttttcctgggggggacatggatctccctcaggttacaacactcttcacaatcacacgtgtgttggtgctgttgacatgcggaatcataccgggaagattctttgtttatctgacacgcgtcgccttgcgcctccgtccggttgttgtgccctttctgtctattaccgcatgcctgaccccgcatattctgcctcttccttttctcttttccgtctccctcttgtttttccttctcttccttgctcactcgaccatcctctggggactttccgtcgctcc

SEQ ID NO: 174152 - DNA, 502 bp, Arabidopsis thaliana
atcgactcactagggaaagctcgtccctgcaggtaccggtccggaattcccgggtcgacccacgcgtcgccacgcgtcagagacacagagggtacaaagcaatttgagaagtccatgtactgtaggcttacgggtctaggatcacgagacagtctcaagttagaagcagaactttgtctatatggaaacgacatggagcaacacatttctggtggtgaagctgatctcacatgggccatagataatcgtataagagccgatggtggacttcttgacgcggatgagattcttcagcacattatagatggacctacaatcagactggacgcattgttttgctcaggaccacccgcaaggtcacatagcgaggttcatgatgagagtgggaacaagactggagagatcacatgtggacgctttagcccgaacctgtataggacatagtcatggcattgtgaactcaggtcatgacatgactgatactaaagtcaagatcttggga

SEQ ID NO: 174153 - DNA, 418 bp, Arabidopsis thaliana
ctatcgaagattatgacgtcgaacgcacgcgtacgtaagcttggatcctctagagcggccgcttttttgttttttttttttttttttttttggatcccaaatattttattattataaaagctacaagaatacagtttctaatacatgtattagcaaaaaagtaacagtaaaaccaagggctacacacttttcttaaacaggaactttggagtccactgatttgagaacctggtcacccatttccttgcatcccaccagtttatttccgggggagtagatgtctccggttctgaaacctttgttcagagcatccacgaccgcgtcttcaatcatctttgcagccttttcttctccaagtccatacttgagaagcatcgccgcactgagaatggtggccaatgggtttgccttgtcttgt

SEQ ID NO: 174154 - DNA, 521 bp, Arabidopsis thaliana
  unsure (1)..(521): unsure at all n locations
gacgtcgcctgcacgcgtacgctagcttgnatcctctagagccgccgcttttttttttttttttttttttttttttttttttttataagnagagngnggggggggaaaaagaattcagattaattatgaacaaaatttttaattaccttttgagagattgatgttttttaagggtataaaattatagttacctccttcacccttctttttcgggggggggccaaaactcctccccctcnatagcaaacccccccccccatacacgctctccgcccacaaacaccccttgcctccccgctccctacatcccgccgccgcctccgcgtcccgatattcgcctgtccctctttcctttctccttcctcctttcctccctcttgtgctcttcgctctcgcctctttacatgcctccctcgccataatccaccctcttcccacccgctctcgtttaccacctcctctttttgccttcacccccgtctcttcctcccctccccgccccgcgcctccctctccccttc

SEQ ID NO: 174155 - DNA, 538 bp, Arabidopsis thaliana columbia
  unsure (1)..(538): unsure at all n locations
aagattttcgggcactaaccgcactcatttagggaaagaacgtacgcctgcaggtaccggtccggaattcccgggtcgacccacgggtccgtgcgggtgcgagaagacnacagaaggggtaatgccagaggggatatctccgagtctggcgttcatagtgcagtcttgttgggtggaggacccaaacatgaggccaagcttcagtcaaattatcagactgctcaatgagttccttcttacccgnagtggtgcgcctcctcagcctttgcctgagactgccaccaacaggaccaatggccgagccatcactgagttctccatccgagcaaaagggaaatttgccttcattcgccagcttttcgctgccaagaggaacataaactcttaggtacaagaaggggtcttttttgtctttgccactgccactggtttggtggataaatgacattagcagagagagagaagtagaaaggtagacttacttaaagtctatagcggagttaagtactcaatcttctttttggcaaggggataactg

SEQ ID NO: 174156 - DNA, 529 bp, Arabidopsis thaliana
ttaggacaactctagaagattatgacgtcgcctgcacgcgtacgtaagcttggatcctctagagcggccgcttttttgtttttttttttttttttttttttaaacctcaaattttataaatttttatgaatgggaaaatcccattaaacatcgataaacacatgcttgtataaaaacatacgattaaatcaaagcaacattctcacaatggctctagtcacattagagattttttggggtgatttagtcaaactagtcaacggagaactcccattaaaccctccttgacaaacagaagcttcgacaccggcgtcgatcacaccgtgttcgccgaatttggggactcctttagagatagcttcaatggcttcgggaacatcagcgtttaagatcggtttgtatcttccactacattcatccaaagcccgttttagttctgggctctttttatatagaccggtgatctcgttcaaagtttttggtgccagcccctttgttttatcaatgaggatgagagccaggcccaaag

SEQ ID NO: 174157 - DNA, 284 bp, Arabidopsis thaliana
atgatatgccagcactaatacgactcatttagggaaagctcgtacgcctgcaggtaccggtccggaattcccgggtcgacccacgcgtccgtacggctgcgagaagacgacagaaggggactacacgcagagctagacacacacttatatcaactgatcttctcccaaagcctgagaataaagaaaaacctccatctttttacatatatagataatcatcaaagaagatgaagatgatgaaggtggtgatgttgatcgtgatgatgatgatggtgatggtgatg

SEQ ID NO: 174158 - DNA, 444 bp, Arabidopsis thaliana
  unsure (1)..(444): unsure at all n locations
tgacgtcgcctgcacgcgtacgtaagcttggatcctctagagcggccgctttttttttttttttttttttttttttttcctataaaggtcaataatatatgcatgaccagggttgtatccacttttgaatgttgagtaaattactattttacatggattgcccatgcattgagaagatgctatgttttatgagagctctatgattttttttggggggtgggctanattcacacaaacaactcttatattttccttctcaatcactcttatggctggtctcaaagtctccgttttcagaggccaaaacagggcgaaggttgatggctggcaatggcagcatcgcactggttgcccggtgtggggaatgggcgggagatcaggtgggggggagtgggtttgctgtacgggtcgcgccgcggtgcgccgtcgtaccggggtctatcc

SEQ ID NO: 174159 - DNA, 481 bp, Arabidopsis thaliana
aagagctttgacgtcgcatagcacgcgtacgtaagcttggatcctctagagcggccgctttttttgtgttggtgcctttttttttttggagttaaccatgcggatacgtagaatattattgaaattgaactatatcattatccaatatcccataaatttttattacattaaatcttctttttgaccaaaccaatctccatgaacaaaagatcgatgttttttcaagagactgaatttagaaattggaaactaaaaagaaagggaatcgatctcagctccacatttcccatgggggaaaaccggccattcgattaaacccggaaccagaccgggcaccacaaagataggcttgggacacattggctattaaccagaccctttttgggtccactttaccccagggaggggaacccaatttggctctttttattcgaaattttttttggctcccccaaaaagggaggtctctccacccccgggt

SEQ ID NO: 174160 - DNA, 523 bp, Arabidopsis thaliana
actcactttagggaaagcacgtacgcctgcaggtaccggtccggaattcccgggtcgacccacgcgtccgacggctgcgagacgacagaaggggacataaaacaaaaggtatagtatataccataaatctccgagattcttttgatgtatctgtccatttcattattacacaaactaggaaactgatatctctctattcacattcctctgattctatttctctggggtatattcacccattaaccatctcaatcttataaccctcaaaatcacaatcttctcttacaaaaaactttgaaagatgaagattcttctagtatcattgtggtttgacaggctcggcggaaccgtggcgtttctgccatggcttgcccgcgctctgtcagaccaacgctgccgcgtggtcggtccccctgattgttgcacggtggtgttggcgttgtcacgtctatagttcccgctagggcgggtgcgacgccgcgcgggggttccgcgcagcgttggtttgtcagccgcatgagcg

SEQ ID NO: 174161 - DNA, 516 bp, Arabidopsis thaliana
  unsure (1)..(516): unsure at all n locations
ctatangagagttatgacgtcgactgcacgcgtacgtaagcttggatcctctagagcgtccgctttttttttttttttttttttttttttttggccgaccaaatttaagtcgaaccctttggcagcaactctttagtatccatatccaagatacattaaacatcagataaattcaaaggaataggagaattacacattctgatttcagcggtgagaatttttcaaagaccgagaataagcataccgggatgttactaacgaaggcggaagctcaggttcagttacgcttgggtatctttgtgatgatcggtagtactcagccaatgaatccggtgttacataccgggaatacaggtcatcatcttgtctacctggagaaaccatgtatgtccttgggggtctttcaagagcatggcgctcacaaattgaatccggtcctctgctggggaatcccgagcacccgtggattccgttgcgccggccgagggcgcccctacatgggcccgggtggaggga

SEQ ID NO: 174162 - DNA, 537 bp, Arabidopsis thaliana
tctaatacgactcactttagggaaagcacgtacgcctgcaggtaccggtccggaattcccgggtcgacccacgcgtccgccgggagtactatacatagaaggggttcgtactcttgatacttctgctaccaacagttcttcagtccagatcacgtcggccacatacagacaggagccgataactgcataaatatcccctccgccgcggcggagattactcttgtaaaccgagagcttccgccgcggagtctctccctcacatcctgcaaaaaattggaaggatgtggaagggtggtgcagctgcggtccacctgcgtctccggattctgccctcgcgccgcgcgatgcgttatgtagaccggcgctatatccacccgttcgaccaacggttgatgtccctcccgagctcttgcagcacgtccccatcttcctctttccctgctgccgtctttcatttcctcgccgtgttctgttcggagcggcggtataaacttatcaacgggtcgcacgaggatccgctccatctggtcaacacag

SEQ ID NO: 174163 - DNA, 515 bp, Arabidopsis thaliana
  unsure (1)..(515): unsure at all n locations
acgtcgcacgcacgcgctacgtagcttggatcctctagagcgttcgctttttttttttttttttttttttnaaaannagcagaaaacacaagactnctcttcattgaattaataatttccacaaaccaagcatgatttcttagccttagagaatttaagacacccatatttctcaccacttacaggaattcccagagcaccattttcgtcattgggggggggacacacccccccagaaacactctaacaacacccccccaccccaggggggcgaagggaaaccacaccctggcgcggcgccgcgcggcaagagcccggccaaagattggctgaggtggagcttagggcaatccggctgcgcacctggcacggttctgatgatgttggaggcggctccgtagtggtatggtggcagcgaaagatccatcgtattcgggctcgcgcgggcgaccctggtgtacgctagtaccaggagccagtatgtcagtgctccctgctgccggcgtagatagcgt

SEQ ID NO: 174164 - DNA, 567 bp, Arabidopsis thaliana
atgacgtcaatgcacgcgtacgtaagcttggatcctctagagcggtcgctttttttttttggcctccaaaaaaaacccacccaacacaccaccatagaagcgtttacagaaagaacaacggtatgtctgcgcgcttagtagaagaactacacgcgctccttataaaccgattggataggtcttagtctctatgtctgttcaaaccacccaggagcgaccagatttcctccttttggggggggggaaaaacatatgaactaacctgaattaagcagaactcctaatactcacatctcgtcttatataatgtgcctcaattaatccgctaaactgccatacttgaataagtattaattgtttattagttatatctccaacgatacatcgaataataagtgtggggaggtaaacttactgaccccgcccgcaacagatttccatcactccgtccatttcacaactttaatatgactgtgaagttctatattttactacatatacagcttagaacagcagtataataacactaacagtgcgcgccgcactttacagtagcgtgtttaagtt

SEQ ID NO: 174165 - DNA, 425 bp, Arabidopsis thaliana
actatcgaagattatgacgtcgcacgcacgcgtacgtaagcttggatcctctagagcggccgcttttttggttttttttttttttttttttttttttttttttttttataaaaaaggaacctctaaattccttttaggaaacccacacgggttttgtatctttttaaagaccgctaggaaacctgggccctccaagaatttgttcattctaccctcaagaatttaaaggcgggggtcttaacaacaggaattatgaatagacttccccggctcttttaaaattgggaatcgacaaaaaaagggaagattggaatacctggtatacgctttggttcctaatgcaacggggctgaccagggaccccttcttggcccaccgctttttggaagtgtaaaaatggttcaagagggctgatgtatcctctt

SEQ ID NO: 174166 - DNA, 537 bp, Arabidopsis thaliana
  unsure (1)..(537): unsure at all n locations
gacgtcngactgcacgcgtacgtagcttgnatcctctangagcgtcgctttttttttttttttttttttttnnnnnnccgaaaaattatatagatgtatttatgtggggnacatacaattaccatgtcaataatctattacaagaagaaactgagctcatgtgtgggggtgaacataaactccctgtcaccaaaaaccccgccttttttttctggggggggggcaaaaccacacggccacccccaaaaaaaaaaaccccccccacacgacaccacccaacaccccccataacccacaaacacccgcaaaccccgacgcgaacgcgcgcaggggcgcgcgaggcagagaagcaggcggcaagaacaacacacagacacacccgccgcgaaaggggaaggcgagcccgcacgcccgccccacaaggccccgcgacgcgcccgcgccgcgccccgcccccccgacacaacgcacacgaaacccgccccacacaccacgatctcccctcccgccacgcccccccccaccccccccgagccg

SEQ ID NO: 174167 - DNA, 496 bp, Arabidopsis thaliana
  unsure (1)..(496): unsure at all n locations
gacgtcgccctgcacgcgtacgtagcttggatcctctagagcggtcgcttttttttttttttcttttttttttttttggagnncattttacatttatagcaatggtttgatgatcttttcccaaatgtcacattgaagaagagaaacattaggtttttggaagagaaattggatctacagaatcaaaaacatcatggccgtttccctaaaggggggggacccaaaggccgcttcccctgcccgagataaaagccaaagatcagcatgggcaaccattgcccagcttttaggtgctcaatctctgcaaatttcagcctctccagtcttctcaaagccccgctgctaaacacccgttcggaataagctggagatcctcttgtgtctcatctgtttctctcggtatgtcttttcttttttattttgttctttgtccgattgattcaactgttgttttcttggacggcgtttgttcgtgctctctttggctcttgtgcat

SEQ ID NO: 174168 - DNA, 508 bp, Arabidopsis thaliana
  unsure (1)..(508): unsure at all n locations
tgacgtcgcacgcacgcgtacgtaagcttggatcctctagagcggccgctttttttttttgttttttttttttttttttagagaagcaaaggaatcattgatcttcaagtttatcatttcattacactcaatagtataaagattaaaagcagaaatgggaacttaggaggaggctgcagtagcagcagcagcttgcggtggcggttttgttggggggggagncaccccacccctcaacccaaaaacaaaaacccaccgccccccttcacaagccactattttcccgctccttgggagcctctcgagtgcccacccaaagctttcaagaatggcggcgcagtccctccgcgcgttgccctcccccacgcccgcacctcctttcatcgttgcgccgccgccgccgcgcggcttatgcggcggctgctgccgggcgacgctcacaccggcgcccgcgtgcggcagctacttatgcacatcacctagcgggtgccgcgcgcggcgtcccggc

SEQ ID NO: 174169 - DNA, 490 bp, Arabidopsis thaliana
tgacgtcgactgcacgcgtacgtaagcttggatcctctagagcggttcgctttttgggttttttcttttttttttttttaaaaaaacaaaggcacaatcttttttaaaaatagatagatatataattatcttcatcacacgtaacgtaatggacctagtaacctatacagcttccatacattgggaaagtaagaagaaaaaacaaatatgggacagggagggacttgaaaagaatttatagttcattttctacacattcaaagatgataaataactccacagcttaaagggaagctttactttacttttagctttctttttttagttgtcggctgctactgccccggaagaattgaaacgggttgtcgtgatacgaacattggggcggcggcccttgccaaaactgcgcctcgacgcgagaccttcgcgcggggccctgttccgacatggaggccgcgttaggtgtcgcgggtgtttgtatgctcggtgt

SEQ ID NO: 174170 - DNA, 452 bp, Arabidopsis thaliana
  unsure (1)..(452): unsure at all n locations
tgacgtcaaatgcacgcgtacgtaagcttggatcctctagagcggtcgcttttttgttttgggctttttaattaataaannnnnnnnnnnnnnnnnaaaccttaacaacaaaatacatattattttttaaacacacattttggattttttttaaaaacactaaaaattcggggccaacacacatattaaacattacatattcccttaataagaggggtgttggggccccaaaaacagagaattaaaataaaaaaaccccccccccttcggggtgcggggggcgcgaaataaaaaggtgggggctgggaagccgcttttcccccccatcgaaatttctttccctaggggggcctcgaggtcaaccgccggcgcgccggcgtctggcgcgggggggcgtgggggacgtgggagcggtgcgggcaggtggcggcggtggccccctgcggggtgcg

SEQ ID NO: 174171 - DNA, 501 bp, Arabidopsis thaliana
  unsure (1)..(501): unsure at all n locations
gggaaagatcgtacgcctgcaggtaccggtccggaattcccggttcgacccacgcgtccgcccacgcgtccgtacggctgcgagaagacgacagaagggaggaaacgaagaagaagaagaacaacaacaacaaaagccttttgagatatggacagcttctggcaattaggtgatgagctacgaggtcagacgagagcatcagaggtcacaagtggtaactgttgcaaagaagcttttcgaataggaatctaatcatgctggctattacatgttaatgtcgaatgtgtatgggggtaaggganaanggntgagtggtggaagagtgggggttgtttttttttggatgttgattttatgtagagtttgaggatggtttattatgttgtttgggtgatgttttttgtgtattatattttttttttttttgtgttgggtggtaggaatggggggaggtgtgttattttgtaggagttggtttgtgttaagttatgttttttgtta

SEQ ID NO: 174172 - DNA, 502 bp, Arabidopsis thaliana
ctgcacgcgtacgtaagcttggatcctctagagcgttcgctttggggttgagggcctttttttttttttttcaacaaccaaaattcaactaattgtaaatgataaaccgctttttgcggaataaataacttgagaatcttcctacgcagaaaaccagatgagagaaaagttcactggccggtaatcctaaaaggtgatcatttcggggtggaggacactctaaagaaacatcaacttaaagagtccctgcgaccggccacggggtcccaaccagagctttttttttaacacttgaccttcctcaaaccatgagcgaagtacaaaaatggctcgggtagatgaacccttcttggggtaaacaaaacaccaagagcgggcattaggccttataactgcgcttttacggggagctctctgcagacacaaaaatgctagggaagggaaccaatcgtctcaatcccttgggtaagagctcttggtatcatgcgttgtaaaataaaaa

SEQ ID NO: 174173 - DNA, 514 bp, Arabidopsis thaliana
  unsure (1)..(514): unsure at all n locations
gcacgcgtacgtagcttggatcctctagagcggtcgctttttggttttaggcttttttttaattnngcacaaaattatatcatccatattacttaatcaaatgaaaatattcataccattaaaataccttgagatcttttgtttttaaaaaccatatgcaagagaaaataagaaatcgcgaccaacaaaaattcctacttggttgttggggacacaagcgggggtgntctataaaaaagacccccctgggggggggggcgggtggacctcttttctttttgaatgcctgggaacatataggtttgatggggggatgtgtcgtttggtgcgtcttccgcttttatctccgtggtgtgttttatagtttattgttgacgtgtcctattgcttgcctgagtgcctggtgacaggggctgttgtgttgcctcgagtgtggtgattgacgtggttagtttcgtaatactgagatgacgtcaggaggctccggctccattcgcggtgtaaactctcaaag

SEQ ID NO: 174174 - DNA, 529 bp, Arabidopsis thaliana
  unsure (1)..(529): unsure at all n locations
actcatttagggaaagcacgtacgcctgcaggtaccggtccggaattcccgggtcgacccacgcgtccgtgcgggtgtgagaagacgacagaagggcaactactgaagttgcggtaaaggaggaagagaagaaagggtttatggagaatttgtaagagaagctccctggacacaagaaaccttaagacggttcacccgtctcttccgcacctgtttttgttgcgggtgctgntaaacacgcgcatccattgcgagaagaaaggccttcttgagaacattaacgagaagcttccaggatgccaccctaagaccactcgatcggacgtggagaacgataaaccattcgatgattatcattacagtttttaaggaatatgatgggctgtcccgcctatggatgtttaatattctcggcgggttgatgagtccagggatcaacgcaacttttgtttccccccgcctgtcccggtgcgggctacttatcttttaacctttgatcttgccttttggcagggttggcctctttcca

SEQ ID NO: 174175 - DNA, 466 bp, Arabidopsis thaliana
  unsure (1)..(466): unsure at all n locations
atacgactcacttaggggagacggtacgcctgcaggtaccggtccggaattcccgggtcgacccacgcgtgcgcccacgcgtccgcccacgcgtccgtacggctgcgagagacgacagaagggtacggctgcgagaagacgacagaagggtacggctgcgagaagacgacagaagggtacggctgcgagaagacgacagaaggcgacggctgcttttttttgaggggggggcacccctncagaagaccatacaaagaaacaaacacaacatattcattaatgcaaaacacaactcccctgtgtagagaacgagttgcaggataggatccgctaccacaggtacgacgttttgtcgggattcagtcgatttgtgagtggcatatgctttgtgtatgtttcccaatgacaatgtttaggtggtgaacggcgggtggtttgtgtgtgtttaggttcgtatcaagttatt

SEQ ID NO: 174176 - DNA, 542 bp, Arabidopsis thaliana
  unsure (1)..(542): unsure at all n locations
ctgcacgcgtacgtaagcttggatcctctagagcggtcgctttttgggtaagtcggttaaaaaaaaaanaaaaaacgnanacggggacatattttgggccatataaaacaaaccacccccatcagcgcagacaacagcacctgttataacctaaaatataaaccaagaaggaccgtcacgagagcacagagacgtaaaaaatttcctcccgtgggatgttgggccaccccaccacaggcaaccatactaaaaaaaacgctctcaccaaccaaccaaagaaacgaaatccgacgcgcaggtagcgaactctcctataatctccgaccgaaaaaatcatcatcaatatagacacacaacaacaaccaacgagcgaccgggggcatgcagaatagagagttcaggccgaccacacacaacaccgattatcaaccaccgagaacgtcacatagaacgtgaacgtagaaggcgatcagaaggcgagcgagatcactgagatcatcccattttccccagagacaacgcgtcgcacataatacctcagt

SEQ ID NO: 174177 - DNA, 524 bp, Arabidopsis thaliana
  unsure (1)..(524): unsure at all n locations
acgactcaattagggaaggctggtacgcctgcaggtaccggtccggaattcccgggtcgacgcacgcgtccgcgcacgcgttcaaaaannnnnnnnnnaaagagggggttgacgcttgggataaaactgggagcgggcctatgagtatgtttcttgggtcggtcgaaccaacaggggtatttaggacggttgtttttttattttttatttgaaggtccccgtttttttggggggggggggtttattttccccgcggcgacttgttacaaaaatgttttagggatgggttttctctttttgtatgcaaagtttagttaggctcaaatactcggagtattatgggccctgctcttgttctttagagtggcgatcggtttatgaggtgggtgtaattaagaggagggtgtcaacagtaatccaggagagtgggtgtctccacggttccgtttttgtaactttggcggctttccgcacatcatttgttatcatgaggggattgtatctcacaagatggcttgggtggg

SEQ ID NO: 174178 - DNA, 316 bp, Arabidopsis thaliana
  unsure (1)..(316): unsure at all n locations
aacgactcacattagggaaagctggtacgcctgcaggtaccggtccggattcccgggtcaccccgcgtacgaggttgttattnttttcttctgcgacaggttcgaaggcgtctcttggatttttacaaggcaaaagctgagtaagacgttaaccaccgagtgtttctccccgggggaccgggggtaaaggggggggagatttttggttagttatgtccccgatttttcacccaggcttgcagggaactccctttcacgggggggggagcctcaaaaaaaaaaacacctaccttaaggggattctctaaaaccccta

SEQ ID NO: 174179 - DNA, 412 bp, Arabidopsis thaliana
  unsure (1)..(412): unsure at all n locations
atacgactcactttagggaaagctcgtacgcctgcaggtaccggtccggaattcccgggtcgacccacgcgtccgcaagatggctggcgaagttaggtcgtgataaagaatgccgatcttcgttgcaacgccttaggggatctgacgtcnatatttctcgtgaagcaaacacaattagagataccattgacatgacagaaaacggtggtgaaactaaaatgtctgaattgtgggagagacgatacgcatatccgttaattatcggagttggtttaatgtttttgcaacaattgtgtgggagctccggtgttacctattatgctagtagcctcttcaacaaaggaggatttccaagtgctattggcacatccgtaatagccacaattatggttccaaaagcaatgctggcaac

SEQ ID NO: 174180 - DNA, 446 bp, Arabidopsis thaliana
  unsure (1)..(446): unsure at all n locations
acgactcactttagggaaagctcgtacgcctgcaggtaccggtccggaattcccgggtcgacccacgcgtccgcggacgcgtgggttggaagactatgggtgcagagagaggacatttgagtctctaggagaagagagtggaacagtgatgtatcaaacgtttgagaagcttggtaagtactgtggatcgcctanatctaccttgaagtgtgaatggagcatcaacggggggtgcancancgaggacgagaaggacgagggaatctagcagaatttttcttcctataactattttcgagctttctggttttgttctttctttntaaaaaacttattaagttcttatgaataatgacttgtgaagtttgagttcgtctccttcacaagcaaggtggattggtggtttctactttatgaatatggggttttatataaaaaaaaaaaaa

SEQ ID NO: 174181 - DNA, 365 bp, Arabidopsis thaliana
gggaaagcacgtacgcctgcaggtaccggtccggaattcccgggtcgacccacgcgtccgggccatcaacctcaacaatctctctcctctctctctctggatatagaagaatctccattggctttaatttctctccatttctctttctctcttccttcaaaggtttctcttttcttgatgggtttaagagaagaaagatcatcattttctatgcgtggggtggagaagttattaaaaatttcaaaagaaattaaagattgttgatgatgaagagattaactttttcagattcaggggggggcctcatctctttatgtcctacaacttccacaaatgacccaagtcccaggagatacggggggaga

SEQ ID NO: 174182 - DNA, 500 bp, Arabidopsis thaliana
  unsure (1)..(500): unsure at all n locations
atacgactcactttagggaaagctcgtacgcctgcaggtaccggtccggaattcccgggtcgacccacgcgtgcgcccacgcgtncgcccacgcgtncgtacggctgcgagaagacgacagaaggggtcttaaagaagatactattgactttattggtcatgcagtggcacttcactgtaatgacaatcatctccatcaacctgcctatgatactgtaatgagaatgaaggtgtacgcanagtcccttgcacgttttcaaggaggttcaccatatatctatcctctctatgggttgggagaattgcctcaggcatttgcacgacttagtgctgtctatggtgggacgtatatgttgaacaaacctgagtgcaaggtanagtttgacgaggagggtaaggtttctggtgttacatctgagggagagactgccaaatgcaagaaagttgtctgcgatccttcttacctaaccaacaagggtcaggaagattggcagggttgc

SEQ ID NO: 174183 - DNA, 486 bp, Arabidopsis thaliana
  unsure (1)..(486): unsure at all n locations
cccctcacttagggaaagcacgtacgcctgcaggtaccggtccggaattcccgggttgacccacgcgtccaggcgatataaaattactttcaagtgtatcagttttagcaactcttttccaaaaagaacactcccattgctcatgctggtgggttctgggactaccattatttcattactggtgataccctctttgaacctgttggttctggtctcttttgagggagcggcanggnacaaaaagagagggctaaataaaacgctaatgtacaccacaaaacatgctgtgggtatggaattgcaactggggggcctttttcttgggggtctggctcacaccggggaagtgagcccagtgcattccttctggtacgaggcctagaaattcgaaatcccctctgcaaacctggagttgaatactaaaagaccaggtgccttacccatttaatgggaaccttaactcccggggaaagtggggaaacccct

SEQ ID NO: 174184 - DNA, 396 bp, Arabidopsis thaliana
tacgactcactttagggaaagcacgtacgcctgcaggtaccggtccggaattcccgggttgacccacgcgtccgaccgctcgtacaaaacctcaaaaagacaccggatggagaccacgactaaggggtgcatttcgcatgaaccgacagggggagtcacgtgccataagacaacaggaagttacatatgaaaaaagactacagcaggattcccatactgtttatatgacggggagggatcgattctctatatacgacagaacgatacggatgtgaccagacaaaatacaggcactggctcaagaaggccacaaatgggtacagacagtgttaatacaacgaatgggttccgatgcaaaaaaaaaaataatagtggcggtttctacaagacgacgca

SEQ ID NO: 174185 - DNA, 502 bp, Arabidopsis thaliana
atacgactcactttagggaaagctcgtacgcctgcaggtaccggtccggaattcccgggtcgacccacgcgtccgtgcgggtgtaagaagacgagagacgggggaagataaaacacagctggagaggagaaaggaaactgctacaagagaaagactattgactctttgaaaagagagagaggaacgatggaacatatgcactatctctacttagacaaaatttttttatcgagtggggcagataaagcgtcctggagttgaagacaatgaattctccaaggaccccaggtgcccccagctacctcctttggctacctggggacctccctcccgacaaggcaaagattggacgtgatgattttcctttaagggacgggtctcccccccacttcaaaatgaataccgggggcgcttagtatggggaactcgccaagggctacactataaaatggtgcccaaactttggccccaaggggggcttttacgttttaatcaagggtga

SEQ ID NO: 174186 - DNA, 495 bp, Arabidopsis thaliana
  unsure (1)..(495): unsure at all n locations
aatccgactcactttagggaaagctcgtacgcctgcaggtaccggtccggaattcccgggtcgacccacgcgtccgtgcggctgtgagaagagacagaagggtacggctgctagaagacaacagaagggttctgctgtgataagactacagaagggtactgctgcgagaagactacagaagggtacggctgttagaagacgacagaaggggcacatccatcacttatgggggggaacacaaatcacgataaaatggcggaaaaacaagctccgactgcaatgggaacatcggctgtggataagcagcctgagacgactacagaggctgaatcaccaagtttgacgacaaagaggatggtgggtgcaattgataagagcttttcttgggacctgtagaaattactgggctaattacgcgaaatgtgccatgcttatttgtaagccacctaaggagatgactaantaattttggagctggttacatggttggggtta

SEQ ID NO: 174187 - DNA, 488 bp, Arabidopsis thaliana
tgggtcgacgccttattcgttcgcgcgttcgcgcgcgccgctagtatcgccggctcctatacgactcatatagggaaagctggtacgcctgcaggtaccggtccggaattcccgggtcgacccacgcgtccgcttattcccgacggcaaattcttacgtttctccggtggtatagaaaaatgacaccacggatcaaaactcatctcttcgtcgaaccaagagccttctaacttctgagaactcatggatcataaacctccggcatcgttctcaacgcgtcaacgaatatagtcggcacctgaatgatgtcatatgccggccgaggttaaagatctctgccataagtaccagcgtagttgattatcacgagcataccttggcttaccaaattaccggtggatttgtagactacatcaagcgatcgcccggagaactcatctactgacccttgtagttttgaaagagtccttctgagcaaaccaggatac

SEQ ID NO: 174188 - DNA, 510 bp, Arabidopsis thaliana
acacctatagagatgctatgacgtcgcatgcacgcgtacgtaagcttggatcctctagagctggccgccctttgttttttttttttttttttttttttttttttttttttagaagacaaaatgcttagatcgaacttaacaagcgaagagtctgaaagcgactaaatgtacattataaagaaacagattttgattttgaaagatctagtaacaaaaacaaattttcgttatccccatgttcttatgcagccatgggcacagcttctgatggtgctgcagcagctgcgtttgggacgtaccaaccatggggaatttcaacggtttttttcctcctagccaatcgagacttcctacgggcaccagtgttcttgggtagggctttaaccttcactggtttggcaattgcagaataagcctttcctatcagtttttccaccgtcacaatctcatcagcttgcccataagttttctttttgagcccctcaagggcttccaagacctttttcattc

SEQ ID NO: 174189 - DNA, 525 bp, Arabidopsis thaliana columbia
atgatttgccgagcactaatacgactcacttagggaaagacggtacgcctgcaggtaccggtccggaattcccggttcgacccacgcgtccgcggacgcgtgggcggacgcgtgggcaaatccttgatagaaactggggagcaggttggcaccttttatctttgttaattgctaccagaccttctgaaagaataagttgcttggatgctcttaagcatccctttctatgtggaccaagatggcgtgttgccccatcaatggatatcatcagatggggtcttggatcaaccgcagtaaagatttcagaagaatacatttaccgcatgcctcagcgccaaagacttgcccacttcattggactgatggagatgctaaatccttatccaaagccaaactgttggttggagcttttaccgggaagatggcgtcttttatactcaactggaaagcacataggtctaactctgcgtcagccttccacacgtgccttaataggcaacgttcacttaacgataactcgagctt

SEQ ID NO: 174190 - DNA, 487 bp, Arabidopsis thaliana
tgacgtcgcatgcacgcgtacgtaagcttggatcctctagagtggccgccctttttttttctttttttttttttttttttttttttttttttttttttttttttttttttttttttttaaaacaaaaaagatttttctggtttagcttcaataagactttgtttccaatccccaaatttgaaaatttaagtttttacccccgtttttccatatgtttatatttgtggggagaaaaaacgaaaccccgcgcggagaccctttttttttaaaacaacttttttgaacagagggggttttttaccccccgcccaccctgtatttaggatttttgaccccacccaaggggaatgggtaaagcaagttatttttgaaccctttccaaaggggagtatttgtgcggaaactcgcaaaacccgctcttcccggacaaacggtgaggagtccccccctttgtggtggaggtttccttgtcagtcctcgaacgaaa

SEQ ID NO: 174191 - DNA, 506 bp, Arabidopsis thaliana
  unsure (1)..(506): unsure at all n locations
ctatagnagagttatgacgtcgcatgcacgcgtacgtaagcttggatcctctagagcagtccgccctttnttttttttttttttttttttttttttttttttttttttttttttttttttttttaaaaaaaaaaaagggccacaaaccttggccttttaaattaataccctcaaaaggggaacctaaagatgatctttgcaatccaaaacgcttgaaatattctaaaagagaaactaaattcgaaacacacctcttttaacattaaccccacccaaaaaacttaataaaaattgggggaacccaataggggaggaaaggatctttttttggcccacctttgggggctttaaagggacgggcggtttggggggtgatatcataaacagcaaagcaccggcccataaattaaatggagttgggtttgaaaccagggcaaaaccttgccacaacacaaaaaggatctttttttgaagggaaaatccaaagatctccattgccctggggg

SEQ ID NO: 174192 - DNA, 496 bp, Arabidopsis thaliana
cctatagaaatatctatgacgtaacatgcacgcgtacgtaagcttggatcctctagagcggccgccctttttttttttttttaggggaagaaaaaacgtttcaaatgtaacagataaacagaatatacataaaattacttacaagggttcgcagtattgagaaacgttgacgagttttagaaggtagaatagaaaggtcacattaatataaatcaaagattgtcgtaaggaccgagcttaggcggctcatgaggaccttttttgatgggaagaactttcccgttgaaagtagcgcttacataatgttgcaaagagcctaccttcaaggataaagaacttgaggagcaattctctttttgagaaatggggaaggaatggttgaaagagattgttataacaaggaatctaaggagaaggctgttcatagcccccacacgccccatgcacccttttcccgttacctaaatttttaagtctcatgaaccctcttgtttcc

SEQ ID NO: 174193 - DNA, 530 bp, Arabidopsis thaliana
  unsure (1)..(530): unsure at all n locations
atcaaacatnccctcaaaccccacagcggaatttaataggtcacctatagaagattttgacgtcacatgcacgcgtacgtaagcttggatcctctagagcggccgcccttttttttttttttttggaaaccacaaatttaagataatgcttaaagaagacagagacaatgaggctttttcataatccaatcacaaaacaaagaaggggaaaaaaaaaaaaaacctcatcacattaggcggttttcagtttcctgttgttatgtttcttggcttccaaggaagttccatcttttagggttccacaggcgtctttatccattcaaaggctgaaaagagcaacggcctgaaaaaagaaagcctgtggccattcatgagacactactttggccctgctttgaatcaccaaaagcctttttgggcatattgcttattaaaaaaaacaaacaccttcttcgcaaaacttgtggccaaaaccattgggcccttttttcaaaaacctgggtgtaaaattcaaacacctagacaaaaat

SEQ ID NO: 174194 - DNA, 519 bp, Arabidopsis thaliana
  unsure (1)..(519): unsure at all n locations
tttaggtcgcactantagagagtctatgacgtcgcatgcacgcgtacgtaagcttggatcctctagagcggccgcccttgntttattcttttttttttttttttttntaagcataaaccataataatctacagataaaaaattacaatgtcacatttgaagcaaagaacaatgaaggaagaagattgcattcatctacttctgcgaaagcattgtctcaagaaaaaaatttgagatgagccaacaacaatgcaaagataaagcaaatttcatatgtttgatgcactcaaagccataactttgcattgttcattcaaagctagaagctgagcctctttcttgtcgagaagtgctgtcaatttcacattctcctccatcagtttctgtacttcaacctccttttgtgccttctccccttctaattgggtcgtcttagtgaccaaccgttcaaagagctcctcaatggttttgaattgtctctcggacgaaagaagtgtttctcgaacattggtaaaagtac

SEQ ID NO: 174195 - DNA, 519 bp, Arabidopsis thaliana
  unsure (1)..(519): unsure at all n locations
ttaggacaactatagaagagttatgacgtcgcatgcacgcgtacgtaagcttggatcctctagagcggtcgcccttnntttttttttttttttttttttttttaacacagaagctaaggctttatagagtaatgataacttttattgtcaaacactagacccacaaggaggcaaaaaaagaagaagaaattaatcctgaaaaatactgttgttctataaataaaatcagatgggtctcttcttcttcaagtagcaaaatcacggcgcttcacgaagatcgggtaccgtttctgcgttcttgtagttggaaagaaaaccagcttgtcttgctctgcaggaacccaactgaagcctgtcactaggcggtgaaggaaaacagagagtgcaaccctagccagctcgtaaccgggacatagccttggccctccaccaaacggtgtgaacacattagaagggcctgtccggacgcgtgggtcgacccgggaattccggaccggtacctgcaggcgtaccagcttt

SEQ ID NO: 174196 - DNA, 468 bp, Arabidopsis thaliana
  unsure (1)..(468): unsure at all n locations
taggtgcaactatagaagagttatgacgtcgcctgcacgcgtacgtaagcttggatcctctagagcggtcgcccttnntttttttttttttttttttttttggaacattttaacaaggaaaggagcaaaccttgctgacttatttcaaaaatgcaaacatgtgaggattgcagagatagcaccatcgccagacactgctaagagaaccgataatgactgcggccttcattttttagatgagggatggaatcaaccaccgttcatggtgagagagcattcttgggagagctttgcctttcctcctggaggctgacacaaaattgtctggggagtttccgcacaccacaacagtctgtgagggactgagaacagttgtgatgttgaatcacccttgcccttctacatcatgaaaaaggaatgggaagactggacaagacgctcgaactggagctttcttttttaagctaa

SEQ ID NO: 174197 - DNA, 503 bp, Arabidopsis thaliana
cactatagaagatctatgacgtcacatgcacgcgtacgtaagcttggatcctctagagctgccgcttttttttctttctttttttttttttttttaacaataatattatcaatttggctctccaaaattgtatatttacatttacgaccctaaagtttacacaatagttcaatctcacccctactaattatcacaatttacatttgagaagactatatgctataacaatacccattattaaagagtgatctacttgtggctccaccatcattgttaatacatctttcccaagatctaaacttttgatatttgattgtttctttttaacttctgccaataatcttcctgatccatcctcgattgtgaaaaccgatttgcgttttacagtcttataacaagattgatgatcaccatcaactatacgcgatcccattacaactttgtatgatgaagatgaaccctttggcaatatcttgaagttttttcttagttgaaatcttgcc

SEQ ID NO: 174198 - DNA, 504 bp, Arabidopsis thaliana
  unsure (1)..(504): unsure at all n locations
taatacgactcctatagggaaagccggtacgcctgcaggtaccggtccggaattcccgtgtcgacccacgcgtccggaagacgacagaaggggtggagacgcagcgaagtacgggcatgagattgtgccgttgaaaacgtcgaattcgcagctgacgctggaggatatcgccgacgcggctcagccaagtggagcatttaagtgggactctgaaacctgtttgaaggtcgacggttagttatattttatatgatcgatcgtctaatcacaaagaaagtaagggaaagaatcaaggaagtaagaataagaagataataaataaagagaataagaagaggcatttgcaactttaagaggttaaaatttcttaaatgagtctgagtttcgttgtgtgttttgggtgtaccataagaaataaaacgtacggngttgctatgtattttgtgaagtgtgtatttctggttgaatattagtctgcgtaataaaaaaaagtatgtgtagtaa

SEQ ID NO: 174199 - DNA, 520 bp, Arabidopsis thaliana
taggacgacactatagagagttatgacgtcgcatgcacgcgtacgtaagcttggatcctctagagcggccgcttttttttttttttttttttttttttttttttttttttttttttttttttttttttttttttaaaagaaaggttttttattttattgaaaatacatttattcaaatttcgttcttttcgaaatctttttctatttccaattttgttggaaaccttctgccccgagagaagtaaagtccaaaccgattccaggtccaaaaagggtttcattctgtctgaataactgaaaaacaaacataagtgtttcttttttcaaacatcaaaatatttagcccctggctgaacatttttatctccttttccggtgaagttcaagaccactcttgccccgtgtgataatgggggacataccttctcgaggtaagcttgggcgtgggaggtccccagggctggaatgattccctttaaccggaacacttttttgaacgcttccaaccctttttgggggg

SEQ ID NO: 174200 - DNA, 507 bp, Arabidopsis thaliana
ttaggtcacctatagaagatcttgacgtcgcatgcacgcgtacgtaagcttggatcctctagagcggccgcttttttttttttttttttttttttttttttagtacaacaaacaacttccgatttgatgtgtgaccctattatccaaaacatgacccaataacaaaagaattacagaccgtcctaacctcctacgttaactgttctccgggtttctctttttacctttatttgactggtactgtccttcttcttgatcactagctccatcttttctttttctcttcttttttatttcccggcaacaccgtaacgaccttaccatttttatactaattccgtactctattattagcaggaattttttttgaatttttaacacttcacacttcattcttaatttgtctttaggcttgttcctcttcatttagaggggagaagattgttgaattatctaacgaaatccctaggagttcgtccagattattttggtctttgtatttaaaag

SEQ ID NO: 174201 - DNA, 498 bp, Arabidopsis thaliana
  unsure (1)..(498): unsure at all n locations
gccagacttatacgactcanatagggaaagctggtacgcctgcaggtaccggtccggaattcccgggtcgacccaggcgtccgtacggctgcgagaagacgacagaagggtacgactgcgaaaagactacagtggggtacggctgcgacaagaccacagaagggtacggttgttagaagactatggacggtttcggctgcgagaatacgacagaaggttactgctgttagaagacgactgacgggtatatacagctttgttgttttcatgaagacacttcacagatctttttcttttttcttgttcagatactcaaaacgaggaaacattttgtgaacctagtttaaccgcacattgagggatcaatctctacttaaacaaatattgaaagacaaggttatgcacataaggcggccgctctaaaggacccaagcttacttacctgtgcatgcgagatcataactcttatatactgtggcataaatttaatatactgcc

SEQ ID NO: 174202 - DNA, 472 bp, Arabidopsis thaliana
tatgacgtcgcatgcacgcgtacgtaagcttggatcctctagagcggccgccctttggtttttttttttttttttttttttttttttttttttgttttttttttttttttttttgtttttttgtgggcccgggggtaaaaaaaaaagaaaaacaccaagaacatttttgtccccaaagcttaaaatttaaaaaaaaaaactgcaacattgagatttggccaaaaaaaaaaatgggggggtggacacaaaaaaagcaatagaaagtgaaacttctaaaacggactaccagggaaaggcaggggaggctatgggttattgaaacggcaccgcacccccttacaatggggcaccggaacagaggggagggggacatgcgcggagagccggggaaccatataaaacaagggctcaaacgatggataccgatgaaagaaaaatgggaaagaagactgagccctacctccgggggaaa

SEQ ID NO: 174203 - DNA, 480 bp, Arabidopsis thaliana
ggaaagctggtacgcctgcaggtaccggtccggaattcccgggtcgacccacgcgtccgtacggctgcagacgacagaagggtacggctgcgagaagacgacagaagggggaagtttgatgaatcgaaaacgctcttaccggtgagaaaacctgtaaatggcaaccgcaaaaccgctggttacaagctttgggttctaatcgctgttctactcttggcctttggttctatgttaaccggttccgtctctctcaaaggaatcggtttgttccattctgctgacggcgttaacgcattctctttcggcgatgatctcgacgttctggaaattgaagggagagagaaagtggtgagacagatgtgggatgtgtacggacgctccggtggcgttaaggttcctcggttctggcgagaagcttttgaagcggcgtatgagtttctcatcagtgattccgccgccgttcgaaatgctgtcgtttct

SEQ ID NO: 174204 - DNA, 499 bp, Arabidopsis thaliana
tatagaagattctatgacgtcgcctgcacgcgtacgtaagcttggatcctctagagctgccgctttttttttttttttttttttttttttttgagttttagacacaagtagagattttgaaacagagtttgatgtacagttgaataaacaagcctaataccattactggtgaaatctagtagattttggttctgtatctggaaatacttcaaccatgatccaaaatctctcatttctttactgtttcaatccctttgttgctcacattgacgcagtcttcttctgcaaactcgttgtcatcagacatttgttcatcgtcattgtctttggaaatcgtcagtccattttgaagcaatcgccggttctcttccgattcttgccttattagccgttgctgaatcccatctctgatggctggtcccattttatgacaaccttccttaaacatttcaagaaatccagcccccaacgatcaggattttaagccactcattatggg

SEQ ID NO: 174205 - DNA, 506 bp, Arabidopsis thaliana
  unsure (1)..(506): unsure at all n locations
actaatacgactcacttagggaaagctggtacgcctgcaggtaccggtccggaattcccgtgtcgacccacgcgtccgcccacgcgtncgtacgggcgagaagacgacagaaggggtatctcggcaagggtagtttcacggttcacggtaaaccaaagtttgctgataaattggcaatgttggcaggtggaaccggaataactccggtttaccaaattattcaagccattctcaaggatccagaggatgagactgaaatgtacgtcatttatgctaaccggaccgaggaagatattctcctaagggaggaactggatggttgggcagagcaatacccggaccggttaaaggtttggtacgtagtggaatcagctaaggaaggttgggcatacagtaccgggtttatttccgaggcgattatgcgagaacatatccctgatggattagatggctcagcccttgccatggcttgcggaccaccaccgatgattcagtttgcggttcag

SEQ ID NO: 174206 - DNA, 511 bp, Arabidopsis thaliana
ttaggacgcactatagaagatctatgacgtcgcctgcacgcgtacgtaagcttggatcctctagagctgccgctttttttttttttttttttttttttttttggagaaaagggcaaaatatgtattatatgttttccactctacatggcctaattaatgattaaaactcatggtcttagtcctatagtagtggtaaactcaagatagattcgaacatgaactgaagatttagaagtgctcattttcgctaaactcgaaatcgccgccacctccaaacaccatgagatcctgagagcccaaaacatcgatagatgtactcgttttcccattgacgtaactggcctgatgatgataatcttcttcgaaaaccatttctggccacaccaatgacaagttattctccgtggacgaaccatgatgacgatgagggatgccttcttccttcattgagggagataaactagggactttgatgatcttcggaatccatgaagatctcattctgatgggc

SEQ ID NO: 174207 - DNA, 520 bp, Arabidopsis thaliana columbia
atgattcgccggcactaatacgactcatatagggaaagctggtacgcctgcaggtaccggtccggaattcccgtgtcgacccacgcgtccgctcggctgcgagaagacgacagaaggggttgctgaagaattcgcttcacagatgtcgaactacactcgtgagaaagacttggagaaggaaacaggacttggaccgtgttttaatatctccgggaagggagatgtgacggtgccggagctgatttttgagtttaaaggtggagcgaagttggaattgccgttatccaattacttcacgttcgttgggaatactgataccgtttgtcttacggtggtttcggataaaaccgttaatccctccggcgggactggaccggcgataattctggggagtttccagcaacagaactatttagttgaatacgatttggagaatgacaggttttgggttcgcgaagaagaagtgtaccccgtgagttttcaggggtaaatttgacttttcacaccgatgagatcaatt

SEQ ID NO: 174208 - DNA, 500 bp, Arabidopsis thaliana
  unsure (1)..(500): unsure at all n locations
ctatagnagatcnatgacgtcgactgcacgcgtacgtaagcttggatcctctagagctgccgctgtttttaattcttttttttttttttttggacccttctgtcgtcttctcgcagccgtacccttctgtcgtcttctcgcagccgaatccttctgtcgtcttctcgcagccgtacccttctgtcgtcttctcgcagccgtacccttctgtcgttttttcgcagccgtacccttctgtcgtcttctcgcagccgtacccttctgtcgtcttctcgcagccgtacccttctgtcgtcttctcgcagccgtatccttctgtcgtcttctcgcagccgtacccttctgtcgtcttctcgcagccgtacccttctgtcgtcttctcgcagccgtacccttctgtcgtcttctcgcagccgtacccttctgtcgtcttctcgcagccgtacccttctatcgttttctcgaagccgtacccttctgtcgttttctgtacggacgcg

SEQ ID NO: 174209 - DNA, 511 bp, Arabidopsis thaliana
  unsure (1)..(511): unsure at all n locations
cctgcggtaccgtccgngatcccggtctacccacgcgtgcgcggacgcgtgggcggatcttcttntacaaaacccatttcctcacaaaatccatctgagaaaaagagcaacaagtttcattttcatggaggttgtcaacgaagtagaatttgtatgcttaaactggtactaattcacgccgacaccccaattccctaatttntgggggggggggacacacacaccatatcattttttaaaaaaaattctccctaattgaatacatctcccatctccctcttctttttcttagactccataatctctttcatatatttatgtttatataattcttctcttatcgcttcttcttcttcttctacatctatactaatcctaatcatcttctctttatttatatgtgtcctccctcttcttctgactgtgtgttgtgcatcttgtttgaatatcttgagacattcgttcgcgacgctcaaccattactctcttaactactacaacttcttcactt

SEQ ID NO: 174210 - DNA, 528 bp, Arabidopsis thaliana
  unsure (1)..(528): unsure at all n locations
tggcacgcctgcaggtaccggtccgngattcccgggtctgacccacgcgtgcggtcacagtgaccaaaatcacacacttcacaagaaacaacctatggatccaaatgaatctgcaccaaaccaatttcgccacgtggtggtcatgtttttgtgcaggtttgggtactcctggggtgctagttctcggtagcgtccgagaccgtttgatctttttggggggggggccaccccaccgagattcttgttgtaaatagtttctcgctggatgccttgttgcttgctttttgttttagtttttgcgtggcgtggtagtgagctaagcggcccgtgacgcttgccctattatagtatactctcaccgcgtcttcctctcgacgtttacttctcgtcacgtttattccttctaatttttttttgtttctcacgtctttactgttttctctagatggggtttttcttaatttatttagcgatcttccttgagcgacctactcgcgtgacactatcactttaactattttactccgc

SEQ ID NO: 174211 - DNA, 545 bp, Arabidopsis thaliana
  unsure (1)..(545): unsure at all n locations
aggtctctacgactcanatagggaaagctggcacgcctgcaggtaccggtccggaattcccgggtcgacccacgcgtgcggcaaaacaaaactaaacaagaaacagaggagaaaaaaggaaacgacgaggaaaaacaaaaacaaaataaaaacaagcctcgttcttcccttttctctcttcaaatcttttcttttacatattttcttttcttttttttgtctttaatacttatttactaactggtgagaataaaaatgggttcgagtaagtttaaacgagccatacgagccgtaaaggaccaaaccagcctttgctctagccaaagccattggtggaagcgcttgttttatcattactgcacctgtcggatccactgcttcccgcttaccgacattctattgcctttctttaccagctgccccgttattttttattctctacgctgcgccttttcatcggttatgggtgtctgcctgtttttgtatcgtatccctgtatcgtgtatattcttctctccaaacaccctctctctaatcctctcgcc

SEQ ID NO: 174212 - DNA, 549 bp, Arabidopsis thaliana
  unsure (1)..(549): unsure at all n locations
gggggagctgacacgcctgcaggtaccggtccgngattcccgggtcgacccacgcgggcgagggagttntataatacaaatctggcaaaagatggccaacccgccagcacgatatcttgtgcattgtggggagctggggcgagtaagtatagagtaatgaagtagtagttatttgtgctgtcaggacgaagtgctacacagggcgaaccaggtttctccatattagggggggggaaaaaaaaaataaatgagagagggcggaagattagaactgaacgaaggagggagtgcgggacagccgaagagttaagaggtaggncgaaggggtgtaagtgagggatgggagggaatgagaagtacgacaaactaatgggtaacaacgcagtgagacaggagtatagcgcaccaaacggtactagtgtgcggtggaatgtagagcgctcaactagacgacacgggacatgcgcgcgcgagaaaaatgaagagatctggagagcgatagtataggagtagcgaagagcgtattaaagcatcgaaacgcactcgctc

SEQ ID NO: 174213 - DNA, 504 bp, Arabidopsis thaliana
ttgacgtcgcatgcacgcgtacgtaagcttggatcctctagagcggcctccctttttgggggtggggtttttaactaaaaaaatttttccttcacattcaatgattccaggttttgtagaaaaccattttatttttagccctaatccggaagttgggaactatcaataactaaacttatttgagaggatatcttattactttagttaccatttttctttgggagatggagaaccacccgaggggctcgcaaaaagataccaaaccgaggttttcttttaataatttgaccaaaaacaggttttttgagaacatctaatataaccataggcccggttcaagggtggtacatatggaagctccctgttctacactcacctcttttgtttttaaataacactgcctttgcccctgcacagagtaagggaaacttccttctatttcttggggttgggagggcccctttttaacctccattaagatcccaaacctttgaaaccaaacca

SEQ ID NO: 174214 - DNA, 505 bp, Arabidopsis thaliana
  unsure (1)..(505): unsure at all n locations
atgcacgcgtacgtaagcttggatcctctagagcgggcgcccttttttggtttttgtttatcaaataaatttctttgtaatttatgtgggacttttatgctctgcattttttagttctcagttcttacaattagatcttaaaagtatcatatcacaactccatctttaattactgagttcttcaagattacagnaatgccatatcttatgggaagtcggtcnnatnacctatgtggctttttaaaaaaaactccgaggttgcgaggattacattctttccaactctaggattcttgggtattatggattcttgaatttttgggggccttcctatcccaagggggaccgttccttaaggaggggcggggggggccgttgtcgttcacggtagggaggattttgccccaagcctcacagggggccttgcaaggaagcattgctggcgacgtgttggggcgaagtgcgaacggggtttgggccaacgcgggggggtgggagagaggcc

SEQ ID NO: 174215 - DNA, 448 bp, Arabidopsis thaliana
  unsure (1)..(448): unsure at all n locations
gcctgcagntaccnngtccggnattcccgggtctacccacgcgtgcgatcttcccctctattcaaacccttcaagagacaatctttcctgcgaaaatggtgggatatgctgtctaccttacccccccccaaccacttcctttatttagcaattatgttattaaccaatgtgttgttatctaccaccacccaacactctctccattttgggggggggggacaaccgctgttttttttttattctaataaaattccccctcgtagtaactcctccacaacgcctccttaacccccacctgcgccagcgtgagcaattaataatttctatcccttatcaatacacttttcaccctcacccacttatctactgttgtctcttcgtcctcttacctcttacactattcaattactccactcaccacagcctttcattcttatataaatataaa

SEQ ID NO: 174216 - DNA, 481 bp, Arabidopsis thaliana
  unsure (1)..(481): unsure at all n locations
acgtcgcatgcacgcgtacgtaagcttggatcctctagagcggccgccctttntggggggggggcttttaaaaaaaaaaaaannannaanaannnnaaaannnaaaaaaaanngggaacccagaggcaaactttaatttgttataaccacctgctggtaacctattcctctccaaatgggggagagcccaatcaaattctggaatctttatttttgaggatgaagggtttctttctctgccgggggaaaaaaaaaaaaaaaaaatttttctttggggaaaaaattttaatcccgcccaagccaaaaaaaaacatttttgccccatgcacctctttaaaagccacactaatcttcaaaaaacttttcaggttgaactttaaagaccaccggttttaacaaacttgaagggcccttggcccacaaaaaaaatacctcccggcctttaaggaacctgaaaccttctttactgtttcacccaccc

SEQ ID NO: 174217 - DNA, 452 bp, Arabidopsis thaliana
  unsure (1)..(452): unsure at all n locations
tctctacgactccnatagggaaagctgcacgcctgcaggtaccggtccggattcccgggtcgacccacgcgtgcgcttatcttccatagtataaaacagtcagaagatgtcactgatgcaacaaagtcaaagaactcacatgcgatctgtgagcttgggctgtcaataatcaatcacttaactcagaaagagcctgatctacaaggggaaatcacacctgtatttttttctccgagggggtgcaaaccttgtgaaaaagttgtagaaacaaatgtccctaggacccgctactccttcgcaaagcttggcttctatctacttcgtggtggagtacgttcacgacaactccgtccttttcttcaccccggcgccctcctttttcgatgtctaaccgacccttctttttgttttcttttcttccatcccgtgttgtatcttttcgccgagcagtt

SEQ ID NO: 174218 - DNA, 514 bp, Arabidopsis thaliana
cagctctctacgactcatatagggaaagctggcacgcctgcaggtaccggtccggaattcccgggtcgacccacgcgtccggttcctctgagacgtgttaaccaggcctatgtcattggtacttccacaaaggttgacatttctggagttaccctcgacaaattcgatgataagtacttcggcaaggttgctgagaagaaaaagaagaagactgaaggagagttcttcgaggctgagaaagaggagaagaaagagattccacagggaaagaaagatgaccagaaagccgtggacgcagctttgatcaaagctattgaagcagttccagagttgaagacttacctcggagcaaggttttcattgaaacaaggaatgaagccccatgagcttgttttctagatttcattactttttttctgaggtttctagtgtatctgtctcctgaagttttacactccaactggttggttctgttctcgtccactgaccagagacataaaatcttggctgctgc

SEQ ID NO: 174219 - DNA, 489 bp, Arabidopsis thaliana
  unsure (1)..(489): unsure at all n locations
acgactccnatagggaaagctggcacgcctgcaggtaccggtccggaattcccgggtcgacccacgcgtgcgaatacacctacgcgagcttctgttactcagcaacggcgacccattgagacacactctttcaccgattgctctcatgctctcaccacgcatgtcgctctctccctctacctcgatttcaacacctccataatccatggctccgctctcctcactctctcctccggcttctccggcgaactctctcttgatactcgctgcatttccattgctatggtcctcgatcctctcactctcgagcctatcccttactccgtctccaccacaccggatcgaattcggggcaccgaagttgtcntagncctttccggtcaatcttcactgctaactgtctactccacttcgccctctggcgccgtgtgcaaggggttgcgccggttcacacatcgccaaaagggtcgctcgggggtcgctgcggcg

SEQ ID NO: 174220 - DNA, 473 bp, Arabidopsis thaliana
  unsure (1)..(473): unsure at all n locations
cgcctgcnagtacccgtccggattcccgggtcgacccacgcgtccggatctgacctcaaaatcaaacgagtttctttgataatcttcttgctaagtgttcttgttgagttttnntatagcgagcggccttcttattttttttttaggttttgtttgttttacctgttttgtaattttgatattactcatcgcccttttttttttgangagggggggtatccgatcaccgccttttactcttcatattttgttagtaatattcttatttcttcgaatactccgcacttatcattcttatagtgagcgagtatcaagtgttcgatttacaacatcgacatcttaatcttttaaattatatctctttataaatcacgctaaagatctttcttctcccctcaccgatattctactttcttatttatttttataacttagattcattttggtttggtatgctggtttttttaccttat

SEQ ID NO: 174221 - DNA, 552 bp, Arabidopsis thaliana
ggcgcaaacacgcgtacgtaagcttggatcctctagagcggttgtcctttgggggggaaagccacacacaacaaaaacagaggagacgttgtggtccgcttactataacccgacgcacgagacgtctgcgggagaggcgcgggagtaggtatcgaacatagcatacgaaaagaacggagaaggatccgacgcaagctcgacgaccgcagcagattttcatactatgagggggggtgggaacaaagagaatcacacacatgcttgtcacaaaacgctagcgcgtgcacgcactgagcggcgaggcgcgcagccacccgacgagacaaaccgccaagtcacattatcaaacgtgagcggatatggcagacgaacctatgctcgcagcccccacccgcccagaagcacgaagagtgagaaagtgagacccgctcgcgagcgacgaatcagaccggaggcgaaacgaaagaggcagaatataaataggtgagatttaagttgtagaaggagaagtgagcagcgaaagcgcagaggtagtagaattaacgcagtacc

SEQ ID NO: 174222 - DNA, 563 bp, Arabidopsis thaliana
acgtcgcatgcacgcgtacgtaagcttggatcctctagagcggcctcccttttttgttttttttttttgagatttaacaataattcaaatttatgaaacaaaaacttagggttcaattgcaatactttaatcagttcattctccaatattagggacaaagtgaaacaaataatattcccaggggagcacaacaagagttcggattttcccaacaccattttttttttcaccatggtgcgggtttccatctcccccggcggggattccaaaaaaaaatcccccccatttttacccggaatttttaacattactccaaccaaactctttgaaaaatgaaacctttgatgaaccctttttttttcagaaggactttttcttttttgggcatacttttaccaaaaaaccctttaacaaaagattttggcttgtccattatcgccttttttctttttccatcctctcgatacaccccccatgagcggggcatccttacccgagtcttcccgcgtggtgcgtactgttttccacgagtccttttttccacacaggacggcaaatatccg

SEQ ID NO: 174223 - DNA, 578 bp, Arabidopsis thaliana
gtcgcagcacgcgtacgtaagcttggatcctctagagcggttttcctttttggggaagccccaaaacaaaaacgaaagtttagagaagtccttctcttataaatatccagcaagtcagagatttccgtaagcagacaagacaagttatctaatatatattatactacccacagcaacggggcgacaggtccggagcggaccggaaaacctttttttttttaaaaggggagtgggggccccacacaatcactagtatatccgtcaccagaacggaggcaacgacagtcgcgagcgaggtaacactactactctccataaatagacaccgtgcagagaggtaataaagcatatgaatcttagacaccggaagcatcgtcaaacgcatgcataggatatagagagataatttatatttaagttgtgtaagtgacactacgggagacggcggaaagtagaagagagacttgagactacgagcccaggtatgagtagaattgtttcttacctattgatagcagtgattcatttctacagcaccctgttcacgagtccatgagaatctcagtgaaagtacagtc

SEQ ID NO: 174224 - DNA, 541 bp, Arabidopsis thaliana
tgatactccagctctctacgactcactatagggaaagctggcacgcctgcaggtaccggtccggaattcccgggtcgacccacgcgtccgcggacgcgtgggcgatgatgagctctgcatccgccatgaaagctgttggatttttgcttctgcttaccattctaacattagcttatgcgaagaagtcaggtgatgtgacagagttgcagattggtgttaagtacaagcctcacaaatgtgatctccaggcgcagagaggggataagatcaaggttcactatcggggaaagttaactgatggaactgtctttgattcaagttttgagagaggtgaccctattgagtttgagcttggaactggacaagtcatcccaggatgggaccagggttcattgcgagcttgtgtagggcagaggagaacttcgatactcccttccgtccccggtcttggtggcttcgggtcgcttcaaatatcttcggtggggccacacttcttgtttcacccccggcgcctgtcgttccccatccgcatcacctttcc

SEQ ID NO: 174225 - DNA, 529 bp, Arabidopsis thaliana
  unsure (1)..(529): unsure at all n locations
gacgtcgcatgcacgcgtacgtaagcttggatcctctagagcggctcgcctttttttgtttttgctacaccaaaagtaaaatcttcaaatttggaagtgaatggtaaaataagaatgttaatatctcttaatatgtaataatctcttatatatttcggtttacccgtacaatgtaaaatatttttcattcaaaactgatgattaggttttttttttctgtggagttgganaaacngngggggggacgcgacaaaaaaaaagaccccactttaaggtgcaggcgcctgagggccaagatataggcactttgaggtgccttcgttagagacaaccccagttgggcctgggcgccggcgcccgacgtcggtaggcagttgcggcggggtccggcggcgggcggaccagccgcgcgctggccggtcgcccagcgcgtgggagccgggcggggtgcgggcgcaacttgtctgggcggccggacgatcctaccgcgggccccagtgcggtcgttcccgccgggcgcagccgacga

SEQ ID NO: 174226 - DNA, 454 bp, Arabidopsis thaliana
  unsure (1)..(454): unsure at all n locations
cgcctgcaggtaccggtccggaattcccgggttgacccacgcgtgcgcggacgcgtggtaaagntctattaacacataaagcgactaatgtgactaatataaatatacgtatggtttaccgcccccctacaacaataaaatataactagaatagcagaaatgaggcggattattaagataatacatcaccacaagaaatttctccttttaaagggggggtaagtaaagaagagagctatatgtttctatacaaatatacaagtacaactgacaatgcgtaacaacaaaataaatatttatctatataacgcaagttatacgatagtaatagtatacgctcattctgcagcctttaatgtcagaatataaagacgatcatatattacctccaacgactataagcatattataattatataaatacagtatcgctagcatgtcgagtgtagatata

SEQ ID NO: 174227 - DNA, 528 bp, Arabidopsis thaliana
atagaagagctttgacgtcgcatgcacgcgtacgtaagcttggatcctctagagcggctgccctttttttgttttgtttgaagataaaacatttagttacaatgtggtaatacaagcttcacaggacagaacatcacactttcattgtctaatgataaatgattgaggtacaataatgtgagtagaaattgttagtgtctttgatccacttcggatcaccattgtctctgggggtgtgcgaggctcattatcaggttaatttatcctagactcgctgtcttaaatcatcttagaacccaacagagctagccacaaacccgagaacaaggacagcaccgaagctcaaaccggtgttagaagcagaggaaggtggttcaagcttatcagggtggtgccattttttttcttggcagaattaatgtggaggtgggggctggagaaatcacttgtgtgattggggcaaaaggcaggtggcggtgtgtgtgagccgaacccaagaaagaaggtggtggatgagtgcgcctggtg

SEQ ID NO: 174228 - DNA, 530 bp, Arabidopsis thaliana
agctctctacgactcactattgggaaagctggcacgcctgcaggtaccggtccggaattcccgggtcgacccacgcgtccgcccacgcgtccggagcgaaggagatgtgagcgaaggagctgtgagcgaaagagctgagttcccggagccatcggaagaagccaagcttttcgtcggaaatttggcttatgatgttaatagccaagctttggctatgctctttgagcaagccggtactgttgaaatcgccgaggttatatacaatagggaaactgaccagagtcgtgggtttggatttgtgacaatgagttctgtggacgaagctgagacagctgtggagaagttcaaccgttatgatcttaacggacgtctactaactgtaaacaaggcagctccaagaggatcacgtccagaacgtgcgcctcgggtatatgaacctgcattcagagtatatgtagggaatctaccatgggatgtggacaatggccgtctagaacagcttttcagtgagcatggtaaagttgtggaag

SEQ ID NO: 174229 - DNA, 514 bp, Arabidopsis thaliana
taggtgaacttatcagaagactttgacgtcgcatgcacgcgtacgtaagcttggatcctctagagcggccgcttttttttttgttttttttttttttttttacccaaaattaaggtttcaaagggtggattaccgggataataaaaaggcacctttggatttggtcccaggttggttaaagggcaaaacttggtccaaaaaaaggttggaaacccctggaggggccaagagactttagaatcctgggcggggggggggcctttttttttggcccaaccaatggtccggagaaggaaaggttatcaacccttcctttttcaacctcttcaatccgggccaacccaatattttcaattttggtggagaaccttaccgtaaggcggggggaattttgggcgaggcttttggaggcaccggggggttctttacaagaacaccttccaagggagtcgattggtttctaccttcccaattaagaagaagccgaacgtttccaaaagggctggccctttcc

SEQ ID NO: 174230 - DNA, 510 bp, Arabidopsis thaliana
  unsure (1)..(510): unsure at all n locations
gtcgcatggcacgcgtacgtagcttggatcctctagagcggccgcttttttttgttttttttttttnnnnnnnaccaccagaaaatatttgcgttatgacaaatggatccatagccccctcacgcacttagttacttagttgagtattagatttatttacaaaatgggggggatcaaatctcaaatacgtaaaacaaagcaaagatttttttcacggggagtgtggtaacctttaagggggccaaaagataaataattaggcgaagggggggcgatttacacattatacctaatgacagcaaggaggggctcactggcctactcagggccgtgtgtgacataaccatctctgatagcgtttcagggttaaggctctcaggtgaacccgccatctccgcgcgcgcgcagggccggggggggcgtcagggaaggggtggtgtgggagggtcaggggatgcggggcagctgtgaacggcgatcgcgtgtgcgaagtgggcggcggggcggggg

SEQ ID NO: 174231 - DNA, 563 bp, Arabidopsis thaliana
  unsure (1)..(563): unsure at all n locations
gggagctactacgcctgcaggtaccggtccggaattcccgggttgacccacgcgtgggtaccgctgtnagaagacaacagaaggcccaggccaaaaatctattaatattatattgtaatagggattggccctcgcacccgaaagagataatatagattatttgtggttcctagaactttaatagtagatcatcacgctcacacccgcaacaaaagttcnctcntttatgggggggggggggaacccccccataagtatatcagaatataaataacaacccctcttctaatctaacatcttcctattctaactcgtattgttattggttgcacaaatatacagtgaacatatgccctatactgagcaaaataattctagtattatctccaaaattcatatcatactattaacttaacaagtggtatatatcatttgatcctaatttccacattgaatgagtctagtagactttatttatagctcacttattgctatctatatctaaatctaaataattacttatcaaagacattccatcatctaatacttctgcatcaaacaca

SEQ ID NO: 174232 - DNA, 532 bp, Arabidopsis thaliana
tgatactccagctctctacgactcactatagggaaagctggcacgcctgcaggtaccggtccggaattcccgggtcgacccacgcgtgcgtacggctgcgagaagacgacagaagggtacggctgcgagaagacgacagaagggcattgttggtgttatcacagcgtttaattttccctgtgcagttcttggttggaatgcttgtattgctcttgtctgtggaaactgtgtagtctggaaaggtgctccaactacaccgttaataactatcgcaatgaccaagctagtagctgaagttttagagaaaaacaacttacccggtgccatttttacggccatgtgtggtggtgctgaaattggtgaagcaatagccaaagacacacgcattcccttagtatcctttactggaagctccagggtgggctcaatggtacaacaaacagtgaatgcgagatctgggaaaactttgcttgagttgagtggaaacaatgcaatcatagtcatggacgatgctgatatacagttagcggct

SEQ ID NO: 174233 - DNA, 525 bp, Arabidopsis thaliana
  unsure (1)..(525): unsure at all n locations
tccatcacgcgtacctaagcttggatcctctagagcggccgcttttttttggttattggtgttnaaaaaaaacttccctaaaactgaaaacttttcattatcacaatcaaactattccagattacatacacattatgttcaaagcatcaatgatccaaacacaacaaaaaaaaactcatacctaaaaacccaattcatatttttctatcagtggtagaaagggcatatcaatcccgcgtggaaaaaaagnaaccaccttcatttttttaattctcccaccatttccacccattttcaggcctccctttaacctccataataaccttttttttctaacacctacaaccacgttaacttcgttcccaatttttttatattttaaacctacctctaatcccccttatttaacaaccaaggtttgattaataatctcaccataagggtctaacactttagaaacacaccctttagaaaaaaaccttagagaagggcaaatcctttcaactcttctaaacaagggggccc

SEQ ID NO: 174234 - DNA, 450 bp, Arabidopsis thaliana
  unsure (1)..(450): unsure at all n locations
gtcgcatgcacgcgtnacgtagcttggatcctctagagcggctgctttttttttgttttggcttttnaaaaaaaagggccacattcctacctccattagatccttacgcaaacacatcttaattcttagatatatgaataggcatacacgtgtattgtcaaaccggtgcaaaaccaaccacaacacaggggccaagacgggattttaatatttttggagttgtggggaaccaacccggggggttttgtataaaaaaaaacccccccatgcggcggtgcggacacgcgccccccgtcgcgacaggcggtcgcggccggcgcaggcggcgccgcggtggcggcgccgtacgggggcgacgccgggggggggagacggcactggactcgggcgccgggaggggcgcaggcttcgtggcgggatcgccgtggatcggactgtgttcgtcggtga

SEQ ID NO: 174235 - DNA, 363 bp, Arabidopsis thaliana
aggtctctacgactcactatagggaaagctggcacgcctgcaggtaccggtccggaattcccgggtcgacccacgcgtccgtacggctgcgagaagacgacagaaggggaacacagagaagttcataacgcatatggatattacttccacatggcgacttccgatggacttgttatgcgtgaagaaggaaaggataggccttttgtattgtcaagagcaatctttcccggtactcaaagatacggagcaatttggactggagataacacagccgaatgggaacaccttagagtctccattccaatgatattgacacttggtcttactggaattacattctctggagctgatattggtgggttt

SEQ ID NO: 174236 - DNA, 502 bp, Arabidopsis thaliana
  unsure (1)..(502): unsure at all n locations
ctgacacgcctgcaggtaccggtccggaattcccgggtcgacccacgcgtgcgcccacgcgtncgtacggctgcgagaagacgacagaaggggaatgttgatgattctgcttttagtgagattagcactgatgaattgagggcttatgagcgggatatgatgcagaaagacgcgggaaaacggcgcggcccacccgcgcttttctatttttagggggggtggcacccccccgaaatctacggagggaaaagaatgccggcgcggccggcgccatcactccggaccgagggaaggcggaatcgtaatgagcaggcgaatcggtcatactaacccagatatgacccgcgaacgccgctcgtggtcggtgctcaccatctcttactacgacgccgacgcgtccccgcgcccgctgcaggacgggggaatgctagcctccgaccgacagcccggcggcgcgccgacccgcgcgcgcctccgccggccttgccgtccccgacaccgg

SEQ ID NO: 174237 - DNA, 480 bp, Arabidopsis thaliana
  unsure (1)..(480): unsure at all n locations
tttgacgtcgcatgccgcgtacgtaagcttggatcctctangagcgccgcgttttttttgtttttttttttttnnnnnnaaanacctaaaaaccccaaaatcaactgtaaagggctcacctcgaacaaagggttgggaattacacatcacattttaccagagatgactagacaacctaaaacgcagttttaccgaataaaaaggagagcattttttttctcggggggggggacccccccccgcggggggcacgcaaaaaaaaaaacgcttcaggtgcagccaggcggcgggcgccgacctgatggactctaacaagtctgcgcgtcatccacaccttcccacaacgacctcaacggtgccggagcgtctcgccatggcgaaatcgaccacggacgggcgcccagcgctagcgcgagccctacatagcacaaagcccgcggatagaaaactggtggcgataccaccgccccgagctgggaa

SEQ ID NO: 174238 - DNA, 509 bp, Arabidopsis thaliana
  unsure (1)..(509): unsure at all n locations
acgactcactatagggaaagctggcacgcctgcaggtaccggtccggaattcccgggtcgacccacgcgtccgtacgggtgtgagaagacgacagaaaggtcagatggagaacatgattactaaagacatggctgaggaagatctcattattcttcgagatgaagtctacaagtacatgattgagggcgatctgaggaggttcaatgctcttgcaatcaataggttgaaggagaggcggagtcaccggggggtaaggcacatccaagggctgccatgtctgngacagagaaccaagaacatctgcccgactcttaaaggcaagaaacttgctattgctgggaagaagaaagtttccaagtaatcatcttgatgatctccttcttcttatcgtatactctgtgtagattgtctagccatctctgattaaatgtgatttgcacacccaaacctttgttcgaactgagccctttccagtttatcttcggctgtttagctattaaaaataaaa

SEQ ID NO: 174239 - DNA, 477 bp, Arabidopsis thaliana
  unsure (1)..(477): unsure at all n locations
cgactcanataggggagctggcacgcctgcaggtccggtccggattcccgggtcgaccacgcgtgcgtacgctgcgagaagacgacagaagggtacggctgtgagaagacgacagaagggtacggctgcgagaagacgacagaagggtacggctgtgagaagacgacagaagggtacggctgttagaagacgacagaagggtacggctgcgatttttctattgaggggggggctgcaacaacacgacagtatgctaaaaaaaattactcgccgatagacggtctcatgcttgtcacccgttatttttttcctaattgcagtgttgtttgattgaaaatcagttgtttggtcttttttattttcatttttgtggagtctcctacactcggatcttttttctacgtgctgaccctagtttgtttttgtttagtgtaacagcctgtgcatgcgaacctgcgaggaaagaatctatagtgt

SEQ ID NO: 174240 - DNA, 472 bp, Arabidopsis thaliana
  unsure (1)..(472): unsure at all n locations
cgtcgcatgcacgcgtacgtaagcttggatcctctagagcggctgcttttttttggggtttgggggtnnnaaanaaagccaaaaagataggttagaaattctcattctttcagtcacaaaatcataatcataacataggcctgtataaagaaaggttacaaatcacaagattaatagtccgctacacagactggaatgagacacttatttttcaactggggggtggggaccgggntcggggtgcactgaaaaaaaaagaacccccgtctttttgttttgggatctctatcctcctaaggcacaaaggataggggtctatcttcacccttaatggggaaactaagaccccaaggtggggctaagaaagagcggatgcgagggtaaggcacgaacggcggcggggagtctccgcggcgaatacagcggagagacgggatggtggggagagcagaaccgcgcgtgcgacgtgaga

SEQ ID NO: 174241 - DNA, 507 bp, Arabidopsis thaliana
  unsure (1)..(507): unsure at all n locations
acgactcacnatagggaaagctggcacgcctgcaggtaccggtccggaattcccgggtcgacccacgcgtccgtacacggctgtgagaaaaaagacgacagaaggacacttctaaagcgcctttctgatttctccgagcagcgaactccatgattgattggttgattaancagttctgctttatatgaacatgggggtgaggaaacggaactcaaagggcgcgttttttattttaggggggggggaaaccaaagccagtgtcgtggggacaaaaaacgccctggtgttgggtggaggcagcatatcccaaatattgagagagataaaatctaggagagtagagacgcgtgacgctccagaacggggaacacgatagatgagaaaacttcgacgggttcctctcggcctctcatgttaacctataacgaacggtagcagaaggggaggtagcgataatactctctgtggtagccgggggagaatagcttcctcagacatctgagcggg

SEQ ID NO: 174242 - DNA, 524 bp, Arabidopsis thaliana
  unsure (1)..(524): unsure at all n locations
acgactcactattgggaaagctggcacgcctgcaggtaccggtccggaattcccgggtcgacccacgcgtgcgcccacgcgtccgcccacgcgtccgcccacgcgtccgtacggctgcgagaagacgacagaagggtacggctgcgagaagacgacagaaggggaaaaagaacaaaaaaaaaaggtcaaaccaaaacgatggcgtttcatcacaatcatctctcacaagacctctgcttcaatcatttcaccgaccaacaccaacctccacctccgcaaccgcctcctcctcctccgcaacagcaacaacatttccaagaagcaccgcctcctaattggttaaacacagcgcttcttcgttcctcagataacaacaataacttcctcaacctccacacagccaccgctaacaccacaaccgcaagcagttccgattttccttcctccgccgccgccgncgncgttgctaaccagtggctatctcgcccctcctctttcctccaacgaaacaacaacaacaacgc

SEQ ID NO: 174243 - DNA, 524 bp, Arabidopsis thaliana
  unsure (1)..(524): unsure at all n locations
gtcgcatgcaccgcgtacgtagcttgnatcctctagagcggccgctttttttttgttttttcttttnnnaaaaagaatggattttgaattcncatttgtaataattgtattcacattattcatattctncagctacaaggggtctttgtgtgtacatgtcacacaaagacctcctctgcacctcgcctcttcctcgaagagaccgttttttttttaggggatgtggagcccacaccccgggggggccgacaaaaaaaaaaggcccccggggggggtgcgcgccgaccccgcacaactgactatgtgcgccgcgctgcgtcgacccatgccctcgcccacgtcggcacggatctgcgatagcaggcgaccttagacaaaaccggttaagaaagtgtcgcccgcaggcgcgcaaagggcggggtctagctcgctcgtgccagaaaatttgagtgttgtgatcggtacgtgaatgacgggataacagccacattgacagattacgcacgcacgggcgccctcccccc

SEQ ID NO: 174244 - DNA, 297 bp, Arabidopsis thaliana
  unsure (1)..(297): unsure at all n locations
cgtcgcatgcacgcgtacgtaagcttggatcctctagagcggccgcttttttttttttttgtctttnnaaaaaaaaaaanaacaagacctttccattcatcatttaatcccaaaacatcaatcgcggaaccaccatgggattggttttttgtctgataagaaagcaaggagcttctcgcgccgacggacacgggcggagcccgcggccgcgcgagggggcgaccgcgccttctttttttttcggggtattgattggggcccacctcatngcgggtggctcgccaaaaaaaaaaaaaa

SEQ ID NO: 174245 - DNA, 246 bp, Arabidopsis thaliana
  unsure (1)..(246): unsure at all n locations
ctctacgactcanatagggaaaagctgcacgcctgcaggtaccggtccgggattcccgggtctgacccacgcgtccgcgagaagacgacagaaggggacaaaaaaactcaaagtgaccaaaataaccaaaaggagaaatctttagaaaacctttaaaagttcttaaaaatggggaaaggaggaaactatgtgacggnnnnntggttttnnaatntgtaagagaagtttttttttttttgggggggg

SEQ ID NO: 174246 - DNA, 468 bp, Arabidopsis thaliana
gacgtcgcatgcacgcgtacgtaagcttggatcctctagagcggccgctttttttggggtttgcggttttttttttaaaagagaacccacggggagaggaagactaaaatatatacaaacacttacactcttataaatacaaagtataagcggaattttacaactttagagggagctggacaacccaaacacatttatggaaacatgatttttcatccgcgagggaggttaaaatttactgggccccaccaataaaaaaacccaccagaaagagcccctcccggaagaattcccggcaaagttaccttccaaattgccattccgagaattcctcccttataccacggcaccaatccactcacacctcgttctccgttgaaaaagggaatcggtttcatcgagccccggcgtccatagctagggcgaagaccttttcgataccacccatccctcgacctttccgccccc

SEQ ID NO: 174247 - DNA, 531 bp, Arabidopsis thaliana
cgactcacttttaggggaggctgcacgcctgcaggtaccggtccgggatcccgggtcgacccacgcgtccgtacggctgcgagaagacgacagaaggggattcagccggcgatcagagttaaacgaacgattaccagttaaagataaagaaaagcaaaagcgtagcaaacgtggatcgtgctgggttaagttgctccttttctcaactatccagaatattttttttttttgggggggggggcccatattaattgttggggacaaaaaaaagagtgttctttactagtgttattccctttttattctttgttttgtgagtttttactttttgtgtatgacgttgttcggtttgtcgtcttttatgtctgttgtttaaggtttttcgtttttctctttcggctatatgtttgttttgtgtgtcgctttgcatgtcctgctttgtcggttttgctgtattgcgttgtcgttagtacaggttactggctgtgattttctcatgtttggtcctcgttcatgcgtcgttgtttccct

SEQ ID NO: 174248 - DNA, 531 bp, Arabidopsis thaliana
  unsure (1)..(531): unsure at all n locations
ctatcgaagagtttgacggcgcatccacgcgtacgtaagcttggatcctctagagcgtttgctttttttggggaaggcgggccaaaaaaaggagaaacacttttctttccatattgatggtcgacatacagaagtctaaaccaaaaaagctcaactaccatataatatatccatcaggaggacattccaaattctgctacataacctgagagggggtttctacttcaagggagtggggncccccttcagaagagcccttttaaaaaataatgtcccccccgcccaatgcaaaagaggaatctccgccttaagccaccaagatccaagagtttcggatgtcctgcttgagtcataccctctaagttttgcgagagagaactcccgtttattggctttaactaaaaacacgccccggtgttaatggcggcctcccgcgaataaaaacataggggagcgtgctctctatttttttcttcgcaaaaaacaacatacacaacggccttggaaaggcttgcctgcgattatgccaca

SEQ ID NO: 174249 - DNA, 526 bp, Arabidopsis thaliana columbia
atgatctccagctccctacgactcacttagggaaagctggcacgcctgcaggtaccggtccggaattcccgggtcgacccacgcgtccgtacggctgcgagaagacgacagaaggggatctaatcacttttgcaattcaccggaacttagccgacgagcgctgatcaaatcaaccggagaagcaaagctatagatctactatctccttcacagttgctatcagagatgtataataatatgggaccccggcctggaatggcaatgcctcaggcaaatcctcagcctagcccatttgggaatccgttctctggacctggctctggacttatccggagtggcttgggagcttatggggagaagattttcggttctagctctgagtatgtgcagagcaacataagtcgctacttctccgatcctcaatactattttcaagtgaatgaccagtatgtgaggaacaagttgaagattgttctacttccattccttcacaggggacactggactcgaatatcagaaccagttg

SEQ ID NO: 174250 - DNA, 398 bp, Arabidopsis thaliana
  unsure (1)..(398): unsure at all n locations
ataaccgggccatgtgagcttaaatttatttttctctctaagatttaatctggtttttctttctaaaaactgggaataaatttaaactgggagaaatttttttcaagggggggggaaaacccattctgggcgggttaaaaaaaaaaaaaacccctgccctttaaatttaaaccacccccgttaaaaggcttccggcctttttcccgatggggggggaggcaaattaaaagacctacaatctaagccgggcggggatctcctttttcccctcccccgccttngaaaaccacccgagccgggtggcccaattaaaaggtccggttttgggcccccaccaaggcccttttttcgtcgggaaccttccccccccgcggggcaatcctcaacccccgcctgcc

SEQ ID NO: 174251 - DNA, 487 bp, Arabidopsis thaliana
  unsure (1)..(487): unsure at all n locations
acgcctgcagtaccggtccggattcccgggtcgacccacgcgtgcgtacggctgcgagaagacgacagaaggtccctaccggtttcgcgcgtagccctagccagagcagcacgctcgactgtgcttctcctccgacgtgagatggttgttgtagagggtgaggggaggtagagcgcgaccaaagaaaggtttctgnttttatggggggggggcaaaaccaacgcctctcttatactaaaaagtctttacgctttctatatttactttaaatatatgctttgctttggaggtattggattggttagggtttgtgactcctggacttatccatcacatattcttaaactaggtgtatggttgatgtggagcgtccgaatatttggtttgtacttctcagcgcacaatcttagcgtgcggggtttattcttgctgttgatagcgggattatgggatgggcggaataagtttttatagttgatttatcgca

SEQ ID NO: 174252 - DNA, 520 bp, Arabidopsis thaliana
acgactcactattagggaaagctggcacgcctgcaggtaccggtccggaattcccgggtcgacccacgcgtgcgtacggctgagaagacgacagaaggggatgcaatgaaacaatgtaaggcggatgtatctactgtttgcttagggttagctgcatctatgggtgcgtttcttcttgcttctggttcaaaagggaaacggtattgtatgcctaactctaaagttatgatccatcagccacttggtactgctggaggcaaagcaacggaaatgagcatacgtataagagaaatgatgtaccacaagattaaacttaacaaaatcttctctagaatcactgggaagcctgaatcagagatcgaaagtgacacagaccgtgataacttcttgaatccatgggaggcgaaagaatatggtttgatcgacgctgtaatcgatgatgggaaaccgggactaatcgctccaattggagatggtactcctcctcctaaaaccaaagtctgggatctttggaaagtcg

SEQ ID NO: 174253 - DNA, 380 bp, Arabidopsis thaliana
  unsure (1)..(380): unsure at all n locations
gtacgtaagcttggatcctctagagcggtttctnnnttggggggaaggcgcgttttttttagatatcatggcccatgaatggtgaaaagtttaagggttcttaattcttacacatccaatacaacctaagacagaaggcccacaatggtttatctttctaacacaagaagggttttttggcacacaataacacgccccttcttatttaaaagggggggttgggnccaacanaccacgaaaacaanttaaaaaaaaaaaagtccctcgcgattcttttcacacaaacggggagtttcccccttttttttgcaacaacggtcactcaccgggggaataaggacaagcggttcccttggcggtgcggccctgtgtttccccca

SEQ ID NO: 174254 - DNA, 501 bp, Arabidopsis thaliana
  unsure (1)..(501): unsure at all n locations
gcgtacgtaagcttggatcctctagagcgggtgctttttttgggtttaagcgggnnnnnnnncacgaaaattatatagatgtatttattgtggtacatacaattaccatgtcaataatctattacaagaagaaactgagctcatgtgtgggggtgaacataagcatgctctcaccaaaatcccttttggcgtcttttatgcgtggcggggggggcnnnnntccacccggggaatttccagaaaaagaaccctgaaggggtaccaggttttcccttatggggagtcgtatttaaaagttgccgtaatcatggggcataggtgtttcctggggaaaattgttatcccttcacaattccacacaaattagaagcgggaacaataagtgtaaaggcgggggtgcctaatgggggggctcctgaaatgaggtgggttgggttattgacgggtatccgaggtgggaactgggtgcgctggggggtaaaggggcggacagccgcgggc

SEQ ID NO: 174255 - DNA, 524 bp, Arabidopsis thaliana
agctctctacgactcatattgggaaagctggcacgcctgcaggtaccggtccggaattcccgggtcgacccacgcgtgcgtccacgcgtccgtacagctgagaagacgaccgaagggcagagctagaagacgagtgctgaggagaaggacgaccgctacatcaatatgcctcacgactctggaagctcgacttcagatcattcacctacatttctagatagctccggatgctccaacgatgcggctttacccacagacgccattcagttactgagttcatcattgaacaacctcatatatagctcaactcgctagtgaatcttatcaggcttgtgtgagcttcacattgggtgactgtgcatgggatatgtgccacggtgagagttctatctgcacacaagcggttaaggagccttcattcatatattacactttttgtcgtctaaatcttgatacttcaggatttccttgatctgaatacggattctctcgactttttggattatattgctcagaatggctgg

SEQ ID NO: 174256 - DNA, 515 bp, Arabidopsis thaliana
  unsure (1)..(515): unsure at all n locations
gtacgtaaagcttggatccctctagagcggcctgctttttttgggtaggcgggnnnnaaaaaaagatggttcaaatacattttgaaaaatatgttacatttgttttcacactcctttcctatgcaacaaatttctgacaacaagtatccttgtgaatattttgacaacaaatagaacaaaacctcatcccacataattttaaatgggaggcggggaatnnacccacaggcccgaccaaaaaaaaaaacccacaaaaccaactccgaaggtccaacctcctctttttaagtaacggcccgtacattccacacccaaaaacctcccaattttccctttttcccaataacccaaaggggaggaattcacggcgtcttcccgaccctcccaacatcctttcgcctagccacaccgttcacgcccacgagcctctccatatgcgtttcattttcgtattcgaccagcgcacgcccctctgtccgccgacagcgcgcgatctgtcgagcgcgcgcgcgact

SEQ ID NO: 174257 - DNA, 519 bp, Arabidopsis thaliana
acgactcactatagggaaagctggcacgcctgcaggtaccggtccggaattcccgggtcgacccacgcgtgcgtacggctgcgagaagacgacagaagggtacggctgcgagaagacgacagaagggtacggctgcgagaagacgacagaagggtacggctgctagaagacgacagaagggggtgtccggtgcgcccccggcggcccttgaaaatccggaggaccgagtgccgctggcgcccggtcgtactcataaccgcatcaggtctccaaggtgaacagcctctggtcgatggaacaatgtaggcaagggaagtcggcaaaatggatccgtaacttcgggaaaaggattggctctgagggctgggctcggaggtcccagttccgaacccgtcggctgtcagcggactgctcgagctgcttccgcggtgagagcgggtcgccgcgtgccggccgggggacggactgagaacggctctctcgggagctttccccgggcgtgaaacattcagctcagat

SEQ ID NO: 174258 - DNA, 518 bp, Arabidopsis thaliana
  unsure (1)..(518): unsure at all n locations
cgcctgcaggtaccggtccgngatcccgggtctgacccacgcgtccgtacggctngcgagagacgacagaagggtgatagtgatggctccatcagatgaagcagatctctttaacatggttgcaactgctgttgcgattgatgatcgtccttcttgtttccgttaccctagaggtaaccggattgtagnnntttttttcccttgggggggggggncccccacccnacgnccacccaacaaaaaaaaacccccccccancccccgcccacaaacaacccccccaccaacacacacacaccaccaacaacaaaaacacacccaccaccaccccccacacccacccgccaccaccaccaccaccccagccgcgggggccccgcgccgccaggccacggcgcggggggcgccgccgcccgccccccgcccgccacccgcgcggcggcgggaccgacaacgcgcgcgcgccccgccggcacgcgcgccccccccgcgcgcagccgccccccccccgcccccgc

SEQ ID NO: 174259 - DNA, 509 bp, Arabidopsis thaliana
actatagaagatctatgacgtcacatgcacgcgtacgtaagcttggatcctctagagcggccgcttttgggtttttcttttttttttttttttttgtcgagccacctcctaggcattcccattctagtgaatatagaaggttttggacttttgatgaacaaattatccgaaaacgttagtccaagcatgtattttctctaaataataaaaaaaagcattttttttccaaacatatctatttaagcatcgttttctaagtgtcgaatttgtcaattttcaaaggagtgatgtcatcagcaactttgaaccctccaaccactcgggcaaagaacaccatctgttgctcaagtgtgtatttgatgttttccgccttgcgaaaaccgggttgttctccttcgtactcaacaagagcaacaggcagaccttttttttttaatgcttcatagattttacgtgattgatctggagttacaaccttgctttctagtccttggaaaaggatgatggga

SEQ ID NO: 174260 - DNA, 491 bp, Arabidopsis thaliana
  unsure (1)..(491): unsure at all n locations
gacgtaacatgcacgcgtacgtaagcttggatcctctagagctgccgcttttttttttttctttttttttttttttntgggatcacacaaaaaaaggagaccagttcattattgatctgtttgaggaaatgatatccgcaagaaagtgtaaattgggcgtcaaccacaaaacaattaacaaaccggcttttggtatatataattagattagggagctaaagctttaaccgctttctcagctgcatcatccaaatcatcagctgttatgagtttcattccactttccttgaggattttctttccctgctcaacattcgttccttctagacgaaccaccactggcactttcaatgcgacctcttttgcagcgtttacgatttcactagcaattccatcacatttcattatcccaccaaatatgtccaccaagattgctttcacttattcgtccgatgtcagtattttaaacgcttcccccacctgttgctaaa

SEQ ID NO: 174261 - DNA, 473 bp, Arabidopsis thaliana
cactatagaagatctatgacgtcacatgcacgcgtacgtaagcttggatcctctagagctgccgcccttgggtttcctttttttttttttttttctctctctttaaaattttttacaattacagtctatcctttctgttcttttaaaaggatggggaaaacccctcctcacactttaaaaaagtttttttttaccactaaaaaagaaattttttaatttttttatacaaataacaaaaaccggtcgatttctcacgattttaaaaagggagggcgttttggcggtatttgtgggaaaaaaataagcaatacactacaactcaggcattagtacttagttcttatgaaagaaaatgcgaaaattaatattagtagtaaaaaaatgccaactatttacaaaaatagatgaattgcctactttataaagagaaagacactctagtgtgttcatgggaaagatgaggagaccgcgct

SEQ ID NO: 174262 - DNA, 533 bp, Arabidopsis thaliana
tcggaccatagtatcgccggctctatacgactcattatagggaaagctggtacgcctgcaggtaccggtccggaattccctggtcgacccaggcgtccgccaaactccaattttttttgtttctctcaataatattctgcgttcatactagtttcgctcgttccaatacatactaatggataacacaaaccgtcttcgccgttcttcactgtcataaacaacccatgtacactcatagctctcatgatatgagtgggactgaaatggagagtttatcaatatgaccgaacaggaagaagatctcatctttccaatgaacagacttactgtcaacaggtgggcatatcatataaaggaaaagtggttgggactttatgcgcaaaggagcatccatagattactggcttatgaccacattgcaaatttatatcccaccaatgacggcagaagtcactctctttcaaaaattttatggaagcagcctggtttcgcattactcaaccttaataaactcttccgtgtgcttgtcgccc

SEQ ID NO: 174263 - DNA, 549 bp, Arabidopsis thaliana
ctgcctgcacacccctaacgcacctcccgtgttcacccgcttttatatgggtcgcacctatagaagatcttgacgtcgcatgcacgcgtacgtaagcttggatcctatagagcggccgccctttttgtttttttctttttttttttttttttcttttttccgagagaaaaacgagttttttgcttcttgaaaaaattcaatgtttcgctattttccaattaaacaagctttttttctgttttcacccttcccaagctaattcgtgaatctatatcacatgaaaccgggctccctttcctgcaacagactttggggctgaaggcccatgcgactcttttccctgggtcggccaatgtgtccccagggttttttttttgtcctttcccattgtccatggtttgtacttacattccctcattttagaacttggtccttttttcttgcctcgccgtcttcccttgccactttgcgaaggcctcagtggggttaccctaacctcatgccccccgtctcgccttccgtttagttgggggtttaagttttctctat

SEQ ID NO: 174264 - DNA, 545 bp, Arabidopsis thaliana
tgaaaaaaaatatattaaaaattgtatcgaaaacacaactgtattctccagctccaagacgactcactaatagggaaagctggtacgcctgccggtaccggtacggaattactgggtcgacccacgcgtccgcaacaaatcttaaacgttttactttgtgctgcactactcaaccttaatggccgcctcaacaaaggctatatcctcccctgccttttacggtaaggccgtcaagctttcccccgagagatctgaagtcctttgtaagcggtcctgtgacagtgaggaacactgtttccaagccaaagggcccatcaagcagcccatgttacgaatctgaccgagaaaagtacttcgggcccttctctggacaatgaccagcctacctaaccgaagagttctctgcacactcggaacggaacacctacttacttgtaattgatcccctagacattctcaaagaccgtgacctaaaagatagtcagagtagaaggagcatgcaccgaatctctaaacagtagaacattcagatctaatcattaaac

SEQ ID NO: 174265 - DNA, 518 bp, Arabidopsis thaliana
  unsure (1)..(518): unsure at all n locations
ctgcacgcgtacgtaagcttggatcctctagagttgncgcccttgggtaatcctctttctatacttgttgtggggtggtttggattgacgggcccccatcgcctggtggcgaaactatccttaaggaaaaacaaacatttgagcggacctttaaataattcgggccgcgtcaaagtcgacctcacccatagaggggaggtttttttttttcgagggggggcgaggaactttaaaacagacacctttctgtgtggggggcccacatattctgccctaaacaaaccgtcagggaaaagaggttggggttgcatggatcaggggtgggaggggattaggtgctcgactgggttgactcggggcaggcaggggggggcaaggggttcggggggttcaaacacctctcgaccataactcattacagggggagggtgcctgtttactcatctccgcacttccctctttccctaaatacgagtaataagaaacttcctttccagccaccacggtgtggctcgatt

SEQ ID NO: 174266 - DNA, 553 bp, Arabidopsis thaliana
ggttgacggaagtacgggggcggggcggggcgggcgcgataatatttgggactacctatagaagatgcttgacgtcgcatgcacgcgtacgtaagcttggatcctctagagcggccgcccttggggtttttttttttttttttttttttttttttttttttttttgttttttttttttttttaaaaaaaaaaatttgctttttttgggctaataaactagtgattaaaaactaaacaaaaaaggttgggggaatatattttcccctggaaaggttttttttaaggggccaaaaaaaaacccaatttttgctgggggggggcctgaccgagcccaaaaactgttttttttaccaaaaacaagtttggtttcgaatcccaggcggttccaacccaagtagctttttttcccggtgtcggggccccggtgtccgagggggggtgtcttgtcccgtccccgggagacccccatgcggttttttttccctttccggggatacccagggggcgtccccctgcttaacgcccccttctaggggggggagggaccccaccc

SEQ ID NO: 174267 - DNA, 503 bp, Arabidopsis thaliana
tatacgactcatttatagggaaagctggtacgcctgcaggtaccggtccggaattcccgtgtcgacccaggcgtccgctccagatgcttctcaattgagccaaatactgcaaaaccccgctatgtcgcagatgatgcaaagcgtactttccaatccacagtacatgaatcagcttatgagtcttaacccacaactccgaagcatgctagatatgaatcctcagttgagggaaatgatgcagaaccctgatttccttcgccagtttagctctcccgagatgatgcagcacatgatgtctctacaacaatcacttttctctcagaataggaacacggctggccaggatcctacgcaaactggtgctgcgacagggacagccaataacggaggactagatttattgatgaatatgtttggcagccttggtgctggcggcctaagtggcacaaaccaacccaatgttcctcctgaagagcgatttgcgactcatttgcaacagttgc

SEQ ID NO: 174268 - DNA, 482 bp, Arabidopsis thaliana
  unsure (1)..(482): unsure at all n locations
atgacgtcgcatgcacgcgtacgtaagcttggatcctctagagtggccgcccttgggttttttttttttttttttttttttttttttttttttttttttttttttttttttttnaggcaaaacagaaacaatttttttcgggcaaaaaaagtttaaaacaggaaattgattcccgcaaaattttgttaatcagagagagagattttttggaagagggtcaaagtaaaaaaaaaaacttgaacaaaagttttttataaatgatcattgggggaaagggaagccaagagatcacttggacttccacttttggtgccttcacttccctgggaagaggggtgatttacgtttttcaacacatttaaggcctttgaaactttggcatttaaagcctttggggactcgagcagatgcaaaacctgggtttggtctctttccagagacttcccactccttttggcagggggctttttttttttttggtc

SEQ ID NO: 174269 - DNA, 490 bp, Arabidopsis thaliana
gtacgtaagcttggatcctctagagctgtcgccctttttttttttttttgaggaaaaaaaaataaaattatccattgttaataaaatggaacaagattcatggccataccattggctctacatcagggaaatattcattataaaaccattacgccgaatgaaaagtattcaagttttggagatacttttttttttagaatcagccacccctagcttttcttctagctgggtggggaagcaaatcaacatcgacttcatctttaggaaactgcacggaccttaccacagatcctcttgatgaaaaaactttttcacttaaaagcatgttgaggggactttgttcctgggcaaaaaaccctaaggggtcttcaagccttgattattcatcatactggttcaacctgagaggagaaagtctctctttatgggctaaaacaatttcttcaggttaaacccggcactcttttgttccaacccaaactcttataag

SEQ ID NO: 174270 - DNA, 479 bp, Arabidopsis thaliana
  unsure (1)..(479): unsure at all n locations
tgacggtcacatgcacgcgtacgtaagctgggatcctctagagctgccgncctttgttttttttttttttagtagcagaaatttaattaatattgatacggaaaagtgtaccagcgctcatcgttcatataaagacatgcgaatcgaacgtaatacgattgaggataacgatcccggatccaaaggggaggagagggtcgatttttttttctacaacgcttatggtaagtggtccaacaggctacatccacgcgcgaggtatcgagcttgggaggggctgataaccaacgaggacataggcaacgacttgaacttggattccggaagcgatgctactggaagacatgtatgataacaatgtaaggttctgtcacgaacggccaacgagtgtctaggaatagtacacgcttcaagctagtaccaacagaacggtttaacttgtctgaacctggtagcgatctacgcactgaggggctgtg

SEQ ID NO: 174271 - DNA, 502 bp, Arabidopsis thaliana
cgactcatatagggaaagctggtacgcctgcaggtaccggtccggaattccctggtcgacccacgcgtccgcccacgcgtgcggcaacgcggatattccagactaaccctatgaataattcgatctttttgtcgagcgatcggaatccttgtgatttacgctggagacgcggtacatgggcacactacttacattgatgcaccattttcccttcaatgccggacttggtgccactagggatcctcagacttgacaaaaagagtggggctatggccgggcaggatgcaagggcaacaggagtcgctcatgctcttgcaccttgtgtggcggactgcacagatcttagatggcgaaggggtgacgagagctatctagaggaccctgcagttgagaatatgcatgaccccaagattcatcgatggattacaaggaattgctcgttacctcgatgatccgaatattaaagtggttggttgcgccaacattatgcagaggccggagg

SEQ ID NO: 174272 - DNA, 342 bp, Arabidopsis thaliana
atacgactcatatagggaaagacggtacgcctgcaggtaccggtccggaattcccgtttacgacccacgcgtacgccctaatctactctctcttctctatatctgtacactttgagaaatggctacttagaactgtgctcggcgtcgacgatcactaccataaccgattcttgactccggttaattccgagcggttaagagacagagcaaaaccgcacgctagtcttttttttaccgcggggcgcgcccgcccgcgcgcaccataacaggaactcggggtggaattgacgtcgaaatcgatcttgattcgcagaagccgccaggtcggataacgaaaagctc

SEQ ID NO: 174273 - DNA, 505 bp, Arabidopsis thaliana
  unsure (1)..(505): unsure at all n locations
ctatagnagagttatgacgtcgcatgcaccgcgtacgtagcttggatcctctagagcgggccgcccttgttttttttttttttttttttttttttttttttttaaacggaaacatacgggtctataatttatttatgtgacaaaaacgggacaaggctggactttgattatatcccgggaacaaaatttagcaaggtttaatgggttatgaaccccattttccaaatttgacccactttgggggtgtggggcaataaaattttttttttatcgcccttctattccttgggaaggaagaacttttcttgatttggcgcccaaggcgagtttatttgaaaaaaaagatattgttttgggggagggatgtctttggcttaggatgaaaaaggggaggggctggggggggggttcttttccgaccggggtggaccaaaataagggggttttggtggattcctcccccagggggcgaaaaatgttagggtgggacaatccccctctccga

SEQ ID NO: 174274 - DNA, 519 bp, Arabidopsis thaliana
  unsure (1)..(519): unsure at all n locations
ttaggtccactatagaagagtcttgacgtcgcatgcacgcgtacgtaagcttggatcctctagagcggccgccctntgttttttttttttttttttttttttttttttttttttaaaccaaattgttctttaacgatttaaaccaaaatgtgtttaaacgatcaacccctaagtggtataaaaagaaaacacataactgtgacactttgaaaaagaaaataattgttgctttgaccataaacttttaggtttattacgcccatcttttttggctgagattcttacctctgttcaaacagaagtgatcgctcaggctacgtatgaaggcgggtttagcctttgacttaaaggggggttatgccaattgcaccacatgcgattttcctgggtgtgttgccagggtttaaaataacctcttggcccccctttccgaggtattctttagcttcaggaaccaaaagggcttttacaagaacatagttggcccctttcgggggtttctggctggccctcttttgt

SEQ ID NO: 174275 - DNA, 565 bp, Arabidopsis thaliana
ctatagaagagttatgacgtcaactgcacgcgtacgtaagcttggatcctctagagcggtcgccctttttttttttcctttttttttttttttttttttgagttcccaacgacattactggaaaaatcaagatcaaggatgtaggaagacaattgcctttttgttctaagatgatcagaaaccgattcacaattatcttgttcaacgaaataaacggtttttttggagggaaacaaacccaactttttttctaccggacaacattcttctcttaggaggacaattcttgggatttctccgaagttttaaagcggcagtgcttttctttaccggatggtaaagagttgtgagttattctccaaggtcgcactttattatctattcttcaataaagcttaggttttgtgcaaaaataatgagtcccctgaaacaaaactttgcctaaaaatatggtgggcattttcttgaggcaatcaaagtggagtgtagcgggggctgccactgtgggagatctatagggttgacaagcctttttccctttggctgtgtgtcgaccttttggcaa

SEQ ID NO: 174276 - DNA, 548 bp, Arabidopsis thaliana
aaggagaggagaggggtggcctgccaggtccatacgactcacttagggaagaacggtacgcctgcaggtaccggtccggaattcccggttcgcccacgcgtgcggacttgatcttcttgccgttaccaaaaccaaaatccctaaatttgccctcatttccctctgattagatcccttaccccgacaaagacaccaaaattcttgagggcgaaagagctgattgaatgtttttggtatctcggagcctatttttttgggggcggggacgaccacaacagcaacaagaacaacaaggttggtgattagtgagaacctctgactccacaacaagacccactgacgatgctcttagtcgacaaaagatcgaattttctctttttggctagcggggagggaaaagacgacgattccatattgctattggaccctggtgcacttattaaagaaactactgtgataggccaggttgatagaaatgtgtaagaaaagggagggacgagtttttgaaattggtgtaggttaccaccaccgaggaaatttcttacccc

SEQ ID NO: 174277 - DNA, 325 bp, Arabidopsis thaliana
gcctgcaggtaccgggccggaattcccgttttcgcccacgcgtacagcttgttttccgaaattttctcaccaagcttcgaacacaaagaatcggccatgggctacgcctcttcaaccggcgctcagagcttgttcactccctctaatgtgtcctccataaatgcaagcacggaccttgtgctgcttctatgctgcctattttttaactggtgtctcctcgcgctctcaggctgatcggccccaagccccctgacggatgtcgtaaaattccgagctgtctgtggcccgtgggagtacctgaattagcgaatcgcggacctatcat

SEQ ID NO: 174278 - DNA, 482 bp, Arabidopsis thaliana
  unsure (1)..(482): unsure at all n locations
actatagnagatctatgacgtcacatgcacgcgtacgtaagcttggatcctctagagctgccgccctttgttttcctttttttttttttttttttttttttttttttttttttttttttgaaaacngggactctggggctaaaacttccacccttgcacaaaataaaaaatttaaaggtccaccggcccaccgaccgaaaaaatcaaagttcaaactttttcacaggtacgcttttaaggctggaagggtgtttttttaaaaggcaaaagagcacatggccactggggctttggggcttcccatcttattattttgttgttgggttggggccttagatcccaaccttcttttgatttttggaaatttggtttagggggatccaaggatccatgacgtgaggggcaatggggccaccctaacccgggaaaccgggaaacccgtgcaaaggtccaaattctttaaaggttttaagggcacaatc

SEQ ID NO: 174279 - DNA, 499 bp, Arabidopsis thaliana
tatacgactcactttagggaaagctcgtacgcctgcaggtaccggtccggaattcccggtgtcgacccacgcgtccgcccgagcgtaccgaagtggctcatgccgtggatttccgtttactggtctaccgattatgcatccattcctatacacgcttatcaatttctctacaactagccgacaactgacttactgatttagaatctctcatagacatgtttactgctgattatgcctaagctcctcacgactgttacttactttgacttgcattcagacctatcgctctagctaccaattatcctacccaccacaagaccaatcgcgatgagtacactccagtagcggtctgacaagctatctgcgactcatacactctacctgtttgtaagtgtattacaggattccagacctggaatacatcagtatgcagatggagatacagatcgcgtgtattgagagaggaatacgctcctgagctgagattacgaatattgat

SEQ ID NO: 174280 - DNA, 478 bp, Arabidopsis thaliana
  unsure (1)..(478): unsure at all n locations
ctcactatagnagatctatgacgtcacatgcacgcgtacgtaagcttggatcctctagagctgccgcccttgggttttttttttttttttttttttttttttttttttttttttttttttttttttttttttttttttttttttttttttttatttttttttttttaagggaaaaaaccggaaattcatttggatttttggagaaaaagaacttaagggtttttttaaagggggggcccctatcccgttagctaaaaaagggttttaaaaattacaggaccctggacttaaatttttttgtttaaaaagagagaaggattatttgaaccccaacggttcaaaaaacaagctttttttttttgggggaggggggggctctctaaaggtgaggggcccccttcttaattttaaaaaccccctcgaggagaagggctaacactcttttatgtggcaccggtggggtataccccccgttttt

SEQ ID NO: 174281 - DNA, 321 bp, Arabidopsis thaliana
tgcacgcgtacgtaagcttggatcctctagagcttccagcctgggggaagcccggggtgccgttgtatgcacggtagaacagagaatgtatagaccaagaattgtatgtgttcagtgaacaagaccaaaacaatctttttggaagggaataacactttcaggcagacagaaagctttagaagacctaaaaaaaagatttttttgtagtcggggaaaacacgctcatggggggttaattcctttgtttcaatgaaaaactttggcggccaagggaaaggctttaaccgtttgggaactgggttgaatggcttttggaccaaa

SEQ ID NO: 174282 - DNA, 485 bp, Arabidopsis thaliana
tacgactcattttgggaaagacggtacgcctgcaggtaccggtccggaattcccgtttcgacccacgcgtacgccccggtggagaagccaccgaagttctatccagctgaagatgttaagaaacctctcctcaacaggcgcacggaaaaaccaaccaagctcagagctagcattactcccaggtacagggtctgattatcccttggctggtaggttttattttttaagaaggagttgttctcccctaaagccaggcttggcctctcgcgttcggattcttctgtgactcggacccacttcatagatcaactggacgagtccttcggagacgctggtaacccagggcctaatcgtgatttggccacgtgcactaaacggttggacatttgactgggaggccacgcagtggctgaaatgatcgtggactagagtactttatgaccaaggtttcgctggagcagtaactgcgtatccacgacccgacc

SEQ ID NO: 174283 - DNA, 539 bp, Arabidopsis thaliana
  unsure (1)..(539): unsure at all n locations
ccggcactaatacgactcatatagggaaagccggtacgcctgcaggtaccggtccggaattcccgtgtcgacccacgcgtccgcgagaacgagagagagagcaagtgaatgagcgagacaaagagtttagcacacagcttataaccaaactatgaacaactacagcaggngactggaagcgtttacagattccgaacgagtgagaaaggcttgggttccagaagccactatgtttttagtgactagctactggtgcaccatattggagagtatatcggagaagagacatgttgtgtctcatcaggctactcagttgtcaagtaaaacacgagtttcggcttgacgaaagtctagaagatttagtttctgagagtcgaaaacgagcttgagacagacacagattaaagaacagctgccgaaatcagaaacggcattcgtattggtcaccgactcaacatacggcttttttactgcgcggcgggagacttgtattatccaacttttatcacttaccgcgaacgtcgggtaattgatcttta

SEQ ID NO: 174284 - DNA, 510 bp, Arabidopsis thaliana
tatacgactcatttagggaaagctggtacgcctgcaggtaccggtccggaattcccgtgtcgacccaggcgtccgctccaccgtggacacaacagtatgaactatgcaattcactatgttatgtactgtgtgtacatcaggaacacgtgtcagccccccaacctcaaagtttggatatgtgagtggcagtagaacgtgattgcactctggtatgcatgtgtgcaggggagtggtgctacttaaacggatcgcctttctgaaacggtgagtgagaggaccatctaataacgatgactgcgcccattaacgcgcctatgaggctactgtgataggcagtactaggagggtctacatccttggaatctccttcacttaaggctgggagaaagactcagtgaggtctatggaaattaataggagtaggactggacaagaatgcttttgggtgtgagaaatagtgttaacacagacatgacactgcagaagatcgtgggctcttaatgctagagg

SEQ ID NO: 174285 - DNA, 467 bp, Arabidopsis thaliana
atacgactcatttagggaaagccggtacgcctgcaggtaccggtccggaattcccgtttcgacccacgcgtacgcccacaccgtgacgaacaaacactgatgatcgtgtgtgtgcttcacagatgatccacaacaagggaggaggagggggtcttcatcacactcacccatctttcgtgcgactctcccgcttctagcagggagcagtgattaaaagcagggctctatctttttttttaacaacggggcgggaccggacggagtaacatcgcactcggcgtctcaatggcacgtcgacacttcgtactatgttcaacggaatccacatcgaggaccaaatcattcctctcggaactccgttggttgttcaaaccccgacacgccggcaatagctcatagccgaagcgcgaaaattacaccttagcactttaatgtttctcttcttcggcggaaaggcagcgtgtcgt

SEQ ID NO: 174286 - DNA, 507 bp, Arabidopsis thaliana
  unsure (1)..(507): unsure at all n locations
ctatagnagagtctatgacgtcgcatgcacgcgtacgtaagcttggatcctctagagcggccgcccttgggtttttcttttttttttttttttttttttttttttttttttttttttttttttttggnnnnnnngnngggggcggcttggccaaagaaaattacatccccaatttctcggccttattttctttcccttattaaaaaccaccccccccattttttttccccgggtcttggtctttggaacaagacccgtattctattaccctaggtgagaggacttattttacaggacattttttgggtgaagactcatgagctggggctacaaagcttgcaatgaaccgagcatcttttcctttatcatggccaaggtccgttgaaacggaatcccccctttggaaaaccccccgtccgacggttctggggcctaaaaacctgcgtaattccctccgggggcggggatacccttgagggggcttttctcccccccctggttaattcc

SEQ ID NO: 174287 - DNA, 204 bp, Arabidopsis thaliana
ttgacgtcgcatgcacgcgtacgtaagcttggatcctctagagcggccgtccttttttttttgtttttcgataagataagggccttatggattatggaaccagaggaagcagcctttgcgactaatacgctgcttcgtaccttatggcttgcttaatacattccttatgtacagtgagagagaggagagctatattctgtgaaa

SEQ ID NO: 174288 - DNA, 514 bp, Arabidopsis thaliana
  unsure (1)..(514): unsure at all n locations
aaacgactcactanagggaaagctggtacgcctgcaggtaccggtccggaattcccggttcgacccacgcgtccgcccacgcgtccggcgagaagacaacagaagggtacgggtgctagaagacgacagaagggtaccgtttggataagacgacagaagggtacggttgctataacacacacataggtactgctgccagaagacgacagaaggattttttctttagaaggtgacacaaggcggagaagagatcgagagaagaatatttttatctttttgggagaaaaaatatggctgctttagtgatgctctcttcggggacattaaaaccagttggtttcacggtggagaagacttgcgctagagggtttcccgcgctcacacgagctagtccctccttcaaattagctgccgtggggtcaagaagatcaagaccgtccttccctttgggttttacggctgcatggtcttttatgctggggttgtcgcctccttgcgaaagggcgagggatac

SEQ ID NO: 174289 - DNA, 418 bp, Arabidopsis thaliana
  unsure (1)..(418): unsure at all n locations
aagagctatgacngtcgcatgcacnngcgtacgtaagcttggatcctctagagcggccgctntttttgtttttttttttttttttttttgcaacactagaagtcttataatncaaagtatgtctgagttttacacattagagagaaagagaccagcacagaacatttatangaacatgattacacatgccctaacaactttaagatttactgagccatagcactttgtgttgacacaagaagagcacctcncggaaagaaattccggcgagagttacnncgcccaaattgccaatccgggtgactcctcctttgtacacgtcaccactcgctgaccactcgttctcgttngtaataggactgtatccatcgacgttagctccatacttgtcgacgtactttgaaacaccgtatcccct

SEQ ID NO: 174290 - DNA, 188 bp, Arabidopsis thaliana
  unsure (1)..(188): unsure at all n locations
cgcacgcgtacgtaagcttggatcctctagagcggttgccctttgggtttgttttttacataacaaacttgctttcccagcttaagacacggagataacagagaacacagcataggtcatatcttgtatcaatcgatcaagagcaaagtacaaccaacacattttaatcgcatagagggcgggncctt

SEQ ID NO: 174291 - DNA, 283 bp, Arabidopsis thaliana
  unsure (1)..(283): unsure at all n locations
agctttgacgtcgcatgcacgcgtacgtaagcttggatcctctagagcgggccgcctttgtggtttttttttttttttttttttttttttttaattttttggaatnnnngggaaaccaggaaaacccctatggttgctgggaattaacggaaataaccagaatgcttggattcttaaggttatggagagcaaaaaaaccaatgttttttaattttttttatgggaatttgaaccaatggaagggacttagtgcacctggtcccctcctttgaaaactccgaaa

SEQ ID NO: 174292 - DNA, 197 bp, Arabidopsis thaliana
tctacaagagctggacgagctatgcacgcgtgcgtgagcttggatcctatagagcggccgacctacgcgttcgcggacgcgtgggcaattttacagaagaaagtgaaaagaaagagagaaaggggaagatgaaaatgtaaaaccaccatgaacgttgctcacactccttactatatgttttggattgtgcgatctca

SEQ ID NO: 174293 - DNA, 514 bp, Arabidopsis thaliana
aaacgactcatttagggaaagctggtacgcctgcaggtaccggtccggaattcccgggtcgacccacgcgtccgcggacgcgtgggcaattttacagaagaaagtgaaaagaatgagagaaaggggaagaagaaaaatgtataaatcaccattaacgttgctcacacttcttactatatgttttggattcttcgatctcagcagtgctctttatggatttttttcaggtggggttcagcctcactgcttctaactttaaggccaaggttcttaattcaaatggagtccgtctcgagagaattatttgcaccatggtgtggtcattgcagagctctaatccctacatgggaaaaagtggctaatcctgccaaaaggaggtttgtcctgagagctgcattagatgcgaatgctcataaagccgcccggcccgaattattgcttgagaggttttgccctactgatggttttgttcctttacaagccgcaattggatgccatggggacaagatattgt

SEQ ID NO: 174294 - DNA, 310 bp, Arabidopsis thaliana
  unsure (1)..(310): unsure at all n locations
gactcactttaggaaagctggtacgcctgcaggtaccggtccggaatttccgggtcgacccacgcgtgcgactgaatctgaaggttcggccactgggagattcccgtcgcggacagagccaaacgaggtgatgatggattcattatttgtgaactattcttactggctcttcatcatttaccattatcggtggttaaataagtgtaccattgtactctctgtcctgtagtggaaaaatgccacagatcctctgtgcgngttttctttgttctcttcataatttttccatacacatactaataaattcttt

SEQ ID NO: 174295 - DNA, 547 bp, Arabidopsis thaliana
cgacgccgcctccaccccccgggggggagtaatcccgggtcttaaccattattttggggaagctggtacccctggcaggacccgtcccgaaattccgggtcgaacccaggggtccgcccagccttccggattagccggttggttggtggccaagggttgattaaccagggagaagttcaacttggcttggtccagaaccggaaggagagaaatttggttggccaatagagatttgaattaattggaggttaaccaaaagggcttattggattttgaagactttggagaatcactaaaggtttacaatcttatggcttcctataaggagaaaacggactttacctttaggcttcaccacatggactgccaaggtctaattgacccccaaaaggtgaaccaaatgttagatggcctttctgtggaatttgaaatgaacctggtctgggacacaatagagaggatcctggaccacacttttgaggccccacatggggatcgctatggaagaattgaaaaacaaaggggacctatccccttactcaaaccc

SEQ ID NO: 174296 - DNA, 486 bp, Arabidopsis thaliana
acgtcgcacgcacgcgtacgtaagcttggatcctctagagcggccgccctttgtggtttttttttttttacccatatattatttaagttttgtgatttttactaacagggacattaaaaccaccattagggcattatttaacaacggggcatacttaaaccagaagacaatttttggcacatcttgggagacagaatctaaaaaattctccttggaggtttttcaaaaaccaccctagccttaccccgaaaaaaaaaacttaaaagcttcgccggtcttggttgcgccaactaaacctctaaagagattccttcggtaaccacccacaatctttattggaaaaaattttcgcacaagaatattactttgcgaaaccctttaacacaaggggaatcctcccttttgaaaaagtcttaggaaacctgaatcctctggacttgaaaaaaaacaaatggtaatatttctcacagggtttttcgcttttta

SEQ ID NO: 174297 - DNA, 360 bp, Arabidopsis thaliana
  unsure (1)..(360): unsure at all n locations
tgggacgcctgcaggtaccggtccggacttcccgggtcgacccaaccgtccgcaactctacacgcaattcatccaaggatcttgctggcgccattcgccaatatccatccccatcttcttcgatttctgagattcggncgaaaatcatcagatggggttacagaacgaagccagccctccctcttataccgcggaaaaaccnccaccggccagagaggactcccctcccccgggagggggccccccccccccaccagaaaaagaccctcgccaacgtcttcatcgttggcggcggcccgggggtctggggcctccccacgccctcaagcgaacccggaggcctcagggggggcccccccc

SEQ ID NO: 174298 - DNA, 536 bp, Arabidopsis thaliana
gactcacttaagggaaagctggtacgcctgcaggtaccggtccggaattcccgggtcgacccacgcgtccggccaggcgtaccgaaaacagaggacatagacggcacatttatatagaaccctccccccgagccctagtggaataaatactaccatcaggaccgagtggcctttgaaccatcatacactcaccatgcatgatactataccgttgagtggaccctttttttcgagaggcgcgaaacggtgtatattaaagaataatgtaaaaaattcagctcttcgtctttcacgagccacgtcagaccctagagcttctattattaccgagctccaaacaagatatttaattcttaccactagaagccgtgtccgcgaacccccccgccccgaaatgagatgaccctgacagaaaaaacttagttcgattgtagtaggtttcggccgccgccaggaacgagcggcgaatgggaccgctctcgaccctagttatacgtgtgaagggacccgcacaattacatataagaatcataaat

SEQ ID NO: 174299 - DNA, 576 bp, Arabidopsis thaliana
  unsure (1)..(576): unsure at all n locations
tagagagctttgacgtcgcatgcacgcgtacgtaagcttggatcctctagagcggccgcccttngttggttttttttttttattttttttnaatgggttttnnnntnttttntttnnggtntnnnnnttttttttaccgccacacaagcgtctttctattggacttgcattcaatattagaaatgcatgagaacaggggaactacatctaccaactacacacttttgataggacatgtggaaaaaaaaaaaaccttcgtccctgactccaagcagaaaaaggaagactcatattgatttttccttttaagggntgttattacaagtaaaaaaaactctttactgagacgggattacttaacagccctgggtaagaaaacagaaagggtttctgggtgggtttttttttgaaaagggctccccaagccaaagacggaaatggaccctttttatccttaaactccttgacagcctaaacattaacggaaaatcctttttggttaaaggtatcaatagcggcctgggcttgtcaaccccttttactctgacaaggatcaaccaattaacaaaagtgggg

SEQ ID NO: 174300 - DNA, 393 bp, Arabidopsis thaliana
  unsure (1)..(393): unsure at all n locations
ctttttttttttttttttttttttttttttttgttggaacaacaagtcatcatcgtgtanangttttatacccaaaaaatcccattgctaatatagaaaaataccatgtagcgacattcattgatttgagattcaatgaggattttttaatataaaagaactctccagttgatcaacatttgctcctctaccacatagttactccatctgaaaatagagaatatgcaacgcagaactcgggatttctgcgaccaaatccttttcggaaaccaactgtcaatgatgttcccaataggagattccctttgaatttgcagccatctgtctgcaagcttaaacccatacttagatgcagctgacagaagaagaggttcatcaaccctttctgaaaca

SEQ ID NO: 174301 - DNA, 322 bp, Arabidopsis thaliana
atcacgactgatttatagggaaagccggtacgcctgcaggtaccggtccgggattcccggttcgacccacgcgtgcgcactgatctccatctacttacgatgctctacaggtaggtttataacgcgtgctgtaacgtgggtatatgttacttaccaaaccagagtacgtaccgcattgacgcgtagctagatacgagaagtacctatcaccggtattcggattagtgactaccctctatttatcaggaaggatcttggcaaccaaagattcgcagtcttcacagtataggtcgattggcggcgccgatgaacgctgccgcgt

SEQ ID NO: 174302 - DNA, 483 bp, Arabidopsis thaliana
  unsure (1)..(483): unsure at all n locations
cgaagaaacacggggannccaaccaggaaaacncagggggncacaacgnaccaagaccagcagaccaccgtctccanncagggcnnngaaggagaaagaagacncaccaaggacggcaggccccctcctaaattcggcggcggggagncccccccgccccaagaagaacaccccccaccgggggcgggaggggggcccccaccccaacgcgnaccccaaagaggaaaagacaaggacaggggggaggggaaaaaacaaaaaaacacccacccccaccgagaggggcgccggggaccccaaaaaaaaacccccccgggggggaagggggccncagacgcccgcagagaaaaacaaaggcggggagggaaaacaccccccccgaggaggcccggagacaaccaccggcacaagagaaaaacccagggggcgggcgggggcccgcggnaaaccaacgggggggggagcagggggggaagaccgccc

SEQ ID NO: 174303 - DNA, 433 bp, Arabidopsis thaliana
acgtcgcatccacgcgtacgtaagcttggatcctctagagcggcccgcctttttttttttttttttattgtacagaaatttaattaatattgatcgggaaagtgttacaggtacattggtcatattaatacatggttattcgaccttattgatttaaggtttgattccctattccaaggggtaaaaaagggccgaagtcttggcttttattttcattggaagctgggtaacatgctttattcacgttccaagcaacctgcccgtgaaaggatgaacacccaacaagacatcagcaacttcttgttctttggtttccggaagccatgccacttccagaacctcgagccttcaatggtagggtcgatcaccaaccgaccttcaatgacatagatcactagacacttcattccaattacacaacttgttgcttaac

SEQ ID NO: 174304 - DNA, 564 bp, Arabidopsis thaliana columbia
  unsure (1)..(564): unsure at all n locations
agacggacggcgccccgcgggcgcgctgggnaaagaaatcccgcctcacatccacatctattagggaagagctggtccgcctgcaggtcccggcccggaattcccggttcgaccacacgcgtccgcggacgcgtggggcaaagcggatattccagactaacgcgatgaaaaaattgagtctttccacaaggctcgaaatccctctgctttacgctgttgacgcggttcatggccacaatacttttattgatgcaaccattttcccccacttgtcggacttggtgccactagggaccctcaacttgttaaaaagattggggctataaccgcccaggaagtaagggcaacaggagtcgctcaagcttttgcaccttgtgttgcggtttgcacagatcctaaatggggaaggtgttaccagagctatagtgaacaccctgcagttgtgaatattatgaccgaaagtatcatccatggatcacaaagaaacgctcctttacctcgctgatcccaagattaatgtggatcggtgccccaaacattttgttggggacggaggcacaataa

SEQ ID NO: 174305 - DNA, 520 bp, Arabidopsis thaliana
gactcactaaggggaaagctggtacgcctgcaggtaccggtccggaattcccgggtcgacccacgcgttcggctgttttaaagctaatattgcctaggagaggaggtcacgcatttgttgcgcagcataccaaaaaaacaaaactggcacaataaaatgtatctgtgcgctcccagcatctcggttgacgagaggcccaccctttagaccctcaatttttttccgggggtaaaaaagaaggcggaggtgcttagaatgggacccccgccttttggacaatctggcgggacatcgccagcttcttttaaattataacttcaccctgctcagcaaaatgtttgacactgctaatcaccaggaatggcaggcccacgcagtgtgtgccgctaccgattaatagcatgcaacggagtaaaaccatatgtttccaccaacctcgaattccaaacaaccaagaacagcgttattttcataccgtcacacgccgatatacagccggaataataaagagttatctttg

SEQ ID NO: 174306 - DNA, 629 bp, Arabidopsis thaliana
  unsure (1)..(629): unsure at all n locations
agctttgacgtcgcatgcacgcgtacgtaagcttggatcctctagagcggcccgcctttttgtttttttttgatggcaacattggaacccttctgattatataattgcngttacaagcaaaaatttatttcatgaaatacatatttggtggaagaagaaggaacctgaccctattcattttcataggcttctggggtgtctaatgaaggtattggtgtttagaattatagcttttaagccggtattagctgcggctgagcccatgctgctgacctaacaggaccagccttcacttgcttcctaccaccaaatggcccaaggcctaaaaccccttgcctgccaagagatatttttcagacttcaaaattgatccatggctcagctcttcatgattattaggctgaggacccggtagccaattgggagcttgcttggtcccaattcccctttgcaggtaggagcagagaagctgcatgagcctgccgggcatgttccacacaggaggactttgngagagatatgtcctatgccgaatgtanggatccatgaccacttgtcctcccttctatatcacaccatggtcgatacttagatcaatcagtcttagtgacttctctcatagacctatt

SEQ ID NO: 174307 - DNA, 672 bp, Arabidopsis thaliana
tatagaagagctatgacgtcgcatgcacgcgtacgtaagcttggatcctctagagcgggccgccttttttttttttttttccgaattaaatttttggttggaaatataagaaaaggttcaaaatcaggctaatggattacccactcttttttatttaagcttggaactcggaccaattaccaaattccacccccaaccaaactttggtccttagaattgtgccctagggagaaccaagggtagaagtaaatcaaaacttcattccttttcctccttaacccttttttgaagaatttatgaattgggcctaaccttacccttggcgggaaaccttctttcgggattttccggtttttttgaaggcttaatggagctttttgctttcagggctaagcaatactccctcgtagaaagcattgggctgcctcgtcaacccgctgtagcaaacgcagagcagcgccttctctgaagcaacctttaggccaatctgggtttagttctctgcaggctttagcatcagataaggcatgctcagcttgtcctagtcgcaaccagcagaggcttcggtttgagataaggtatgatccgttgggtaaaatcaattgcttgtgataagcataatagccatctgaaatcctttctggaaaggcgtcttgcctctggctttgctct

SEQ ID NO: 174308 - DNA, 557 bp, Arabidopsis thaliana
acacgactcatttagggaaagctggtccgcctgcaggtaccggtccggaattcccggttcgacccacgcgttcgtacggctgctagaagacgacagaagggtgccgggtgcgagaagactacaataagggtactcgctgcttatcatacatacacaatggtactttctggccgagaagaccatcataatgtggttgttatagccgacacacgcgaccaaattcccggtatttttttttatggggggtgttcgacagtgccaccttatttcgttgcacgcaactcttacattgtgagccttctcgggattttgttttggtaagaccatgcgttttttttttatctgccgcctcttccgagtacgtgtgtctgtttcataaatgtttctttgtatatccctctccgccccgactcggcgtgctttaacaatcgcacctattcttacgcgccgctgtttcccttaaattgaaacattgcacgcgccgcgcatgcatgcgtcggttgttgtggccgacttctattcgccgacacgacacatcctgcaatgtgacgtaagat

SEQ ID NO: 174309 - DNA, 180 bp, Arabidopsis thaliana
  unsure (1)..(180): unsure at all n locations
gaagcnnggacctctagagcggcctcctnngnggnaagatccttaggattataatgccatttttattggagcaacactaaaggagtgtacatgtgaattcatatgatctaaaaaaatccagagtagtcaacagcgtagatgctgagagagagaaaagaaacagtacctaataaataacaa

SEQ ID NO: 174310 - DNA, 214 bp, Arabidopsis thaliana
actctagaagactatgacgtcgcacgcacgcgtacgtaagcttggatcctctagagcggtcgccctttgtgtttttttttggaagaaagagcgctgatatactgggaaagtccgtacgtaaggacgttcagagagatgcgattgacacgcaaacactccggttgttgggacccaaaagcactctatgagattcgcaaccgttacaggatcactc

SEQ ID NO: 174311 - DNA, 517 bp, Arabidopsis thaliana
cagctctatacgactcactttaggaaagctggtacgcctgcgagtaccggtccggaattcccgggtcgacccacgcgttcggttgaagatgttgaaatagcttacagagatggtgttgcctgctctgctgggaaaccttagaaagaaccagaaactggaaatgaagcccaaaaaagggttggaaaacctattccaatggattttagcgaaagaaccgcccttttgagtatattaattccaagtggggcaaaaaaccatcattgggtagtaaggcagggagttttgccaggtgccccttaaaatcaagcccaacccagccacacccttactggttttcattatgaaggaaaatgccttgaaactggtcattccacttaaggaagggaaggtggccattccattggtttggccaatggaataaaggccgaatctttttaagggtcttaggattcttgagaatcccaagggtccttccaaaattaaaaagaaggagggtgaccggcaccttatggggaat

SEQ ID NO: 174312 - DNA, 545 bp, Arabidopsis thaliana
  unsure (1)..(545): unsure at all n locations
cgcctgcagggaccggnccggccttcccnggtncgacccatccgnccggaaaaacacacaccaaacaaaacagaacaaaaaacagagagagggaaaacggaaaccccnccagcgacaacaaatcttcacataaaccgacccgatgcaaagcgggggttaataggaaggccgcctcctccgtggggggggaagaaaacaggggggcgcccccgcaaacatcccagggtcggagggaaaacaccccccccgggtaagggacaagggacctcacttgggggaaaccccaagggcccccaggccggctcccagagggaactaaggccacaaggaaaaaggcggaagggaaagggggtggaaaaaaagagaagggaggggggaaaaggaaacccccccccaccaacgtgcaagccagaggggggagaggggtgggaaacgaaaacaaaaaaagggacgtagggggacaaatcccctgagggggccccccggggagccaaaaaacagaaaaccccagggaaacccccgcccagaggggggaaaccccgcgg

SEQ ID NO: 174313 - DNA, 458 bp, Arabidopsis thaliana
agctttgacgtcgcatgcacgccgtcgtaagcttggatcctctagagcggcccgcctttttgtttttttttggttgtgaaatgcgcttatttacctgggaaattccgtaccggttggaccttcaattatatagctttgacaagaccttgaccttcggttgaaaagaaacccagagaaatcctatgggattctcaatccgaaataggattacctgaagtgtggccatttggttagagagccttcttcaccttgaaaaaggtggagccgtcattggtcggttggttcatggctttcggggatgcacaggcccccggacaactttattttttaccacctttattggttgggccaaattcttggaggccctccaacctggtggtaggatcctttcaccccttctttggcggtcctcggcaggtacttccgagtaatggcctaaccaaccggctatacccttg

SEQ ID NO: 174314 - DNA, 501 bp, Arabidopsis thaliana
gacgtcgcacgcacgcgtacgtaagcttggatcctctagagcggtcgccctttgtgttttttttttggaaaaaaacagtgtctttcacaaaggaaccagtgcattgcgtaccaggaagagcacaaccgtttggcctcgagaaaatctaacagtacaaggtgtttgaaagccaaccagggaggggtcctgccgaaaacacaggcggtattttttggagggtgtgcagaaaacagggtaaacacgcttggcgaatttgggggaagatgcattcttaccaggttgtgcagagattcatgctaactgggacaaatatagagcccttaaacaaggaccagctgttgacccaaatcctgttaggggtaaccaatctaggatttgagggcctccccggcctatgataatgcttgggggggccattcgttggagggcatcttctattttatcacctgagggatgagaaccgattttgaccaagacacaccctgggacccttgggctttt

SEQ ID NO: 174315 - DNA, 569 bp, Arabidopsis thaliana
atacgactcacttgagggaaagctggtacgcctgcaggtaccggtccggaattcccgggtcgacccacgcgtccggaacgacccttgtttaggagccaaacagataacttctccttgtggctgctgggctccttcctctggccctggaaccgactgatttatataatcgccttctgggatctgacagatggcgttgactaacaccatcggtgccgagtcctattatcctctggcacttatcctgcctacgtctgactactcttgttgcgatggttacccactattccagatatcatcgggtttctgctggatagagccaccgatccgcccgcaagagtagagggtctccatcagaactacccggttttgggacataacacctaaaacctctctagtctcctacagtgatagcggctcgggggggccccccttggaaagtccccctgcgggccggatgcgatacctttacccctgcccatagttggcacaagaggcactcttcctgttaaaatctgatggccttggggggacgtttttcgcaccaaaagcccccctctgataatatgttt

SEQ ID NO: 174316 - DNA, 316 bp, Arabidopsis thaliana
  unsure (1)..(316): unsure at all n locations
cgcacgcacgcgtacgtaagcttggatcctctagagcggctcacctttgtgtttttttttgatgtggagtagaccaatctacaccaacactgagttataagcgaaccacacactggatgcacaaggtgattttgatctcatggtctaggtgacaaggacagtaccctgggattcacagtatggacaaacgagaggcacgtgttttttatcagggttgatgcacnggtgaagaggtcaagaatgtgcgacgtcgctctcatgatgcgcagccaaggaattggcctgcatatcatacagggcagagtgaatgacacct

SEQ ID NO: 174317 - DNA, 459 bp, Arabidopsis thaliana
  unsure (1)..(459): unsure at all n locations
acactcatagattactatgacgtaccatgcacgcgtacgtaagcttggatcctctatagcggccgaccttagcctncgaatataattttttttatgactnnccatgtgaaactgttccataccgaacgagggccaaaatacccactccaacaaacaaaacatggttctgcttcaatagatcaacaaaacatatagacttcatgaaaacttttttaaattcaaggatttacttattattttgaaactgttgaccacaatcagatcgattatgagcaattaccacataccacagactaattatcacttaacatcattgcaactttgtttatggaacacttcgcacttgttttgcttttaaaacaataatgtttggatcagaatcccagccgagctttctggaggggggaacagaaaaacgagattttgccagtgcattaaatcgaaaacaatatgggttca

SEQ ID NO: 174318 - DNA, 452 bp, Arabidopsis thaliana
  unsure (1)..(452): unsure at all n locations
ctatgacgtaccatgcacgcgtacgtaagcttggatcctctatagcggccgcccttttttttttttatttttttttttttttttttttttttntctttttagccaaatgttagatggggtaattggaggagtttaccaaaattaacacaaattatactgggcaaatgggggtcctaaaacaaaagaaattcctgcttttgaggcttattgtggaaacgcttcatctaaaaatttaaaaaatgttggctttatttccaatttgacccccctggaaacaaaaggaaaattcggtcaattaacaaaagaatcgaatgtttccgaaattaccgatcgcctaggtcaaccaggaaatttcggatcggtaatttcagggcctcctgtttttacccataattactcgttttagaccttgggggaataaaggtttttccttgtaaaatgggttaaacagc

SEQ ID NO: 174319 - DNA, 323 bp, Arabidopsis thaliana
  unsure (1)..(323): unsure at all n locations
atccgactcatttagggaaagccggtacgcctgcaggtaccggtccggaattcccgggtcgacccacgcgtccggcaatttccaatgccttcgtttcttttactatttgccctgatgtttccttggggtacaagcatgtcttttgggaattgagagcaactttgtttaaattttcggttgcaaaatttttagaagaacctctgattttngttctttttttaaaggatccctctttgtacagcaaaactcttgttaattttggttcatcaccccaattatcaaatcttatttttggcttanaaaaaaaaaaaaaaaaaaaaaaa

SEQ ID NO: 174320 - DNA, 515 bp, Arabidopsis thaliana
  unsure (1)..(515): unsure at all n locations
agggaaagaacgtacgcctgcaggtaccggtccggaattcccgggtcgacccacgcgtccggtgcacactggctacactgttttctaagccctggctgcttaaatgactaagatatccaattctacaagcttgactgaaaaactaactttcctggtaaaggatctctgaagatcaaagagaatatcgacccgggaactctatgtgattttattggaggagacacctaaaaagctccaggcagagctgaaaacangcacctggcagtgattatggacgaaaacctgagattggcttaacagaacgaattgtttacgtcacaaagttgccaagcttgagcttaacgagttatatagttcgctgagctccgctacaaactaaggactaataccgcctcaactatcccattctccattaaaaattggggaatacacaagagaaaagtccaacgcctgaggtataaaatccaacatgggctcaagtcaaagatcccatgttttcaaaacagaaaattcga

SEQ ID NO: 174321 - DNA, 512 bp, Arabidopsis thaliana
atccgactaatatagggaaagccggtacgcctgcaggtaccggtccggaattcccgggtcgacccaggcgtccgcactacacaaattcaacaactgaaaccaactcagagcaaaagcttgatttgacactatggcgagcattagcaacgagcccgagcgtgagaacagagacgaagaagagactggagccaacgaagatgaagacaccggtgctcagtttgctcgtgtggtcaggcttgaagaagtcgtcgtcaccaccggtgaagaagacgaagacaccattctcgatctgaaatcgaagttgtatcgatttgattaagatggaagtaagtggaaggagagaggatctggtactgttaagtttttgaaacatagagtttctgggaagattcgtcttgttatgaggcaatcgaaaacttttgaagatctgtgcatatcattattgttggatcgggtatgagtgttcaagaacacgctgggaatgataagtcttgtgtatgggaacgctcggg

SEQ ID NO: 174322 - DNA, 501 bp, Arabidopsis thaliana
aacccgactaatttagggaaagacggtacgcctgcaggtaccggtccggaattcccggttcgacccacgcgtccggaacagagaaggcactatgtctatgcaggattcgaggtgatagatactcgtttcttattggtctccataagtgtcaataggaatagaagctgattacaccttatgttggctcaaatgagtatgcttagtgtacattatcagctactcctatggtttttacagcttcaataagagtatgttcatgaaataggccctcgatgctgatggaatggatatggaaattgacttgtcaaacctgaggaccgacaataccatgtttgctacattgctcactaaactacgggggcctatcaagactactgtctctgctaatgttctagaagaggctatcaatggaactgccccacgtcggcctcttcctattggaacatcacttaatgggaaggtgcgaacatcacaacatgggttagactattcttctaccat

SEQ ID NO: 174323 - DNA, 511 bp, Arabidopsis thaliana
aagaacgtacgcctgcaggtaccggtccggaattcccgggtttacccacgcgtgcgggccactcttgagccaggtcgaagctaggaagaggacgaacctctggctacaagtgcatgatatcactgtgacttccagaggtgtgcattgtgaactttagaatcggaatgtggtctatgaacccttacatcggggccgaggagatttttttagagggggtttcaaacatttgccatcaccctgagtgggaaaaacccccaagcctcgtgcaaataaagtcggggggaactaatgaagaaagatcataccctgcctcaatgttaggcactggaaaccttacctgcgaaaggaacgcgccgtaatgaacgttaacaagaacgctgaggggaaagtaattcaaccacgcgaagtacaggatctggtgtgactcggacaacctgcaatgaatgtgctggaccgctctcgaacaatcgaagggtcgggaaatctatggttataggacgcccccaatctt

SEQ ID NO: 174324 - DNA, 364 bp, Arabidopsis thaliana
  unsure (1)..(364): unsure at all n locations
tccgactaactaagggaaagctcgtccgcctgcaggtaccggtccggatttcccgggttgacccaggcgtccgcccacgcgtccgcgtacatgtctttagtctggccacctaaaccaggccatttgtttagagcgcttttataatggatgaagcttaggtactttacaaataactctttttctataactaggtatttcccataaactacatttgcatgatttattcggaggttagggtanagctgtgacactatcttggctaataaggagctgaatagagacttactagggagaaagatgaaaacgggagctctggatgctactcattcgagatgattcggcaagttcagggatacaaaggatc

SEQ ID NO: 174325 - DNA, 516 bp, Arabidopsis thaliana
gggaaaactgtacgcctgcaggtccggtccggattcccgtttcgaccaggcgtacgtgttaacaaaaaaaactgatataggttctcttataagatcccattcttgtagcaaaaaccccgaagaacaaacttttcgaacaagacgactaatcaattcatctgattatggagagactacagagaatcttcggagccggcgttttttttggggggtgttcgcctgattctacgactgttgatacatgagaaccggtttacatctcttctttatctctcctcaatatgcttaaaccctgatgagctggtgtttctatggaactcctcggtatagtcgcttgcgccagtctttcgtatgatatacacttgtaaagggctggagatgtattattccattccctacaatatggtaactgccccgcccacgttgaacgctgatgagacatgctcttcaccacttagtatgctacaccttgctcaagacaataatatagtacctataatacgcggtaagtattga

SEQ ID NO: 174326 - DNA, 439 bp, Arabidopsis thaliana
caactatagaatagcttgacgtcctgccgcgtcgtagctgggtcctctagagcgggcgccctttttttttttttaatcaataacaagttttatttccataatctttttcacgacgatcttggtacaattattctgaatcaatataattcaagacaggagaagaacagttttcccaacccatatttaaaagcgagggaaaattttttggctggtcttctacttatcttgggaagatgagggctgctccaaccaaaccaacccacagggtcaaagcaagccaaaagactgggttcttctccataccgaccaccggtggccaaacaaagagctttcctagaaaatcatcactcgagttgagctgattcgtagtcgatgcattcattcgccgctctttatccctttccttatcactccatgtcactgcatagctgtcgtaact

SEQ ID NO: 174327 - DNA, 512 bp, Arabidopsis thaliana
actaatacgactcactatagggaaagcccgtacccctgccagtaccggtcccgaattcccgggtcgacccacgcgttccgaagggccacaatttttggtggtgaaaaccaaattggttaacttttggatttgaaggccattattcccccccttaatggcttgaactttaataaccattaaaaaaaaaaccttccaatccttgtattccgccgccaaccttttttttttgggttttttgccagcctcttagctttagaatttttaagaaggaaagggttcctattcccataaccggtccaggtaccaacagttttccagggccttgaagtgataaggaaaggaataaggaccggcaaatgattgcttcaattacaaataacttcacctcaagtgatgattttttaggaaagctcttggtttgccaaccggtggtcggtatgaaaaaaacccgattcttttggctggctttgacactgtggtttggttgggttggaccaccactcatcttacaa

SEQ ID NO: 174328 - DNA, 517 bp, Arabidopsis thaliana
taatcgactcacttagggaaagctggtacgcctgcaggtaccggtccggaattcccgggtcgacccacgcgtccgcgttctctctatctctttctctcctcaaacatagattgatcaataggcaattgtgattttttgtcttcattcaagattcatcttctgttctgttttggtgttttaaggatttaaagaatctgcggaaacagttatactcagcatctgagtacttcgaaacatcttatggcaaagcagaacacaaagaaacagtgatagagacgttgaaagagtatgcagcaaaggcagtagtgaacacagtggatcatcttggttctgtctctgacaaattcaactcttttctctctgataactcaactcatttctccaccactcatcttcgtttatcttctcttgaacaaaggatgagactatgcagagattacatggggaagagtggcactcatcagcatttgcttctatttcaatatcctcgccatcataagcgttacttcttccctca

SEQ ID NO: 174329 - DNA, 167 bp, Arabidopsis thaliana
  unsure (1)..(167): unsure at all n locations
ccgcgtacggaagccgggatcctcttgagcgggcgggctaatccnnngaaaaaaaaaaatctttcgncctaaagtaaaaatataacctccatagtgtatttgacagtaataatgcaaggtttaaagaaagaaagtaatactatgctctttataataggagaaggagg

SEQ ID NO: 174330 - DNA, 469 bp, Arabidopsis thaliana
gggaaaaacggtacccctgcaggtaccggtccggaattaccggttcgacccacgcgtacgagcaaatgctatccgtgtcctctgccggataatagactgaacccttctaactcaggattgagcgatactttgaaacaagcccttagtggataagaatccctgttgtttcaagtgccgctttagaacaaagggccacactagctcaatttttttttgagggggtggcaaaaagacggagcactgaagtttaagaaaagattccactcgaaatcagcccttgggtaagatgacatagccctagcttaagtgcatcaaatacgccacgagggatgggttggctggaaaaaaaattgcttgggaggtttggccatggggatgcggggcgctctccctatggctcagcgtccgccgagtaccatacaccacccacgggtatgccgcgacatggacaacgtaaagacaaacagga

SEQ ID NO: 174331 - DNA, 518 bp, Arabidopsis thaliana
gcctgcaggtaccggtccggaattcccggctcgacccacgcgtccgggccaagtgcctgaacggttatgggtgctccctgaagagaactaggagaaatcttccaacagcactttcataggtttcgaaagatcaacgaaacttggacttaccttctgtccaagaaccaccagctctgatgcaacggggacgatttttttgggggggtgcgggaaacactccggcgttctatgagagaagccctatctcagcgactgaggctttttacaaccacaagttccatgggtcaactccctacctcgatgggaaagaccccaaactccataagcttgcacctctcagatattccggacttattctacgagagagggcgttgtttcacaggaaaaaacattcggaccgcataagaaacttatgcaagtcgggcagaacccaaccaagtgggaaaacctcgcccgagagccagaagaaaagtcagttgcccaaaggaccaggaaaaagcggaaaagcaccaaaacac

SEQ ID NO: 174332 - DNA, 494 bp, Arabidopsis thaliana
ctgcaggtaccggtccggaattcccgggtcgacccacgcgtccgaaaaaaaaaaaaaaaaaagagtttcttcattcggtcttcgtctcgtcgtttgattagttctctacttttgtttttgattagttcgcgattcatttctatcttgtctccggtcaatatttttcttcgatccgtcgatcggatattttgactggagatttaagaagtctgaaattgttagatcgcagctatgtcgtactctgactccgattcgtcgtctcatggtggcgagtacaagaatttccgacagattacgcgtgaacgactcttgtatgagatgcttagatctgcaaagacagggagctcaaaatccacctggaaggtactaatcatggacaaacttactgtcaagataatgtcgtacgcctgcaaaatggctgatatcacacaagaaggagtttctttggttgaagacatatttagacgaagacaaccacttccttcaatggatgc

SEQ ID NO: 174333 - DNA, 493 bp, Arabidopsis thaliana
agggaaagacggtactcctgcaggtaccggtccggaattcccggttcgacccacgggttcgagctcttgaaggccacattttttttcatagaagagacagagcaaaactcaggcagatcccttcttggctcttcgaacctcaccaccacacacctattgcaaaccctaaccctaattttagctcttcttcttcctctgcaacactatatgttgggttttgccttccctaaccaaccagagatccaaaaccacttcttttccttctgcccggtttgatcttttggacagtactactagctatggaggtttgatgatggacagagagaagaacaagagcaatgtatgtagcagacagatcaagaaaagtgccatcgatgcatgtcattcagtaagatgtgagataagccgtggggatctgatgaataagaaagatgatcaagtcatggggttggagcttggcattagttttaggaattccaaccaagtacttgat

SEQ ID NO: 174334 - DNA, 478 bp, Arabidopsis thaliana
ccctggcgggacccggcccggaatcccgggtccgcccaaggggtcggctttttacaaaggaaaaatttaacccctaacaagaaggcttggaaggccaaagggagccgtgcgaaccccaaccccggaaggattctgaagggacaaattcaactacggacggactaggaaatggtacaaaaaggccggaacttatttttgggggggtgaggaggaagggataccccaggacggaaaaggttgggaaaacgttatcaatgagggtgaccgtactttcgtgaaccacggcctcgcttctttcgcgtgagatgacggaatgtgcctagacaggctcgctccttgctccatgcccgaggtgcaggacttaagggagcgcgctattggggggtgccgaaccggaattgaaaacttcattagggagagtacaggaattttcggggaacctatttgaaggtaacaaggaggggagccattttttggg

SEQ ID NO: 174335 - DNA, 524 bp, Arabidopsis thaliana
  unsure (1)..(524): unsure at all n locations
gctgggacgcctgcaggtaccggtccgctattcccgggtgcgcaccagcgtccgactgagctctgtttttgtttttaccgcagatcgtttcgagtctctttaatctttggcgggttccgttaaaaaaaaaatggcctcttctagattccaatctgggggngggcccancnctttcctcnccctcttgggggggngccaccgaaaggattaaagacgcctgtcttccccccccctcccggtgtgtagggccacctctctggggggtcttgactttcttcttcccttaaggggcccattggttggaccccttactggacctttgatggcccaaaaacccaagggggttttatccggggggcggggggggaccccttggggagctgttttctttaaaaaagcttggaccctctctggtttttagaaaaaaaaaggaccccgggggggtccccccctccttgagggggcccttgaaccccaaaaaggggaaccctgggccgggaacaaatggccccccttttttaggg

SEQ ID NO: 174336 - DNA, 457 bp, Arabidopsis thaliana
  unsure (1)..(457): unsure at all n locations
aactatagacttactatgacgtaccatgcacgcgtacgtaagcttggatcctctagagcggccgcccttttttttttttttttcaacaagtttggaattaacatgaacaagaaagtagttctctttactttagttagagataacagcacaacacaacacatcagaagaagatgaagcancatgtttatgtattgacttaaacatttgcttcagctctggaagggatcttccttatgactgagatggtatcaccaactttgattgttttctttccttcgccttcagtgttggttaagttccaattccaaaccatctccttgccaaagaaaacctttccacgcggtttcttgtcaggcattaagacatggtctgatctgaatttatcagagtttcagttggttctgctttacccataacccggttcttgattaacagttggaccttgcagcggctacat

SEQ ID NO: 174337 - DNA, 492 bp, Arabidopsis thaliana
agggaaagacggtacgcctgcaggtaccggtccggaattcccgtttcgacccacgggtacgggtgcttccagctcttaactttaagttgactggaatgtctttccgtgtcccaaccgttgatgtctcagttgttgaccttactgtcagactcgagaaagctgctacctacgatgaaatcaaaaaggctatcaaggaggaatccttatgttaagtggttggaatccttggatacaccgaggatgatagaaactcaactgacttcgttggcgacaacaggtcgagcatttttgacgcctaggctggaattgcattgagcgacaagtttgtgaaattggtgtcatggtacgacaactaatggggttacagttcccgtgtggtcgacttgatcgtccacatgtcaaaggcctaagctaagaagcagatctcgaatgatagggagtggaaagtcatctgttcatccccttttatggtctgaatttgacgttttcgac

SEQ ID NO: 174338 - DNA, 513 bp, Arabidopsis thaliana
atacgactcactttagggaaaggctcggacccctgcagggtccgggccggaattcccgggtcgacccaaggggtcgggcctttcttgaacacttggttaaatcaaaattttaggggggaatttcattcccaagcccaagaaccaaaccctttcccccttaagttttggtggtttcggtaggttggttttttaaaccaaaactgggcttggccaaaggaacttttttttgtggggcggggggccggggttcttgcaaaaaaaattaaaagggcaatgaaaagaagggggcttgaccgttaaaaattggaaggtccagaaaggtggggcggggttgcggatctaatatttaaattaaaactagggcaccaccttgaattttttggcaggaaatcttttcctgttcttttataagatccccattatcttcatatgggggtgggggccacaaagatcagaaagggagagggatggcaattaaatcagcttatggggagcttttcacagagccggggg

SEQ ID NO: 174339 - DNA, 436 bp, Arabidopsis thaliana
  unsure (1)..(436): unsure at all n locations
ctatgacgtaccatgcacgcgtacgtaagcttggatcctctagagcggccgccctttgttttttttatttttttttttttttttttttttgttttttttttttgaggcacaagttattaaattagttagatgtttttttttttaaagaatggttcatttcttacaatataccaaaagctcaaaaaaatttgttctttcacaaagtttttaanngaagcatacagcctacactaaggagagtccatttagattgggggttgagtttataatatatacacattctactttgggggctttgtcaccgggctgctacacgcttttggaatctgagttcccacaagctttggtgatccgttagagcattggaaagtggctggaccctctgctccggtatactggatgttcacgtaaccaacctaaacggtctgacatggat

SEQ ID NO: 174340 - DNA, 212 bp, Arabidopsis thaliana
  unsure (1)..(212): unsure at all n locations
ctatgacgtcgcatgcacgcgtacgtaagcttggatcctctagagcggccgccctttntttnttntttttttttttttttttaaacaagtaacaagaaggctaaagataaattaccggaggacgttgatgacagagacctagtgatccctgtatcttgtctgtaaagacaaaagttgctagctccattcaaacaaaagactttttactatta

SEQ ID NO: 174341 - DNA, 471 bp, Arabidopsis thaliana
tttaggacacactatagatttactatgacgtcgcatgcacgcgtacgtaagcttggatcctctagagcggccgccctttctttttttttttttttttttttttttttttttttttttttttttttttttttttttttttttttttttttggtcaaaaccaacaaacaggctcttaatttaactgggtttaataccaacaaataaattgttttttttccaaataaagatggaagaagagttttcccctttttttattaccctcaacagaaaatttttccttacccaaccccttttgtttttaaaaaaatactttttttttttttttccaaaatcctaaataatctttttgcctaaagggttttaaaccccccaggcgaaaccctcctccattcctttgacccctttttttgttaacttttttggacgcccgccgttttttttcccctaaaccaaatttctttttaaaaggag

SEQ ID NO: 174342 - DNA, 410 bp, Arabidopsis thaliana
  unsure (1)..(410): unsure at all n locations
atgcacgcgtacgtaagcttggatcctctagagcggccgccctatcttttttttttttcaatacttgcgtggaacaatttaatatggttcacatcaagaaatatctgaacaacgatacatggtgattacagtttgctccattttggctgtgttttttccgttananaagcaagattctcgttnncgggatgttgggnannacaaaacaaaggcacaggccaagcttcttaggcctgaggaaaagggggccctctttcaagccagggcctgaaatcagaagctgctgctttgccccttttttactcctctctctttgctgctaagctctgactacacctagactcttctgcaagttctccatgtgttccctcattccagatttctctgccttgcagttttttttatgctcc

SEQ ID NO: 174343 - DNA, 501 bp, Arabidopsis thaliana
gggaaagacggtacgcctgcaggtaccggtccggaattcccggttcgacccacgcgtacggcgggagaaacaaagtgcgaatttctttgacaagacctgatcctttccgtgaaagtatagccatggctgatgtgggatcctttacaggggttactgggtctgctggctatgggtaaacgactctgccctcaaggaaaggaggtgtcctttgggggggaggggcggggcttgtcgaagaaactcggagagaaaccctgtgcgaatagatcacgacagcgagattgggagcttagaggttgtgatcttggtagtaccctcgggtgtgaagaacgaggcgatcatatgggtgtgcttcttgttgtagttggggtacttctctgatgcagatttccaccgtggtggtagcttcgccacccctcgacggacggggaacttggagtgagatggccgtggtaacgaccatggcggaggagcggggggggcgtgcatgtgcggtgggag

SEQ ID NO: 174344 - DNA, 529 bp, Arabidopsis thaliana
  unsure (1)..(529): unsure at all n locations
ccgggacgcctgcagggaccggnccgctanacccggggggccatcgcggccgcgattgatgactccgcaacagaggatcaagaggatgnagcaaaggggaacaaagacccagagggaaaatatcaggcggccgattctggggcagaccccacaacctcaaccccagggggccgcctccaaaccaaaggggtgggggagagatagggacaccaagaagaacaacgctcagggagggggggggggacaacccccgaaaaacagcagaacctttggagcccacaaagggacaagaggggagggggaacccaccacacaacggaccccaggggaaaaaagggggggaccccccccaaaaaaaaaacaaaaagagaaataaccgcacgcgggggggagagggggccgacaaagaaaaaaaaccaaaaaagggggcggccccccaaaaagaaaacaacacaaaccgacgcgggggcgggaaaagaaaaaggctctgagaagggggcccccaaaaaaaaagagccacgggggcggg

SEQ ID NO: 174345 - DNA, 416 bp, Arabidopsis thaliana
  unsure (1)..(416): unsure at all n locations
atgcacgcgtacgtaagctaggatcctttagagcggccaggctaccctttctaaaaaaaattttttagaagaacatatgagntgnncaataaatgccaaagcattgatctagagaatagctcccattacataagagaatttccatttgtggaactaaaaacattaggatagcacaattctctttnngnngtctgtagaggaggcaaccatgtgatgataaccaaactacgaactttatgtgtagtgctctcccacactagaccaccaaactcaggcctcttcatccggaaccttgtcctgaaaagaaccgtgtaggaaagcttctggagcttcgaagtgaaattgagtgttctgggctggacagttacggatgcgcctttgaatggccagacagaaaccccggagcttgaaatgtg

SEQ ID NO: 174346 - DNA, 496 bp, Arabidopsis thaliana
ggaaagctggaccccctccaggtcccggcccggatttcccggtccaccccgggggtccgaaaaaagtaaaaccccggtttttttaaccgccgtggggctcctacttcttcttctaccggggttctttttaaaacaaacaaatttccgacaactaattcgttcctcccaaaatcagaaaattaagggaaagggcttttacgcattttttttaaggggtttcccgaggaggcaaattgagaatgctaaaatgattggctctttaaggtctttctttgttgatgccactcaccataaattccaccaggagactaacaattttttttgagccaaaatactatattggtgggctggaaagctccgagtgatccgaaggatgcaaagaaaaaccttgctcagtttaggaaagtatttgctaagaaagttcaagtgtatcgttaagagttcattcttgagattgagatgctttggtgttgaaaaacatcgtagggatgaggct

SEQ ID NO: 174347 - DNA, 537 bp, Arabidopsis thaliana
  unsure (1)..(537): unsure at all n locations
ccgggacgcctgcaggtaccgggccggctatcccagggcgacatcgngtccgctcgtgtcttactcgtgccagccactcgcatttctccagatattattatccttcctcgaaacaagagcttagctaagatgacgaagaaccacccaaccgggagcgaagataacaaaaaggcccctccgtaagtgcggggggaagcccagaggggggaccgccagaaaaaaaccgcccccccatggggggccgactcccacggcactcgggggaaccttgaaaggaaaaaaagggacgggggggccatcaggaaaaaggggggggggcggcgaaccacacccaggggaccccacggggggccccccaagggggcgggggggggggggcccccaagagggaggcacccccccccccggttggggggaggacccacaaaggggggagggggcggggcagaagaagagaagggggggccccaaaattccccccccgccggggagaagggggccactcccaccccccccgcgggggggcggagccgcgag

SEQ ID NO: 174348 - DNA, 277 bp, Arabidopsis thaliana
  unsure (1)..(277): unsure at all n locations
atgcacgcgtacgtaagcttggatcctttagagcgggcgccctataccccnnnaaaaaannnnntgnnnnnannnnngcaatacaacactgctgaaatgaataaatggaaacagaggaagtaatttattcgtgtacgttagggtttttaatcttaaaatataaaaaacttagaaatttctcttagnacaagttttgcaaaaganncagaacagaagcgcgncaagaaaccaacaccnccagaagaaggaaaccccggggaggaacngaaaccgggaa

SEQ ID NO: 174349 - DNA, 512 bp, Arabidopsis thaliana
atccaattaatttaagggaaggctggtccccctgcaggtcccggcccggatttccgggttcgacccagccgtccgcccagccttccgggctctaattccttctaatccttttaactctgttaatgctggggctaaaacgtacgtggatcagttcacaaagggtctacttgttgagtttaaaaagagtgggattgatgttcattgccaggttcccttgtttgttgcaccaaggatgacaaaattaagaagagcttccttcttagttgcttcaccagagggttacgcaaaggcagcactgcgttttgtaggctatgaagcacaatgcacaccgtactggcctcacgctctcatgggtgcagttgtctctgcattgcccgaaagcgtttttgaatcatttaacatcaagagatgcctccagatccggaagaagggtctccaaaaagactccatgaagaaagaatgaatcttccaggtttaagttactaccaagaatttccttcttctgaagttgt

SEQ ID NO: 174350 - DNA, 470 bp, Arabidopsis thaliana
  unsure (1)..(470): unsure at all n locations
aactatagaatactatgacgtcacatgcacgcgtacgtaagcttggatcctctagagcggccgcccttngnntnnnnatnntannttttttttttnnnnnnnnnnnnaaaccagaaccaaaaccttagccaaagcattgtaaaggcaaacacgagaacagagacttttaagtttcaacaaaccaacgacgacttctttcttactctgaccaaaaaccaaaatttcaacttattctcacttctccacttgcgtgtacttcctttacagtcttatcgaattcatcctaatcggcttcctttttttccacctcctccttttcctcctccacgttttctgcatcttcctcttttacatctgcatcccaatttcctccccagccaaaacctccgatggatcggaaaacaggaggcggtgttttggcgtcagccactatcttaatgatctctttaacggtctgaagggaaaaggtt

SEQ ID NO: 174351 - DNA, 523 bp, Arabidopsis thaliana
ccgagctctatacgactcactataggaaagctggtacgcctgcagggtaccggtccggaattcccgggtcgacccacgcgttcgaatttcaccccaaaaaagaaaaaagaaaaattcccaccagaaaaaaaaaagaaaaagaaaggtgattcttcgcttagggttgaaatctcttccatcccaatctcaaattaaccttccatcggcatctctttccctttttttttcccactttctttgggaatcgcgagaacttggaatcgcattcttgaatttgggatactggtttttttttttttaaacctggttcattttcacgggaaattcttagctggttgaactggacttggatttcaaccaaaattttggagaatttttttttggttggggttttcctttctggtttggggggttggaaataagggtggccagccaaaatggaccagttccaacttgtgaaagaccttagggcctggaattttggaagtggccagcttattgagggccaaaacctttagggact

SEQ ID NO: 174352 - DNA, 439 bp, Arabidopsis thaliana
ctatgacgtcgcatgcacgcgtacgtaagcttggatcctctagagcggccgccctttgtttttttttttttttttttttaacaaaaccaaatactttgttatgccaaacaagtcacaatgaaaccgctttattacaaccttggttaatgtctgagaacaagctatagaatcctctactacacatacagttttttacatagacaacacaagtggtacatttcttagagagccttgaggatatcatcggcgctggaaactgtgaattcgccaccagattcgacattggctacagtcactttgagatcatcaagtaacagagcaaatctccttgacctaacaccaagacccttgtctttaaagtcaagctcaagttcgagaaggggtgtgttttctccagaccatcagcttcaaacttacattgttggtctctgggtttgtt

SEQ ID NO: 174353 - DNA, 425 bp, Arabidopsis thaliana
gcacgcgtacgtaagcttggatcctctagagcggccgccctttttttttttttttttgatatcagacattattttactatatgattcaagtaaaaaaatacatgaaattacagagtagttgtcttataacccttaggaaaaaagaatgaaaatacatgtaatctctatggacttgtttttacaaagggcgtgtatggcgtgtacattcattcattacggtccaaaaacaagttctttcaaagatctaaacggcgagttgtgaccataagccactgcatctctccacaaagccagtcctatccatgagatcaaaccaattgtagctgccacgaagaatgactggctggtgcaatttaccaggtataagcaaagaatatttccatattccataaaagagagttgcccttagcgaaccagtgagccac

SEQ ID NO: 174354 - DNA, 368 bp, Arabidopsis thaliana
ctatgacgtcgcatgcacgcgtacgtaagcttggatcctctagagcggccgcctatgcttctgataaaattttttttagaagagaggcgggcccaaaacttattaaaggagaactgaattcaaacaaaaaaaaggtgacatcaaccaaaaaaagaaaaggaggcagccattattgttcttttttgtgcacatgtgaaaacctaatgaatagataaagagattctctctgtctgtctggcggctctctctcttttgctctcagtctactaaatgctctggcttcttctagggattttcctcaaaactaccaaactaagctagcagctaagagacacaacacaactttttttacagagctcatccttgac

SEQ ID NO: 174355 - DNA, 528 bp, Arabidopsis thaliana
cggcactaatacgactcatttagggaaagctcgtacgcctgcaggtaccggtccggaattcccgggtcgacccacgcgtccggtttcactgccaaatggaagagcactgcctccattgtttaacttcactgcccaagaacttgcgggtgcatcaacagagctgcgacagcgtctaattccagcacattgccagggaacgggaagtagctcttaggatcatttatagcgtgtccaaatccagctttctttctctccctctatttactgcagtgtgtacatcaattttgaaccacttctgcttccaagcttttgtcgccggaggagagattggaaatctgtacgccgggacctgatgaggtgtgaaataactggggtcatgaagcttcttcttcttcttctgactggcttttctctcaatttgctatccttgttattttcaccttcactttcatttttttgtttttttttccacaaatctgaccccccttatatgttgggtgtatcatttttatgtgtttgtaatccatc

SEQ ID NO: 174356 - DNA, 415 bp, Arabidopsis thaliana
  unsure (1)..(415): unsure at all n locations
ccgcgtacgtaagcttgtttcccatcgaggagacgtgtgatcccttttttttgaggagaaaggttgaagctttataaatcgcaaatttggtccattcattcaccaatcaaacacaaattaacccaacaacaaacatcagaaaactgaaaacacagtaaattttttcnaaaattcctcttactagatttttacccactcagcagataactcataccaactaggcagcgcctgaaaccaaatctcccgcagcagtggcagcaccaccgtcgtcagaagcgagagtgaacggactccattccgccggaagaggaggaagaggagcgtaaacagtaggctttctcttaatgtcccaaggctgagtcttcttcggcctcgtcttcctgtgatgagccgtcgatttcttctgtggcctcga

SEQ ID NO: 174357 - DNA, 464 bp, Arabidopsis thaliana
  unsure (1)..(464): unsure at all n locations
cagggacgcctgcagggaccggncccctatacgcggggggcatcagcgtccgcaaagataaggaaaccangngggggncagcgaaccnngggaccggaaacgncaccgcggcggctttttcggttctccgccaatttcaagttccaaaattgggtaatggaggaggaacatcgctcgtgatttnagngggggnngaggccacagaagaaaacgacggaacaacacaggaagacgaggggggagaacacccacccgggggacaaaaaaaaaaagccnacggggnaccccccccccccnccccngggggagaaagggagcccgcacacccccccanaagaaaaaggggggggccaccacgggggggggagaaaagggaccaggcgcccgccaaangggaaagagcaacccggggagggggcggaaaacaagggaaaaaaccggggggggggggaacgggggagaaa

SEQ ID NO: 174358 - DNA, 533 bp, Arabidopsis thaliana
  unsure (1)..(533): unsure at all n locations
cactaatacgactcacgttagggaaagctcgtacgcctgcaggtaccggtccggaattcccgggtcgacccacgcgtccgcanagataaggaaaccatgtctgtgtcagcgatctttggtaccagaatcgtcaccgttgctgcttctccgggttctccgccatttcaagttccaaaaattgggtaatggaggaggattagggatggtgatagagtgttcgtcgaggcctcagaagaaatcgacggctcatcacaggaagacgagggccgaagaagactcagccttgggacattaagagaaagcctactgtttacgctcctcttcctcctcttccggcggaatggagtccgttcactctcgcttctgacgacggtggtgctgccactgctgcgggagatttggtttcaggcgctgcctagttggtatgagttatctgctgatttggttgtaatctagtttgagaacttttgttgttgtttactgtgttttcagttttctgatgtttgttgttgggtttgtttgtgtttgattgg
